United States Patent Application Publication US 2026/0103690 A1 - sequence listing, part 39

SEQ ID NO: 183040 - protein, 428 aa, unidentified
MKNRNNQKLEAITPKTLIVGVDIAKETQWARFVDYRGLELGKALKFQNNKKGFENILASIEAICKNKRFDNVLVGMEPTGHYWKPLANYLIMHGVTVVMVNPYHTKRAKELDDNSQTKNDKKDALTIAKLVRDGRYYEVYMPQDIYAELRVLSNSRVSLMKRYNALKNTITAVMDEYFPEIKTVFKNPLNGKAAMQILKSCPFPSLILELGVEGVLAEIKKAVKKTVGRKKAQQLVETAKNSIGVGYGIASAKLKLGLMIEELELLTKQLEHLETAMEVALAETGFGEIILGIPGIGVVTAASFLGEIGDPLRFDHPRQISKMAGYNLIEDSSGKNKSGTVISKRGRKNLRNVLYQMAMTIVAVNNEMKELYRYLKTRENNPLKKKQALVVISKKIITVIYNLVKKQTEYKAELVLGEYRKNQMKKAA

SEQ ID NO: 183041 - protein, 378 aa, unidentified
MATTRSVLRHELTAKPGDLYMSLDLGDKRWHISIGDGRCGLSRYTVGAGQTDELADCIAKAKVRLHSSRKAIVHSCYEAGRDGWWLHRWLTEVGVDSIVVDPASIEVNRRARRAKTDRLDADKLLAMLVRHHSGERVWSVLREPSPQDEDARRAHRELQRLTHERVAHTNRIGSLLVLHNLRPSVVIGGRYWSAWWERHRAQVPSSLAAELEREVMRLQLVKQQVRDIEAARTQELLEGQQPQVAQLTRLRAIGTKGAWVLVKEVFGWRTFVNRRELAGSLGLVPTPYASGDSQLEQGISKAGNRRVRGLLVELAWGWLRLQPGSALTQWFNRRFASGGKRLRRIGIVALARRLAIALWRYLKNGEIPAGAQLKPTGA

SEQ ID NO: 183042 - protein, 422 aa, unidentified
MSYCPVAGIDVSKRFSDMCILSPDNKIFAQEKIYHDETSINRANALLQKAERLFFSKPVIVMESTSHYHLILFQFFSEHGYDVIVVNPLQSNSMKDFSIRKRKTDRVDAFKLAMMYRTKTLRPSQIPQTATRALRQLCKHRAELLNDVSSYKNRLTALLDQTFPGYDKVFSDVGGVTSCAMLVRFPTPTILLVEEESELVEVIAAASKSGYSFAKKKAGLLISAAQKAQTLGIHSCADETLIVCTIQMLRTLSESVLQIEAAIDNLLAQIKEMRNNVSLLQSIPGIGSHSAALLLGEIGDISLFKKPKQLAAYFGLDPTERQSGSFRGTKNKLSKRGSSYARAALHMGIVNSICKRGKDSAANPVLLSYYEKKCKNKPAKVAQAASMHKLVFIIFAVLRDQKPFELKTPEQHAVEQGFVKAA

SEQ ID NO: 183043 - protein, 340 aa, unidentified
MNQVVTIGLDIAKSVFQLHGVDAEGAIVFRKRLTRARMRTFFERLPPCLVGMEACGSSHYWGRELSALGHDVRLIPPSYVKPYVKRQKNDAADAEAICEAVSRPNMRFVAIKSPEQQAIMIAHRTRSILTRQRTQLSNAIRGHMSEFGLVAPQGRMGLEMLAAIIGDADDERLPLQARASLQMLIAQLRLVNEQILDSDRHIIASARSTDVGRRLMDIPGVGPVLASALVAAVADPKSFRSGRDLAAWIGLVPRQNSSGGKERLGGITKQGDRYLRQLLVVGAVAVIRYAQRNGARRPWLVRFLARRTPKVAAVALANKNARMVWAIMTSGERYREPIAA

SEQ ID NO: 183044 - protein, 328 aa, unidentified
MTMSPTHSAFNHVVAFEVAKHTLLIHTLPADAQHSIANKPAPIRKLLRQEMRRNAVAGLGPVLVVCEATGGYEGHVLAICVELGLAVHKAHGSRVRHFARYLGLLAKTDTIDARVLAIYGLKTQGLRLYLPPAPELAALKDLKTRRDQVQQMLIAESNRLEHARHASVMRSLKTHIASLRKTLAALQADIVAHIKANQALARKARLLRSVKGVGLLTAAALLAHMPELGTFRKGEVACLAGLAPINNDSGRSHAPRHIAAGRSAIRSSLYMAALVAVRHNPVMRRFAASLRQNGKPFKVVITAVMRKLIVTLNAILRSGKPWLHATSP

SEQ ID NO: 183045 - protein, 387 aa, unidentified
MTVRTVSNLPAAMHVETARCLFAIELSKQSWVIGFITPLSAKISRRILSGGDWKGLLELIEEVRARVSRETGRAVDVISCYEAGYDGFWLHRLLEAHGIRNYVIDPASLQVDRRMRRVKTDRIDTERLLRSLMAYLRSEPKVWSVVRVPSIAEEDARRLHRERDRLVSERVQHVNRIKGLCALHGIYDYQPLRPQAMARLEQLRTAQGLSLPPRLTSEIKRELQRLELVVEMITTLEAERDAIVEDEASTHVNAKKIQNLHKLKAIGPEFAAVLVGEVFHREFNNRRQLASYVGYAPSPFQSGNVAHDQGISKAGNRKGRTTGIELAWLWLRYQPDSDLSVWFRARVGALKGRVRRIAIVALARKLLVALWRYLETGLVPRGAVLKG

SEQ ID NO: 183046 - protein, 438 aa, unidentified
MSNKVIFNLDELFISVGIDVGADFSWMSIALPNQQFVGKPYKILHNSIDSLTTAVSKIKEAEELYSLESRIFLESTGIYHYPLFCYLRDKGFNCSVINPIITKNSTNINIRKVHNNRFDSKKATLVGLKPDLKVSLMPSDLALNCRNLCREYYDLMDNRSAYVNKLQGELRMAFPQYLGIFSKVTINTSLTLLETYTSPSAFLEADKQEIIDIIKSTARFGLTYAQNKYNAIIQAATDANQFGYIIDSNIKHIRLYISFIRKYDEEINSILESLHELVDANEDTDFVKQIHLIKTFKGAGFLSAVSIMGEIGDFSAFSKPKQLFAYFGLDPAVKQSGKFEGTKVQMSKHDSAIARRVIHTLTLQSISISRNGEAKNPVLREYYLKKCDSKPKLVAMGAVSHKVCNMIFAILRDNKPFKIIAPQEHIKQYNAAKCDMTA

SEQ ID NO: 183047 - protein, 410 aa, unidentified
MQVLYPCCCGLDIHKKFVVACRLTTTPDGQVQKEVQTFSTMTPDLLAMLDWLHAAGCTHVALESTGSYWRPVYNLLEGQFTVLVGNAYHMKTVPGRKTDVKDAEWIADLLRHGLIRGSFIPSPPQRQLRDLTRYRTHLVEERARLTNRLQVVLEDANVKLASVVTDIRGASARAILTALVAGETDPAVLADLARGRMRAKRDVLAQAVVGHFTTHHAFLITEHLSQLDYLEAAMERVSAAITQRLADEQAALALLDTIPGVGQRAAEILVSEIGTDLSRFPSAKHLASWAGMCPGNAESGGKRLSGKTRKGNIWLRQVLFEVAHAASKTKDTYLSAQYRRLATRRGKQRALIAVGHSILVMAYHILTRRVPYRELGPLYFDNLDRQRLQQRLVQRLERLGYAVTLQPVAA

SEQ ID NO: 183048 - protein, 429 aa, unidentified
MVGCLTVASGILARSEGARETICNDPQVCRIVDLPVYYELETNNGNRDYRIQIGGHYMNYNTVYVGMDVHKESFTLCSCKYEDEKASHYQRTPASYKNVLRYLAFLRTIYGEDTRFVCGYEAGCLGYSLYHQLENFNVECVILAPTTMLEQRSKRRIKTDKRDAEIIARSLAQHNYSPVHIPTETDNQTKEFIRMRDDHKAELKKIKQQILSFCLRQGYQYDGSGNWTAKHVKWLRSLKPAGLYKEILDEYLLTYTILTDKLNRLDQRIEELASKEEYKESVSKLTCFLGIKTHTALSVIVEVGDFQRFVSARKFAGYLGLVPGQHSSGDDRNGLGITKAGNTHVRRLLVESAQSYTRGKIGYKSRVLRSRQAGNSPQVINYADRANERLRRRYYKMVLKDGKKYNIAKTAIARELACFIWGMMTDNIY

SEQ ID NO: 183049 - protein, 340 aa, unidentified
MKEAGIIGLDLAKRSFQAHGALADGSVAFRKKLTRERVLGFLAEQPRCVVAMEACGSAHHWGRAIRDAGHEVRLIPPAYVKPFVKRQKNDAADAEAIAEAASRPTMRFVAVKTEEQQARAMLFRTRDLLVRQRTQLINALRGQLSEHGVVAPQGPANVVILAQAIDDMTASLPLLVVELARVYLDQIDRLSEKVAGLEKAIACEARRGDTTRRLQTMPGVGPITAMAIEIFAPPMEVFRRGRDFAAWLGLVPVQHSTGGKQVLGKTSKMGQRDIRRLLITGAMIIVRWACRKGAREGTWLHRMLGRKPRMVVATAAGAARRCMRGSASPTSRSCQVPAPK

SEQ ID NO: 183050 - protein, 338 aa, unidentified
MKLYAGIDLHSTNCVIVVVNAVGEVVRRTRLKNRLALIAAWLEPFRDSLVGVVVESTYNWYWLVDGLADQGFTMHLANTVAIQQYAGMKHRDDASDARWLADLLRLGLLPEGYIYPKKERAIRDLLRKRTQLVRQCTSNLLSIQNLYSRSTGTSIRANEVKQLAPESVDDVFEDPNVALAVRSNLTVMNCLQEQIALVEDSVHGQVRLRQPYRRLISVPGIGKILALTIMLETGDIRRFDDVGNYVSYARLVGSSYLSNGKRKGSGNTKNGNAFMCWAYIEAANFAIRFNASIRRYYDRKKARTKRIVALKTVAHKLARACYHMIKNDTAFDVQRAFV

SEQ ID NO: 183051 - protein, 340 aa, unidentified
MEKRYIGIDLHRNQFTCCIRLENDRTYLTEWRLEDLPRFVKKLRPGDEVAVEITSNTRLFHDAVAPQVARVVVVNTNQFRVISQSVKKTDPNDARLLSLYLSKGLLPEVRMKDKQHGQLASLTQTRDTLVKQRSALKNKVNNILSARGLNLAKEALSSAKKLAEVLELPFDEIVRIELRVIVEQIRSLNKSIAELEKTIGEEGSKLEGHKGLSSIKGIGKITGAILLSVIGDVNDFPDEGRLASYFGIVPRVSNSNATERSGRIHKRGTKLGRTALVQSALIAANYSPYLKNFYERVKARRGAGKAIIALARKFLGIIYRTLKNKWVFEDFPNFVLAEES

SEQ ID NO: 183052 - protein, 352 aa, unidentified
MIQTQTKTERKLWIGIDFHKKTWRVHFRSDLFSGNPFSMEPSPENLLKKVQKEFPEYKIHVVYECGCFGFWAHRAFRSYGWQSVVVNPSDIPRRAKHNFQKTDTIDARNLSEQLKAGALSSVSIPEIKREQFRGHFRRRNDLVKSSRMIKSRIKSILLYYGIIIPEKMDNANWSKDFKQWLSDLKWEYKTGENMMQSRLRELEFNHKEILQVSNEIRKYCRINHKEDYELLQSVPGIGPLTAICFLVEVGDIKRFKNFKQLASMVGLVPTIYQSADTIQMTGLTPRCLRLMRSYIVEASWQAVRIDPVMQEYYRKHIGKKPNDIIIKVARKLLSRMHGVLRTRQPYEIGLVQ

SEQ ID NO: 183053 - protein, 439 aa, unidentified
MRSVSSNSEAVELTGLSGMDPKSYLAGEVISLSEALFIGIDISKENNLAQFMDSDGEIISKPLSFPNNQKGLEAFLKFIQRLSKNHSPSKINIGMEATGFYWWHILEALEDFAPDTSEVQLFTINPSLVKQFKKTYTTLPKTDAIDAWVIADRLRFGRLNPVDKRSLLYAPLARLTRLRYNLKKNIRNEKNRALKLISLKFSDFFKASGKRTFNNSSLELLNEFSLEQVAEMPIEELAEFILAKGNNRTKNPQEFAKAIKKAAKNSYRLNPKMEDSVSVALSMTIENIRFLENQCKKIDKSIARELKAIDQTLTTIPGIGPALAAGIVSEIGGVKRFPSEKSLAKFAGLTWHKTQSGDFEAEETSLTKSGNVFLRYYLVEAANSLRLHNKEYAAYYNRKYQEATKHKHKRALVLTARKFVRLVFALLSKGQIYQEGRNN

SEQ ID NO: 183054 - protein, 311 aa, unidentified
MENIFPCCAGLDVHKESVEACVRRIEPNGRWHQQTRHWGTMTRDLLAMADWMAAQGVTQVAMESTGVFWKPIYNILESCFTMLLVNARHLKQVPGRKSDVRDCQWIAQLLQYGLLKGSFIPPRSQRELRDLTRHRTQLVEEKTRTANRIHKVLQDTNIKLSSVATDVLGVSGRAMLEALIAGEEDPVKLAHLAQRKLRSKIPELEKALEGHLTEHHRFMLQLLWKQLAQQEELIAELDRKIEEQTRPFAAEIDRLDAVPGVDRRVAEVVLAEVGADMKPFPAHENLASWAGMCPGNEESAVGGASRPAIPG

SEQ ID NO: 183055 - protein, 429 aa, unidentified
MSYRIAGIDVHKKMLAIVVSDVEIDGEYQFERRKFSSNPEQLRLLAAWLLEQEAEEVVMESTAQYWRPVWEALERYWKPICEKRAGARRKSGTLHLAQALSNRGRRGRKRDFPDAERLVKRLVAQELTLSFVPDAKQRLWRTVTRKKYQLRCDRIRLQNQLESLLEEAHIKVSSLVSDLLGLSAQRMLKAIADGETNPATLAALADKRLRATPEQLCDALGACTQLNPVYRRLVKMALEELRLIDEQIGRLDQEMASLLSKHQDAVQRLAEVPGLGVDSAQQIIAEVGPTAATFPSEKCLSSWVGACPGDDESAGVNHSHRSPKGNRHMRRLLNQAANAAARTKGSLFEIVYRRSVPRLGHNQAIGAIAHRQCRLIWLILHQGVRYEERGPAVTKRSKQLRTWKMIRQLRNLGYRIEPPNPQPSQAQAE

SEQ ID NO: 183056 - protein, 345 aa, unidentified
MNKISVIGLDLAKNVFQFHGIDADGEVVVRKQLNRSQVRQFFARLEPCLIGMEACSGAHYWSRELTRLGHSVRMMAPAFVKPYLKSNKNDRNDAEAICEAVQRPSMRFVAAKTPEQQAVLHLHHGRQLLVRQRVALSNHIRGVLSEYGIVVPQGVKVLSRQLPEILEDAENTLPMLARHLLAELKAEHDQLLERVDRCEQQLKAWHANSTVSQRLASIPGIGVLTATALAATVGEGQDFKNGRQLAAYLGLVPRQASSGGKDRLLGISKRGDGYLRSLLIHGARAVIHHIRRRLKAGRPGGNPWVEQLLLRCHVNEAAVALANKMARTAWVLLVRNETYCLARPV

SEQ ID NO: 183057 - protein, 397 aa, unidentified
MYIVGIDIAKRKHEAAVIDGEGAVIIKPFSFTNNCSGYNRLLAMLAKAKLPLDEVSFAMEATGHYWLALFTRLQKEGFRVQVINPVQTNSIRSFYIRQAKTDPRDALLIAEVIRFGHFSESTLHPENIYELRELCRGRHAIVSMQADVKRKVVALLDQVFPEYETAFTNLFGDTSMAILQTCPTPKELSEMPLEELCHLIEVSSHKRFRMAKAQELQVLARNSFGFAMAGDVFSTMIRLYAKHLDFLKQQVREMDRKIAEIMETLDTPITTITGIGPTLGAYILSEIGDISRFSSAAKLAAYAGIDPTMRQSGEYNGVRNRMSKRGSPYLRHAIWLAASSAVLHDPALKLYFQKKRDEGKPYMASVGHACRKMVSIIYAVMRDNKAYVPCIPSEISA

SEQ ID NO: 183058 - protein, 370 aa, unidentified
MNEPSTFVGLDAHKSTIVVAMLLPGHREPVEWRIANELAAVRRLGKKLQREGLGHVRCCYEAGPCGYALQRQLREQGIDCQVIAPSLIPIRPGSHIKTDRRDARKLAEMLRAGILTEVHPPTEDEEAVRDLVRCRDDAQRDFTRARNRLTKFLLRRGLVCRSTLRPGSQQYESWLAGLSFERQADQWVFEDYCLAVDQQRSRRENLDARLIEIAEQEPYRVPVGALRCFRGIDTITALALVAELHDPRRFPSARHLMAYLGLVPSESSSGERRRQGGITRSGNRFLRRLLIEAAWHYRHKPKIGVRLRARRVGQPATVIALADRAQRRLCARSRRMAAHGKRPCIVAVATARELTGFLWPVLQSWVPARA

SEQ ID NO: 183059 - protein, 417 aa, unidentified
MLFVGDDWAEDHHDVEIIDEDGKVLARKRLPEGLAGITQLHELIAHHLGEPDGDPAAWPPVVVGIETDRGAWVASLVAAGYEVFAINPRMASRYRDRHSMSGAKSDRADAHLLAELVRLDRAHHRPVAGDTALAEGVKLAARAHQNLIWERTRYVLRLRSALREFFPAALVVFDDLASQDSLELLGRAPAPDAAAALSKRTVTAALTRANRRNIEDRAGEILRVLRAPELRQPAPVQQAFAAIVTAETALIGALNVQIEALGEVVKDHFGHHPAAEVITSLPGLGPILGARLLGEFGDDPDRYADAKARKAYAGTAPVTKASGKVKVVQARFARNKRLADAAQQWAFSSMRGSAGAKAHYQQLRAREIGHQAALRQLANRWIGILHGCLKTGTLYDEHTAWAHILEPHPHPVLEAAA

SEQ ID NO: 183060 - protein, 429 aa, unidentified
MICYDINETAVYAKYVRWCGRTGLRGPSYPIQLCEKGSRLQRSATTIVRVQRYPHAPLLFECVGKGRSGFSTIKGGAGTAPNSIVEKTPMQPYFVGLDVHKQVIAFCVKTADGGIVSEGKIPATRAALDEWVQTVPRPWQGAMEATMFSHWIFWHLKPHAAELKMGHPARMKAISEGKNKSDKIDTRTITDLQRCNLLPECFVISPELGALRQQLRFRRLMIEQEVMFKNKTAGLLMEAGVEYEGRRLHGKRYFAELLAQSEWIGSQLRPLLEYNREQIESLQAMDRRLMQMLERHPRLQARIECLREIDGVGPVTALTWALEVGTPERFGSLKKAMSYCGLTSAFRESAGKQKRGPISKQRNRHLQSVLIEAAKIAPQYNEKLGQTHRKAMEKGAHKNRATLAVARKLVAYLLAADRAFLLKCAEAPA

SEQ ID NO: 183061 - protein, 349 aa, unidentified
MEILKEVIGIDVAKLELVVSMGRLMHNLDIELAGSQVFKNNSTGIKKLIEWSNKLKKGDGPLHFVMEATGVYHESFVYHLHDNGYCASVILPNKISSFMRTLDIKTITDYTAAKAIMQFGLQRKLSPWRKPDPILKNLKQLTRERGQIVEERTMLKNQLHAEKSEAMPNERSINRLLERIKLLNKQEKEIKQEIDVYVNQNPDLKRQLSYLCSLKGIGRLTGVILLAETNGYELIRNKKQITSYAGFDVKEKQSGTSVKGKSKISKRGNKHIRSAMYLPSLSSVKYIPEFKNLYTRLVAKHGIKMKALIAVQRKLLELTYVLYKNQTFYDPEYQKKKELSLKKEQLFTN

SEQ ID NO: 183062 - protein, 300 aa, unidentified
MSDYSYFCGIDLAKNHFSLHAVDQNGKVILHKSVTRSKLLTTIANMPLMRIGVEACGGAHYWARTLNKLGHDARIMAVKYVTPYRTKGKNDLNDAVAICEAVQRPSTRFVPIKSPEQQAILSVHRMREHWVRERTALMNRMRALLSEFGLIIPVGRSSLMKQVPLMLEDAENELPLLARTLIADAYHHLGELNQRIADTEQVFDSFAKVSTNVQRVMKVRGIGPQTATAILASIGNGSQFDKSRDFSAWLGLVPKQYSTGGKPRLGRITKHGDKYLRTLLVHGARTVIANLGDKQDKLSQ

SEQ ID NO: 183063 - protein, 347 aa, unidentified
MRFYNRQHRHYCGIDLHVKTMYVCILDSAGQVLVHRNVKSTSEAFLEIVAPYRDDLVVAAECMFTWYWLADGCAAEGIAFVLGHALAMKAIHGGKAKNDKIDSHKIASLVRGGLLPQAYVYPAAMRSTRDLLRRRLHLVRKRGELLAHIQNTRAQYDLPAFERRLAYPANRDGVSAHFPDPSVRKSVDVDLALIDQYDTLIVDLELTIVREAKRHDADAFHRLRSVPGIGKVLALTILYEIHDIGRFDRVQEFASYARLVKCVKTSGGKKLGTGGAKMGNVHLKWAFSEAAVLFLRHTKEGKKLLAGIEKKHGKGKALSILAHKIGRAVFYMLSRGTVFSMETFLAA

SEQ ID NO: 183064 - protein, 347 aa, unidentified
MRFYNHQHQYYCGIDLHVKTMYVCILDGAGQVLVHRNVPSTPAAFLEAVAPYRTELVVAVECMFTWYWLADLCAAEHITFVLGHALAMKAIHGGKAKNDKIDSHKIAVLLRGGMLPQAYVYPAAMRSTRDLLRRRLHLVRKRGELLAHIQNTRAQYNLPAFEKRLAYPGNREGVVEHFPDPSVRKSVEVDVALIDQYDALVIDLELTIVREAKRHDGDAFHRLRSVPGIGKVLALTILYEIHDITRFDRVQEFASYARLIKCTHESAGKKLGTGGAKMGNVHLKWAFSEAAVLFLRHTTEGKRLLTRLEKKHGKGKALSILAHKIGRAVYYMLARGTVFSMEKFLAA

SEQ ID NO: 183065 - protein, 391 aa, unidentified
MICVGIDVAKDKHDCCILDSEGTTLADCFTIPNNLDGFKRLLQTIKDCTQKSDKIKVGLEATGHYSYNILGFLLDNDLPVYVMNPLHTNLYRKSLSLRKTKTDRVDAKTIATMLLSDVDLKSYTDTAYHNEELKSLTRYRFDKVQERAKLKQSVSRLVTILFPELEQLVSSIHGTSIYALLSEYPGAKQISEAHLTRLANILVKTSRGHYRKDKATHIRDAARTSIGSVMPAKSLELKHTIKLIQELTSEINEIEDAIRKIMDELKPPILSIPGMGFYSAAMILAEVGDFSNFNSPDKVLAYAGCSPSTYQSGKLTNCYAHMEKRGSRYLRYALYTATKYVCYWNPVFTEYLTKKQAEGKHYNVALSHATKKLVRLIYALQKSGKAYLAVT

SEQ ID NO: 183066 - protein, 373 aa, unidentified
MPKYSTAFGMDVHLRSTTVCALDADTGEAVTRRFPGNPWGEIAGWMDGFPGPSLAAYESGYLGFAPQRELAGLGVECVVAAVSKIPRSAADSASKNDRNDAARMAKAILAHDISPVWVPSPEVEGIRDLAGAYDGATARLATAKQRLLAFLARRGFVYGGTTPAGNPRKYWTYDFLRWLDKVRPEDDGGVRALDALRNEVEAAAEARADLLSEYRAAVDASPIAAEVAALQSIKGCAFALAAAFSAEVGDFTRFRSGRQVTSYFGLAPKQRSSGGSVRLGGISGAGNALVRKLAVEGSWCYAAARHQPKLMPRDTGVPLEIRVHGRKGSERLLRRREEMLARGMPAAKANAATAAELVRWLWALGMMCREGAE

SEQ ID NO: 183067 - protein, 319 aa, unidentified
MKDLLEISCGLDIHKEKIVACILTGPLGKPTHSEIREFTTLIPDMLALRDWIISENCHHVAMESTGIYWIPIYEILEDAFSGDITLLVVNARHMKNVPGKKTDMRDSEWISTLLRAGLLNASFIPEKRIREFRDLNRYRKSIIRDITSQKNRVEKFLQSSGFRLSSFISDIFGASGRNIILHLMEHGRIDKISLDSYLKTKTRKRIDEILMSVNGTLSEHQKSFLKILMCHYDSMKEHLIEIETHLQEDMIPFALQIEQLNTIYGISTTASCAIIAEIGTDMKPFKTAEHICSWAGLCPGNNESAGKEKVPLSQKAILI

SEQ ID NO: 183068 - protein, 343 aa, unidentified
MQISTLGLDLAKHWFQVHGVDAAGLVGVRRRLRRGEVLAYFRSLEPCLVGMEACATAHYWARELSALGHQVKLMPPAYVKAYVKRNKNDAADAEAICEAVMRPSMRFVPVKDAERQSVLMLHRARNLLVRQRTMLVNALRAHMAEFGIIAPQGLRHVEDLLARISDERAPLPELARSILRLIVDQLAETMARVRDIEKRLAKWHRQSRVSQLLATIPGVGIMGASAIAATVADPSLFRSGREFAAWLGMTPRQNSSGGKERLGRTSKRGDKYIRCLLVAGAVAVLRHTRNRTTKDAAWVRGLLARKPTKVAAVALANKTARIVWAVMMRGDSYRAQEAFGQPA

SEQ ID NO: 183069 - protein, 456 aa, unidentified
MGKKQMSLEVVNPNAGGIDVGSKSHWVAIGQDAQDIREFGVYSQDNQELCKWLSENGIKSIAMESTGTYWQNLFSALTAAGFEVILVNGRQTKNVKGKKTDIKDCQWIQKLHSLGLLSHSFLADSTTEVIRTYSRHRQNLIQQSGRTVLKVQKYLRLMNMRLDVVVNDVVGLTGTKIVSAFIAGETSGKKLAQYRHYNCRKPENEIAKALQYNGRADYLFALKQEWETYLHIQKQITEVDTQIKKLLEDIINKDDNKKQHIANKKPYKRKNKNTIRGTDMNQISYKYFEGIDLMEIEGVNDATIMTIISEIGFNGIKKFDSAKQFTAWLRLAPNNKISGGKVLAHHIPKGSSRMKIALRNAANAIGNLKEGHLADFFRRINYKKGRATAINATARKLAVIIWNMLVKEQNYNPPTQYKFLDEKRRLGIVKRLKKQITKFEIKAEQLGFATSSLSGL

SEQ ID NO: 183070 - protein, 419 aa, unidentified
MKNIKSKKIRIINENTIIAALDIGKITHFAYFRAPNGKDIKPFAFKNFRKDFDKFWTKLYQFKMEHNLKDVVIGFESSGPYAEPLFHYLRRKPVKLVQINPMHSKRVKELTGNSPNKTDKKDPRVIADIISLGHALTLIVPEGAAAQLRRLTQARERALKRRTSAVNQLQDLIFVIFPEFLSIMKGISTKTAFYLIGRYPLPEDIVALGLESLSIDIQRVSRGKLNRGRAEELFNAAQMSIGVREGDRGILLEIEYLIAQIGSVNMFISNLEKQMEEYLAEIPYSRSILSIKGISIVTVAGLIGEVGDFKKFNTLSEIMKLAGLDLYEISSGKHKGQHRISKRGRSLIRKLLYFAAINTVNSRGIMNEPYQQMLDRGMPKMKALVSISRKLLRLIFALARDNTLYEENYSNTHCFKIAA

SEQ ID NO: 183071 - protein, 400 aa, unidentified
MLSIGIDVSKGKSTVCGMKPGGEIVYTPFEIQHTREGMSELVSLLRSSGEEVRAVLESTGSYHCPVVAALLENGIFVSVVNSLRMKRFCSQSIRKVKTDRIDAMQIALYGLAYWQELQPARLPEDTYRELQLLARQYYQMTSLLIKAKVDFNAICDQVLPGMQELMNDHAGRHKLSDFVLRYRHTTHILEMGETRFRKDYCKWAEKKGYRNCERMAALIFATAQNGIPVLPNAPSTQIVITEAIRVLHTVEASRDAILTQMQALAKTLPEYSLVREMPCIGDTLAPRLIAEIGDVRRFHSKRALIAYAGIDAPPYQSRKFCANNRHISKRGNRYLRKTGYEVMQSYVMHKPANDPIFTFIEKKRGEGKSGKLAMVAGLNKFLRVYYGKVTELYRSLPAIE

SEQ ID NO: 183072 - protein, 377 aa, unidentified
MQKPSTIDIDPVIYLAIELSASTWLVVSKIPTSEKTGLHRMEAGNSQALIALIADLRKKVSAKLGVESAVMSCFEAGRDGFWLHRLLSEHGVINHVVEPTSILVNRRARRAKTDRLDAQGLLRILTAHAKGDHDVCSVVHVPTIEEEDAKRQHREREHLVQERVRIENRIAALLTTQGVRKRPSLRSWQKDMEEMRTGDGHPIPPLLRAEANRLRRRLVMTLEMIREVEAEREQALQKQDDTASRTIQALRQLRGIGDNFAAVLTREVFYRSFENRRQIASYLGLTPTPFQSGGMDRDRRISRAGNARARKTLIQLAWLWLRYQPDSSLACWFRERVGNLQGRTRRIAIVAMARKLLIAIWRYATDGIVPEGAQISI

SEQ ID NO: 183073 - protein, 342 aa, unidentified
MHDYIGLDVSMKVTAVSIRRGGKRVWRGKCPSDPKLIADLIRKRAPSAKRVIFETGPLSVWFYHALRDEGLPAICIDARHAKAALDMAANKTDADDADGLAHLAEVGFYREVRVKGFDSMLTRTLVAARTRLVRICTELSNQIRGLMKTFGLVVPAGKGSTFEKNVRSLLVHHDGLSAIVLPMLEAWRGLRIRAAELGRQLVAGARQNQACRILMSIPGVGAITATSFATAVEDPNNFKNSRSVGAWLGLTTRRYQSGEVDYDGHISRRGVTAMCGGLLFKAATVILTRSSAESGLRRWGLKLRERVGFKRAAVAVARKLVVIMHALLKAGTFFDRSIGAAA

SEQ ID NO: 183074 - protein, 342 aa, unidentified
MQIASIGIDLGKTTFHLVALDEHGNIVIRKKFSRQQLLAYTANLPTSLVGIEACSGAHFIGAALREQGHDVRLIPAQFVKPFLKSNKNDFLDAEAIAEAVARKNMRFVPIKTDDQLDLQALHRVRDRLVHRRTAVINQIRGFLLERGITFAKGPANLRRQMPVILEDAGPNLTTRMRNLLAHLWQEWKSLNTDIDGVSQEIYGIADQDAACQRLRRIPGVGPLVATATVAAIGNGAAFRKGREFAAWLGLIPRQHSTGGKARLLGISKRGNIYLRRMFIHGARAMLLRVKYDTGRLGEWARQLELRVPRNKAVVAVANKLARIAWAVLATGNEYRNLAVAAA

SEQ ID NO: 183075 - protein, 352 aa, unidentified
MTTMTPARPLVTGGVDTHHRDEHVAAGLDHNGGLLATASFPTTAAGYVALLAWLLSLGELVAVGEEGTGSYGAALARHLTRHGVKVLEVSRPNRQVRRRYGKSDVVDAIAAGRAVLSAEATATPKTHDGPVEALRALKSLQRSANKARTQALNQLRAVLVTAPDDLRARLRDLPRGELLATCAAFRIRADDDSLAAITRLTLRELAARIAFLDAQLKSTVARLRRITTEFAPDLVAKRGVGPDTASTLLLTAGDNPDRLHSERAFASLVGSSPVAANSGQKQNRFRLNRGGDRQANAALWRIAMVRLRYDQPTRDYLAKRQAEGKTKSEGIRCLKRYIAREIYNSLPKAALS

SEQ ID NO: 183076 - protein, 314 aa, unidentified
MVSYGFDVSKDWVDVVHSDYSRQPKQHWRLDNDQVHLTTFLQEQKIRYPKLRCSVESTGPYHAALLRVCLSLDIPCYLLNPITTKQLTKASVRGTKTDTLDALRIALIGLEADRPINAHTLDPAKSLQRAATKLEQLATVLIGSQAHYELLQPYDSEPLQVAFNECRQQLRSSAKLLRSEALARCDPRVEKLVMSLPGVGQKLAPVLMTEIGDITRFPHAKQLIAYAGLDPIIRQSGTSVHGAGRLTKRGSPHLRRALFIAASIARRYDPDLQAVYERKRTQGKSYRQAVVHVARLLTIRLYAVWQRGTPYVSE

SEQ ID NO: 183077 - protein, 318 aa, unidentified
MQTSIVFIGVDVGKFELQVAASDGEIVTGVLPNNRSSIVGWLKRLPAASVIAMEATGGYQELLARTAHERGFEVYVLNPTHVHHYAISLGNRGKTDRLDAAVIAQYIAQHHKKLHRYEPISPELQEVRALQALRSTVVRVGTSLRLSAQRHGCVSSHQKKALASLTAWSEQLEREMIAKIKAQNDWAKTYGLLTGICGIGPITGVALTSLFSRIDFASSDAAVAFCGLDPRPNESGRKVGRRRLSKQGDKAARTLLYNAASSAARTEQFKDYYAMLRVRGLASTAALVIIARKLLRIAYGVWRTGHPFDPEKLRPTTA

SEQ ID NO: 183078 - protein, 376 aa, unidentified
MPRFIGFDAHKSYAYVVELGGDKQLNYRVALPGGLADFKQRLDSQCQIVIEASTSTFRLVDELAPHVGKIVVSDPAQTRGAVSHVATTDRNAAEALARLLASDFVRPVWVPPREIRSLRSLVELRNRLAGLRTISVNRIRALLRQELVPGRVALTEEVVREQLCDDPTMEVFYSSLFRFRDLVKKECERVDDALRSWCRNSDDARLLMSIPGVGPLVATCLVAQVGDIKRFDSPRKLCSYAGLVPKVYISGQSQRSGGISKRGRSSLRWAMSIAVMSATQVDGPFKELKERLCRRKPKGVAMVACARKLLTVVWRVWTKRQPYADQNEQRYARKLAELDRRYGTQNDSNAFPNKIAGLTPESDKRIARAGNRKQDV

SEQ ID NO: 183079 - protein, 408 aa, unidentified
MEVLHARCAGLDVHQATVVACVRRATRKAVRRETREFGTCTRELLALGEWLRTHEVTHVVMESTGVYWKPVWHVLAGSFELVLANATAVRTVPGRKSDVSDAAWLADLLAHGLVRPSFVPDAPTQELRGLTRTRTQLVREHTRHAQRVHKVLEDANLKLATVLSDVFGSAGRAVLAALVEGETDPARLAALVTTRVKAPPAALAEALRGTVTDYHRFELRLHLALMTQLDRAIAEVEERITHALAPFRLVVARLTTIPGISTTTAHILLAEIGRDMTRFATAGHLVSWAGLCPRLDESAGKRRSVRVRKGGRWLKTALVQAAWAAIKVRDSYVQAQYVRLKGRRGPKKAIIAVAASLLVAAYHMLRDATDYRDLGGHYFDRRDKRRVAARLVRRLTQLGYAVELRPAA

SEQ ID NO: 183080 - protein, 340 aa, unidentified
MRELYAGCDLHGNNNLVGIIDGEGKRVFKKTLSNDLRLICDALKPFQRELVGIVVESTYNWYWLVDGLMEEGYRVHLANPSAIQQYSGLKHGDDKHDAFWLAEMLRLGILPEGYIYPKGERPLRDLLRKRGHLVKLRTSLVISLQNILSRNQGVRMIVNDLKRLKEDRISPLLEGNEDLAMAGRVSKEAIDFLTRQIRKIEGVVEKKAALKEAYRYLLTLPGVGKILALTIMLETGPISRFEQVGDYVSYCRKVPSQRMSNGKRKGAGNKKNGNKYLAWAYSEAADYSRRFYPEPRAYYNRKMQKTNSVVAHSALAHKLARAGYYVMRDQVPFRPEKLFG

SEQ ID NO: 183081 - protein, 340 aa, unidentified
MVHVGVDLDKRSSQIAVLTEDGEIVQQRLPNEAVGLEKFFAQLPPQTPIALEASGTWWWLVDLLERLGHRPVLSNPKQTKAIAAARLKNDRVDAERLALLLRGDLLPTVWIPPTALREARELVRHRIQLVWLRSVIRNRLQAMLARRNLQPTSGKSWLTQRGQRELQQLPLPEAPSRIREDCAALLPTLDAQIRRLDVDLVTRWGQDPRVQRLMTIPGIGPFIAIVLVLELGDIHRFATAKRVASYVGLTPRVRGSAGRVRAGHITKEGNRLLRWVLVLAATQAVRRPGPLRAWFHAVKKRRGKKVARVALARRLAEIVFHVWQQECDYFTVVRHGVVRG

SEQ ID NO: 183082 - protein, 367 aa, unidentified
MSNYVTAIGLDVHARSISACAFDPMTGEVSRARFGYDPASVAERALGFESPKAVYESGPTGFHLCRALRALGVDCAVGAVSKMHRPAAGRGRKNDRRDAEWLARLLACRNVVEVWVPDERTEAARDLSRAPEDARDDLQRARQRMSKFLLRHGLVFDEATPTGRRRSNWTEAYWRWARSIEFDEADDAAAYERYTDAVDRCGEAKRELERRVVEAASRPEWAPTVDALCLVKGVDVATAFLLAAEAGDFSRFPSAPSFAAWCGLAPSERSSGETESRGGITRAGNSHVRRALVEASWHVPMSTRHPKKPRPGHGVAPAASRHAAKCNRRLRDRRDAMSQAGKRPCVANCATAREMACRVWAIAPMVR

SEQ ID NO: 183083 - protein, 431 aa, unidentified
MNCNTQNAKIETIKEKTLVVGIDVGSETHYARAFDWRGYEYSKKAFSFSNTEAGFVSFLEWMQDIAKDNGKQELVPGMEPTGHYWFDLGKFLQDKGIKPVLVNPYHVKQSKELDDNNPSKNDRKDPKVIAGLIKDGRFTYPYLPEGVYAELRSASNLRFQTQEELTRILNRIARWFSIYFPEYKDVYGKSDSKSGLMILEQAPLPADIRVLGVDGVNKIWRDAKLRGVGIKRATKLVEAAEHSIGSQEGLTTARMEIKNLLSDYERYSKRMEELVELIDELVKEIPYVEKMLQIKGVGIKTISGLVAEIGDIRRFDNPKQIQKLAGYALVEDSSGKHQGETRISRRGRKKLRYLLFEASLSLVGKNEEFKELHYYYTHREENPLKKKQSLVAVACKFLRIAYKILTTGVDYDGAKMISDIRRPQKQMLQAA

SEQ ID NO: 183084 - protein, 344 aa, unidentified
MVYVGMDVSSKSFVVHAIDERKRLVWRGEVAATPSGLKRALRESGEGPKLVVFEAGNQMKWIARELGRRKEVTRHIVHPNEVKWISQSSGKTDKVDARKLAELARGDLLPRKVHVVEGHIRELRELVGARHTLQSKRVALLNTVRAYLKQEGHRLPEKFFQRRDWHQALGKLGVSAVTQQIIETFKTSIDALQQSEAALTRQLVAIKDERITQLESIPSIGALTARVVLGALDDARRFDNKKCAAKYGALTPSIYQSGDVVHLGRINRDGRQEVRRVLLQCAHTLARMKSAGARPLRAFYERVARRRGKKIAIVALARKLLTTAYGVLKSGTFYDPAKLVAQHA

SEQ ID NO: 183085 - protein, 351 aa, unidentified
MYIVGVDYHPSFQQIAFLDQETGECGDRRLDHSDGEAERFYRELRQKGVSVRVGLEATGYSRWFERLLVELGIEVWIGNAAEIKAKRVRKQKTDRQDAQLLLKLLEENRFPRIWVPGPENRDLRQLLWHRHRLVQMRTRIMNQLQALAMNEGKRWKHRLWSAEGRALLEKFPLAPWASRRRQDLLELLDRLTPTIDELTAAVEQEARRWPEAVRLMTHPGVGALTALAFVLIIGTPGRFARGKQIGSYIGLIPSEDSSGGRQRLGHISKQGNALLRFLLVEAAQAATRCNQDWRQRYWHLAMRREKSIAKVALGRQMAVRLYWMWRNGCAYSQSLEFGSHAGQLGTGHGVQ

SEQ ID NO: 183086 - protein, 429 aa, unidentified
MNYNTQNAKIASITEKTLIIGIDVGSETHYARAFSWRNYEYSKKPFAFSNDEAGFAAFKEWMDDIAEKHGMEVIIPGMEPTGHYWLNLGAYLQEQGMKPVHVNPHHVKKSKELDDNNPSKNDRKDPKTIASLVNEGRFSYPYIPTGIYAEIRNLSNLRIQTQEEITRIKNRMARWFSIYFPEIKDVYRNPDAVSGLMVIKQAPMPCDIRELGVEGVNKIWRDARLKGAGIKRATTLVTAAEHSIGNTEAPRSARKEIRNLLEDYEGYKKRMDELMEEIEKTLSEIPYIDKLMEINGIGIKTVSCFIAEVGDIGRFDNPKQVQKLAGYAIVANSSGKHNGESRISHRGRKRLRYALYEAAISVIGKNKEFKEIHSYYRTREKNPLKKMQSVIAVACKLIRIFYTILTKGVDYDGQKMLNDIVRPEIQPAA

SEQ ID NO: 183087 - protein, 455 aa, unidentified
MNRETKPTALEHLPVLNLNAAGLDIASEEIWAAVPPVRDPRPVRVFGTFTPDLYALADWLKACGLETVVMESTGIYWIPTFEILEARGFQVQVVNARHVKNVPGRKTDEKDCQWLQRLHTYGLLSGSFRPDGEMCALRAYLRHRTSLLEHRAAHIQHMQKALLQMNVQLTQVLSDITGETGLAIIRKIVAGDRDPVALAQLRDPRCQHSTDEIAKALTGNYRPEHVFALKQALALYDFYTEQVRECDRELEQQFSVLKPRHDHDSLPPLDVSDKRDSHSKNAPDYDARTLLYRLVGVDLCAITGMNEITVQEALTETSTDMSKWRTDKHFCAWLRIAPANDISGGKVLRSRTLKTHNRATQAFRLAAQAASRSVNSAYGAYYRRMRARLGPQKAMTALAHKIARTYYHMLKHRVPFRDVSAEEYEQKARDRELAHLRKKAARLGMTLVAQPAVAV

SEQ ID NO: 183088 - protein, 343 aa, unidentified
MQMITTIGLDIAKSVFQVHGVDAAGEVVIRRQLKRRYVLAFFQKLSPCLVGIEACASSHYWSRELQALGHTVRLMPPAYVKPYVKRQKNDMADAEAICEAVTRANMRFVPTKTSEQQSCLMLHRTRHLFIRQQTAVINSIRAHLAEFGIVAPVGRRGVTELLDIVADPSDKRVPEVARACLAALGTQLLRLKEQILEFDRMIMAWHRSNQTSKRLHYIPGVGPMLATALVASVADPRTFRSGRNFSAWIGLVPKQHSSGGKDRLGSISKQGDRYLRSLFVAGALAVIRYAKIHGTKHRPWLTALLGRRPTKVVAIALANKIARMAWAMMAKGERYKQPVALAA

SEQ ID NO: 183089 - protein, 382 aa, unidentified
MAGTEPHAWGTGRMDDITYVGLDVHKATVCVAVAESGRGGEVRQVGVFQNRPEILCKMAAKLGRGGRRLSFSYEAGPCGYGLHRLLTACGHSCVVVAPSLIPMKSGDRVKTDRRDAMMLAKLHRAGELTAIWIPDATHEAIRDLVRARATAGRVLSKARQHLQGFLLRHDRIYRGARAWTQAYWRWLTTVRFEHPAQQIVLQDYIHAVEDAEARRDRLTRQIEEMLPGWSMAPVVAALQAMRGVALVVAVTVVAEVGDFCRFANARQLMAYLGLVPSEHSSGSTIRRSGITKAGNTLVRRVLIEGAWTYRMTARVSRKLHDRLEPLSPVIRGIAWKAQVRLCARYRRLAASGKPKVVVTTAIAREMVGFIWAIACIAQLALA

SEQ ID NO: 183090 - protein, 355 aa, unidentified
MTGTKYIGMDVHKESISIAVMNGFGKIVMECVIETKASMVLQCIHGLRGELYVTFEEGTWAAWLYDLLKPHVSGLVVCDPRRNALLQDGDKNDRIDARKLAELLYLRKLHPIYHGEHGLRTLKELVRSYLTITKDLGRVMTRVKAIYRSWSIPCTGKQVYAPRHRGEWLPKISEPGVRRRAEFFYQQLDALRVLRQQVRRDLLAESNKHRAWKRLCQIPSIGPIRAAVLLGIVQTPHRFRTKRPLWKYSGLGIETHSSADHRSVHGQLQRAKKQVSVRGLNRSCNHDLKSLFKGAAVVASSKPGPFQEFYAALLAKGMRPEMARLTLARKIATIVLIVWKKGVCFDAQYLKPQTA

SEQ ID NO: 183091 - protein, 337 aa, unidentified
MTRYVGVDLHRRRSVVVVLDADGTELWTRRIDNSPVTLGLEIEEAGPDPEVVLEATWGWYWAADVIAQAGGRVHLAHPLGIAGFENRRVKNDRVDARLLADLLRMGRLPESWIPPEGVRHQRELVRYRRKLSQLRAGLRAQVHAVLGKEGLLPPMNHLWGPGGSVWLDDTDMAEAYETPVRSLRRLIKLYDTEITKLDARIADVFKGHPGYEAVQAIHGVGPVLAAIFTAELGDVTRFASAKHVCSWAGLTPRHRESDTTVHRGSITKQGPPLVRWAAIEAVSKNHGGDPIKQHYRRVAERRCRNKGLVAAARKVLTLVYYGLRDGEIRSLAPPEAA

SEQ ID NO: 183092 - protein, 456 aa, unidentified
MRGKNKSSKTGSPALPVLRPKVAGIDLGANQHWVGGPIASDGAANVRVFGTTTPELDKLANWLIEQQVESVAMESTGVYWIPIYELLESRGLEVVLANARQLSHVPGRKTDMKDCQWIQLLHSCGLLRGSFRPTEEICRLRALQRQRGNLTEERTRAVQWMQKALDQMNVQVHRAVTDLTGKTGMAIVRAIVAGERDVLTLAAHRDKRCRKSAAEIAAHLTGTWRDEHLFNLRMALRLFDEIEAMIDAYNAELRGAMEALQPPDRQQQPIPPHPNPAKERALRSRGEQESRACLWRFASVDLTRIDGISAGNAEIILTEVGLDLAAFPTEKQFVSWLRLSPRTPISGGKPLRKRRNTMGATRVSGILRMAALSLSRSTSALGAYYRSIARRKDGAVAVFATARKLAIWVYRMLRYGHEYVDIGANAYEVRSQQRRLRGLQASANSLGYQLVPVAER

SEQ ID NO: 183093 - protein, 395 aa, unidentified
MFIVGIDIAKRSHEAIIITEDGQVVRKAFSFRNNCTGYNLLLEQVRRLTLVKSQIVFAMESTAHYWLALYARLLKDGYTVMVLNPIQSHSLRELYIRKAKTDARDSLIIADLVRFDRCKASNVPQDKILALRELCRSRAYLVDMAADLKRKLIALLDRIFPEYESLFDSVFSKASIAVLRKYSTPQKVKNANLRKLTDILMESSNGHFGEWKAHQLKEAACSSFGIDDSDGVYSTLLGMFLEQILSLTAQADSLEKQISVFFQEFNNPLTSIPGVWTVLAATILSEIGDITRFSSADKLLAYAGLDPSVKQSGEFKSNQNRMSKRGSPYLRRAIWLASTVAVHRDPMFQTYYEKKLSEGLHYMNVIGHVSRKMTAVIFAVLRDGQPYQPILQSAG

SEQ ID NO: 183094 - protein, 450 aa, unidentified
MGKDAKQKTNLQLAVVDHHTAAIDVGSKMMMVSYSDKEGNQRLLEVDSFTEDLHELVKTLQTEGIKQVAMEATGVYWMALYEILEREGLKVTVVNPKHFKNVDAQKTDVKDCHWLHQLHAHGLLRASHIAPELYRELRSYLHERNILQNQKSDTLNRIQKILTQMNIKVQHLISDIEGVSGMRILRGISNGISDPVELLSLMDTDKLKAGKEDLLKSLKGVYKQQYILILRNSLKTYDFFKKQMKSYELLIEDVLKKMLPEDIQGNKPSIKAKTSHVRKNQYSINLKQYLNHIVGVDLIKIDGLDEKCILEIISITGLDMNKWPTAGHFASWLNLSPRPKITGGKVIGYTKRFTNNKATQAFRMAAQTMWQNKGALGQLYRRLSAQKGSKKAIKAIARRLAVIFYNLVKNQTEYDASKLNIDTKKQQARKIARLHKEAAKFGLILQKVAA

SEQ ID NO: 183095 - protein, 338 aa, unidentified
MAILYVGIDLAKTVFAVHGVNEGGKPELVRPNVARAKLLELIVSLPPCVIGMEACSGAHHWARQFMVHGHTVRLMAAKFVSPYRLSGKRGKNDAADAAAICEAVQRPNMRFVPIKSIEQQSQLSVHRVRQGFIEQRTATINRIRGLLSEFGVVLPLKASTVRHQAAACLEDLPGWGNTVIGDLLSELMRLDERIALYDRHIAQMAREDVRAKQLMHLSGVGPTTATAVLAMIGNGHEFKCGRQFAAWLGLVPGQYSSGGKARLGHITKAGDPYIRSLLVLGARAVLNSAANKTDVVSRWAVALAERRGYWRAIVAIAAKNARMAWAVLSRGEQFTMPA

SEQ ID NO: 183096 - protein, 349 aa, unidentified
MTEQRISYAGERVYVGVDVHKETYTVTCVCHTQRVKTATVPAEPASLAASLLRWFPGATLASAYEAGFSAFVLHRALTQAGITNIVVNPASIAVAAHDKVKTDRRDSKRLAIDLADGRLRGISIPTEAEELARLLPRTRAQIVEHRATIARQIKAKLHQFGLIAPSSRRLISNRYLRERATWPLPPELGVSLTLLAEQWRFATRQLIEMRRLLRDQAKAHEETEKVYRSVPGIGAVVARTLATELGDMTRFANERALFSYTGLTPSEYSSGSSVRRGHISRQGSSRVRHLLVETAWRALPRDEVLKEIFDRIAATRGKKRAIVAIARRLTGRIRACFRQGTTYAVGTYA

SEQ ID NO: 183097 - protein, 406 aa, unidentified
MISVGIDVCKGKSMVCIMKPGGEVLKTPFEMLHSIESIHRLVKLINSYDEEVRVILEDTGHYHLPVVTLLVEKDIFVCCVNALRMKKFCSQSIRRAKTDKIDAVHIAQFGLTYWDELNPVKSPEEVYQELKLLARQYYQTVSMLVKAKVNLSNLLDQTMPGIMDLINDSPSNHKLTDFVKRYYHFSHILEMGEKCFTSDYCKWSKKQGYRMHERLAEKIFAMVQNGIPVLPNSPTTKIVVLEAVRMLREIEASRDIILAQMQDFAKTLPEYSIVREMSCIGDILAPRIIAEIGDVRRFKNKHSLIAYAGIDAPPYQSGSFNAAERHISKRGNSYLRKTGYEIMQSLIKHKPTNDPVYDFIQKKRLEGKCSKEAMIAGLNKFLRIYYGRVSEVYRAIDEALDFTSNI

SEQ ID NO: 183098 - protein, 411 aa, unidentified
MKRVYDNCCGIDVHKKLIVACFRKGNEQELREFGATTRELLELADWLKSGNCEMIAMESTASYWKPLYNVLEASELNTIVVNAHHMKAVPGRKTDAKDAEWIADLLQHGLLKASYIPSKDQRELRELVRYRKSLVGERTRELNRLQKMLEGANIKLSGTVSDINGKSARSILEYLITGESIDSEKYDEMYEKKVIAHNLKASKEQIIDDLNGIMTPLQRRMMKELLTHLDELNIHIKNLDDEINDFMKPEEKQAAKDIQDITGIGNSSAQAIISVIGADMERFPTDRHLSSWAGLCPGDHESAKKRKYGKTRKGNALLRSTLVICAHSAVKNKKSYFYAQFMRISAHRGKKRAYVAVAHSMLIAIYHILKEGVAFKDLGAEYYNQFNRERKINAYLKKLKALGWEAQAVAA

SEQ ID NO: 183099 - protein, 445 aa, unidentified
MSESLISAASEPEWAAFAAIDWADQKNFWRLVPAGSQHFEQGELENTPEAVEAWAAGLEQRFGGRPIAVCLEQSRGALVYMLTKYPHLVLFPVHPTTAAHYRETFCPSGAKSDPNDTASLLDLLLRHRERLRPLQPDTVETRLLHFLVEERRRTVDEKTRQSNRLTDCLKLYFPQILRWFDDVTTPLVGDLLGRWPSLDQLQRAHPGTLRRFFHEHNCRSQQLMEERITAISQAVPATRDQAVLEAGTMMARGLVALLAALRSNIAAFDKRIAELVQAHPDGAIFASLPGAGPALVPRMIAAFGTRRDRYQNADEMERYSGIAPVKKGSGKTELVHFRFACPKFLRQTFHEFASHSIEQSEWAKAYYEHLRNDEKKDHHPAVRALAFKWIRIIFRCWKDGKPYDEQVYQQSLRRRGSMLGAALASATSVGWKPVAGFQKLSENNA

SEQ ID NO: 183100 - protein, 333 aa, unidentified
MTRTITNAGIDVSSKVLNVHIHEGGPAHFENTVEGRKKLVRFIKKRSKGAGRVLLESTGSYGLDLALELHAVKRFVVVYLNPAQSKAYAQAKKRRAKTDRLDAKLLAEMASKGLGHAWQPPEEAYLELRAMTRHRRSMVENRTREKNRLAAARATNTTPRAVLDSLQATIQWLSDQIEALNRIITAHCRAHPELQRRVTLLSTMDGIGPTTSAEIVGEIGCAPRDLTPRQLVAYAGLDPQVFQSGHLDARRHISRQGSRFLRLAMHFAATNGVKNSPRIRAIHQGLLDRGKPKMVAYVAIARRLLHVVHALLRTGERWDSSRFGRLPDEATAS

SEQ ID NO: 183101 - protein, 428 aa, unidentified
MIDQQHSTAASNLVAIDIAKEWNIALVQETSGRRRSFKFANRLADHDDFVAFLHSLAGPVQIALEPTGDYHRNIAYRLLTEGFHVVSISSLALARFREARFGTWDKNDPKDAQVMLAMMAQDLVQIYWDPLISGSHDWQELSNTYFHITLSRTRLQHSLLLHHIPLYFPEFTRYWYSTRSEWFIRFLVRFPTPASIRALDRNAFITEAWDLVGRKVSKQAKLEEIYTLATESIGLPVALESAAIETFRLQLTRYLELSQQRHYLDRRAQELLADNPDFQRLKTLPGVGAITALTILAEAGDLRRFRHHRQFLKYCGLDLSKSQSGQSKGHEVLSKRGNKRLRLAFWMAGLVAIHQRENAFRDKYERYMSANPFDGDRKRKALTAVSAKMARVAYAVVKHGSDYQCFFEHRLPSGSIPFARAVEATSTS

SEQ ID NO: 183102 - protein, 340 aa, unidentified
MSKNTVIGIDLAKTSFAVIELGRGGDVKRRKTFRRDGLKRFLAKHEPATVALEACGSAHYWGRWLEAHGHEPVLLPPQHVKGYLRGQKNDYNDAQAIAEACHHGAIRPVTVKSIEQQDDQAFHAIRRSLKVESTRLVNQMRGLLAEYGLTVPKSVSAFCRRVPELLEDDENGLSARFRMLLNRQWSRLKALLDEQVWYDQQLQQQAKEDDTCRRLTDIPGVGPVVASAVKSWMGDGQQFQRGRDASAALGLVPKQYSTGGKQSLYGITKRGDAYLRSLVVHGARAVVRTAKNKQDALSRWALAVEARRGHNRAVVAVANKIIRMAWVVVARQEHYRPAES

SEQ ID NO: 183103 - protein, 417 aa, unidentified
MNTLSEYAAIIGLDWADKKHDICLKLPDGNELEFSTLSHSAEAIDAWAMDLHKRFSGKLIAVCIESRKVPLIYALLKYDFLVLFPVNPQTLARYRRALRPSRAKDDPTDAQLLIDLVLRHEEKFKPWVPDRPEVRALAQLVEIRRTLVADKVRCTNRLIAALKNYYPQVLEWFEDKDTAVFCHFLEQWPTLEAARRAREATLHKFFTSHNVRYPKVIERRILAIKSAAVFTTDLGVIEPNRMLALALVAQLTLLMEQIKQLDRQIAERFSQLDDAELFEALPGAGKQLAPRLLVAFGEDRTRFDNADAMCQYTGVAPVTERSGNKSWVHWRYSCSTFLRQTFIEWASESIRFSFWAKAYYQQQREKGKTHQMAVRALAFKWIRILFRCWQERKPYDEAKYLMALKAKGSPLVAELAK

SEQ ID NO: 183104 - protein, 341 aa, unidentified
MTVVTVVTVGIDLAKNVFAVHGVNAAGKAILVKPLVRRAKLLELIATLPACLIGMEACSGAHYWAREFQKMGHTVRIMVPQLVSPYRMGGRHGKNDAADATAICEAVARPNMRFVPVKSIEQQGQLFVHRAHQSYVSERTTLINRIRGLLSELGIVLPQAFKAFLSGVAQVLEDLPGYCNQVIGDLLNELFHIEEKIKNSEKLIPQLARDNSAAQLLMQFRGVGPMTATAIVASIGNGHDFRNGCQFSAWLGLTPRQQSSGGKARLGRITKAGDSYLRTLLVLGAKSVLLGAAKNDDPVSKWALQLKERQGYGRALVAIVAKNARMCWAMLHLKDEFRFPS

SEQ ID NO: 183105 - protein, 401 aa, unidentified
MEPNYRRCCGIDIHKKSVTVCVLPPVDKPESGIRKRNFPTFTRDLKQLRTWLKNCKVTEIAMESTGQYWRSVWNLLEGHFEKLVLVNPQHIKGLNGYKTDPKDAEWIAGLLEGGKLKGSWVPPREIRELKDLTRQRVHVLEDMNRVKNRIEQLCQAGNIKVSSVATDLFGVSGRKMLKAIVEGKHDAGWMADYARGALRGRKRELELALDGSFTGNQRWLLDRELLQLEWLEAQARVLEQEIERRVVPFAEPMRRLMTIPGIDQKTAWTIMAEIGVDMNVFPDARHLASWAGLCPGNRESGGRRMSGRTRKANRYVKSALCQAAWAASHSKQTYLSAFYKRLQVRKGAQKAVMALAHHLITVVYNVLKRGEQYVEMGADYHDQRNKPKVVSRLVKRLTRLG

SEQ ID NO: 183106 - protein, 462 aa, unidentified
MPGREERETWEKSRRQLEGLPVIRRGVAGIDLGSEQHWVCAPTLDRSGREVARFGATTAELIRIAEWLKARQVESVAMESTGVYWIAPHEVLEAQGLQVLLVDTRQLAQVPGRDKKSDPTDCEWIQRLHSCGLLRGSFRPEEAVCMLRTLVRDKANLVAESGDWLRRMQKSLDQMNVRVHRAVSDIDGVTGMAILRAIAGGERDAQKLASLRDRRCSKTQQEIAEQLSGHWREDHLFSLQQALKMYDAVQERIAAYEQEILGKLGEMEREEPHEPTAPPLQNTSKARTIKKRGQEAKRQALYRMSGVDVTQIDAIGVETVEVVLSEYGSDLSRFPTEKQFVSHVTLAPRVPKSGGKPVRKKKRNSASTRVAAALRMAALSLRHSQTALGAYYRRIAQRRGGDIAVFATARKLATLIYRLLRWGQPYVDEGAAAFENRYRQHRIGRLAATAKELGYQLTPVPA

SEQ ID NO: 183107 - protein, 352 aa, unidentified
MDRYIGIDTHSESCSVAILGQSGKRLRQCVVETQAKVLIDLLEGVPGDKHVCIEEGQLAEWLMEALAPHVKEMVVVQPQEHAGRKSDADDALALAERIRVHAKGIYVFKPTTQYRPLREAVRTYAVATKEQTRAKNRFRALLRARGVSKLDETLYAPESRERWIKKLPPDYRRRATWLGEQVDATTRAQLVAESWLLEEAKHLPDVHRLKTVPGLGNVRAAQIVALAVTPHRFRKTRQFWSYCGLGIVTRASAEWKHSSTSGELQRVRTKVHVRGLNLNRQPLLKSVFKGAATSVLSRNNPLRDHYDRLVANGTAPHLARLTIARRIAAATLAIWKKKEDYEPGKHTPPKAA

SEQ ID NO: 183108 - protein, 373 aa, unidentified
MTKGNAERAIRKHVGLDVHKATIWPCVAEAEGGEVRDLGSMAHDVPGLLKRLRGLGDPAEIHVVYEAGPTGYGLLRALREHGYRADVVAPSLMPRAPGERVKTDRRDARKLARLARAGELHYVVVPDARDEAIRDLSRAREDAVAARLVIRQQIMALLLRHGMIYSGRTHWTKAHMSWLRERTMAYPAQQAVLDEALHSLASVDGTLGRLTKGLSEQTATWRFRPVVDALMSLRGMAEVAATTIVAEIGDIGRFAHPRELMAWLGLVPSEHSSGPRVRRGSITKAGNTHARHILVEVAWHYRFRAHIGPALKRRQSNCTADQQRLAWKTQERLCKRFADLKKRGLHSNKINVAVARELAGFIWAMARTVPITA

SEQ ID NO: 183109 - protein, 347 aa, unidentified
MSFVGVDLHTNSFTACRREAEGSESFETFTLSPADLDRFCLTLDADDEIAFEATGNSAWFRDQVLPCAGRVVVVNPSQFKVIRQSVKKTDRNDARALALFLAKDMLPETRAKTQAQSELGSLTQTRDLLVKQRTRLLNKVHALHNRHGIKLKRETLASRKRLLALAPDPFTPLEWAELEIVRDQALSLTAAIAKIDARIEEAAGAMNGYEGLTSIKGIGARAAAVFLSTIGNVHDFASADKLAAYFGIVPRVSQSNETDNRGRITKRGSPLARTVLVQCTLIATRYSPYLKAYYDRIKARRGAGKAIIATARKLLAIIYDTLKNQWIFRDFTAFALKSPQVPAGQSS

SEQ ID NO: 183110 - protein, 343 aa, unidentified
MNEVTTIGVDLAKSVFQVHGVDASGQVVLRRQLRRSQVLPFFDKQAACVVGLEACATAHHWAREITKLGHDVRLMPARYVKPYVKRNKNDAADSEAICEAVTRPTMRFVAVKTEEQQSVLMLHRTRQLFVRQRTMLINAIRAHMAEFGIVAGVGRNGVERLLRLIDEGSDERVPPVARECLQALRTQLVLVKRQILEADRRILAWHRSNELSRRLETIPGVGPLIATALVASIPDPHAFGSARDVPAWIGLVPKQNSTGGKERLGSISKAGNRYLRSLLVIGALSVIRRAKQVGYTRRAWLAELMARRPVKVAAIALANKIARVAWALMVSGTRYREPVPQAV

SEQ ID NO: 183111 - protein, 448 aa, unidentified
MGEPQVIDDVEHERVFETVAAVDVAKRDGVVCLRGPARSRPGGRQSTVWTVSATMNAVAALGGQLAAAGVQKVTLESTSDYWRIWYYLLEAAGLDVQLVSASQVRQLSGRPKTDRLDAMWLARLTEKGLLRPSFVPPAEIRALRQCTRARTHLVQDRTRCFQRLEKLLEDALIKVSSVASKLTTASARDMIGALIAGERDPQVLAALARGRMKAKHAALVEALTGVFGDHHAEIAQILLDQIAFCDTRITALTTRIEDAIDAIPAAWGVGPGGVTGTESGTGPDAAALPAIMRLEQIPGLSPELACSIIAETGLDMTRFPTAAHLVAWAGLCPRTLQSGPRTRQAKGQGNSYLRGYLGQAATGAAGTATFLGERHARIARRRGGAKAQVAVARSILVIIWHLLADRSARFADLGPGHYQTRIDHNRKARSHIRQLEALGYQVTITQAA

SEQ ID NO: 183112 - protein, 436 aa, unidentified
MEEVTDEPLYRDRVCGIDIGKAEVHATIRVPSDTNPERRMSETRAFATTKRGVLALADWLRSWQVPAVVMEATSTYWMGPFFRLEAEGLECVLADAKQVKNLPGRPKRDPSDSSWLAQCFERGAVRACFAATKEFRVIRLHTRYRRDLINERTREKNRAEKLLETAAVKLSSVITDLHGVTGRDIMGHLIAGERDPKVLAQLARTRARAKITELQHALEGAEFFTGHHARLLKTMLERIDQIGAQISDLTAVIEELLAPYEEQLAQAESMPGWGRRSAEDAVAETGADMTRFPTGGHLVSWAGRAPLDKQSGKRKGQARHKKGNTYLGGVLGETAISAGRTQTREGARYRKLARSRGKAKACVAVGNTQLKAYHKLLSNPGMRYEDLGPDYYERRAATRRKITWHMRQIEAEGFDVTLTPREPAPGEGAPSGAQAA

SEQ ID NO: 183113 - protein, 385 aa, unidentified
MIVVGLDTGRESHWFHALSTDKVSLSQGQLPNETGSYQGWAEMLESVDPCIRLVLEAKNGYASPLDQYLVGRGWEVVAVTAGAVKTYREKVMRQHNKTDGTDAEAIARLGLELAPRTTQASQPRLELRRLTRWRVRLVKDLTRERNRLRRCIAAYFPELTVDRMPNLKAGYLLTLFELHPDPRVIAALGVERLAANLREHGCRRVPTRALVDFVALAARNCYESPERGVLVQEAALLARRIKGLERDIADIDALIEQSGGEEPGVADLAARTGVSTVQSASVLSEVQDILNFASDDKLASYAGLALKRDQTGRTRNRLHPQMVANRYLKRHLLSMAHTRLMHDARSKAYYKRKIREGKTHLQALRALARHLIRLVYYVLKRRALS

SEQ ID NO: 183114 - protein, 346 aa, unidentified
MGKSITDLSPVTTVGLDLAKHVFQVHGIDASGRVVVAKAIRRNKLLEFFASLAPCLVGLEASGSAHHWARELMALGHEARMMPPAYVKPYIRRQKNDASDASAICEAVTRPSMRFVGVRSLMNQAALMRHKAREMLVTQRTQLLNGLRGHLTEVGVIAPQGLRCARELAELIEACDETIPFEVCEALAPLVVQLRNLDEAIAQLDRIIAKLAQKDETARRLMSVPGFGPITASAMAATIQDTSSFAGPREFAAYLGLTPKQNSSGGKPKLGRISKMGNRYLRKLLVVGAHAVLFHRKPHTDPLRMWAKKLIEKKPFKLVAVALANKMARIAFAILRGKTVYREIPA

SEQ ID NO: 183115 - protein, 345 aa, unidentified
MQVYAGLDVSLKTTHICLMDEGGKIVWRGVSASDPASIREALSPFLGQLVRCVLETGSTSPWLASGLLALGVPVVCIDARHAQPLLATMTNKTDRNDARALAGLARVRLFREVYVKPRQAQELRAALAARQQLVEAATAIKNTIRGLLKPFGLIPSKGTGQVFVRQVREKLIGEAALGAVIEPLLSAWLALRKELARATKALMDFARGNQTCRLLMTMPGIGVLVAVAYFATVCDPTRFGKSRNVGAHFGLTSRRTQSGEVDIRGRISRHGDELMRHYLYEAAGVMLFRWRGCCALKDWAGRLVQSKGVKKARVALARKMAVVLHEMWEHGVAFAPKGRPAALAA

SEQ ID NO: 183116 - protein, 315 aa, unidentified
MAMVVADSKRLIGVDVAKTELVIWDDESAELIAIPNTKAAIKKWLKGLSGAMSVAIEATNIYHVLFTDLAFEFGHTIYVVDGYALSHYRKGVNVRAKTDAIDAQLLARYLKNEGQDLTPWAPPPAIYRQLLSLFRRRAGLVQARTSLTQGWANEPLLKAAFKTHLRAMQRLELLMEKMIKGLLEKAGLMPQVKRCMKVEGVGFLTAARLTATFQRGNFSGGDAFIAFLGMDLRIAQSGQKKGQSKLTKRGDPEARRLLHNAAMSASRTAAWKSYYEERLARGFSTTASLVMLARKLARVVFALLKSGDEYRSKAA

SEQ ID NO: 183117 - protein, 415 aa, unidentified
MALKIVYKICCGIDVHKTFVVACIASTDNKGITSYESHRFSTYTSGLKDLLQWLLTRNCKDVCMESTGKYWIPVYNILESDCSIVLAHPKYVKAIRGKKTDKKDAKWIADLFKHDLVAGSFMPPADIRQLRDLMRYRFKLTCFKSSEKNRLQNCLTVSNIQLGNVVSDTFGKSAQAILDKLLENPADTSFDLEPLVYKSLKKKLPQLRDAIDGFITPEQAGKLKIIKDHYENLGSRKAELEELILALAAPYQQELTILQTAPGISSEFTAIGIISEIGTNMETFPSAKHLCSWAGLTPTNNESAGKKKSVRVSKAGCYIKPLLIQCANAVVTSKKHPEMRNRYLRLRKRRGHKKAIIAIARMLLTALYHMLKNGENYNAELYRKSDLPPVDREITVEQALIIARNQGYKIKSATA

SEQ ID NO: 183118 - protein, 320 aa, unidentified
MTVNADKIQFVLGCDVAKDTVTFFDSHTRKTFTVANTTAALKAVLKPYAGCSDRLAICEATGGYEDALLNVLLSLAIPAHRADAAKVKAFILSYGVRAKTDPIDARYIAEYGLARKGSLPLWQAPAPQDARMKLLVCRRADLVAMRVQEDNRLKAPRNRPIAKEIAGHIAEITRRIETIDRQIEAIVKDNQRLKERQAILRSVPGIGKVIAPVLLALMPELGRIDRRQVASLAGCAPHPRDSGTHRGRRFATGGRRQLRPLLFIAAMAASHSKSHLANTYKRLLAAGKSKLTALGAIMRHIIVIANARLREYENATVRLT

SEQ ID NO: 183119 - protein, 421 aa, unidentified
MEETNEPAELVERVAALDIGKAALTACIRVPHEDKPGRRCQEVREYATTTRALLGLADHLRCQGVTLVVMEATSDYWKPPFYLLEAEGFECWLLNARHVKNVPGRPKTDKLDAVWLAKVAERGMCMPSLVHPQPIRQLRALTRYRRTLIRERAREKQRLEKILEDAQIKLSAVVSDPFGVSGRAMIEALIAGQRNPWALARLARGTLRNKTKILEDALTGHFGDHHGFLCQMMLERIDGLTAQIGRLDARVEQAIAPFARQVTQLDEIAGVGTTSAQELIAEIGVDMSRFPTAGHLASWAKFAPIDNSSAGKKKGSSTGKGNPWIGGTLGEIVLGASRTHTFLAERYQRLARRRGKKRAIVATGNTVLTIAYHLLSDPTTRYTDLGPGFYDSKAGRERHARNLIRQLEHLTGKKVALNEAA

SEQ ID NO: 183120 - protein, 366 aa, unidentified
MKKSITPIGTPVGIDVHKRRCRVVELQKGKVQVRKSIANTREDWRELLTELPPDAEIGLEVSTAGYFAMSVLEEAGWRERSHWIHTAGIDSNRRQKNDRLDAERLARKLAAHHLDPLPEAWFPPPEIRPLRLRARARCWLVALRTQCKNHLQSLLGMQGLQAPGSDPFGAAGQRWLAEQKLPLPLTESIPQIQRLLKLLEEEIKTSEQYVRAAEGQFREIALLRTIPGIGPILAPLIWSELGTMERFRSAKALANDTGLVSSFYDSGDVQVSGGITRQGSRWLRWAFVTAASVAMQYPNPFARRYHRLRRGKKPNVAKAAIAHSLARCAYGVLKHGCPYREDRWGRKVGAREQETRAGARSTKTVV

SEQ ID NO: 183121 - protein, 365 aa, unidentified
MKKSTAFIGLDVHKESIEVAIADQAEARHYGRFAGTAAAVDQIARRVGSRGRELQFVYEAGPCGFWIYRRLTRKGYGCMVVAPSMMPRRSGERVKTDRRDCMNLARLARSGDLTAIYVPDERDEAIRDLVRAREDSVCVQRQARQRLQALLLRNEIRYAGKSAWSTAHRRWLANLKLPDPAQQIAFEEYVQSIEEADARLKRLAQVIASHLQTWRWKPLVDALQAFRGIETIHGVRIVAELGDLTRFDSPRKLMGYLGLIPTEDSSGARRRQGAITKTGNRSARRAFVEAAHQYSHPARVSWVIARRQGGLPKEVIDIAWKAQLRLCARFRTLCARGVNRNKVTVAIARELCGFIWSVGQIVKPV

SEQ ID NO: 183122 - protein, 339 aa, unidentified
MQVTTVGLDLAKDVFQVHGVTADGTVVFNRSVRRSPLLPFFEKLPPCLVGMEACGSSHHWAREIGKLGHEVRLMPAFYVKPYVKRGKTDAVDAAAICEAVTRPTMRFVEVKGPEQQALLGLHRVRDLVVRQRTQVINMIRGLLREFGHILPKGPGAAIRFAKSCLAGDLPDIPDLAKGLISTLCDQLTGLCGRISMYSKLIERHSRLDKRAWRLRSIPGVGPMTASAIVATIGDGKQFRNGRELAAWLGLTPLNRSSGGKERLGRITKKGDRYIRKLLVLGMTSRVQRARRHPEQVDPWTAKMLERKPVRLATVAMANKTARIIWAVLTRDTEYRCSTA

SEQ ID NO: 183123 - protein, 435 aa, unidentified
MPFFARSGHHHLFLEEVMAKRRRKKTGKVKVLHVLQPNASGIDVGATAIYVAVPPDRDAEPVRHFDTFTEDLHKAAKWLKTCGVQSIAMESTGVYWIPVLQIFESYGFEVVLVNARHVKNVPGRKTDVQDCQWLQYLHSVGLLAGSFRPTEDVCAVRSLLRHRDNLIKMASSHVQHMQKALTQMNVQIHNVISDITGVTGLAIIDSILAGERDPQKLAALKDRRIKADQSTIAKSLEGDFRSEHVFTLKQALQVYRYYHQMITECDREIESLVNDFDSRINPDETPPPPSRSRKRKPKGNEPNFDLRTHLYRILGTDLTLIDGIDVTTAQVFFAEIGPDLSKFKSPGNFCSWLCLSPNNKITGGKVISSRTRPGKNRFAQALRMAAQGLWNSRSFLGLYFRKMRARHDSAKAITATAHKLARIIYHLVKNGNKRD

SEQ ID NO: 183124 - protein, 394 aa, unidentified
MFYIGIDIGKRSHVASIMNDEGKVVLKGFSFPNTIEGGEKFLGKIHDFSSLPDDFTVGREATGHYWLAVFSFLHEKNFLIHVLNPIQTDGWRKGTEIRKRKNDIIDSVLIADLIRFGSFVETTLSDENIFSLKQLSRYRTYLVGTASDFKRKIIAVLDQVFPEYDTVFGKAGVFGKASKELLLEFSSPETLNEISADTLAKLLSDASRNRLGIEKANALKNAASRSFGITFAQETFTFQLRSMIEQLKFLELQIKNTETEIKKIMATLHSVIETIPGIGPINGATILGEIGDISKFSNPTKLVAYAGLDATVSQSGQYQATHNVMSKRGSPYLRKALFSAALIAVQHDPVLKAFYEKKRSEGKHHLTALGAVSRKLCYIVHAILKKNEPYEIRM

SEQ ID NO: 183125 - protein, 356 aa, unidentified
MPKRTSKRTRVVIGGVDTHGRTHHAAVIDQQGRLLGDREFPADSGGYRQLLGWLGRHGQLEAVGVEGSGSYGAGLTRLLLDRGVNVVEVDRPDRRTRRQRGKSDPIDAEAAARAVLAGVATAPAKRRDGIVEAIRALRAARSGAIKARTAAINQLKGLLVTAPASVREGLDALPRAALVVTCARLRPDEAALDDPVQGVKAALRAVACRIHQLDEELSQADQRLAALVGRAAPRLLKLHAIGVDHAGQLLTTAGQRPERLRGEAAFAHLCGAAPIPASSGKTHRHRLHRGGDRDANRALHLAVVVRMRWCPRTRAYAERRTKQGRSKPEILRCVKRYLAREVYHALVADFEALNAT

SEQ ID NO: 183126 - protein, 387 aa, unidentified
MSQPIATLIPAAVDYERTLVLAIELSNKSWVLAAQVPGLPHTKAKRTVNPEAEALLAAIAGYRARAAATGRSIERMIAVYEAGWSGFWLARWLMRHGVEVHVIQPSSVPVDRRMRRAKSDGIDAELLLRTLLAWLRGEPRVCSMVPVPEEADEDARRCVRERSELISERVGLTNRIGAVLATLGVSDYNPLLRNRKRRLTELRTGLGEPLPRNAHAKIERLLARLELVLAQIAELERERDAVVETEASDKASKMIQQLTSLRGIGVQSATVLVREAFVRRFANGKALGSYAGLASSPFNSGGIEREQGIGKAGNRRVRTVMVELAWLWTRYQTNAAQVCWFRERVGPTGRRVRKIMVVALARKLLIALWRFVIDGVVPEGAVLKPAA

SEQ ID NO: 183127 - protein, 341 aa, unidentified
MHYIGLDVHKKTISYCVKDTSGRVCQEGKVGATRWELDAWLKTLPQPWTVAMEATIFTGWIYDHLKPHAAAVKVAHPLMLRAIAAAKKKNDRIDAGKIADCLRCDFLPECYMASTEIRERRRTLRYRQLLVRQMVQLKNRVSGLLMETGVSHNKQRLHKVGYFQELLASSDAISEGIRPLLQVSRDSITRLQRTEAAIIRSLQRDPLLAERVRRLQTIPAVGKVTALTWALEMGDISRFRSIRQAISYCGLCGDEKRSAEKVARTPLSKQRNKHIQRVLVEAAKLAPRRNADLALVYENAKNKGNANLATLAVARKLVAYMLAVDREQRDFAPIREFSATA

SEQ ID NO: 183128 - protein, 355 aa, unidentified
MNVKKYIGMDVHQETISIAVMNGEGKLVMESIVETKASTILQFVQGLHGDLHVTFEEGTWAAWLYDLLKPHVTELVVCDPRKNALLKEGNKSDKIDARKLADLLRGGYLRAVYHGENGLRTLKELARSYLTISQDLTRVMNRVKALYRSWGIACGGQQVYAPRHRAEWLNKIGEPGVRRRAEFFHQQLDAVRALRQVVRRDLLAESRKHGATKLLRQIPYIGPIRAALLIALIQTPHRFLTKRQLWTYSGLAIETRDSAQYCYVAGQLQRSKKPQQLRGLNENHNHDMKAIFKSAAAMASRREGPFQDFYLELLTKGMKPAMARLTLARKIAAITLILWKKGAHFDAEQLKPQAA

SEQ ID NO: 183129 - protein, 328 aa, unidentified
MKKEKEPKQYCGIDVSGNTIDVCYTKTDGTMEWGQYENNRMGFKQLLKFCGTDYHYIMESTGVYHLPLAFFLQAQECMYSIINALQIKRFIQMNLERNKSDKKDAFHICNYGIMNDPEVYEMPERQYFECKSLNNAIEGITQELTSFKNKLHALSKLEIDKKAIEKSYKQIIKALSAELLKLESELSTKLSTWQPELVKLVSSVVGIGKRATSLLIVSTQGFKHTSSYQQLISYAGLSPKEYTSGSSIKGKVRICKQGGGRLRHVLYMCALNAKETNKECKALFDRLVAKGKNKKLAVIAVCNKLLKQVFGVVKNQTMFDRNYLQKTA

SEQ ID NO: 183130 - protein, 328 aa, unidentified
MENKLHFIGIDVAKTKLDVDMLRPDGRHRSKKFANTPKGHNELVSWLCGHQVSNAHVCMEATGTYMEDVAAHLSDAGYLVSIINPLLSKAFVQSQGIRSKTDTVDARQLAYFCREKRPVIWEAPHPVERALRALVLRHQALTEMHVQEQNRRESAREVQLPSIDMHLLWLETELKRIEKQIKDLTDDDPDMKHRRKLLDSIPGIGAKTSAVLLAYVGLKNRLLEARQFAAFAGLTPKQHESGSSIRRVSRMSKMGHMSLRRALYMPAMVTLYKTEWGRIFRERLEKSGKNAKLIIGAMMRKLAQVAYGVLKSGRPFDATQHTENACMA

SEQ ID NO: 183131 - protein, 466 aa, unidentified
MARSKPKASRPAPPAPALPPHLAAANLHAAGIDVGAEAHFVAVPPSDDPQPVRGFGAFTADLEAIAAWLVACAITTVALESTGVSWIPLFELLEARGFEVLLVDPQQVQKIKGRPKSDVHDCQWIQRLHTFGLLASAFRPADQVCVLRSYLRQRAMLLTYAAHHIQHMQKALTQMNIKLQHVVSDITGVTGLAILRAILVGERDPAQLAQRRDYRCKHDEATIARALQGTWRDEHVFALAQAVALYDVSHQKITECDRHIEAYLQTFADRREGQPLPPAPRPRKRGRNQPGFAVREPLHRITGVALTQIEGLDETTSLVILSEIGLDMHRWPTVKHFTSWLGLCPHHRVSGGKVVSRRTKPCANRAATALRLAAACLHHSQSALGAFFRRMKARLGAPKAITATAHKLARLVYSMLKHGMAYVRQGMDEYEQQYRDRTVKNLTRRAKTLGYTLVQTPEGTLKGALV

SEQ ID NO: 183132 - protein, 408 aa, unidentified
MEVMYPRCAGLDVHQKTVVACVRRQRKTKAEHEVRTFGTTTKALEDLSTWLHENGCTHVAMEATGVFWKPVWYVLEDGFELLLANASHIRNVPGRKTDVNDATWIADLLAHGLIKASFVPETAIQEMRTLTRTRKQLVRERAKHVQRLHKILETANVKIGSLVSDLLGRSGRAVLEAIADGETDPARLIDRTTGRLRASRESLQEALRGHVTEHHRFMLRLHLDQIDALDKAITTVDTEVGKTVEPFRDSVDQLKSVPGVSDIVAQVIVAEIGTDMKRFATAGHLLSWAGLCPRNDESAGKRRSTRLRKGGNWLKTTMVQAAWSAARTKESYLQAQFLRLRSRRGPKKAVIAVAASMLTSVYHMLKNGTFYEDMGGDYFERRDHDRTKRRLLARLAGLGYEVELRPAA

SEQ ID NO: 183133 - protein, 429 aa, unidentified
MQNESTPGARGPVFCGVDTHADSHWLCVLDWRGRKVLSRRFPADAAGYEALAGAIAAAGEPACVAMEGTSSYGAGLTRHLASLGMPVREALSPARTQRRRPGQGKCDESDAERAARAAMSGSKLGTPKSQDGWVDGVRCMLAARSGAVKARTSAINTARSLLTTAPEGLRSRFRGMAGPRLMEELPSVRAEGALGAALGALADLWAAARDAALDMERAIEASLEENCPALLAMYGCGPVSAAKPAVAAGDNPGRLRSEASFAAICGACPIPASSGKTVRHRLNRGGDRQANSALHEIARQRVMRDPETAEYAERARARGKSDREVMRCLKRYVAREAYRALMRPHEVRRPEDASGLVAARRAARVSQVRAASILGTSEKYISMLERGQRELKPIRRAYEAWVEAGLPLDWDRQAFEAERKMDSKKHLAK

SEQ ID NO: 183134 - protein, 350 aa, unidentified
MVVVGADVHKRTHTFVAVDEVGRKLGEKVVAATSAGHADAVMWARERFGVQLVWGIEDCRHLSARLERDLLTAGQQVVRVPPKLMAQTRASARTRGKSDPIDALAVARAVLREPDLPVASHDEVSREFKLLVDRREVLVAQRTATINRLRWRVHELDPERAPNPKALNLTKHREVLRTWLDTVPGLVAELAREELADITRLTEAIDALAKRIGQRIAQVAPALLAVPGCGELTAAKLVGEAAGVTRFKSEAAFARHCGVAPIPVWSGNTAGRVRMTRSGNRQLNAALHRIAVTQIRLNGLGQTYYRHRLAAGDSNPEALRCLKRRLSRVVFSHLHTDHQNRTQPCQPAAA

SEQ ID NO: 183135 - protein, 385 aa, unidentified
MDVAVNRTTKNGDKHMKSINKYVGLDVHKDTTVIAVAESGREGEVRLYGQIDSDLAALEKVLRKLGGENVILHVVYEAGPTGFVVYRRLKQLEIDCIVVAPSKIPQTNGPRQKTDRRDAVQLARLHRAGELTAIHVPDAVDESIRDLTRARADAVHDRTRAKQRLKSFLLRLGYRYSGSANWSEAHQRFLRRLTLPLPALRSVLEEQLLAMDQAVQRVARLDELIAAQVPQWRLYPAVQAVMCLRGFQLTSAAIIVAELGDVRRFAHPRHLMAFLGLVPKENTTGNTRRLGAITKAGNAQARWCLVEAIQKALTPPKVSARLSLRQQGQPTLYRELGWKAQVRLHKRGWHLLHRGVMKAKVNVALARELTGFLWDLLRQVPAPEA

SEQ ID NO: 183136 - protein, 319 aa, unidentified
MLIGIDVAKAELVVAARPSGARWTTPNDEPGVRALVARLRADAPALIVLEATGGYELLAVAALAAAGLPVVVANPRQVRDFAKATGQLAKTDRIDADVLALFAERVRPAVRPLPDADAQELDALLGRRRQLLEMLQAERNRLGQVFGRGRQPVKKSLTAHIAFLERELRIADTDLGAMIRESPAWRERDDLLRSVPGVGPVLSLTLLAELPELGRLTRREIAKLVGVAPLSRDSGTMRGRRFVQGGRAGVRAVLYMAALVATKRNVVIRALYQRLLAAGKPKKLALVACMRKLLTTLNTMARTHQRWSLDYATAARHTA

SEQ ID NO: 183137 - protein, 348 aa, unidentified
MLYVGLDLSRKRLDWHALSAGGELIGRGASPPDRDGLAHLVHEVDREHGGPVLAAIESMTGARFVHDQLELAGWDVRIADAQRAKGIAPLACKTDRIDAWVLAELARRDLVPEVWLPGPEVRGERERARFRLHLVHKRTSLKNRVHAILFQHGLRAPIDDLFGAGGRRFLDRCELPEPWRSSVAASLYLIDVLEEQIDALERELRREGADHRYLQLLMSAPGIGWVLGYTIAAEIGDVGRFSTPAKLISYTGLCPRVHQSGEVDRRGALSKHGPPYLRWALIEAAHNAIRCHPPYHALAERQRARLGRQRGASVAAITVARKLAEASWWMLTRNRPFAPAGARVPLTA

SEQ ID NO: 183138 - protein, 491 aa, unidentified
MKAAGTKKQEKAEKPAKKAAKEGLGSAKQQHLPTRNRRKQRRELARKIQTQDVSLEVKHPDAAGIDIGNTAHYVAVPPARDSEPVRRFGCVTAELKEMARWLKQCGIRTVAMQSTGVYWLPVYDVLEEEGLEVYLVNARETKNLPGKKTDVLESQWLMQLHTYGLLRNSFRPAQEIRELRNYWRQRNDWIRSAVRHMQRIQKTLTQMNVQLANVISDLSGVTGQAILQAILGGERDGQKLAALRDGRIKASEEEIARSLEGNWREDLLFVLKQEQEGYEFCQKQITACDLRLHEYLTRRPDRSAGADLPEETRKSRRKKKRGNAPQIPMREGMFRMTGVDLTRIDGIDVMTAATVVSEVGWDMSKWPTESHFVSWLRLCPDNRISGDRVIGKGRLATNNRLTVALKMAASGLKESDTYLGAQFRRLRMRLGAPVAIKAMAAKLARLIYRMMRYGMEYVDRGAEFYEKEHRQRQIQSVKRKAASLGLKIIAA

SEQ ID NO: 183139 - protein, 307 aa, unidentified
MKEEVVYCGIDVAKSRLDVALSGQRWEVPNTKAAIARLVQGLEGRAFKAQVICEASGGYEQTLLRALHRSGLAVTLGQSNRVRQFARASGILAKTDRIDAAVLVRFAQAIKPAATAAQPLPLLRLRELDTQRAHLTRLLVREENRLAQLNCAQLRRFTRSLMHKVQKQIATIDQRIKELIREDETLRCKAQKLISFNGVGERTAALLLAQMPELGQLNRRQVAALAGVAPFNRDSGTMRGKRCIFGGRRALRSGLYMSALTAVRYNPVLAPFYRRLLAAGKPPKLALTAVMRKLLIALNSALTPHPA

SEQ ID NO: 183140 - protein, 371 aa, unidentified
MVQNVCASKQLGCIHREDTPRKTEKEVSMKTLYYIGLDIHKKVIAYCIKTIDGRLVEEGMIEASRRALDDWVNGLPGPWIGAMEATIFTGWIYDHLDQYAVELKVAHPEMLKAITAAKKKNDRADAERIADLLRVNLLPECYMLPTEIRELRRVLRYRNHIVRTAVKMQNKMCGLLLEVGADYNKTRLRGKRYFTELLETVEDIPQSVKELLKLSRAGFEMFHASQKQLVKALRTNNLIQDRVHRLMTIQGIGEITALTWVLEIGDPSRFDSIRQAISYCGLCSAQRESAGKEQRGPISKKRNKHLQTMIIEAAKIAPHWNPKLAVIHERELKKGNRNRATLAIARKLVAYMMAVDKTCRDFIVEEEQKAA

SEQ ID NO: 183141 - protein, 461 aa, unidentified
MRKARKAAGRRGKKRVDVTANLEILHPHAAGIDVGNAQHYAAVPVGRDPQPVQTFGSFTADLHRLGQWLRACQIETVVMQATGVYWIALYEVLESYGFKVYVVNAKHTKTLPGRKTDVWECQWLQKLHTFGLLNNSFLPPEEIRVLRTYLRQRENLVAGAGTCIQQMQKVLTQMNVQLANVLSDLSGKSGLEILKAILSGERDLYRLAALADPRVQASRKEIAQSLEGHWREDLLFVLRQVHDLYFFHLDNIAECDRRIEAHLQTLQSKVDLASQPLPQPTSLPRRKHIPQTNLQEELYRIAGVDLTRIDGIQVQTAQVVLSETGVNMTHWEDEHHFASWLGLSPNHQITGGKVIRRGTKKVLNRATTALRLAAQTLHHSQSYLGAKYRRLRAKLGAPKAITAMAHQLARLIYRLLRFGTEYHDKGMEHYQRQYRKNQIEWLKRQAAQLNMQLIPNTGVAG

SEQ ID NO: 183142 - protein, 411 aa, unidentified
MDTLYPRCAGIDVHKNSVVVCVRCAGPAGKAAEQVRTFAAMTADLLALSDWLADHRVTHVAMESTGVYWKPVFNLLEARFAVILVNAEHIKKVPGRKTDVKDCQWIAQLLQHGLLKASFIPPEPIRELRDLTRQRTQLVEERTAAANRIHKVLEDANIKLGSVATDVLGTSGRDMLEALIAGRTDPQQLADLARKRLRAKIPELRRALHGRVTEHHRFLLRMHLDHIGHLEGLIGRLSARVEELMAPFARDRERLETIPGISQRVAETVLAEIGNRMEQFPTAGHLASWAGMCPGSNESAGKRRSGRTTKGDRWLKRALVQAAWAASHTKATYLAAHYRRLAKRRGRKKALVAVGHTLLVIIYHVLQRGTTYQELGPDFLDRLEPERLTRQLVKRLEALGHKVTLEACPAA

SEQ ID NO: 183143 - protein, 430 aa, unidentified
MKSNTQNAKIEAITEKTLVLGIDVGSEMHYARAFDYRGIEYSKKPFKFSKTEAGFATFKEWILDLKERHEKDKVVPGMEPTGHYWFNLGKFLQDNEMKPVLVNPHHVKKSKELDDNNPTKNDRKDPKVIAGLVREGRYMIPYLPEGVYADLRTASNIRFQLQAELTRIQNRISRWFNIYFPEYKTVYGKPDAKSGMLILKAAPLPEDILTLGIDGVNQIWRDAKLRAVGKARAKTLIEAAEHSVGSKEGAVSARMEIRMLLEDYESRNIRLQEVMALIEGLVKQIPMAEKLLEIKGVGIRTVSGFLAEVGDISRFNNPKELQKLAGLALVESSSGKHKGETTISRRGRKRLRYLLFEVAMSLVAKNPEFRELHNYYTTRRLNPLKKMQSLMAIAAKLIRVFYAMLTKGVDYDPKKMVSDIKRPAVYLQAA

SEQ ID NO: 183144 - protein, 328 aa, unidentified
MNTTYYIGLDAHSSICTLCVVDPRGQEIDNRTIVTNGRLLVDYIKSLGGKIIIAFEECDLSCWLFDILHRHAHEVIVCNPTQNAQYKRAKTDKLDARNLANLLRGGYLKSVFHDGSKREKLRILMSSYQDNVQEIVRLKNRLKTTKRRAKLFSKQDIPSHASFIEERLQAQLSQSLITHEKYQALITKYITCFKEAKFLMSIPGIAYIQSAKIIAQVIDPARFENKYKFFAYSGLVKHPRISAERKYGSTRIWGNRTLKCVFKMAAHSAIKGDNALRKLYEHLRDRGLSDYSARNAVARKIAVLTLTLWKNSKFFDEKIVIANLPVKG

SEQ ID NO: 183145 - protein, 412 aa, unidentified
MKDLLEISCGLDVHKEKIVACILTGPLGKPTRSEIREFTTLIPDMIALRDWIVSQNCHHVAMESTGIYWMPIYEILEDAFSGDITLLVVNARHMKNVPGKKTDMRDSEWISTLLRAGLLNGSFIPEKRIREFRDLNRYRKSVIHDITSQKNRIEKFLQSSGFRLSSFISDIFGASGRNIILHLMEHGQIDKAALDSCLKTKTRNRIDEILMSVNGTLSEHQKAFLRILMTHYDSLKKHLAEIETSLEEDMAPFTLQVEQLNSIYGISTTASCAIIAEIGIDMEPFKTAEHICSWAGLCPGNNESAGKRKSASVTKGNPYIKSMLCEIAWVIAGKRNTYLSAWYWRIKQKKGAKKAIVALARKLLVIIYTMLKQGTLFDESCFETRRKNCEQKQLSRYIRELEKHGYHVEAQS

SEQ ID NO: 183146 - protein, 326 aa, unidentified
MTSLPSPTSDDRLSVGIDVAKATLEVAISGHAKTLAFANDEAGCAALLAELSGRSVALVLFEATGGFELPCATALQLAGLAVAVINPRQARDFARAMGHLAKTDRIDAAVLADMARTLLARGDLSKLVKPLPDAQQLELQGLVTRRRQLMAMKLAEDHRMKMPGVRQRRSLNTIIKALDRELARVDKDLQAFVGTNHAELAALLDSVKGVGKATISTLLAEVPELGKLSGREVSALVGVAPINRDSGTMRGKRSIFGGRPDVRRVLFMAALVASRHNPVIKAFYQRLLAAGKPKKVALVACMRKLLTILNAMVRSGKPWNQALHLG

SEQ ID NO: 183147 - protein, 411 aa, unidentified
MELVHPRCAGLDVAKDEVVVCVRVPDGHGGRDQEVRTFQTFTSGLEALAGWLAGERVTQVVMEATGQYWKPIWYVLEEGGFELLLVNARHVKILPGRKTDVCDAAWLAELLEHGLLRGSFVPPAAIRELRDLTRYRKRLIQAHSAECQRVQKTLEDAGIKLDSVAADVLGVSGRAMLAALVGGERDPQVLAELARGRLRAKLPQLRQALRGRFSDHHALLLRLALAHLEHLEGAIATLDTEVDRVIAPFARARDQLATITGVGKRAAETIIAEIGTDMTVFPTAGHLASWAGRCPGNNRTGGKRRSGKPTKGNRWLGEVLIECAWAAARSRDTYLSAQYWRLARRIGKKKAAVAVGHSILVIAWHLLTDDCDYADLGGDYFVRRDTDRQRQRAVAQLQALGYRVTLEPPAA

SEQ ID NO: 183148 - protein, 334 aa, unidentified
MYYIGMDIHKKNTQACMKNEDGKVLLAGRFPSRAKDLNAFIDKVEEAGGPASFVIESTGFSIPIYDVIAGRGHEIKVAHPLKIKALTTGRAKTDKNDAEMLAELLRVKAIPASYIPPAELRQLRELTRFRQMLVRNTTQIKNEIHAFLAYRGIETPAALRSPFSAKHQEWLRSLHLSQVDDLLDILVTLRTKIEKTETDIERASQKKEEVELLKTIPGVGDVIANELMAEICDIERFSSAENLYSYAGMVSSAHQSGEKGWTGPITKQGNASIRHIMVEAAFSHVRYCRDSKLTLFFERKKAQKGTKKAIVATARKMLGIIYHMLKEREEFHAH

SEQ ID NO: 183149 - protein, 376 aa, unidentified
MKKDSTEKPAQATAGKSSPRSTKRLQGRLTIGLDLGDRSSRYCMLNEAGETVSEGTMATTRKGLDQLFGRMPRSRVALEVGGHSPWVSRHLGRLGHEVIVANPRKVRLITQSSRKSDRLDAQALARLARVDPELLSPVRHRGEAAQMDLMRIRARAVLVEARTMLINSARGLAKSCGERLAGGDAKYVNESLMEPLSEPLRQALGPLLAQVRSLTEQIEACDQQIRQLAHERYPETGRLMQIRGVGPLIALTYVLTVDDPTRFRRSRDAGCYVGLRPRRRQSGGRDPEMHISKEGDPYLRKLLVQGAHYILGPFGPDTNLRRWGLRLAARGNKNAKKRARVAVARKLAVLLHHLWVSGEGYEPLRVSQPPVAAAAA

SEQ ID NO: 183150 - protein, 343 aa, unidentified
MDYFAGLDVSLKSTSVCIVDGTGKIVREVKVASEPEALLTVLRDSAYRFKRIGLEAGPLSQWLFSALAEADLPVICVETRHMRAVLKAQINKTDRNDARGIAQMMRVGLYRPVHVKTLRSQKLRMLLTHRKLLQAKAIAVENDLRATLRNFGLKVGAVGAVKFEARIKELIDNFPDLVALVEPLLVVRRVLREQISILHRRVLAAVRNDEVCRRLMTVPGVGPVVALTYRATVDVPARFRKSKSVGAVFGLTPARDQSGESDRPGAISRCGDEMMRTTLYEAAQVMLLRSAKWSWLKAWAMKIARHRGMKKAIVALARRLAVIMHRIWIDGTEFRWTREAAAA

SEQ ID NO: 183151 - protein, 371 aa, unidentified
MQTLKEYTLEATPVASAEELKNRKGPKAKRIAIGTDTHLRGYQAARKVDNAAIGAVANLRSETELLLYVEKQCEQAEEVVVAYEAGPLGYGLYRKLAERGVKCLVCVPDSTQQQKKRRKNNQIDARTLTSHLFNYLNGNEGALQLVRVPTPEQEQARLASRQHDQLVEERKRLGAQGNGLLLSQGFGSCKHWWRPKALSRLEQLLPGWLFEMLRTWVDLLRALDEKIQKAKAALSKGCSGPRPKGAGANSLVQLRSEVLDWNLYKSRRKIACLGGMVPSEWSTGESQRRGSITKVGVPAIRRIMTEMAWRIIQFQPQYPPVQKWQEVLGGTNRTLKKKAVVAIGRQLIVDLWRLETGRATAKELNLVMIGG

SEQ ID NO: 183152 - protein, 392 aa, unidentified
MLFVGIDVAKSKHDCCIIDSNGIIITDSLRISNTKEGFDTLYTSIISALESTDFSNVKTGLESTGHYSTNITNYLYSKGFHITVLNPLATNAFRKAGTLRKTKTDKCDAKVIATMLFSDESKSYSPSSYQIQELKSLTRHRYRMIGYRSKLKLSVTRLIDIIFPELPALVWSIHQSSSYQLLLELPCPDEIRRCHLTHLTNVISKASRGKYGREKAIQLRELAANSIGSSNRSLTFELQQTIRLIQSVQVEINTLDKQIKLVVDELNTPLMTIPGIGYTIAAIILAEIGDINNFSSPAKLLAFAGMEPSTYQSGKYNASKTPMVKRGSTYLRWAVMQAARLVSMRDSTFAAYMAKKRSEGKHFNVAQSHVGKKLIRVIYSLLKNNTAFVPQM

SEQ ID NO: 183153 - protein, 338 aa, unidentified
MEKIPVYVGLDYHMSGVQVCVMDRSGTVMMNRGVSNHWKAIAMEVERYGTPVRTAIESCSGAANLADELVNQAGWSVDLAHPGYVSRMKQNPDKSDFSDARMLADLVRVGYLPRVWLAPAEIRELRLLVRYRQQLVDQRRHVKLRIGAILREQRIGAGPAGRWSLPWIVWIKTNCDLSAQGRWVIERHFETLAELGVKISAAEDQLAMVCGEDPLVQKLVGFKGVGYVTAWILRAEIGRFDRFATAKQLSRFCGLSPRNVSSGTRQADAGLIHAANKQLRSALIELAHRVSRYDGRWRQLSISMKQRGKPASLVAAAVANRWTRHLYNQMCPKPARAA

SEQ ID NO: 183154 - protein, 370 aa, unidentified
MLDTTTFVGLDVHARSIKAVSLDVMTGEVRCATFGYDAGAVAEWVRSVDPKARCVYESGVTGFDLQKRLSGLGVDCVVGAVSKMIKPSADRRRKNDRNDAEFLARMLSVGNVVEVWVPDDECEAARDLTRALEDARDDLSRAKQRLSKFLLRHGLAFDERTPTGRRKGNWTRAHWSWIESIRFAEGADNDVLAYYVDAVRRAAEEKARLEGLVEAEARKPRWRRRVDSLRCLKGVDTASAADLVFEAGEFSRFRNARSFAAWVGLTPSEHSSGESDRRGAITKAGNKHLRKALVEAAWHYLTCSGRPKEPARGQAPDRGARRHAAKGVRRLVERRESLLARGVHNNKANVATARELACWVWAVGLMAEEA

SEQ ID NO: 183155 - protein, 342 aa, unidentified
MSEVTIIGIDLAKRVFQLHGARADGSVVFRKKLSRGQLLVFFAQQPNCVVAMEACATAHGWGRELEKLGHSVRLIPPVYVKPFVKRQKNDAADAEAIVEAALRPTMRFVAVKTEDQQARAMLFRTRQMFVGQRTQLINALRGHLAEHGLVAATGTAQLKRLADAIEDSNTALPEGVRALGQMYLAQIEGLNARVAELDQKMRTAAKVADIARRFQTMPGVGPITALAIETFAPDLTTFQRGRDFAAWLGLVPKQHSTGGKARLGKTSKMGQRDIRTLLVSGAMAVLQAVERFGTPNSGWLTRIRARKPRMVVAIALANKMARGLWAMTTKQEDYRNPVATMA

SEQ ID NO: 183156 - protein, 337 aa, unidentified
MKSWSVTVLSETSVLKKFSQNPSPEALHGFLTRSYPGAEYRSVYEAGFCGFWIHERLTALGIDNIVVNPADVPTKSSEKLRKTDTVDSGKLARSLRANELKGIYTPDSVSLEMRSLIRLKNSITKDTTRQKNRIKSQLRYLGIEIPPEFLEPFSNWSKRFFAWLKKVETLTPSGRQALDIQIRHLEELRRQKLEMTRALRTLAKTDRFREPLRLIMTVPGFGQATGMAFLSEICDIARFRNAEQLAAYIGMIPMCHSSGEKDGTGDITVRKHAIMRCNLIEAAWVAVRQDPAMNLFYTEQCKRMPKSKAIVKVARELVNRLYFVLKHQTEYVNCVVS

SEQ ID NO: 183157 - protein, 347 aa, unidentified
MSKLYVGVDWHKRTSTWVAINEERQKVYSRSWGCTPEEVHAAISSLPAETKDIILGVEPVCGWRWMTQICTERGVADVRVANPKRLREIAETAQKTDKNDAQTIAELLRMNYLPCAYRASDDIHGLRILVRQRTFFTRLGISTKCRIHGICGALGAHETAERPLLKAGRTAIQNGTNEELQDMYALMDEITAHQGRIERKIAVDIKDTPLYRIVSSIPGIGPVTGAAIMGEVGDFVRFKTPSALVSYAGLYPRERSSGGVQRFGGMSKEGSRTLRYSIIEAAMRVRDTERSRNLYSHYDSARERRKKPKQARVVLAHKMLTIMWHLVRRGMLYDDRAVKPAQREMTS

SEQ ID NO: 183158 - protein, 312 aa, unidentified
MTQIVCGVDVSSEALDARIGRDGAEARFLATPEGIEALAAFCREHQVALAVMEATGGYEKRAFTLLWSHAIPAAIVNPRNVHRFAEAMGFLEKTDRIDAGVIAWYADAKRIVAQEPASQAQERLKALVTRLRQLTELRTMQSNQRRLVGESDINRMFGEIMAMIARQTRELEHEIAALIDADPLWQKLDECFRSIKGVADRTVSRIMAEMPEIGTLSNKAVAKLAGLAPLAKDSGKSQGKRITRGGRANLRNILFVIVENVRRYNPDFAAFHKRLTEAGKAKKVIRIALAHKLLVQLNAKARDVRQELALAA

SEQ ID NO: 183159 - protein, 394 aa, unidentified
MFYLGIDIGKRTHVASIMNAEGKVVLKGFSFLNSLEGAHALLDRLNAFSATPDDFLIGMEATGHYWLALFSFFDEQGFYTHVINPIQTDGWRKGTEIRKRKNDIIDSVLIADLIRYGSFQETALANETMFSLRQLTRYRSYLVGTAGDFKRKIIAILDQIFPEYETVFSKVGIFGKASKAVLLEFSSPEEFNQVSAKVLAEALGLASRNRVGTAKAEALKSAAAHSFGIRFAKEAFVFQMRSMIDQLIFLEDQIKQTENEIEQLMASLDSVIETIPGIGPVLGATILGEIGDIHKFSNPKKLVAYAGIDASVTQSGEYLATHNVMSKRGSPYLRKALFQAALIASRHDPVLKAFYDKKRAEGKHHLTALGAVSRKLCYIIHAILTKNEPYEIRQ

SEQ ID NO: 183160 - protein, 418 aa, unidentified
MIDDVQWFVGIDWATQSHRVCLLDVDGRQVSERDFAHGGAGLSELRDWLLEKTKAAPGQIAVAIETPHGPVVEMLLDHAFLVFAINPKQLDRFRDRFTVAGAKDDSRDARVLGSALRTDRHAFRLLVVDNPAIIELREWSRMAEELQQERTRLANRIRQQLWRYYPQAIELTDDVADDWFLALWQQVPTPASAAKASEKTVARLLKEHRIRRLDAATVLQTLRKRPLFVAPGTTEAACVHIRSLAARLHLVNQQIKEAHRALDDLCAKLEAPTESPSGQNREQHDVTILRSWVGIGRTVSATLLTEATEPLRRRDYHALRALAGTAPVTRRSGKQCFVIRRLACNKRLQNAVYHWSRVAIQRDAASRRRYDALRRRGHGHARALRTVGDRLLYALCTTLERQTPYASNYQTAQVTAAL

SEQ ID NO: 183161 - protein, 409 aa, unidentified
MAEELIETTQIAVWCGLDVGKEEHHACALDTDGRQLFDKPLPQDEARLREVFTGLQSRGEVLVVVNQPNTIGALAVAVARDAGCEVAYLPGLAMRKAAQLMPGDAKTDARDAFVIATTALKMPDTLRAVDRDSEVLASLKVLAGYDDDLARESTRAINRLRSLLLQIHPALERVFAGTRLTNRLSLDLLARYGGPTGLAQVGPTRVKAWARKAKHRGVDALVDDVFAALGQQTVTVIGTGAVETVIPRVAEQVAAIKTQRAELAREVERLLDDFPLRDVLISMPGVGTKTAATILLAIGDGSGFPTAGHLAAYAGIAPVTRHSGKSIRGEHPARSGNKQLKNALFRSAWVASNCDPESAAYYQRKRAQGKKHNAAIICLARRRCDVIHAMLKNGTYYQPRQAEKLPAAA

SEQ ID NO: 183162 - protein, 315 aa, unidentified
MSEATFVGIDVSKKSLEVHVLPSGEHFSVNYDEAGLTALIQKLKTLQQLRVILMEATGGYEKLIAAELCAAGLNKVCISNPRFIRDFARSTGKLAKTDTIDAAMIALFAQMFNLEPETIPSQAEEQLKALISRRQQLTKIRTAENNRLEKATSPRVITSLRKIIKLLNSEIKNLDQDIEQTIRQNPVWRAKEKILRKVKGVGRVTASQLLATLPELGQLNRREIASLAGLAPINHDSGQFRGKRMIGGGRSAVRKALYMATLVATIYNPTIRNFYNRLLATGKPKKLALTACMRKLLIILNSILKNDPITICTQS

SEQ ID NO: 183163 - protein, 412 aa, unidentified
MVERLIERCAGLDVHKASVTATVRVPGDQGERRTETRTFRATTAGLVLLGDWLASFGVTLVGMESTGVYWKPVYYLLEDDFEVWLLNAQHLKNVPGRKTDVADSVWICQLVEHGLVRPSFVPPKPIRELRDLTRYRKALLAERTREVQRLHKVLEDAGIKLASVASDPLGVSGRAMLEALVQGTHDPQVLAELARGRLRAKLPALREALEGRFGAHHGLLVTEMLARIDQMDETIGRLSAEVARVAAPFSPLLALLMTIPGVSRRTAEVMLAEIGPDMSRFPTAAHLASWAGVCPGNNESAGKHGSGRTRKGSKWLRVALVEAAHAAARTKDSYLAAQYARLRGRRGPKKAALAVAHSILVIAWHLLSRGEPYTDLGADYFVKRQSHQAYRDRLVRQLERMGHKVTLEPTAA

SEQ ID NO: 183164 - protein, 424 aa, unidentified
MKPRRQTTKVRMEKLDDLYPHCAGLDVHKAVLTVCLIAGGTEGELAEYETSTGELRRLRDWLIEKGVTHVVMESTGVYWKPVWQILETGRFQLLLANARQVRNIPGRKTDQNDAVWLATLLRKGLIPASFVPPAEVRALRDLCRSRASLIHDRTRIVQRVEKVLEEANLKLDTVVSDLMGISARRMLDELGKGNNDPAALAELAVGRLRSKIPELIPALEGSFLPHQLFVLQELLQHHDELSSRIERFEQEIDRYAPPFEKAVERLIDIPGLDRRSALAVLAETGQDMSVFPSPQQFARWARVCPGNQESAGKRKSGRTGKGNSWLRAVLVQCAWAASHTKNTYLSAQFKRLVHRGSKKAAMGVAHSTLKIIWYLLHNQTRFKDLGADYFAKQNLEGQTRSYVNRLKKLGYEVTLTSMAAGAVA

SEQ ID NO: 183165 - protein, 393 aa, unidentified
MPQTSPTDLVVISVDPHKASWTAAAVDTALQPLEVIRVAVSAEGYRRLRRFAQRWNNHSWAIEGAAGLGAPLTQRLHADGIEVTDVPAKLAARVRVLSTGHGRKTDEADAISVGIAALTATRLNTASVNAAITALRALVEHRDDLVKTRTQTINRLHVLLTHLTPAGAPRGLTADRAADILRQLRPREPAAKTLRNLAVDLIAEIRALDRRITKAAVDINAAVESSGSTLTELSGIGTLNAAKILARVGTIQRFRSADAFASYTGTAPIAASSGDETRHRLSRAGDRQLNCCLHTMAISQISRDTPGRTYYRRKRAAGMSHREALRCLKRRLSDAVYRQLLRDAATLEGAGPAGHTGATPTSCAAGSHPITSTSDKSLTGPAKPHPTTSDRTA

SEQ ID NO: 183166 - protein, 317 aa, unidentified
MNDPTDVCVGIDVSKAHLDVACNPDGPVTRFDNDAAGHEALIEKIKTLTAHRVVLEATGGYERPAVAAMLAAKLPVVVVNPRQVRDFARAVGQLAKTDAIDACILARFAGAVRPDLRPLADEKALVLQEKIARRRQLVAMRTAESNRLGQSFGPAVRASIEAVLNTIDRQIKDLDDDLDQAIQDTPAWQAKVDLLKGVPGVGDQTARCLVAQLPELGSCSRQQIARLVGVAPINRDSGTMRGRRTTAGGRPAVRGALYMATLVATRHNPVIRSYYQRLVATGKKKMVALVAAMRKLLVILNAMVREQKPWTTTTGNT

SEQ ID NO: 183167 - protein, 363 aa, unidentified
MSTITIGVDLAKNVFSVCEMDSSGHVLRRLDLKRDAFALWLAQVPAGTVVAMEACSGAHHWARRCLEYGLQPRLMAAQFVTPFRKNRTAKNDRNDAEAIATAARQGNMRFVPVKDVDQQARLAWHRVREGYKTESLAIGNRLRGLLAEFGIVVGKSDAALRRVLAALDQHAALPGEFKELLRDLSAHWASLRAAIEACSARIEAHAQQDARCVRIGAIVGVGPITVDAMVASVGNAREFRNGRQLAAWLGLVPTQHSSGGHTRLGTISCRGDAYLRTLLIQGARSSLQRAKAVSVERCTPEQQWIRQLASRLLFGKVLVAIANKHARQLWAMLAHDLDYDPDAHVKHPMAQRLADQHALTVIA

SEQ ID NO: 183168 - protein, 409 aa, unidentified
MERVIERGAALDVHKKSVTVCVRVPGPDGGRRQEVQTFGTTAAALLALRDWLSAHGVTHVAMESTGVYWKPVYYVLEELFTCLLVNAAHVSKVPGRKTDVRDCEWLAQLLEHGLLRGSFVPPVPIRELRDFTRYRQVLVQDRTREANRLHKVLTDAGIQLASVASNVLGKSGRAMLAALVEGTTDPQVLADLAQGKLRRKLPALREALAGRFRKHHALLVSQLLAHLDYLDEALEILTAQIEEALGPFATEAARLDAIPGVGPRTTEILIAELGVDMRQFPTARHVASWAGLCPGTHESAGKHRAVRTRKGNRWLRAALIEAALAAINVRDSALAARYRRLVRHRGHKKAIVAVAHKMLTTAYLLLADGRTYQEPGAGYYDAQRKDRSVRRALQTLQRCGYRVSLEPAA

SEQ ID NO: 183169 - protein, 379 aa, unidentified
MQTITLYLGLDVHKDSITIAIAQAGPRGEIRPFGTITNSLHALERTLIRIRKAHPGARLEVAYEAGPCGFGIARRLKQLKVPCLVAAPSLIPKQPGSPFKTDKRDARTIARLLRAGELTGVYVPEPTDEAIRDLCRARTDAVDDLRRCRLRLKSFLLRHNYRYQGKANWSEPHMRYLRELVLPHPAMKAILEEYLQGIDAAHQRVQRIEASMLTLLETWRLKAAVQALMAFRGFQLVAAMITVSELGDIHRFAHPRQLMTYLGLVSVEHSSGPHQRLGRISRCGNGHQRWLLTECAEHYALPPKVSKELARRQEGQPPAVRALSWKAQTRLHLRFTRLLARRLQRNKAKVAIARELCGFIWALLRTQPCYTQPLAGTAS

SEQ ID NO: 183170 - protein, 421 aa, unidentified
MFSRVKIACGLDVHYSKIVGSIVTSDGTHETRTFTTDIDDTLKLKDRILTHKCERVAMEATGIYWYPIYNLLEEHVTVQVANPFYIKGIPGRKTDQIDAEWIGMLCLNGLIKPSIVPTREIRNIRDLVRTLTSFTHERTRHKNRVHKILVRAGIRIGAHLSKLFGPSGLKILYGLLDGKSIDTILLDLKSPRIAKKHDELVRSICGTLDENDVFLIRLELDSIEFVDQQIEKLKQRLTNLMTPMNEEINILTTIPGIGQDSAMKILAEIGNIDMFPSGKHLVSWAGIAPGMNESAGKKIPGHITKRGSKYLRTFLIEPAHAIAVMKTDNQLKRYFGRMVGRLGYKPAIIALARKLLMIIYHLLANHEPYFEEKFSKKKPITLPVASPSSMTEDQILKVMSNAFANMSEVERAKFVRKLNRI

SEQ ID NO: 183171 - protein, 412 aa, unidentified
MARRAAHAAVFVTRDGQRVGRLSFHTMSAGFAALKDGAQAAAQRVGAERVLVSIEPAGSAWRLLAQFLDGAGIAYRLVNSFTLRRQREGDDLHHRKSDYRDAEMVAQLVRDGRYLRTQRHVGPYARLMVLQREYRRQQNLLYAETNTLLDLVDQLFPEFHVVFKDVLGVTARAVLRAGLTPAKIGRLPLSALRARVRRAAQGRQAWLIRLSALQEVARASVGLRDEAEELACRVQQVLQRVDLLLAQCEVSKGRLTAEVMALPEGRRLAALPGLGPVLAAGLLAEAGPLSRFSNIKQLPKLAGVIPVEHQSGMYRGRYTPMGKKGRPGLRWVCYRAALCLLRHNEVFREAYQRWTGRAERPLTPMQALGACMHKLLRVAYAVARQANGILPATNPILPGDPVPALGRRCEVA

SEQ ID NO: 183172 - protein, 338 aa, unidentified
MRCYAGIDLHATNSVVVVLDEADRVLYQKRLRNDLTLILTALEPYRATVQGVVVESTYNWYWLVDGLMDAGYRVHLAHAPALPQYSGLKHADDEHDAQWLAHLLRLGLLPTGYIYPKAERAVRDLLRKRSQLVRHKTMVVLSLQSLLTRLTGSRLSLPRLRELTPERIQTLVPFPEHVQAVESSLTVLRCLEGEIRTLEDRVWEAGRTQPGYALLQTVPGIGPILAGTILLEVGDIRRFATVGHFASYCRCVGSEHVSNGKRKGAGNTKNGNKYLSWAFIEAAHFAIRYEAVIRNYYQRKQARTHPLVALKAVAHKLARACYHMLGKQAPFDLQRAFG

SEQ ID NO: 183173 - protein, 351 aa, unidentified
MDYRVYCGVDFHARQQTICSLTTEDGVMSTHELKHHNQAELRAFYAQFSGPVLVGLEASGYSPWFEQMLEELGHDVWLGDATEIRRRARRRQKNDRRDAELILDLLIHDEFPRIHRPTTNSREILRMLRYRHKLVQMRTIIKNSLHALSIQSGLSLRARLFTGVGLDQLRSLTMSPVMQYQRDQWLVGLESLNQQIVAATNWLGEQAAGDERVERVRTHPGIGLLTGLALVHTLEPVTRFRNQRKVAAYVGFDPQERSSGEKKRYLGISKAGSRVLRYLLVEAAHTAVKGDPELQRFYLRLQHRHGKAKAKVAAARKLLIRSYILLRDQIDYAEFGRRAVAARLARVASKA

SEQ ID NO: 183174 - protein, 340 aa, unidentified
MDKLTTIAVDIAKRVFSVYWVDARTGEIGARTMSRAKFEEFMRRREASRVVLEAGGSAHYWGRWLACHGHEVRLIAAQHVRAFVRTNKTDAGDARAIWEAASRPEVRWVTVKGEAAQAVLGLHRMRRQLIDMRRMQTNQLKGLLYEFGVVAPARVTEVQIEGWVAAGRVPQLIGARLGEQVERIAQLKREELALTRAITEHNAEDALAQRLLAVPGIGALGASALSADLSTGAKGYANGRQYAVCKGIVTRLSGTGGKVRPGAISKRGDPYVRTLLIHGARSVINHRRRTKRLSPWLSALLERRPLNVAVVALAHKMARTAWALAAHERTYQENYGAQAA

SEQ ID NO: 183175 - protein, 303 aa, unidentified
MSALVCGLDVHKDSIYATILNYEGKVINQMRMDNEKVLSYLAHYKVNKVAMESSTAIAPLYRKLAGKGFDVVVSHPKKTRYIAEAKIKSDRVDSKAIAELARLDALPLAYVPDVETSKLREKVRRRAFLVRERAKLKVKIKSILTYEGIKVPFDHGLFTLKGVEWLGSLNLESVDSYLRIMNIFNMEIKVLSKQLLGLAENDEDVRLLMTVPGVGYYSALLVKSEIGDINRFPFGERLCSYAGLVPSTHASGKTVWHGGVTKEGSRWLRWVMVQAAQTHVRSFDSTITCMYSRVAERRGRARD

SEQ ID NO: 183176 - protein, 445 aa, unidentified
MVRKSMKKRLEIIHSHCAGIDIGSREHWVAVDPDQDDEPVRCFSTFSDDLYALADWLESLNVEIVAMEATGVYWISLYEVLDARGLQVHIVNSRATRQVSGRKSDVLDCQWIWQLMSYGLLRGAFRPTDQVCVLRSLVRQRATKVQEQSRCVLHMQKALTQMNVQLTNVVSDLTGKTGMAILRSIVAGERDPMQLAKLRDGRLRADEATVARSLYGNWRKEHLFALTQALAHYDFEIEQIRECDQAISQILSDLPTLSQAEAPKPVKPLCNRQRTRAEQTALHQALFAVLGVDLTAVPTLGIETVLVVASEIGPDLSRFPSSGHFCSWLSLAPPTCISGGKPLPGKTPKALNRAGQALRQAAANARNSDSFIGASHRARLARMDTAKAIKATAHQLARLIYAMLTQGQPYVEQGIEAFEARRQARQLRALQRKASRFGLTLVDAA

SEQ ID NO: 183177 - protein, 412 aa, unidentified
MEVVYPCCCGLDVHKKSITACVLWAEARGKSRKEKKRFATFTHDLLQLADWLAQCGVTHVAMESTGVYWKPVWNILAEQFEVLLVNAQHIKAVPGRKTDQKDSEWIADLLQHGLLRGSFVPPRPTRELRDITRYRVSLVQEINRIANRIQKVLEDANIKLASVATDALGASGRAILEALLAGEQDAARLAEMSKGLLRNKIPELKLALEGRMTEHHRFLLRQLFEHLRFTESKRSEIEQEIEKRMRPFEDKVTRLCTIPGVDRVTAWGLLAEIGLDMNQFPSSGHLASWACLCPGSFESAGKRLSGKMRKGNVSLRRCLSQAAWAISMMKNNYLSALYRRIAARRGAKRAVMAVAHALLEIAYHMLKRKEDYRELGADHFDRIDVNRIRRSLVRRLERLGHKVTLEPVAQIA

SEQ ID NO: 183178 - protein, 377 aa, unidentified
MSKVRFLGLDVHADTIAVAVAEPDGEVRSLGVIPNRLESIRKMVAKLGPVKDLKACYEAGPTGYVVYWQLTALGVACEVVAPSLIPVKAGDRVKTDRRDATKLARSYRAGDLTAVWVPDADHEALRDLVRAREDARQDQHRARHRLSKFLLRHGRRPPEEVKKHWTLKYLTWIKEQVHFDQPALEATLLDYVHEVDHMAERIQRLEKAITEAIQKAPPVIRAVVEALQALRGVAQITAVTVVAELGTLSRFASPRQLMGYSGLVSSEFSSGNRIRRGAITKTGNAHLRRVIVESAWAYQYRPWLGGFLLKRQQGLDQEIKDIAWKAQWRLHTRYKKLSAAGKKKPQVVTAVGRELLGFIWAIAVQTEAQFQPQTKAA

SEQ ID NO: 183179 - protein, 335 aa, unidentified
MQIKHFIGIDVSKDTLDFSVVVDGKNLQHYCIKNSTREIKSTVNKFMKTFETTFDDTVFCMEHTGMYNLPLVKWLQCQQGKMWLESGVHIRKTLGLVRGKNDKVDSARIAMYAYLNRHQVRLWKAPRKLIERLAALLSQRARLNKARKQLNTANREQRLFLDKDIMNSLNKYTYKTVVVIDKQIIAIEKEILELIKEDEKLNRMYKVITSVHGIGFVTASYILVTTNEFININNPKKYACYSGVVPFEHSSGSSVRGKTRVSQMANKNIKTLLHLAALSTIQMQGDLQEYYNRKVAEGKNKMSVLNAIRNKLILRIFACVNQNREYEKNYCYKFA

SEQ ID NO: 183180 - protein, 364 aa, unidentified
MKRKVYVGMDVHKETIQIAILPSNTKALVKEQQIKHEEGQIKKFIQKLKSEGTEIHCCYEAGVTGYPLYRYLKTLGVNCIIAAPGKIPRQSSDKIKTDKRDAIKLARLLRSGELESIHVPSEEDEAVRDYLRSRDSLRLDLGRNRQRLMKFLLRKGITYSTTKYWTVSHYKWLNNLHFENEILQATFNDYYSRVRVQEENLKAMDQKIQEIAKSEPYREKVGILRCFRGVDYLTAMFLLSEVNDFKRFKTAGSFMSFLGLVPGEYSSGPKRKQTSITKTGSPRLRRILVEAAWQHRFPGTGSKVVAARRVGQSALVVSLAEKASLRLHKKFKSMQLRGKTPQVMITAVSRELSGFLWAAMNLVA

SEQ ID NO: 183181 - protein, 456 aa, unidentified
MSRKRKSSKKIGAPVLHCLNPNAAGVDVGATEIYIAVPPDRDEQPVRHFATFTEDLQAAAAWLKSCHIETVAMESTGVYWIPLFQILEEQGFTVFLVNARYVKNVPGRKSDVSDCQWLQYLHSVGLLRGSFRPEQAVCTVRSILRHRDSLVQMASSHVQHMQKALDQMNLQLHHVISDITGVTGLTIIEAVLRGERNPHTLAALRDGRIKASEGTIAKSLIGDYRREHLFTLRQSLEAFRHYQKLISACDTEIEQYLEAFESKVDPPEGSTPTSREEQKPKGGESTFNLQSHLHRIFAVDLTKVPGIHVLTTQTLLAEIGPDLSRFANGPAFTSWLGLCPDNRVSGGKVLSVKTRKVKNRAATALRMAAQSLHHSQSYLGHFYRRMRAKLGAPKAITAAAHKLARIIYHMVTTRQAYNETIFELQEQNNRWRLERKLRKQARELGFEVVAAKPVAI

SEQ ID NO: 183182 - protein, 342 aa, unidentified
MKDSIYDQYIAIDWSNLNMAIARMTKKSNKIIIIDVPSDVVELQTYLKNLRGTKILAIEETSTSQWLYTELEGYVDKILICDPYRNKLLGEGAKTDKIDAAKLVHLLKAGLMKEVYHSAEKFIYIRRVVSGYEDMVKAGVRLKNQRYALLRTCGKSGKEKDINLGVQGEQFVLECLDRQIKAYEEEKKGFEKEFVRLARKYPEIKHQKSLPGIGTINAVKIVSRVVSPYRFADKGHYLSYTGLVKLEKISGGRSYGKKNPRYCRQLKSVYKSGVLAAIGGNNPINDYYEHLIREKNYPAHNARNSACRRLAILSLGVFRSGKKYQPYRRDRVKGNKEIPSDL

SEQ ID NO: 183183 - protein, 377 aa, unidentified
MPAANTVHVAIELSVSSWLVAARLPGAEKARLHRIEGGDTAALLSVIAELRSSASKKLGGPAELVCCFEAGRDGFWLQRLLSSHGILAYVLEPTSILVNRRARRAKTDRLDAEGMLHVLGAWLGGDRRVCSMVRVPTPEEEDAKRPHREREYLVQERQRIQNRIEALLFTQGIRARPSLRSWERDMAELRTGDGRALPSLLRAELDRLRRRLMLVLELIREVESERDEALATADDATARKITTLQRIRGVGANVAAVLAREVFYRPFANRRQLASYVGIAPMPHQSGGMDRDRSISRAGNARARTTLIQLAWLWLRYQPGSALATWFRERVGALQGRTRRIAIVAMARRLLIALWRYVETGMVPDGVAIRAAAETTA

SEQ ID NO: 183184 - protein, 342 aa, unidentified
MKIIGCDFHPSFQQIAMVDTETGEHTERRLNREEAIVFYRSLNGKVLVGMEACGNTLWMERLLTELGHELRMGDASKIRAMEVRKQKTDRRDAELLLRLLLEERFPQVWVPSPQQRDSRQLLLHRQKLVSARRQFKNQLQHLALNQGLQQKQKLWTKSGRELLEELPLTGWTAQRRADDLELLDQLERRIAELDVSVQQEAASDPIAVLLQTHPGVGPVTSLAFVLTLGRIDRFASSKKVVSYLGLNPAEHSSGGQQKLGSISKQGNPMVRSLLVEAGQSAARLVPELKRAYQRLKHRKHSGVAKVMIARKLAVRLYWIWRTQQPYTATRMQGSPSHLVGVR

SEQ ID NO: 183185 - protein, 422 aa, unidentified
MITQQIDSFTAIVGLDWGDSKHDVCIQASTGEAREFDVIAHRPAVVDQWVKSLHDRFGGPIAIALELSKGPIISILQKYDFIVIFPINPSTLARYRSAFKPSRAKDDPTDAEMALDLLLRHPDRFKPLQPQSTDMRTLAKLVEQRRQLVADKIRLTNRLRSSLKEYYPQVLEWFDHIDTPLFCSFFARWPTLAQARRARSKTLQRFFHEHNMRFEKVLASRIEAIKNATPLTLDNAIIKPHRMIAQVLVEQLQLMLSAIKEFDAEIDSIAKAQPDYALFRALPGAGPSLAPRLLVAFGEQRDRFTSAEDVQKYAGIAPVTERSGKKHWVHWRWQCSTFLRQTFVEWAAQTINKSYWAGSYYRQQREKGCTYQAAVRALAYKWIRIVYRCWQTGVPYDEAKYLKALEYRGSTLLAPQKILKTA

SEQ ID NO: 183186 - protein, 360 aa, unidentified
MARSTLPAARIDVPTSFVIGGVDTHLDVHVVAALNQIGGLLGTASFPTTPLGYAQLIEWLLGHGPVVQVGVEGTSSYGAGLTRAFQAEAIDVLEVDRPNRQERRRVGKSDTIDAIAAARAVLAGKALGQPKTKNGNVEGIRVLGVARASSIKARTQTMNQIRSLVSTAPVELRERLRGLTIKQIVALCAAFRPGPDSTVETVTKLSLRILARRVLFLDAEVADIDQRRTALVREVAPKLMTAHGVGPHTAATLLVTVGDNPERLTSEASFARLCGVAPIPAGSGKTDGYHRLHRGGDRQANSALWTIVLSRMSTHPDTIAYVERRTKEGKQTKFIMRCLKRHVAREIFKLLPRQELLLTT

SEQ ID NO: 183187 - protein, 340 aa, unidentified
MKDVAIVGIDIAKQAFQLHGAAADGSVVFRKKLSRGQLLTFLSGLPPCLVAMEACATGHHWGREIQALGHEVRLIPPIYVKPFVKRQKYDANDAEAISEAASRPTMRFVAVNTVEDQAQGSLFRSRALMVGQRTQLLNALRGHLAEYGLVAPTGATRVEPLADGLSSAGHHLPPAIRHLASVFLTQIRALSDAIAELERQLKSRARCSVVTRRLQTMPGIGPMTAVAIDVFAPPPETFRSGRDFAAWVGLVPRQHSTGGKTRLGRVSKMGQQDIRRLLIIGAMAVVRWAVRKTPRPGSWLASMLAKKPKMLVAIALANKRARGLWAMLKKEEDYRVPATA

SEQ ID NO: 183188 - protein, 344 aa, unidentified
MHYVGVDLHKEQSWFYVSDQEGKRLISKSIPNSDAELKQIFESIPKPFKLGVEATRNWYFFVDLAEQYAEEVSLANSFELKAFAKRNKKTDKIDAKLICDVLRMGFLPTVNIPPKPIREIRELIRYRMSLVYERTFNINRLKNTLGKLGKECNGDLTTYKQLDKVQTEELPEIYKTVIQGHKERIRFLTEKIKGMKMYLEETFQEDQEIMNLTTIPGLSYLSAAIVKSEIIDVSNFASFNRLCSFAGLAPRVSQSGNKDIHGPLSKNRRKLLQWILLEVTPHFVKASIEKKKKFDELAKRKTYNIAKVALARDLLRMIYVVLREKREYYSKVIRSSAGVALQGV

SEQ ID NO: 183189 - protein, 368 aa, unidentified
MSNHPHYKVGCDAHKHYSLFSVLDDHGHLIQRTRVNHEPGAIRAFLSQFPPGTPVALETVGNWYWIVDEIEDAGCLPLLAHAARAKSMMGHVHKSDKLDAAGLATLLHLGTLPAVWIPPGDLRDERELPRTRMAFSKVRTLLKNRIHSTLAKYALSLDTDSDIFSPKWRPQLLQVLEHLPAETHRCVAQELELLDLLQTHIQRLEERILQRVEITPAIQLLMSIPGPAEILSIVIDRELGSIQRFPAPKHLASYSGLVPRLKASGGKVHYGRMIKQANNYLKWAFIEAANVIVRQRHHRNWRDKSVVGLYERIRQRKGHAVAVGATARYLAEAAFWVLKKGEPYREPLPRHPAGLKSPASPRQGQARA

SEQ ID NO: 183190 - protein, 343 aa, unidentified
MDQYVALDVSLQKTAVCVLNVSGRVLIEADVPSEPAALIAFIQTHAPRAARVGLESGPTSPWLWHSLKAAGLPVVCMDARHAHAALSVRPSKSDRNDARGLAEMMRIGWYREVQVKSLAAHERMALLGVRRRLVDMRVEIDGQIRGILKTFGLVVGRGNKGAFAQRARMLAQDHPVLSALIDKLIEVREVAVAKVAALDKEIRRFVRDDLTLRRFMTVPGVGPVTALAFRSTIDEPNRFKRARDVGPYLGLTPRRYQSGETDRQGGISKCGDRFTRTCLYEAASVLLTKVQRWSPLKAWGTRLARRIGSKKARVAIARKIAVILRCIWTDGTEFWWTKETATA

SEQ ID NO: 183191 - protein, 444 aa, unidentified
MTRKSCQQRLSRVHRHCAGVDVGSREHWVAVDPAQCEESVRCFSAFSDDLYAMADWLAALKVDVVAMEATGVYWIALYEVLDARGFQVHLVNARATRQVSGRKSDVLDCQWIWQLMSHGLLRGAFRPPDAICPLRMYVRQRATKVRDQSRALAHMQKALTQMNIQLDGVLSNLMGKTGQAIVRAILAGERDPQKLARLRDRRVHATEATVARSLCGNWRQEHLFALAQAVQTYDFLQTQIAACDQAIAAVLETLPRRGEVAFTPDKPLRSPHRTAVQQRTLHRALGHLFGVDLTAIPTLGLETVLVLAGEIGPEVSRFPTAEHFSSWLGVAPPTRISGGKPLPGHAPKIINRAGQALRQAATNARRSQSFIGASHRARLARMDTSKAIKATAHQLARLIYAMLTHGQAYVEKGIDSFEAQRRDKQLRALQHKARQLGLALVHVA

SEQ ID NO: 183192 - protein, 345 aa, unidentified
MELEKQYVGIDLHRRRSVIVRRNSESETLEVTHVDNDDVAAFARAVMAAGEHPEVVLEACYGWYWATDLLQELGCEVHLAHPLGNNWGHRRVKNDTRDAEDLADLLRLGRLAEAWIAPPAVRELRELVRYRAKLVALRTNCKLQTYAVLAKEGVAVPMTDLFGVAGTELTETCTLAPAYRTRVESLRDLVEVFDREIQKLETDVRHELRGHAGYQAIQQIPGVGPLFAAIFVAEIGDVTRFRSPAQLASWAGLTPKHRESDMTVHRGPITKQGSRLVRWAAVEAAQRQAGGTKLRADFTRIAANHGDSAGARKIARVAVARKIVTLVFYGLRDGTIRSLAVSEAA

SEQ ID NO: 183193 - protein, 315 aa, unidentified
MGKQSSQINVGIDVGKAQLDVHIHERDIHLTVENSAEGIRVLLARLNRYRLTRIVVEATGRYERLLADAALAKDLPVIIVNPLVVRRYAGAVGQLAKTDKIDARIIAEYAAVIQPEVRPDSNHNVRVIKDLLARRRQLLTMSTMEKNRAHIMPKAFRADIQRHLRHLEKQVEKLDKLLDQKIEAESQWRDKRAVMLSMPGIGPAVVNTLLGDLPELGNLTNKQVAALTGVAPYNRDSGSLRGKRRIRGGRHSVRTILFMATLTSVQHNPVIKRFYQRLVSLGKHKKVALTACIRKMVIMLNAMVRDGKMWNEKLA

SEQ ID NO: 183194 - protein, 347 aa, unidentified
MEYFAGLDVSLEETAICIVDDTGLIVREARIASEPEALVAFFRASGMAMKRVGLEACSLTAWLHQALTEAGIAAICIETRQAKAAMGAMPNKTDRNDARGIAQIMRTGWYRAVHVKNPCCRSWRALLAARRMVLNKRRDVENGIRALLREAGLKVGTPSRRNFAARVIELVADDPVLAALRRSLLSVISVMTEEIDRLTKRVLDEVRIEPTCRRLMTVQGVGPFTALAFRATIDRPDRFQRSRDVGAHLGLTPRRYQSGETDVQGGISRCGDELARTALYEAAHSLLIRSTKWSALRAWGMNVAKRRGMARARVAVARKLAVILHRIWADGTEFRWTKQAAASVTAA

SEQ ID NO: 183195 - protein, 388 aa, unidentified
MSVSCATTSVEQPLHAALELSKNSWLLAIQSPDRDNPSLHPIKGGDAEGLMAKLDAARQRLAKASGRAPRLTLCYEAGYDGFWLARFVKQRGIDCLVMDPASLQVDRRARRVKTDRIDVGKLLHTLIAWRRGERHVCSMVVIPSAEEEDLRRSHRERDRLVRERTAHINRIKGLLFAQGIRAINVKSRYKSLTPAALVTGDGRPLPERLGREIAREIERLALVGEQLRAIERECEQAPTLCEASERKRHQLLRLKGIGPVCATILARELYYRQFANRRQVASYTGLTPSPYDSGESRRSQGISKAGNSLVRHVMIQSAWLWLMHQPQSALSQWFRQRTEGHSKRMRCIMIVALARKLAVALWRYLEHGLIPEGAIVKTQSGEPAISNR

SEQ ID NO: 183196 - protein, 347 aa, unidentified
MKFYTKQHKYYCGIDLHTKKMYVCILDAEGQIRLHQNIKTDPEHFIRILTPFREDIVVAVECMFTWYWIADLCVEQNIPFVLGHALYMKAIHGGKAKNDKIDSHKIATLLRGGMLPQAYVYPATMRATRDLLRRRNHFMRKRAELFAHIQNTRSQYNLPDFLGCIAKPQNREGIVERFDDPSVQKSMTVNLEIIQAYDRLLNQLEHDIITFAKEHDLRSYALLQTIPGVGRILALVILYEIESIERFPTVQDFVSYCRLIKSIKESNGKKYGSSGKKIGNAHLKWAFSEAAVLFLKGNEPAKRHLERLARKHGKPKALSILAHKLGRAVYFMLKNKEAFNQKKFLGL

SEQ ID NO: 183197 - protein, 338 aa, unidentified
MQVTTMGIDLAKQVFQVHGIDAHGTVVLKKRLARSTLHTFMATLPPCRVGMEACGSANYWSRRFRAYGHDVRLMSPQFVKPYVKSNKNDRNDAEAICEAVSRPTMRFVAPKTVAQQDLQGLHRIRQRLVQSRTALINQIRGLLAEYGLTVPQQAAQLRRRLPILLEDSTNELTPLGREVFGELARELAAVNERIRQVEARVKHLFAKNEVCQRLAQVNGVGPLIATAIVAAVSDPRAFRNGRQLAAWLGLVPRQRSSGNTHRLLSISKRGDRYLRTLLIHGARSVVARAPAKTDSRSRWIAEIQRRRGTNRTCVAVANKNARILWALMAKGEPYRQVA

SEQ ID NO: 183198 - protein, 353 aa, unidentified
MPCERARRPLMEAYAGKQFVGIDLHRRRTVIVRTTEAGEVLETVRIVNDVQRLASVMARAGQCPEVVLEATYGWYWAVDALQAGGANVHLAHPLGVKAFEYRRVKNDVRDAQDLADLLRMGRLPEAWIAPPPTRELRELVRHRAKLVGLRSHCKAEVHAVLAKCGVQVLMSDLFGLAGTELLDSLELPAPYAARIASLRRLMDDLDFEINLFAGIIRGRMAHEPGYTAVQKIPGIGPTLAAVLVAEIGDVSRFASASKLTCWAGLTPKHHESDTHVRRGRITKQGSRLVRWAAIESVKTVSKGSVVGVLRERVADRRGRNIGSVAAARRQLELVFYALRDGHVRALEHLPAAA

SEQ ID NO: 183199 - protein, 378 aa, unidentified
MRETTRFLGLDVHAETIAVAIAEAGRDGEVRSLGTVPNNPEAVRKLIKKVGPSKALHACYEAGPCGYGLYWQLEQLGVRCEVVAPTLVPVKSGDRVKTDRRDAVKLARCLRAGELTAVWVPDPDHEALRDLVRAREAAKKDQLRARHRLAKFLLRQGRRPPTKMKAWGGAYMQWVRGQPFERFAENATFVDYLAEVDHAIARVEQLEKDLDQAVAEAPPAMRAVVEALQALRGIAKLSAVTVVAEVGQLSRFEHPSQLMGYSGTVPSEHSTGGPGKANRGGITKTGNAHLRRVLMEAAWNYRFRPAVQGKLRARQKDLSEEIKAIAWKAQHRLHQRYRHLTARGKPPQQVVTAVGRELLGFIWAIGVQTETLTQQQAQ

SEQ ID NO: 183200 - protein, 421 aa, unidentified
MTPPNEVVWAGIDTHTDTHTIALLDERGRPLGAETFTADPDGYDRLIGMLPEPRVVAAVGVEGTNSFGAALARRLTAAGYEVREVLRPRRSVRRRDGKSDPLDAVAAARSVMAGDGTSLPKSSDGWVEALRHLNAQRSQLVSAMTAISNSTNGLLVTAPESVRERYRGLRGETRMNRLAECRPAGGLVEHSVLAALKSAAKAWKALKRQAGLLEERMRLILEEHARPLLDMYCAGTVIAATLAIVAGDNPERIRSEAAFAKLCGVCPIPASSGKTNRHRLNKGGNRQGNMALHRIAIVRLRYHKPTRDYMAKKTREGKGKLEIIRCVKRFIAREAYRALISIRNGEAGRGTPAERGAKLRELRVSRNITQQQIGEALCVPSSRISEIERGARDLPELEQRAIQWIHSTTNPKQHTQTLDNV

SEQ ID NO: 183201 - protein, 319 aa, unidentified
MITVGIDISKSKFDIFYQEKSGKKISKVFKNNLAGFEAMFKLIPNSDRIRVIMEATGNYGDDLANYSYLQKATVHVVNPAQIKFFGQSKLRRSKTDKVDAKLIYEFGCVNNELRPWQPMSPNLFIFRSLHRCLQNLKLDLVQFGNRLESEKDISVIAVYNTIITTLNLQIKELIEKIRSLVSDDQNLQQMTELMTTIPGVGELTSWGILSEVDITQFNNARQLAAYAGLNPHIRQSGSSVKGRGAISKIGSSQLRKALYFPAMSALKHNHIIREFGDRLKTQGKAGKVVIVAAMHKLLRMIFAILKSGVQFRDVATSYT

SEQ ID NO: 183202 - protein, 353 aa, unidentified
MIHLPEEREVILGVDTHLDVHVAVLIDVVGRIVATTSVPTTALGYEQLIEWARGFGRLTRAGIEGTGTYGAALARRMHAHGVQVLEINRPDRSRRRLRGKSDPTDAENAARAVLAGEANAIPKAQSGVVEAMRAVSMARRSAVKAKTQAINQLRALLVTAPESIRATLWKVKPEQCVARCARLQSLGDTPLLKALTSTLRLLARRWMSLAKELHQLDAALEELTKRAGRRLLTRFGVGPQTAATLLVTAGDNPNRLRSEAALAALCGASPLEASSGKTTRHRLNRGGDRTANNALWTISMVRMRSDPRTRAYVARRTAEGLSTKEIQRCLKRYIVRELYPLILADLADSVCKT

SEQ ID NO: 183203 - protein, 428 aa, unidentified
MNASLNNDETQNDYAAFIAIDWADQKHVFSLQVAGQTKKETGTLEQKPEVIGPWVAQLRERFGGRPVAVALEQSRGALIHALLAYDFIVIYPLHPTTVAKFREAFKSSGAKSDPLDTDQILEIVTKHLELLKPMNPDTEETRLLGRLTEDRRRAVDLRTGHDQAALASLKEYFPQAIQLCSGNLMSRLACDFLKKWPTLEAFQQAKPSTIKRFYYGHNIRSPKIIEKVLSLAKTAKSLTIDPAIVESGSRLSLMHLQMIQTLNPIIEAYQGRIEKLFQDHPEASLFSKLPGAGPAMAPRLLSFFGTDRSRYEAAQNAQNFCGVAPVTRSSGKTKVVYFRRACPKFDRQTFHEFARLSLARCQWAQNYVDYYKAKGKKFHTIIRALAFKWIRILFRCWQNRTPYNDDKYLETLKKRGSIFATLHLQKSS

SEQ ID NO: 183204 - protein, 348 aa, unidentified
MKFYTKIHKHYCGIDLHAKKMYLCILDVSGNVLLHRNIASSPESFLKAVAPFRDDLVVGVECMFAWYWLADLCRKEGIEFILGHAVYMKAVHGGKAKNDKIDSHKIAVLLRGGSFPVAYVYPPEMRATRDLLRRRCHLVRKKAELLAHIQNTAIQYNLPEIDVNLSLESSRIDADQHFPDLEVRKIVQIDLAMIDAYDDVLKALEWDIEKTGRHHNRHALLLLRSIHGIGQILSLVMLYEIHDVCRFETVQDFASYCRLVKCAHESAGKKKGTGGAKMGNPHLKWAFSEAAVMFIRHNSAAKKLAEHLTKTHGKGKALAIIAHKLARAIYYMLRNNVPFNLEKFLATA

SEQ ID NO: 183205 - protein, 403 aa, unidentified
MTNTIAAIDVHKKVLMVVTGPLGEEAGDSHRFQTTRDQLERLAQWLHSRGVQEVVMESTAQYWKPVWQALEPDFRLHLAQAQSNRAPRGRKHDFGDARRLLRRMVAGELILSFVPQPEQRSWRTTTRMRQQLIRDRVRLQAQIEALLEEAAIKLSSVLSDLLSLSGRRILQAIAAGQTDPATLAELGDRRLRCGREQLEQALDGRVTPLHQQLLALYLERLAMLDRHLEQLEQLASQAMQAQRDAILRLAEVPGLGLESARQIVAEVGATAETFPSPDRLASWTGICPGRAESAGVSRSARSAKGNRHFRRVLVQAAQAASKTKGSYLQTVFRRLLPRLGFAKAMWALAHRLCRLIWKLLHHRVRYLEHGLITDPRTRKHLASKHLRALSRLGFQVHISEPAV

SEQ ID NO: 183206 - protein, 410 aa, unidentified
MEVMFDRVAGLDVGKDSVTVCVRTPGPRSGRRSETRTFKTMFGSLRVMRDWLIEAGVTIAAMESTSTYWKPPFYCLEEQMTVWLLNAAHMKAVPGRKSDVRDAEWIAQLLEHGLLRPSFVPPPDIRRLRMLTRYRMQLMGDRTRETVRLELMLEDASIKLSSIASSLRTVSARAMLTAMIAGETDPVQLADLAKGRMRRKIPDLAQALTGTFDVHHAQLARSMLRRLELVELALAELDAVIVEACRPWQHQIELLQTIPGVGDTVAQVIVAETGADMSRFPTAAHLTAWAGLAPAMHESAGRQTPAGKRHGNKWLTAMLVEAAGSVGRMKGKNYLSAQHARLTRRRGMGRAQVAVAHSMLVSAYWMLKRDEPYHDLGADWHSRRSNEAHTKRLIAQLERLGHTVIIDPAA

SEQ ID NO: 183207 - protein, 355 aa, unidentified
MNDAKYIGLDVHQATISVAVLDFAGKLVMEAILETKAETILQFIRGLRGSLHVTFEEGTCAAWLHDLLKPHVAQVLVCDPRKNTLGIVGNKNDRNDARELAELLYRNKLKPVYHGKHGVRTLKELARSYLTITRDLTRVMSRLKALYRSWAIPCAGQQVYAPRYRAEWLGKIAEPGVRRRAEFYYQQFDALATLRQQARRELLHESQKHFAVKLLRQIPSIGPIRAALLVALIQTPHRFRTKRQFWSYIGLALKTYGSGEYRFVGGQLQRSKKALAIRGLNLNHNHDLKNLFKSAATWAAASSGPFQNFYEARLAQGMKPSTARLTLARKIAAITLLVWKKGVRFDAEHLRQQAA

SEQ ID NO: 183208 - protein, 394 aa, unidentified
MRFAGIDIASETHVLAIIDADGAVEVKATPFAEDAAGYEKLLNLLGAPADLLIAMEATGHYWQNLFAVLAAAGYRLALINPLRTHRFAGEDMTRTKTDAIDALGIARFAAQKRPSVAPLPDALTEELRELVRLRQRLLQDFGDRVRQLHRLVDLGFPEFTRYVRTLDSELASAILRAYPTAAAFRGLSVKRLAALRYDERHPVGLELARTLIDAARRSVGQHHSPAYRLQIRYACDDLDVLRRRLRELDRDLDDTLRQHEIARLLLTIDGIGPHTAAYVIAEVGNPAHFKSPAAFAAYVGAIPGLKQSGKRSPNRAALTTIGNARLRAALWMPTLAAVRFNPWLRAHYLRLRARGKLPKVALVACMHKLLFAIYSVAKHRRAFVPQLAAPGTVQ

SEQ ID NO: 183209 - protein, 424 aa, unidentified
MNTQSYAAFVGLDWADVEHAVALVTKDDAVERGTVAQQAVELDEWVSGLRQRFDGRPVAVCLEQSRGALIYALMKYDCLVLFPINPKQLAKYREALYPSGAKDDPTDAELLARFVREHHQRLRAWRPDDPLTRSLRLLSEGRRQWVDQRTASGNRLLLQLKEVYPLALKFLGKQVYAERFLSLLAKFPTQSALKRAAPRKLIEWLPKLRRVMEDPPADLSQHPRVLVVKEAQPLVTDEAVLHGQLAVKGLVKQLQQLNQTIKTYDEEIAQLLQQHPDAELFASFNGAGEALVPRLVAAFGSDRQRYASASEIQQLSGTAPIQKQSGKSRVVLMRRACPKFLRQTFHEFAKCSLFSCRWAQAYHAMMRHKGHGYHSALRALAFKWIRVLFRCWQTRKPYDDALHMRHLHLKKSPLLAFLPPTPQD

SEQ ID NO: 183210 - protein, 385 aa, unidentified
MDSAVGKAAERSEAGFPTAAGDRSIVPGSLKTVTKQDRRRFRGTSPNSRQSRRRASSSHLQDRDHSMDGSITHFAGIDVSKKSLDLCLLPEDRRQTFTHDKAGIQQLLAALPVGGTCLIAVEATGGYHRNLVAELVNATHQVAVVNPRQVRDFARGLGILAKTDRLDAHVIACFAQHVRPRVAAPLSPAQAELEQLVTRRRQLVDLRTAELNRMQTVSSKSVRKSVQQMVDMLRKEIRRVEHDILTLLQSDDDWKAKMDRLESVPGVGPVSVASLLAELPELGQLNRQEIAALVGVAPFNRDSGRFRGKRAIWGGRASVRSVLYMAALTARRHNPILRAFANRLEAAGKPFKVVITACMRKLLIILNTMLKERTQWQPEKSLANA

SEQ ID NO: 183211 - protein, 387 aa, unidentified
MPQRNDLSRSAASLDHESTLIAVIEMSQSSWLVAAIVPGIERHPLKKLEANEEALLQLLRRWQGEAAGAGRTIARVAVAFEAGRDGFWLARWLRAHGIEAHVIHPTSVAVSREHRRAKTDRLDTGLLRRAFLGWLRGEPDHCSMVAIPTLEEEDAKRPNRERESLIGERTRIINRMRGCLARLGIRSFRPTLRTAPGRLETLRTPEGVTLPPNTLAELRRDMARLRFVTGQITEIEQARLERLRQAPAERPHAMVRLLARVIGVGIETADMLVHEVLSRDLRDRRAVARYAGLTGSPEESGARRREKGLAKAGNARVRRGMIQLAWRFLRFQEASGLAVWYRARTADARGGTRKTMIVALARKLLVALWRLVTTGEVPEGVVLRPAA

SEQ ID NO: 183212 - protein, 433 aa, unidentified
MKKTTMAAKVTTEPEPKFVAFVGIDWADQKHVWSLQAANSTQREQGELEHRPEVIEAWVSQLCRRFGPGPIAVAVEQVKGALVYMLRKYECLHLYPVPSTMSASMRKALYPSGAKDDPGDAELVLELLLLHRDKLRRLTPDNEATRLVQNLVEERRKLVDEKTAQLNRLIGYLKVYFPQMLEWFAKLDSKLVCDFLERWPSLEELQAVPAGEVKQFFHHRAGRHGELTGWRMKGMSQAMPAIRDRAVIEAKRTVVQVIAGLLRTLLEGIATLDRKIAEAAQAHPDFFIFQSLPGAGAALAPRLLAALGSQRDRYTSADEVQKYAGIAPVTETSGKKKWVHFRWAASKFLRQSFHEWAGHTIGHSIWARAYYQLQRERGQEHHAAIRSLAFKWIRIVFRCWQDRVAYDETRYLTVLAKRGSHLIPAFAAATGSK

SEQ ID NO: 183213 - protein, 310 aa, unidentified
MASHEFIGVDVAMDWIDVCYLSNGRHERIKSTKQSLAKFAKTANDAVVVLEASGGYERPLIEALIKAEARFIRVNPRQAREFARATGKLAKTDKVDAAILARMGKALDLVPPPIPDPDRVRLADLVARREDLVAVIQAERNRLGASRDGWIRREIQRLVAILEDHLDAVEKEIARHIASSGSLLEQARRLRTAPGIGPALVAVILARLPELGRLKAKQIAALAGLAPQACDPGLSRGKRRVWGGRADIRRALYLAGFVASRFDPTLAAFRARLQDSGKPPKLAITACARKLLTIINAMARDATDYASAVP

SEQ ID NO: 183214 - protein, 332 aa, unidentified
MSIVSTVGIDLAKNVFSVHGVDARGAVVVRRAVSRAKFAELIAQLPPCLIGMEACSGAHEWARRFAGFGHTVKLMAPKFVMPYRKSGKNDGNDAEAICEAVARPNMRFVPIKSIEQQSDLSLHRVRQGFIEERTARLNRLRGLLAEFGHVLPLRAVEVRRRVPALLDKLPTRIAGCLRDLLEHADRLEAKALEYEREIKVHVRTNALALRAQTRAGIGPITASALAATVGNGHDFKNGRQFCAWLGLVPRQYSTGGKTRLGHITKRGDSYLRMLLVMGARSVLQSAARLNDPFSRWALAVQQRRGYHRACVAIAAKNARVAWALLAKEPVPA

SEQ ID NO: 183215 - protein, 341 aa, unidentified
MQKSTTISIDLAKTVFQVALFNKYGVMKSNNKLSQSKMVQFIAQHPEAIICMEACGTAHYWGRRFQQSGHKVLLVPAHIAAKYRTGNKNDANDALAIYESIKRPKTYFVQVKNLDQQDLASLLKLRQGYVKQRTQTANRVRGLGLEYGVKIPQGIAKIRKNLPCFLEDAENELTTSSRFILRDLLNQLLLLDIQVEEATNRLVARAKEVPVCSKLTALPGVAWIIASALYARLGDGSAYKCGRDASASVGVVPAHSGTGGNNKLLGITKRGDRCLRSLLVHGARSVVSRIKDKQDGLSCWIREQLLKNHLNKTAVAYANKLVRMAWAILKSGEDYRTPLAQ

SEQ ID NO: 183216 - protein, 400 aa, unidentified
MMTPDDIDVWVGLDVGKSAHHAHALDHDGNTLYDKPLKQDEKAIRTMLGKLSKHGRVLLVVDQPNTIGSLPLTVARNMGIAVAYLPGTAMRRTAQLLPGDAKTDRRDAHVIAWAALKLPETLRDAGPDDETLAALKLLAGHDEDLAHESTRHVNRLRSLLLQTHPAFERALKGERITRDATLALLERYGGPMGVKRAGIEDVKDWAKSNGLRAGRIIDDMFKAIGEQTVTVPGTLMAETIIPSIAHDIKTIRDRRREVGRQVEKLLEDHPLLTVLTSMPGIGVRTASNILLGIGGDIANFKSSAHLAAYAGIAPVTGQSGTGIKGERPSGRGNKRLKNALWQTAFVASTKHPPSVAYYKRKREQGKHHNAAIICLARRRCDVIYSMLKNGTLYQEPALVA

SEQ ID NO: 183217 - protein, 357 aa, unidentified
MRYLFARNQGLGCDYHPSFQQIAFVDTENGELGERRLAHPTEAEQFYRQLHEQGVKGRVGMEASGHARWFERLLHGLQFELWIGNAAEIRTKRVRKQKTDRQDAQLLLRLMIEGRFPRIWVPDAANRDLRQLLWHRHRLVQMRTRVMNQLHVVALNEGLRRKKALWRPAGRKELESFALAPWSSRRRQDLLELLDQLTPKIQELTRALEEEVDKRPVARRLATHPGVGPLTALAYELVIGTPERFHCGKQIASYVGLVPAEESSGDRRRLGHISKQGNVLLRFLLVEAAQVTVRSQPEWRSQFFHLALRRGRKIAKVAMARKLAVHLYWMWRQGWDNGPLPKLGSHAGGPGNPDGGQ

SEQ ID NO: 183218 - protein, 487 aa, unidentified
MAKRNQSTFERLQRGEKLSRRERKQIERQLQAAEPGWEIVHRNVAGIDVGNESHFVAVDPRQADQPVREFGSWTAGLHQMVDWLRTCQVQRVVLQTTGVYWIPVQDVLEKAGFEVAVVDARGTKNLPGRKSDVQECQWIRKLDIYGLLRGCFQLSDSIRSIRTIWRLRQRWVEETGRSIQQMQKALTVMNVQLANAISDLSGQTGMAILRAIVGGERNPWTLAKLRDARIQSSEDEIAHSLQGNWRDDVLFELEQVLAAYDFQLQQIEKCEQQLEKYMKAQPSRPAVDPVPAQAASGPEEAPKKPNKKVRRRQAPRKNRIGFDLEPELARVMGADLTVIDGIKLMTVQTIYSELGPDLSAFPTENHFASWLMLAPKRDVSGGKVIRHVWVKGRNRVANALRMAAESLTHSQSYLGARYRSLRGRLGAPKAIKAMARYLACLVYRMLTKGQDWVDRGAAYYEQRRQQRELIHLQHKAEALGLQLVPAE

SEQ ID NO: 183219 - protein, 423 aa, unidentified
MSYKIAGIDVHKKMLAVVVTDIEVQGEYQFEQRQYGSNPEHLQVLAKWLIEREVEEVVMESTAQYWKPVWGALERYWKPSSQTRETAGPMSGTLHLAQAQSNRGARGRKKDFPDAERLVKRLVANELTLSFVPDAEQRLWRAVTRRKYQLRCERVRLQNQLESLLEECQIKLSSLVSDLLGVSARRMLKALAEGETNPAALAAMADRNLRATPAQLCDALGACVELRPIYRRLLTLFLEELQLIDLQIRQLDQELGTLLSRYQASVEHLAEVPGLGVDSAQQIIAEIGAQAATFPSAKQLSSWVGACPGDDESAGVSKSHRSPKGNRQMRRILNQAANAAAKSKGTIFEIVYRRLVSRLGHNQTIGAIAHRLCRLIWVILHEGLRYEERGPSVSAKSKQRRTHRMIRELRNLGYRVEPVLTTL

SEQ ID NO: 183220 - protein, 423 aa, unidentified
MFKIILNNCCGLDVHKTRIYACIGITDTHSRTEYYEANFSSFPKDLRKLSEWLHKYNCVDVCMESSGKYWIPVFNVLEETCKVTLAHPKYTKPQKGNKTDRKDARWICDLFMCGMIKPSFIPPPAIRHLRDLVRYRVKLTNTLTGEKNRAQNCLTVSNLKLDDVFSDVFGKSARSITEYILAHPGEKFDVAPFVDKRCKTPLDVIQDAVDGAVSPEQAVKLRECLDHIDQLIAHRDRIEKEILSIAEPFSPQITLIRTVPGLNRDPMTAIVILSEIGSDMSVFPSAKNLVSWAGCCPRNDRSAKHVKSTRISQAGSCLKPLLLQVANALINSKDHPEFVERYRRIKSHRGHKKAIIAICKMLLTAIWNILSTGEVYNPSGYLIQTPRPINDTKVLTQKQALELLRLRGYVIKDDPLVPKPLPA

SEQ ID NO: 183221 - protein, 358 aa, unidentified
MAKLSLSRLEAFVLGFEATQFRVGVDVHKKSYSLALLREDGARLTWTGPARAETLLDPVQRFNLHIKAIVYEAGPTGFSLARRLEAAGLRVKVVAPSRVPRPVRSGAKCDRLDGIKLAEYADNRGVQSIAVPTESEEAERSLLRRRHALANGRRRCKQRIKAHLLYLGVSAPEGLDHWSQSAVTALRGLRLKPSARLTLESLLRELDFHNEELRQVEGQLLELLTSGSQRERLYWLRTVPGVGFLTASTYVLELFRPERFNNARQVASYLGLAPMVRHSGDRKPRGKITPVGQSRLRSLLIEASWVWKSRDAYAGQLYNRFLSQMGIAQKAIVAVARRLAIILWRLSIEQRCYRRQPV

SEQ ID NO: 183222 - protein, 425 aa, unidentified
MKAANPSTPTQPIELAALIGLDWADQQHALTLSEAGSTQLERTTLKHTPEAIGAWVAALRQRFGGRPVGIALEQSRGALFHALSGHDCVVLYPIPPQMLKKLREAFCGSGAKDDPTDADLAWEVLAKHRDHLRPWKPDAMEVRLLDRLCEARRGLVDQRTKLVQKLGAALKQYFPQALDWAGDELSSRMACEFLLKWPTLESMQLAKPQTVRAFYYAHHCRRMDRVQARLEAMPKAVALTTDAAVIECESRRVQALARQLRALATDIDAFEGRIQELFASQPDRAIFESLPGAGAQLAPRLASAFGTDRKRYEAAEAMQTYSGVAPVLERSGKSEWVHWRWACPKYVRQTWVEFAGCSRFQSRWAAAYYQVQIERGKGHGAALRALAYKWVRIVWRCWHDGTAYSEEHYEAALRRRGSALALAKA

SEQ ID NO: 183223 - protein, 346 aa, unidentified
MMIIGCDFHPSWQQVSWLDTESGDCGERKLVHASGDAKMFYQQLALPVLIGMEATGNSQWFVELVADLGHEIWIGDAAQIRASYVRKQKTDKRDAAHILKLVVQGRFPRLWTPDREQRDLRQLVLHRHKLVEIRSRVKNELQHLSLNKGMQRKGKLWSQAGQKLLRELPLKPWAACRREDLLGLLSMLNQQVGQLDTAVQHAAEENPQAKLLMTQPGVGPNTALAYVLTLGDVSRFPRGKQVASYLGLIPREHSSGGRQKLGVITKQGNRMLRSLLVEAAQIAVRFDPGMKKQYLHRCHQKPKGVAKVATARKLAVRLYWRLRTNVAYPEIVRIESSPRVPLVGAS

SEQ ID NO: 183224 - protein, 353 aa, unidentified
MVELSKVEAQEVVGLDLGDRSSQICRLDRKTGVILEERRLSTTTTSVQRYFGARAPQLIALESGTHSLWMTRLLKSLGHEVIVANPSKVRAISASQTKTDERDARFLAQLARVDPQLLSPVQPRSEESQQAIAVVRAREGLVKARTMLINQVRGVVKSFGFRLPAGSSASFATKFQKDTTLPASLKATLGPLVRVIDDLSQEIARSDKEVEALARRWTVTQRLRQIKGVGALTALVFVLTLGDPFRFVHSRSVGAYLGLVPGSRSSGQSTPQMPITKQGDRMLRRLLVQASHYLLGPFGQDSDLRRFGLRLAERGGKSGKKRAVVAVARKLAVLLHCLWVSETDYEPLRSAAA

SEQ ID NO: 183225 - protein, 371 aa, unidentified
MKSIIYIGMDVHKKTYSLCALLKETGEIIGETKIPADVSLIIKFIENAKKSVDSDDVQIKTGYEAGCLGYSLYWQLAEKGIECDILAPSTMHRSAKNKVVKNDRRDAKNIATNLANGTYKSVYVPIDEDVEIKEYIRMMHDFKIELKKVKQHINAFLLRFGHQYPGKSKWIPAHIKWLKELELSDMYREILDEYLSQLEILSEKIERFKYRLEELSQKETYNEKIGQLRCIKGIDTTAAMTMHAETSDFDRFPTANAFASYCGLTPGEDSSGESYHRLGITKQGNSMIRTTLVEAAQVLVRGTIGKKGKKMKSKQKDQDVKVIDYADKAVIRLQKKYHRMIFRGVKRNVAITAVARELACFVWGIETGHIS

SEQ ID NO: 183226 - protein, 347 aa, unidentified
MRKIAYLAMDVHARNCVLGDMDGSGKFRGNRSFTTCEVNIIKAIKAIKAKKKLLVIEAGPMSNWAAQVANDHLTRVFICDPRENALIYKSSQKFDKVDTKKLCRLLRLNEFKEVYRPENDQRAIFKTAVQHYHDLRDQLTAVKQKIKAKYRQWGVIDVFTDSVYSVSGRDKFLARIQHQPICLQLKRLYTLLDTTAAMKQDALNSMVSLGRQYPEIKEFKKMPGMGITGAHIFDAYIQTPHRFAKSNRLWRYSRLGVTDRSSDGKPLGFKRLDKSGINELKALSYRAFLTAMKSDNEVKQFFLRSLQRTHDKKHARLNTQRKILSVMLGICKKKVAYRPQLFLDPST

SEQ ID NO: 183227 - protein, 395 aa, unidentified
MEYILSFDIAKGRSVYCFIDNNKNIILEPTSIKHNKNEFDTLFDNIKSYRPLTVVMESTSVYHLPVENYFRSKGIETIVMNPKLVKQYKDTLNKSKTDKIDCFKIARCYLGTIDTLYQKNDEYFMFNPLARQYWSFTEGQTRLKNRYRQLIEIVFSEFNLLFDDLYSDLALNFIHDFPHPVLFVNRRTDYLMNYLKEKNGTTQAFRFKSKVLKMKEIASNSLCYVGYDSLQVQNLVQVIEMIQYHKKEINKLKNQLINKLKDTNQFKIINSIPGFGEFSTALFLAEVGNITRFDNKYQFISFIGIDSVTSQSGTSEYHGPISKTGCKFARTILFNVVTTIIQISAHTDKENPIYLFFRKKQSEGKHHYKCIIACENKLCKIIYKLCTSDCLYQHK

SEQ ID NO: 183228 - protein, 355 aa, unidentified
MSVYVGIDVHRKRSQVAVIDQDGEVLANRNVPNGVETILGVIGGLPPGTPAAFEAAFGWGWLVELLEDYGFDPHLVHPLQCKAIASARLKNDKVDAAILAQLLRADLLPEAWIAPPAVRQLRALLRHRAQLVRLRTLLRNRIHAVLADHGHDRPAGCWSGPGRGWLASLPLPAVSREVIEDDLALIDALQVPIGRLDTEVRQRARSDPRVKVLTQLPGVGHFTALVILAEVGDITRFGSARKLASWAGLTPTVRGSDRTVRHGHISKQGSAWLRWILCEAAQTARRHPDYAASYAAIARRRGKKIATTAIARKLLARAWHLLTDAERTAGLHATTTSAPPPRDAVNDREGSPSPG

SEQ ID NO: 183229 - protein, 335 aa, unidentified
MKHYAGLDLSMETTQVCIVDENGRKLMSEKVESSPKALALMLERHGPIERAVVETGRMSPAICHGLRELGVPLVCIDARQAHQSLKAMKANKTDPHDAAGLAQLARTGFYKEAYVKSPAAHGVRSVIAARNHLVEARVKLDNMIRGLCATFGYRPGPGQGKAFLARIMEATHIPGLGEAIASLLSVRSAIVDQIKEMDRRLRVIASQSRACEILMTIPGVGVQTSAAFAAAIDEAGRFRQSRNVGAYFGLVPRRHQSGEIDWTGRITKQGDGMVRKLLYEAANSILTRSRETFALKTWAMKIAKRRGLKKARVALARRLAVIMHAMLRDGTLFQA

SEQ ID NO: 183230 - protein, 494 aa, unidentified
MLRSETRRRRDERLDSSKQNDAGVLGLVKGSRAKRGGKAALDKACARRRASKLDDGQTDASGGDSGLQMSARRKKKKKKEVVDPSSAGFPVDSPTRSKTQIGKGPEERSTMRNVALDLAARKIAFCEVREGHVVERRTVGSLDALDDLLGERCPPARVVIESCREAWHVHAVLTKRGHEVVVVDTTRVKQLGIGQHGRKTDRIDAEVLARALERGHIPVAHVLSPQRQVLRLELGIRKALVETRSQYITTVRGLVRAHGERLPTCDANRFLRRAREARLSDTTRTLVEPLLCLIGAVEEQLLAVEQRIDRLCAKEPVIEQLTTVPGVGTIVAAAFVSVIDDAHRFRHAHQVGSYLGLVPNEDSSGDRRRLGAITKRGNTYMRFLLVQAAWACSRCRNGDDPLRRWALSLAERRGKRIAMVALARRLAGLLWAMWRDGTVYDAQAVAHASAKGFRRQAQSRQVLAAALERAASKTADRQQIMRTIAQNLPSVTHL

SEQ ID NO: 183231 - protein, 375 aa, unidentified
MNKYITKYVGMDVHKETIAVAIAREGRGEPIYYGEIPNTDEAIRKLVKKVASNVEKVSFCYEAGPCGYDVYHQLIDLGQRCDVVAPSLIPKKSGDRVKTDRRDANTLTRLYRAGELTPVWVPDKEQEAIRDLTRAREDMKAMEGHAKQRLGAFLLRHGKRFPGKCNRTQAYFRWLEEIKFDMPAQQIVLQEYVDTVKHMKGRVEALEEEMRQAMKEWSLAPVVTGLMALRGVALITAMTVVAELGDISRFTSARQIMAHLGLVPSEHSSGNRQKRGGITKTGNGHARRVLIEASWCYRLPARKTAQIQRRAEKTSETVQAIAWKAQKRLCRRYWHLINKGKRPVEACTAVARELSGFMWAIVCEVMGKNYVYTTA

SEQ ID NO: 183232 - protein, 463 aa, unidentified
MSKRKKNKQPAEIPELGSLKQLNLNAGGIDIGSAEIWVCVPEDRDTPAVRRFDTFTVDLHHAATWLMSCGVTTIAMESTGIYWIPLYEILEANGIEVCLVNAQEAKNVPGRKTDILDCQWLQQLHTYGLLRRSFIPPNEIRKLRDLGDHRDNLVRHRATQILYMQKALHLMNLQLDNTITDITGKTGMAIIRDIVGGQHDPKVLAQHRDGKCKNPLEVIEKSLEGSYSDEHIFQLKQALELYDFFSAKIAECEQQIEQSYQRFHAKRNPKELAPSRKKDSNTKNHMNFDLRSELFRICGVDLTEIDGVHTIVAHTVLTHIGLDMSRWQTEKHFTSWLRLCPKNEKSAGKVLKRSTGKTRNPATLALKKAAQSLHHSKSYLGAYFRKMKAIHGPGKAATAAAHKIARIIYVMLKEQKEFVDLGADYFQQKNKEREIKKLSKRANALGFYLVTPNDYQRLVATVS

SEQ ID NO: 183233 - protein, 429 aa, unidentified
MHYTQNQKLEQVTEKTLVIGVDIGSESHHARAFNYRGIEYSSKDFEFGNNANGFEAFQGWMQSYVLMFGAKKVIVGFEPTGHYWYNFADFLKALGIMFVMVAPQHVKHSKEMDDNTQRKDDHKDPRVIAKLVTEGRYIIPYVPEGIYAELRTAYGRYCELTETKVRLENRITRWFDIHFPEYREVYKNPGAKTGMMVLRIAPLPADVLKLGAEGINQLWRGVKARGAGMKRAETLVAAAKRSTGRAGGDAERLDLWQMLEEYELVMRHLEQIQVMLEKLVARIDGAERLLRIKGVGFITVAGFFAEVGDLSRFTDPKQIQKLAGLSVVTPDSSGKHNGQSEISRRGRKRLRMILFRAAMSMVKSNREMKMLHEYYTMREQNPLKKMQSLMAIAGKIIRVFYGIMKNGTEYDPVRLMTDIRRPGMDKNAA

SEQ ID NO: 183234 - protein, 357 aa, unidentified
MTSPRARAQAPIRTVIAGVDAHKDTHHVVVLTGLGQRLADRAFPATIAGYADLRDRVGSHGPIRCFAMESTGSYSAALTRYLIGTGADVVEVNRPHPRTRSRVGKDDAIDAEAAARKALSGQCTARPKDTTTAVESIRVLTAARDSAVKAPTQAHAQLRDLLITAPADLRERITATTSAARAAACRRLRPGTSAPDRPAQAVRTALRSIATRISALDEEISALDTQLDALVTATAPTLTSRTGIGTHTAARLLITAGANIERLDGEAAFARLCGTAPVPVSSGRTRRTRLHRGGDRQANKALHQIAVCRLRHDPRTKTYMQRRLDQGLSKKDVLRCLKRSIARQAFKDLTTDLHPTP

SEQ ID NO: 183235 - protein, 355 aa, unidentified
MKKVDPTIWQDKPLYVGIDMHRKRWHISIRSADGQVLFSQSIEGRWPVLKHRLEKYPGAQFMAVYEAGYFGFWLYDELTAYGVTTCVTPPSLIPSASGNKVKTDRLDSDRLAQLLQAGLLTSVHVPTEEERAHRQVVRRRRPFIQDRIRVKNRIKAELRLYGLELSGETKGSWTQRLLRQLRAVRFADAFHQASFEALLSHHDFLSRQIDHLAQQLKILAESEIYQERVEILTSIPGLGWLSAMEILLELQDVARFQRAEQLAAYVGLTPGQHSSGEHVRLGRITRQGKSIVRTLLVLASWRLIDKDGAMREKYERIKARAGGKRAIVAIARTLLVRLRRLLLNREPYALGLVSG

SEQ ID NO: 183236 - protein, 355 aa, unidentified
MNSEKYIGLDVHQATISVAVMDSRGKVVIESILETKAATLLEFLAGLRGTLSVTFEEGTWAAWLYDLLKPRVQKLVVCNPRKTALLKDGNKNDRIDARKLAELLRLDNLKPVYHGETGVRMLRELARSYLTLVKDLTRVMNRLKAMYRSWAIPCAGRDVYYTRHRAEWLSKIREAGVGRRAEHLYQQLDMLQHLRQPARRELLAESRKHVITAKLRQIPSLGPIRAALAVALIQTPHRFRTKRQLWAYSGLALETRTSGEHCYVQGQLRRSKKQVSIRGLNKDHNHDLKGLFKAAATRASVQPGPFQDFYERSLAKGIKPTMVRLTLARKIAAITLTLWKKGENFDAEKLKSQAA

SEQ ID NO: 183237 - protein, 350 aa, unidentified
MWIIGCDLHTRYQQVAVMNTATGETIERRLDHEGDQVRRFYAALEPPVRVGIEATGAVGWFEQLLGELGHELWIGNAGAIRAAAPRRQKTDVRDARLLLQLLTEDRFPRIWLPSIEERDVRQLLAHRSKLVGMRTAVRNQLQALALGQGLRLGQRLWGAAGRSALGQLALGERAAARRQDLLELLKPLDARIKALDAEVEAEARRRPDAVRLMEQPGVGPVTALAFVLIIGPVSRFRSSRQLASYLGLIPSEMSSGGRQRLGHISKQGNVMLRWLLVEAGHTAARRDPELHRFYTRLKHRRGANIAKVAVARKLAVQLYWILRSSQQTSAEGDRQGSPATAMVGATPSHS

SEQ ID NO: 183238 - protein, 347 aa, unidentified
MDFVGIDLHKTSSQICILSEGGELTERRIKSTRADFDDVFAGRPRARILVEASTESEWVAQHLESLGHEVIVADPNFAPMYATRDKKIKTDKRDARALCEACRLGAYRHAHRTSERQRKIRAQLLVRSTLVRTRSKYISLIGSLARREGCRIATGGSNNFAARVEAANLPAHVMAAIAPLFESLRMLNRQIAEADAELEKIVKEDEVVRRLCTAPGVGPVTATTFAATIDDASRFSAAKQVRSYLGLVPREYSSGERQHRGRISKAGGSRARTLLVEAAWALLRWRNAKNQALYDWAMRIAARRGRARACVALARKLAGILYAMWRDGTEFDPEAISHGVAETAAAA

SEQ ID NO: 183239 - protein, 355 aa, unidentified
MDSGKYIGMDVHKESISIAVMNGAGKIVMECVIETKASMILQFIDGLRGDVQVTFEEGTSAAWLYDLLKPHVTKLVVCDPRKNASMREGNQSDKIDARGLAELLRLNHLNPVYHGEHGLRSLKELVRSYLTITKDLGRVMSRVKAIYRSWAIPCSGKQVYAPRHRAEWLAKINEPGVRRRAEFYYQQLDALRMVRQQVRRELLAEGKKHQAWKRLCQIPSIGPIRAAVLLGILQTPHRFRTKRQLWSFSGFGIETQSSADYRSVDGQLQRARKQISIRGLNRNCNHDLKNLFKGAAIVASSKPGPFQEFYTELLSKGIRPEMARLTLARKIATIVLIVWKRGACFDAQHLKPQTA

SEQ ID NO: 183240 - protein, 417 aa, unidentified
MSEYAALVSIDWADQQHAVCLLDLSTGEREQTIVKHTPQALQEWALDLRQRFAGQPIAVCLEQSRGPLIYALLKFDFFVLYPINPATLAKYRQAFSTARGKDDPTDADYLLDLLEHHRNRLRPWHPDDEKTRTLRLLVEQRRRLTGDRTRVSNRLTALLKGYFPQVLDWFEDIRTQLVCDFLERWPQLSLLQQARPATIDKFLRSHHSTSKPTNLRRLTEIKTALPLTTDAAVMTSSVINVKALVAQMKTVIAAISEYDRHLEALCQTHDDYHLFAALPGAGPVHAARLTAALGSDRSRWQSADELVTFAGIAPIIERSGKQFRIRWRYFCPKFLRQTFHEFAAQSIQASFWARAYYSSQRAKGKDHHAAVRALAFKWIRVIWKCWQTRTPYNEIIYLQSLRKKGSSLLKFAADYQQ

SEQ ID NO: 183241 - protein, 320 aa, unidentified
MEAKNTVIYAGVDVAKATLQVHLLGRQNEWSNTPAGLRQLLKALQKVPGVHVICEATGGYEQPMVKVLHEAQIPVSVANPARVRAAAQAQGQRAKSDPIDAGGLTDYGRRFEPKATPPTSATQEELVALTQWLQQLVSGQAMAKTQAEHHQDPFVRRQHAKLMVHLRGQITAVEKQIETLVEKDAELRARVECLDEIQGVGPRTAWMVLAHMPELGQLNRQQVAALAGLAPWVRDSGAMKGKRCIGGGRSEVRVALYMASLSAARCNPVLSVFYKRLRGNGKLGKVALTAVMRRLLIFMNHELKALAAKTAVEETEAAIA

SEQ ID NO: 183242 - protein, 464 aa, unidentified
MKSPSPRVGRAADRLLVGDDVSSVRNDVRFLSASGDVLLGHQAFANDRPGYHALRECVLQLLEQQGSAGVDFAGEATGWYWFHTFYALAHDPELAQVDLRLNLYNPRLTHAFKKALGSLEHTDPLDAHVIAERLRFARTQHAPVLDDVWLGRRLLTRHYFHLSHALAAEKTYFSAFLFLKASAYRQLKPFSEVFGTTSTAILTQYSTIQELAALPILELEARLRALSNNHLPDVEKNATRLQAVATHSFPVPPGMVAPLNLLLRWTLDHIRFLEAQLDTLQTAIADAFTGVPELVWLMSIPGIGLIIAACLLAEISPWERFLEGDRLDRRTGRWRPKNARDAEAALAKWVGLWWPRNQSGAFTGEITRLRREGNRYARYALTQAANCLKEHSAEYAAFYARKFAESTTHAHKRALVLTARKAIGLVVALLHTGQSYRVPEPYRHVWSPHQARQLADDPTAPDDM

SEQ ID NO: 183243 - protein, 353 aa, unidentified
MKYDKYMGLDVHQAMTVAVVIDAEGKVVLETMVATEAAAVLRLVKSLSGPMRVTFEESTQAEWLYELLRSHVTEVVVCDPRRNKLLSEGSKADKVDARKLADLLRSGMLRSVYHGHQATRKLKELVRAYETFSLDTQRAMNRIKAIYRGRGIATPGRGVYQARTRDQWLAKLAESGLRQRAAWLYQQLDQLKPLRKQAKQVMLAESRAHRAVSLLRTIPQLGPIRAAFIVATVDTPHRFRTKRQFWSYVGLAVVTHMSAEYEMKAGKVVRRRKPVATRGLNRCCNHRLKEVFVSAATGGTRDESYKLYLERLINNGMRADMARITLARKIAAVALILWKKGKEFDPRELNRTT

SEQ ID NO: 183244 - protein, 427 aa, unidentified
MTYKIAGIDVHKKMLAVVIAEVARPGEYEFQQRKFGTGAGELRRMAEWLIEQQVEEAVMESTAQYWRPVWQSLERYWQPERRRREDSGKMSGALHLAQPESNRARSGRKSDFADAERLVKRLVAQELILSYVPDAEQRLWRAVDRRRYQLIRDKVRMRNQLEGLLEEADIKLTSMMSDLFGVSGRRMLKGLADGETDPATLAALADIRLRATPEELRDALGACTELHPVYRKMLKMSLEELTLMEEQIGKLDKEMAGLLEAHQSAVLRLAEVPGLGCDSAQQIITQVGPTAATFPSGKDLSSWVGVCPGENVSAEVSTSSRSPQGNRTLRRLLNQAANAAVRAKGSIFEMVYRRMVPRMGHNKAIWAIAHRLCNLIWKILHQGVRYEERGPAVNLKSQKARTGRMLKELKALGYRIEPPNPQIAGTR

SEQ ID NO: 183245 - protein, 345 aa, unidentified
MLYLGLDVHSKWTTLRGFDSESGEVLERERISNEPEAMAAALSELPGPLYGVMETGTNAWAMYRELEPFFARLVIADPSQLWDRKQDRSAKTDRRDALRMAQKLHRGEIKGIYVPDAHTQDLRVLVRGKLRATRWVTKLINEIGSLLRCWGYVGSKSLLSKKGKQDLDEAQLPGRSARVLKLWREMLEKAQEIEAELEAAVKEEAEKDAVCAQLRTMPSVGPFTALAVRAEIGDIRRFPSSAALISYAGLAPRVFQSGERCRYGSLGHWGNRWLRYALALLANRMAYHGKGSRLHQLHWRIQLRQHSNGAKMAVARKATHLIYHMLRSGQPWREPAEEERAKARV

SEQ ID NO: 183246 - protein, 343 aa, unidentified
MKITTIGLDLAKNVFQVHAIDEHDHRVVRKQLRRDQVIAFFAAVPPCLVGMEACGSAHHWARRLQEFGHTVRLISPQFVKPYVKTNKNDAIDAEAICEAVGRPNMRFVPIKTVEQQAVLSVHRVRQGFMKARTAQANQIRGLLAEFGLIAPKGISNVARRIPELVEAATTLPTSMRQLIDRLLENMEVLDRQVKELEAQIKAWHEGSDLSRKLAAIPGVGPLVASALLASIADARSFKNGRQVAAWLGLVPKQDSSGGKPRLLGMSKRGDVYLRTLLIHGARSAIAAAQRWRTPNSWLQGLLTRRHPNIAAVALANKNARTIWALLAHEREFRPDYVPRSATA

SEQ ID NO: 183247 - protein, 414 aa, unidentified
MSNPLLVGVDVHRKTNAVCVMDGQGQELVPRFTMDNNQPGTEAFVHQMAQLMLDGDFDALQVAGEATGWYWFHFFQTLSQDPFLNQWPIQLYSLNPRLTANFKKTYVDLDHTDHIDSFVVADRLRLGRDLPVPFRYEETYLPLRFLTRYRHHLVHNLAREKSYCLAILYLKFSEYTRKDKKPFSNVFGAASRAVLQEFASVEEIAAIPFHQLVEFIDLKGKRRFPDPTENARKLQQVAQHSYHLPQALQQPVNLTLGLSLKHITFLERQEKRLNTAIDQHMEAIPHTLDTIPGFGPVFSGGIIAELGGIERFDYNQAKVAKFAGLKWRRHQSADFEADETRLTRTGNRFLRYYFCEAANAVRLRDAEYAAYYDRKYHEVRKHQHKRAIVLTARKLVRLVTRLLTTNQPYRPRRH

SEQ ID NO: 183248 - protein, 415 aa, unidentified
MALKIVYKICCGIDIHKTFVVACIASTDCKGVTTYESHRFSTYTKGLKDLLQWLLKHNCRDVCMESTGKYWIPVYNVLENDCTIVLAHPKYVKAIRGKKTDKKDARWIADLFKHDLVAGSFMPPADIRQLRDLMRYRFKLTCFMSSEKNRLQNCLTVSNIQLGNVVSDTFGKSAQAILDKLLENPADTSFDLEPLVYKSLKKKLPELRDAIDGYISPEQAGKLKVIKAHYENLESRKAELEELILALAAPYQQELSILQTAPGIRSDFTAIGIISEIGTNMEAFPSAKHLCSWAGLTPTNNESAGKKKSVRVSKAGCYIKPLLVQCANAVVTSKKHPEIRNRYLRIKKRRGHKKAIIAIARMLLTALYHMLKNGENYNAELYRKSDQPPVDREITVEQAIIIARNQGYKIKSATA

SEQ ID NO: 183249 - protein, 385 aa, unidentified
MMLIGIDPHKSTHTATAIAPDTNQEAASIRIDATLREYRRMLTWARQWPQRRWAVENAEGLGRHLTSWLLARGEDVVDVPTTATARVRQLSRGGGRKNDRIDAGAAACVAALQGDARPLEAESYVDAMAVLDERRVNLAQSRVRAVNQLHALLRALIAGGAPRDLSATTAAALLRTVRPNGAVEQARKAVAKDLVTEIRTLDTQLKANAQAIARLVAATGSTLTEVVGVGPIMAGRLISRTGRASRFLTASAFANYAGAAPVEIASAEKSRHRLSRHGDRQLNSALHTIAITQIRIPSSRGHRYYKSKIAEGKTPREAARCLKRRLADHLWRTMINDERRAVGPGGHLGTTLQSSVAGPTPTTNSSDKSLPGPATHDSTTAKPAA

SEQ ID NO: 183250 - protein, 400 aa, unidentified
MDKDRIVAGLDVHKDTIYLCVMDNTEAVIFAKVYGTLTPDLELMCSEMVSYGVTEAAMESTSTYWVPVWNALCESMSLKLVNPYFIKQLPGRKSDVKDAQWIAECLLKNLIRGSFVPDKTVQDMRKYNRRIFDLNEDLTYNSNKQDAALQRCGFRLSNYVSRVNGKSYQKCVRAIITGITDPEELVKLIHGKTLRKYGRNIIKDALTGDFHQADICLLKQYAELIGVIERQIEECRNALISMCQEHFPKQFKRLQSIPGVKERAASAIIAETGADMKPFEKATNLVGWCGLKPRNDISNNKVKSNRTTHGNRFLRQILIEISWVASRTRNCFFSNFSYVQCTQRHKNKMKIQVAIARKLLVAVWHMLTKDEDFIDVYLKRLEKQAEWQNDIQALESLLVG

SEQ ID NO: 183251 - protein, 345 aa, unidentified
MTYYTGIDVSLRSVSICVVDDKGEVCLEAKVAAEIEAIVDRLRRFSSEVKSVGFEAGTLTQYLTYGLQAAGFEVICLEARQVSVTLAAMRNKTDRNDARGLAQILRTGWYSRVHVKSLHSHQVRALLASRKAILKKCVDLENELRGLLKVFGIRLPSRVGHGSFDAELRETVSSDEMLACALVPLLDARTVLYKTYLKLDNAVKGLVRVDPICRRLMSIPGVGPVTALTFKAAVDDPSRFKSSRTVAAHFGLTPRRFQSGEVDNPGHISRAGDADVRSALYVAAHSLLTRNAQWSSLKAWGVRLAKIRGHRRAVIAVARKLAVILHRMWIDESEFRWGSPAPTTA

SEQ ID NO: 183252 - protein, 331 aa, unidentified
MYFSQFIGVDISKNTLDAAIYPAKDKKLDLLHFDNTQKGLGEMMTWLKRRGVKPSEMVICAEHTGVYTNPLIAFADKKGLALSLNSPLDIKHSMGIVRGKNDAVDAGRIAEYAHNHRDKLRLYEKPSEAIMKLQYLLTERRQYMRQRTALINLNSAMGKYETREARTRNESAIHHCEKLVKKVEEQMMAVLCTDPDVKRNFDLVSSVKGIGLINAINTVVYTNNFKAFETPRRYACYIGVAPFDHTSGISVKGRTQVSKICRTQQKAELSMAARSAVIHDPGLKRYYQRKMKEKGGGKDVHGVVLNAVKFKLILRMFAVVKSGQPYKVLNY

SEQ ID NO: 183253 - protein, 394 aa, unidentified
MRYAGIDIASETHVLAIVAADGTVAVKPTAFAEDDLGYQNALTLLGTPGEVLVSMEATGHYWKKLFAVLVAAGHAVALLNPLRTHRFAGVDLERTKTDAIDALAIARFAAQKRPPTTPLPDALAEELRELVQLRQRLMQDFGDRVRQLHRLVDLGFPEFTRYVRTLDSELATAILRDYPTAAAFRGVSARRLAAVRYDGRHQVGPNLARTLIDAARRSVGQHHSATYRLQIRYACDDLDTLRGRLRTLDRDLDGKLRQHEVGRLLTSIDGIGPQTAARVIATVGNPAHFRSGTALAAYVGTIPALKQSGKRQSLRGGHTPIGNAQLRAALWMPTLSAVRCNPWLRAHYQRLIARGKLPKVALLACMRKLLLVIYSVAKHGQPFAPRLQPPQAAT

SEQ ID NO: 183254 - protein, 410 aa, unidentified
MSRRCIGMDVHRDFCEIAIWEDGRVRSAGRVRSRPEALAEFGAGLQPRDEIALEATTGAGRVAEILRPHVGRVVVANTHRLAAISESKKKTDQSDARMLAQLLAAGMIEGSWLPADQIRALRRRVNRRNALVTARTRAKNEVRALLGRNLGERPPMSDPFTEKGRRWLGALDLPDDEVETLAAALRQIDFFGGEIGSIERELAKFGSSSPEVRRLMTVSGVAMVTAVTFIAQIGVIDRFASPRQLVGYLGLDPRVRQSGNSTASTGRISKEGSTLVRHVMVEAATAAVRTPGPLRAFYERVRSRRGHQVAVVATARKMVTIFWHLLRRGEDYRHQIELPTKKKLRKMELTAGAKPRRGGSGPHDGPNREQRREVDLDRVRKAESAYRQLVADRVAASADVHEGASVIEGT

SEQ ID NO: 183255 - protein, 346 aa, unidentified
MSLSTRTSPYQLYVGVDIAAKTLTAAWMAPGATPGRPLTVDQTPQGFATLQERLLATGHPAATILVVMEATGSYWVGLATTLAQAGFVVSVVNAAQAHHFAKALLKRAKTDAIDAQTITQLAARLEPAPWTPPPAIYTELQQRLAQRETLMTLRQQVRNQRHALQHLPVVITSVLERMEALIATFDAQIAAVEQEIEQVLSQDAAWATTATLLLSITGIGLLTAAWLLVTTLNFTVCATAEEATAYAGLAPHPYESGTSVRGRAAIGHGGNGRLRTALYLATLSAAQHNPHIKPFYARLRAAGKPKKVARCAAARKLLHLAWAVATKGVAFDPTYQTQHACSGSSA

SEQ ID NO: 183256 - protein, 366 aa, unidentified
MHTAAPDVTVTVGVDTHKDLHVAVALDALGRRLAELVVPATAAGYRQLHLWATDQGQVDAFGVEGTGSYGAGLTRYLRRSGSRVIEVNRPDRATRHRLGKSDPIDAEAAARAVLAGTATATPKDGDDQVEVIRILKLTRDSAVKAQTQAVNQLKAVLVTAPAELRESLAEGGLVALLERCAALRPGEPTNPLSAAKYALRLLARRALTLRAEAKHLREHLTSLTAAAAPTLVELTGVGPDSAAALLLAAGDNPHRLHSEAAFAALCGTNPIPASSGKITRFRLNRGGNRQANAALHRAVITRMRWHEPTKIYVARRTAEGKTKPEIMRCLKRYLARQVYRCLVPRVPLNPADEQPRDPQKDLVRAA

SEQ ID NO: 183257 - protein, 318 aa, unidentified
MPEAIVVGIDIAKLSFDAALGVMTDVRTFPNDDAGHEALITTLAGRTVELIVMEATGGLERDLACALQAAGFAVAVVNPRQARDFARAMGYLAKTDRIDARALAALAQVLVRHPERDKFVKALPTAEQQALQALVARRRQLVTMLVAERQRLAVSHKAARASIEALIKAIRQQLDTVEAQLASHIDSHHAALARQLASVRGIGPATLTTLIADVPELGTLSRREIAALVGLAPFNRDSGQMRGKRSIFGGRADVRRALYMATLAAIRFNRVIGHFYERLVTAGKPKKVAIVACMRKLLTILNAMVRSGASWDDSIHLA

SEQ ID NO: 183258 - protein, 406 aa, unidentified
MISKLYAGIDISATDATLCCLDSEGNQLKPSQKFENNLSGAAQLVEALTEFEAEEIHVGLESTSVYGAHLRDFFLASPLLQGKAFVYELNPALVSGFKRSFPKKPKTDNLDAYFIAERIRFGHLRPFSEKQLTTQPLLQLTRYRLHLIKLLTMEQNRACNLVFLKFSNYLQNSPFSNSFGKASLAVLEDLFPDDLMEMDLDQLVLFITRNGNNRLNDPENMAKELKTIARQAYRLNPKMKDSVRVTLAMTIQNIEYFKNQIKQLDKLIARELKAIPQTLDTIPGIGPVFAAGIVAEIGDISRFDNEAALAQYAGLTWSRYQSGSFEAEERRLTKTGNRYLRYYLVEAANSLRVHNEEYKAYYYAKYNEVNKHQHKRALVLTARKFVRLVFALLSKGQIYQKQEVKR

SEQ ID NO: 183259 - protein, 338 aa, unidentified
MKLYCGIDLHSTNNWLGIYDEEDRAVVSKRLPNDLGVVLESLEPYKAELAGIAVESTYNWYWLVDGLMEQGYRVLLTNPAGNEQYNGLKYTDDRHDSRWLARMMRLGIVATGYIYPKEERPIRDLLRKRMRLVQHRTAHITSVLNTIARNTGSSLSWSKIEAMSDDQISKLLGDELIGMAPRASLEVIKSLDGQISKIEKTAKARAKLRSEYKLLKTVWGVGPILALTIMYETGEISRFSQVGDYCSYARCVGSVRISNGKKKGENNTKNGNRYLSWAYVEAANFASRFYPQAHRFIQRKRAKGNHTLAVKALGHKLARASYYVMRDQVEFDPARLFR

SEQ ID NO: 183260 - protein, 444 aa, unidentified
MTRGDRNRNRKLEALREAVARDRAVLAVDLGEDKQVAVVMDHECRVLARKVVKAKAHQLAGLLDWGADRAVKAGFAGLTVACEPAGHRWKALMGLADGAGHGFCCVQSLAVHRAREGDDYTLGKTDHRDAYLIGKLAVRLECYLPERADEAWARLRHLGARRFALVADVTSCMQQAGDLLGCAWPAPLGAAARPLESVTWLAGMAVITGRCCGQPRRLRKLGYDRFLAAVRRELPRWGGKYVRHSIVRGLWDALADAGGVAAQRPGALERVHLLLGDWRELRTRLAGTEERMVAVLGKLGLAELVASIDGVSALSGAVILAEAGDLQRFTSGRAVVKHAGLNPSERTSATINGQTRISRRGRPGLRAAAWRAVWGALRHNPVLQAKHAHLTGRHANRLADGQARTACAAALLRWLWAVVITGQAWDARIAAGQIPARPVTTAAA

SEQ ID NO: 183261 - protein, 423 aa, unidentified
MKEWKEITHYAGFDWARDHHMVVIVNQQGQIVADFEFEHSVEGWKSFGEKTAGFANLAVAIETSQGAAVDQMLQRDYTVYPVNPAAAASYRQRKAPSGTKTDHIDGWSLADALRVDGQGWRALQPADELSTQLRLLCRDEVALIAQRTLLVNQLQQALVEYYPAALEAFEDWISPATWDFVLEFPTPEALTKAGKRRWEKFLHTHRLWRPETVEKRLAIFSQADQFKASAPVTKAKSQLALSLCKLLRTLQQQLNQYREQIEALFKNHPDHHLFGSLPGAKKMLAPRLLAAIGSDPGCYGTFQVLQSFAGTAPISFESGKIHKARIRWNCDKFMRHTMHLWADCFHRVSPWGQAYYRKKRQEGMTHACALRCLGQRLLKILFRMISDKKPYDAELHARNQKKHGSWVLALIEKPAAQIGEQLL

SEQ ID NO: 183262 - protein, 323 aa, unidentified
MQGKMMSEQSAPEPVYVGIDVCKERLDVYVHPTGQRLSVANSRDGLKRLKQALAGIDVALVVMEATAKYHRLAQRTLVQAGLLVAVVNPLRARLFAEAAGALAKTDRVDAKMLAIMGAALGPQARPPAPEEMEALQELVRARSAATGDLTGLKNRHGAAQTPFLKAELRRQIGNLERSIARLSAEIERRIAADPALARRRRILLSMPGVGPAVAAVLLADFAELGALSAKAAALLAGLAPIARDTGDTSGQRHIKGGRKTVRNALYMAALSASRANPDLKVFYQRLRAEGKKPKVALTAVMRKLIILANSLIKDDRQWQTSAP

SEQ ID NO: 183263 - protein, 341 aa, unidentified
MQVTTVGLDLAKNIFDVHGVTEAGEVAFNRPLRRAQVLAFFERLSPCLIGIEACASSHHWGRELTKLGHTVRLMPPMYAKPYVKRGKSDTVDAEAICEAVTRPTMRFVEIKSEDQQALLSLHRARDFVVRQRTQLINMLRSLAAEFGITIARGVARAIDFAKGIIEGKQSGFPALALDVLRVLSRQLVELHNRLRWYEITMRIQARLSRQAQLLQTIPGVGPVTASAVAATIGSGHQFKSGREFAAWPGLTPRNHSSGGKERLGKITKMGDRYLRQLIVVGMTSRVRQVTNHPERADPWLTKLLQRKPARLATVAMANNLLGTCLRHTLPGSGLCGSCGRC

SEQ ID NO: 183264 - protein, 352 aa, unidentified
MTKHKYVGMDVHSATTVSEVINEQGKTVARSIVETKAAEIKDFIRGLTGTIHVTFEEGVHAAWLHEIIKPLVAEVIVCDPRHNKLIQSGNKSDQNDAHKLAELLRLGSLKAVYHGDCGTRKLREAVRGYNALTGDCLRVMNRIKAMFRGRGIDCGGTEVYRVIHREQWLDRLGDPPAKARLELLYEQLDSVSGLREKARREMVTQARSHSAYKVLKQIKTLGPVRIAEIIGVVRSPFRFRTKRQFWPYCGLAVRTASSADFEIVNGKVRRTAKRAATRGLNHNYNRELKKVFKGAALLATVTEPFKQYYEGLTASGMKPEMARLTLARKIAAITLAVWKKGESFDASKLIKE

SEQ ID NO: 183265 - protein, 372 aa, unidentified
MTIVAQTRPFVIGVDCHARTHTYAIIDASTKRQVACEQFPTTSAGISRALAWAGRRTDGDMGCLWAVEGIGSYGARLARAVADAGYDVAEAPRMNARGRRGIGKSDPLDAAAIGTAVLAIEESQLRAPRRDEGTRAGLRILSAARDQLTRERTMNVNALIALLRSHDLGIDARKPLVSAQIATITRWRERQEQIELSIAREEAIRLARRVLEVTTQLTANHKRMTELIQQSPAAPLLEMMGAGAVTVATVMTAWSHPGRVRSEAAFAALAGVNPLPASSGNTVRHRLNRGGDRRLNRALHTITMTRMVHDPGTRDYVTKRTQEGRSYREIRRSLKRYIARTLYRQLNSLYATAEPARSPMPGRPLPGIGAPI

SEQ ID NO: 183266 - protein, 346 aa, unidentified
MRIIGCDYHPSWQQVCWLETATGETGEQKLEHASGEAERFYRQLREPALIGMESTGNCQWFLELARRLGHDLWVGDAAKIRASDSRQQKHDRRDAALLLKLLLENRFPRIWVPSSEEKDLRQLLIHRYKLVRIRAQVKNELQHLAMNQGVTRKRKLWSKTGEKVLRELPLLPWTSRRREDLFRVRAMLDAQIAPLDQAVAEAVEKNAKARLLMTQPGVGPITSIAFVLTMGDVSRFQRGKQVASYLGLIPREYSSGGHQRLGSISKQGNRFLRMLLVEAAQNAVRYDPQMRNEYLHRCRRMAKGVAKVAAARKLAIRLYWMLRTNQGYPEVVRVESSSRVPLVSAS

SEQ ID NO: 183267 - protein, 359 aa, unidentified
MDKNTQVPAVRVGVDLSKRVIQVHAVDGGGRVLTNRALARDKFLAWCALLQVGCMVVMEVSSSAHHWARALRAMGLDARIISAHLAAPYRAEGHCGKNDANDAAAICEAASRPHMRFVPVKSVEQQSLLCVHRLREGLKADRTACINRIRGLLLEFGVAVPNGSRALRLVLDELLEDGANEMNGLARMTLRRAQAQWRELDEHLAWCDERLAAHEQENPEVRRAGQLMGIGPVGASAAVATVGDFRQFKSGAQFSAWLGLVPKQHSSGGKPHLGTITKRGDAYLRTLLIQGAKSVVNTAHTRSDPISRWVLALKERSGWQKAVVALANKNARILWAVMTRGERFDPHHISLKPGATMPS

SEQ ID NO: 183268 - protein, 381 aa, unidentified
MITVGMDVHVRNSYLHVTDDAGNVMRHGRCQNTLMDLAEFLSPIEREAAQRDEPVRTVLESTTNSRAIQRMLTEYGGAAGIDLTAEVLDARKIRIIAESVCKCDRLDAKVLGELARSNLKLPVCYMPDDEEFALREHLRARSDLVRMRTMLKNRVHAVLHRRGILAPTADLFTKAGRAFLGQQELDEAGRTILDRYLETMDQIHRAVDESTASLKELMRRPRWSKAVALLMTMPGIGLITALTILAELGNLKRFRSRAAVANYAGLVPIVRDSNQKHYSGGISHRGSNHLRAVLAEAAWMAVPRVPVYCHLFERVEQKKNKATAIVAVARRMLEDAFTLLKRDEAFRYIAVSAADTSQQVGTVTPAPESRSGRKVASSVAG

SEQ ID NO: 183269 - protein, 458 aa, unidentified
MAPRKRKKSAVSDALPPQLATVNLHAAGIDVGAEEHWGAVPACDDPQPVRRFGANTADLDALADWLWACDITTVALESTGVYWIPLFEVLEARGFQVLLVDPGKMPRNGRPKTDVHDCQWLQRLHTYGLLSACFRPEDQVVVLRSYLRQRAALLADAARDIQHLQKALTQMNVKLQHVVSDITGVTGLAIIKAILAGERDPQKLAQLRDHRCKQDAAAIAQALYGNWREEHLFALQQALERYEFQHRQLAACDGRIETQLQTFADRSQGEPLPPKLSQRRRHRNRPAFDPREPLHRMTGVDLTRIEGIDETTALIVISEIGLDMSKWPSEKHFTSWLGVSPHQRVSGGKVLSSRTRPTTNRAAAALRLAAASLHHSKSALGAYFRRMKSRVGTPKAVTATAHKLARLIYSMLKHGTAYVAQGMDDYEQQYRDRAVKHLHRRAKELGYELHPAPAGTLA

SEQ ID NO: 183270 - protein, 343 aa, unidentified
MQIAILGIDLGKNNCSLAGCDVTGQVILRRRMKREGLMTFVSNLPACVIAMEACGGAHHLGRLFRQKGHEVRLMSPEYVRPYVKAQKNDDRDAEAIAEAASRPTMRFVELKSEDQLDMQILHRARDRLVAERTSLINQLRALLLERGIVMPQGRKKLEVGLAVLMDVEIASFSLRIRSLVEDMRIQWRDLDQRITAFDEEFRAYSRSDKACRLLTTIPGIGPLNATAFVAAIDNAQTFSRGRDLAAWLGLVPRQMTTGGKPRLLGISKRGNGYLRKMLIHGARAALPTLSKDKTILGSWLRNLLARAHFNKVVVALAAKMARIIWSVLRSGIGFKALTIELSA

SEQ ID NO: 183271 - protein, 342 aa, unidentified
MRYIGLDVHKDNITACVLSDSGKVVFEKNFEKIDGTCVCLAELFDHVGKSGFCVLMETGTYAYRPYRFFSDRGCDVDCVHAQCLKMITQTDKKTDKNDAKTIARMLRLWKRHDIDLQIAYMPTREQCELKDLCRYREEISKKIGDESRRIKSQMARNCQIIPEGMDDFQVKRNRRYVLEKFGTDQTLSRRMRALEQLFEERDIVRKQVESGLPNDPNVTLLEHIPGVGRQTAVQLMSMIVDISRFEDSDKFCAYFGLVPRVRDSGGKVHHGRMTKNGDRMMRVLMERVTQAHVRICDSSVTDYYNRLRQRMGAKKALITTSRKMLKTIFAVLKNQQEFRTRP

SEQ ID NO: 183272 - protein, 347 aa, unidentified
MNYIGVDCHISTLDFAVVDGKGNIKKKACVNTGVKEFMEFVRSIPAPRKIYIEEGELANWLLETSRRFGEQLIITDPRENKWISKAKQKNDPIDATKLAQLARGGYIKEIYHPVNDRRRFKELVFAYHDTVKSQTRIKNKIKACFRREGIKCSGETVYSETYRAEWKEKLPKNNSVNLIIDELWTQLDQLQNTKEKIKINIRTYARKYPEIKRFIKVPGVGLIHASTISAIIETPHRFANKKKVWMYAGIGLTERGSGDKVYSRRLTREFNRPLKNAIKQATEAAIHSNDNPFMRQYLRLTIEQGAPSHKAKLTVARSLLSALYIIWKKGEEYDPDIDQKRDKGSKK

SEQ ID NO: 183273 - protein, 408 aa, unidentified
MEVLYPRCAGLDVHAKTVVACVRIAAGATVTYEHRTVSTSTRGLLELADWLAAHAVTHVAMEATGVYWKPVWHVLEGHATLVLANAMHIRNIPGRKSDTNDATWISDLLALGLIRSSFVPPAPIQELRDLTRTRKQLVREITRHTQRLQKTLEDANVKLTEVIGDILGTSGRAILTALVAGETDPERLADLTSGRLKATRAELVAALHGRVTAHHRFILHLHLTQIAALDTAVADVEARIREALVPFRPAVSLLTTMPGVSETAAAVIVAEVGTDMARFPSAGHLLSWAGLCPRLDESAGKRRSTRTRQGAPWLKTTLVQCAWAASRKKQSYFHAQFLRLKSRRGPKKAILAVAASMLTDVYHMLRDGVEFHDLGDQYFAQHDKARLTKRLLQRLRDLGVEVEVKKAA

SEQ ID NO: 183274 - protein, 401 aa, unidentified
MISVGIDVSKEKSTVCILKEYGEVISEPHEINHTETDLKALVESISELNEETRVVMEATGAYHLPLLTYLKNHGIFVAVINPLIMKKYSAIGLRKGKTDKLDSIKIANYGIDNWFKLTDYEATDEVYSELKLLGRQYSHYIAMRIESKLVLSNLLDRTMPGIKNLLKNRSDKPEKDKLNDFVKEYWHYDNITKKNEKQFINSYFKWAKNKGYHQSETKAKQIYALAQEGIPTLSSSTPSTKMLVLEAVRVLSEIDRTLSMILSQMQELASSLKEYNVVRNMPGVGDTLAPRLIAEIGDLRRFYNKKALIAYTGIDSPPFESGQFVANKRHISKRGSALLRKTGYEIMKCIKSTKPKDDPIFLYMLKKEAEGKSKKVAKIAALNKFLRIYYARVKEVYNTQV

SEQ ID NO: 183275 - protein, 401 aa, unidentified
MMYVGIDVGKNNHEMGIVDDEGNHVGSSLPFPNTVEGAQKMLQYLKLMNPSNEDVLVCMESTGHYWLSLYSFLQKEEYETVVVNPLQSDSFRKLSLRKTKTDPVDSFLLADLIRFGKYSNTTLPNEKTHALRQLSRFRTSLVETCSDCKRQAIAVLDQVFPEYASLFSDVFGKTSQEILLKYTTPEEILSVDTRKLTYILSKASRGRLGKDKARALKKAAKISFGIVYAQDAFPFQLKMILRQIQFMETNIKEVEEKMVQTLKEVNNVITTIPGVGPILGAAIVGEIGDIKRFAGLDPSVKQSGSFTGTKNHISKRGSRYLRRAIWLAAVVAAFHDPVFSAYYLKKRGEGKAYGTSIGAVARKLTFTIFAVLRDNKPYEIHLPEKKDNKILPANLSSTTHI

SEQ ID NO: 183276 - protein, 349 aa, unidentified
MPENRETFVNVGIDVGKDQLDVCIHERGIHFVGMNDAAGIRLVIRRLQRYRVERIVVEATGRREYDFVVAAAERGLPVIICQPLLVRRYAAASGVLAKTDKIDAGILASYAAVMQPEVRPLAIGNIRKIRDLIARRRQLMEMSTMEKNRLDVMPKALSADIRRHVRHIRAQIDKIDRLVADLVDSIEEWRDKRDIMTSVPGIGPQVINTLLADLPELGTLSNKQIAALVGVAPFNRDSGKFRGKRRIRGGRASVRTVLFMAMLSAIQHNPIIKATYRRLVASGKHKKVALTACMRKMICILNAILRDQVPWRGVFEILCHFFKLTTKEMIHEEINSIRYGRSRQGAARG

SEQ ID NO: 183277 - protein, 359 aa, unidentified
MFTVPVFVGLDYHQSTIQVCVMDASGKVLANRACQNRWQAVRDLVAAVGVPVRVAIEACTGASDLAQELVDHAGWSVDLAHTAYVARMKRQPDKTDYSDARMLADLTRVGYLPQVWLPPLYIRDLRRLVSLRNSLVSQRRNLKLRLTSLLRDLRVIIPHARWSKPWLEKVQAPDALPPVGKLIAAEILDQLKDVMGRIDRVKDQMEIFTQGDAIVAYLRTLPCVGPVTSWIMRAFIGEITRFKNGKQLAHYCGLSPGNVSSGKRTADSGLVNSGNTLLRATLIELGQRLARTQDRWKAFRQELKARGKPHCVIIAAIANRFIRAAYYSWKQTRLTGIMPPASDPPALLDTATGEVSSPR

SEQ ID NO: 183278 - protein, 321 aa, unidentified
MPATIIGVDPHKRSHTAVVLDDCEEIAAQLRVTASPHQVDQLLGWAPATVQRLWAIENANGLGRLLAQQLVARGEVVIDVPATLSSRARKLSGHSGRKTDEHDARSVAIAAGHNHGLRRVSIENVTVAIGLLLDRRWQLVAQRQPTICQLHALLTELVPAGAATHLTSTKAAALLRKITPSSIVELERKLVARELLEDWRWLDRRIPAAKQRLSDALTAYGTTLTDIHGIGEIGAATVLSIVHDPARFPSRGHFAAFNGTAPLEASSGDVRRHRLSRRGNRQLTRSSTSRPERRSAAMAPAAPTTNANSPRARARWKRYAR

SEQ ID NO: 183279 - protein, 353 aa, unidentified
MNEPTIDDVEVTGGVDTHRDTHMVAALDQRGAELGVREFTTTPAGHRETLCWLESFGTIDRVGVEGTGTYGAGLTRFLHRNEVAVVEVACGDRQARRSHGKSDPVDAIAAARAAQSGKATTVPKSGTGNVEAIRALRMVRKSATRDRTGAINQMRALIVTAPDELRETFRGISIAKLVNSAARLRPTDAATVEAATKFALRELARRVQSLNAEIKRVNDILGPLVTTTAPNLVARIGVGTDTAATLLIAAGDNPDRLRSEASFAHLCGSAPIDASSGPVIRKRLNPRGNRQANEALWRIVLVRMGKDPRTRRYVERRTTEGKSKREIMRCLKRYVAREIYRDLNPTNKALDRQ

SEQ ID NO: 183280 - protein, 343 aa, unidentified
MTIIIGIDPHKASHTAVAIDNTECVLDELRVRACAAQTDRLRSWAAPFPDRVWAIESARGLGYLLAQQLVAAGETVVDVPAVLSTRTRLLGSGRAQKNDPNDARSVAIAALRTDGLARVRIDEHAQVLKLLAKRHRDLGRLRGKAACRIHALLMELEPGGIAQRMNVTRANDLLDRVVVDTEMAAHRVGVAREFVADLAHYEAQMKTSKTRLRHAVAATSTSLTDIRGVGVVTAAMIIGHVGDVSRFKSAAHFASYNGTAPIEASSGERRRHRLNPRGNRQLNYAIHVVAITQLRYPCEGREYYDRKRAEGKSAKEAIRSLKRQISNVVYRALIADARRSSSQ

SEQ ID NO: 183281 - protein, 348 aa, unidentified
MKIIGCDYHPSYQQIAMVDSETGEMWEGRLEHEQGEARRFYQALQGQVVRVGMEAIGNSQWFEKMLGEQGHELWIGDAGQIRRLVVRRQKTDRRDAKHILDLLLDGRFPRIWVPSAEIRDVRQLLRHRQKLVEIRTQVKNQLQHLALNQGVRRKRRLWSKEGRAVLEALPLQGWTAKRRGDLIEMLDRLETQVEELDQEVRAEAQRRPEVRLLMTHPGVGPVVGLAYVLTIGPAARFPRGKHIASYLGLIPREHSSGGRQKLGAISKQGNTMMRTLLVEAAQTASRFDQELRRDYSRLRARKHSALAKVMVARKLAVRMYWMLRENKAYSPRPVARMQGSPSHSVVAG

SEQ ID NO: 183282 - protein, 353 aa, unidentified
MPSKADTAIARTIGIDTGKNTLHVIGLDEKGAIVLREKVSRVRITKRFVNVPPCLIGIEAGMASHHIARELVALGHEVKQVPPGYSKPFRQGHKNDFRDAHAVAEAVERPSTRCVPIKTDEQLDLQALHRVRSRLISNRTAVTNQIRGFLLEHGIPVRQGHHFLRRQLPQLLGTRIDVLSPRMIRVIGDLMSDWNYLDERIERVTDEIESLARADEGCQQLITVPGIGPIISSAMVAAIGTGAAFCKGRDFAAWLGLVPKQMSTGDRTILGRITRRGNRYLRTLFIQGARAILLRPTGWAKHSFGSWLAAAARRMHRNVLAVALANKLARIAWTVLAQARCYEARVERRVEPA

SEQ ID NO: 183283 - protein, 367 aa, unidentified
MDQRTQFVGIDLHQETVTLAVLEEGAPSPRDVQTLPNDPSKLRRYIARVAQAGPVRACYEASACGYVLQRSLTRWGHACEVIAPSLIPRRPGARLKTDRRDAARLAHLYRSGELTAVRVPTEEEERLRSLVRCREALVREVLASRHHVLKLLQGRGQRYEGKEKWTAAYQRWLDQIDLPEPDAYTLRTYRALLETKIALREEVGRKIEAFAQLAPWKDVVARLVCLRGVRTVTAMTLALEIGDVTRFATARHLMAWLGLNVSEYSSGSQERRGGITKAGNGRCRRILVEAAWHYRHEPRVRKALEDRRRGADPLVVAHADRAQRRLCRRFKDLEARMPSAKAVVAVARELAGFVWALMHEGGRRLQP

SEQ ID NO: 183284 - protein, 367 aa, unidentified
MKKISTVAAKQSRNFSQPKLTIGLDLGDRSSWYCVLDEAGGVLLEQRLSTTPKAVKEVFGGMPRCRIGLETGTHSPWVSRALSELGHEVIVAHARNVRLIGESRKKDDRLDAQTLARLARIDPQLLCPVKHRSAKAQADLTVIRARAGLVRARTALVNTARGLAKSYGERLRGCNVRNMNAEKTQRLSPELRTALEPLLAGIESLSERIRECNERIEELAQDSYPQVALLKQVKGVGTLIALTFLLTLEDAHRFRKSRDVGCYLGLQPGRRNSGQSEPQMHISKEGDPYLRTLLVQGAHHILGPFGADSDLRRWGLKLAERGGKSGKKRAIIAVARKLAVLLHHLWVSGEVYQPLRHSKPRAMPAAA

SEQ ID NO: 183285 - protein, 414 aa, unidentified
MSEFEFAAFVGLDWGDTSHEVAVWDEQRQTQRSERIEHTPAALRAWVEALQARFADAPIGVAIEQSRGAVFDTLSGYPFVTLYPINPRSAARYREAFHPSLAKDDPTDAVSLLDLLRKHRNELRPFVPDDASTRLLRLLTEDRRELVDRRTQHVQRMTDRLKTYYPQALRWAGALTTAQACDFLDRWPTLQAIKGARPSVIRAFYERHHHAAPWIDEKLAEIRAAVAFHEDEVITATAVLLVGSEVAQVRALNASIATYDEKIASAFGAHEDAPIFTSFPGAGEQLAPRLAAAFGTDRSRVDSALNVATRCGIAPVLRRSGKTATVHMRWACPKFLRQTFHEYARVSIGHSVWARAFYHQQRARGHGRHEAIRTLAYRWIRVLYACWKNRTPYDEARYLKQLAMRGSPLANAAA

SEQ ID NO: 183286 - protein, 403 aa, unidentified
MNSVGIDISKGRSTVAVMRPFGEVVISPFEVRHTDSELSELARQLKSLDGETRVVMEATGNYHAPVAKLLHDAGLYVSVVNAKLVHGYGNNDLRRVKTDRKDAIKLANYGLDRWLTLPRYVPEEDTRLLLKNCYRQYRQYSKVQTVLKNNLISLLDTVFPNVNRLFSSPAREDGSEKWVDFVAEFWHCRCVSEKSEKAFANKYQRWCRKYGYNFNEAKAHTIHAEASGHIGVMPMSETTKLLVEQAVAQLRATSTALAALKHEMQALTSMLPEYPVVMDMFGVGPTLGPQLIAEIGDVRRFYSKKALVAYAGLDAPPNDSGDVTGRHKSMSKIGASSLRRTLFLVMSVYLQTAPLDEPVYQFMDRKRAEGKPYRVYMMASANKFLRIYYATVKAYLESLEHTA

SEQ ID NO: 183287 - protein, 451 aa, unidentified
MKKEKVNKGVIKMGSGLPVFNHFAAGIDIGDTLHCVAINDGNGGHEVKTTSAFTCDLTEIVDYLKGNGITTAAMESTGVYWLPLYIMLEEAGIEPYLVNAKHVKNVTGRKKDDTDSIWIQKLHTCGLLQKSFQPDNEIRLLRNYTRQRKNLIILGTDAVRRMQKALELMNIKIHTVISDILGKTGMEMVKAILAGEKDPQILATLCDPRIKASQEEIIKSLQGIWKEEYLFMLEQAVENYEFHQKQIKNCEEKIKQQLIKQVAIIKEGDITSLEEMLKKKAKSKRNQFDFAIAPLLNAIAGVDLCMIPGISEVTALGFISEVGVDMSKWNSGKQFAAWLNLTPNTKITGGKIISSKMMKKNNKAGQYLRQAASCLSTNKTPIGDYYRRMRGRLGGKGAALTTAHKLSRVIYTMLSKKTEYNPGMMIDNQEKFKEDKIKKLEKQLARLKQVA

SEQ ID NO: 183288 - protein, 404 aa, unidentified
MNNVAGVDVSKGKSMVTVLRPFGEVVAKPFSVGHTGSELKELADHLKSLDGETRVVMEHTGRYYEPVARFLHEEGIFVSAVNPKLIKDYGNNTLRKVKTDKADARKIARYGLDNWAELRQHTLMDTIRTQLKTLNRQQGLYTKTKTMMKNNLIALLDQTYPGVNDLFDSPVREDGSQKWVDFATAFWHVDCVRNMSFAAFTERYRKWCKRNGYNFSQSRAIKIHTEAQDLIAMLPKDALTKTMVRQAADALNAGSKSLERLKAEMRSLASQLPEYPVVMAMRGVGDSLGPQLMAEIGDVTRFAHRGSITAFAGVDPGSDQSGTHEAKSPRTSKSGPPELRKALFLVMDCLLKTMPADDPVYRFMDKKRSEGKPYLVYMTAGANKFLRIYYGRVKEYLASLENAD

SEQ ID NO: 183289 - protein, 401 aa, unidentified
MNAVGIDVSKGKSMVCVMRPFGEVVLEPFEVLHTAQNLHDLAEKLKALDGETRVVLEATGNYHKPVAFVLHNAGLFVSVVNPVLIHDYDNNSLRRVKTDRKDAVKIANYTLDKWTRLRQYLPEDDTRLALKNCYRQYQQAVAIRTMLKNNLISSLDLTFPDANKLFTSPAKSNGCEKWVDFIGDFWHSECISSLSANAFAKKYLKWCQKHGYVFTRSKSDEIYACAVNSASLPKSPTSKLLIQQQVAQLKAVSQSVAAFRQEMLRLSQQLPEFDTVMEMYGVGPSLGPQLMAEIGDVRRFSSKKSLIAFAGIEPQPNDSGKVVGNDKGISKVGSAVLRRTLFLIMTVILQTQPQDEPVFQFMNKKRSEGKPYKVYMMASANKFLRIYYARVKAVMDSERSQ

SEQ ID NO: 183290 - protein, 411 aa, unidentified
MNFIGVDLHKKSITICVMDEKRKILARKTVACTQTDEILEFFRQFRPFKVVVEATASYLWFVELVEPWAEKVVLANPKKLRVIAESTKKTDRLDAQVLTEFLVLDMIPESYQATPRLRQHRALVRHRQYLQGRITSVRSKIRHILSNYNTDRKVLFSANCGLAYLKEVRLNDVDRFVMKQLWAEWQDHLAQRLAVSKQLKAFVAKAPQREAEAREILKTAPQVGSVTAEVILSELGDISRFRNAKTVCAYAGLVPVVRQSGERKSKDMKITKEGSGLLRWALVEAAWRLVGKSPKWAALFSRLMHRSGKKRAIVAVARKLLCVLYAMLRTSTPYKIVTTQTTAPRTTGKESVRTSTPDQTTPTETTAPRTTGKKLVRTSTPEQTTATETTAPRTTGKKLVRTSTPDQTITT

SEQ ID NO: 183291 - protein, 338 aa, unidentified
MTCIGFDHHKKWTQAAAVDDQGKIIREMRVLNDNSSLKGFLKGLPQPLKGVVEAGPTWGWIYDTLTELGVKMIVANPSAVRAIAEAKIKTDKIDARMLATLLRVGLIPEVYVPTEEVRSQKMLWRERIWLVRMHVRLKNRIHRLLNHYHLEVPEFSDLFGAAGRRFLEELKLPEPGNRILNAQLKLLQSYRLQIEEVQRWAVKATQGHPNRAYLESLPGFGKVFAPIVALEIDDPKRFASPGKLASYCGLVPSLYSSGGKSWQGGIGKEGNHWLKWAFIEAAWAAIRSSAYFRVVYQRLRQRKTAQVSIIACARRLCEIAYHLLKERRCYEERPFRCA

SEQ ID NO: 183292 - protein, 352 aa, unidentified
MVVAVQYRRPSLNKNVMVQIYGIDLGMSSFDVSFLSESGSVRHLSGVKNTVHGISKFLLSLPSSAVLCAEHTGVYGDLLLRLCTLNRICLCFVPGYQIKHSLGLQRGKSDPLDACRIREYAERFYDLLRPCFYPGEEMSELQELYRTRSLLVESRKRLDTLNIGDNCKSSVSLAAGHARRAVLAELNTQISGLDHEIEALIQNSSEFSRNYQILTSIVGVGPVTSCELIIKTENFRKLDTAKKCAAYAGIAPYPKESGKMKCGHKISPMGDKQLKTLLFLCARSAKEHNKEIRLYFLKKHKVEKKHFFVAMNNIANKLLRLIYSLIHKQQTYDRDYIQRDPRCVVISDTHKC

SEQ ID NO: 183293 - protein, 345 aa, unidentified
MECYVGLDVSLKQTSICVVNERGSVVREGVVDSVPEAIAGFVRSKAPGAVRIGLETGPTATWLWTELARLDLPVICIDARHAKAVLKMQVNKNDRNDAAGIARIMQTGWFKEVRVKDLDSHAVKALLASRALLVKIKRDLENQVRGLLKNLGLVVGHGTFNVFAVRAKELIADRPELTSAVSPLLTARTAIEQQIGELDRQVLKLSRQDAQARRFMTVPGIGPITALCFKATIDDPARFRRSRSVGAYIGLTTRRHASGELDWSGRISKCGDAMLRMYLFEAAGVLLTRVPKWSALKAWGTRLTKRNGLRKAKVAVARKLAVILHRMWVDGTEFNWSNNNKEVAA

SEQ ID NO: 183294 - protein, 386 aa, unidentified
MIEVVINRHLIGATFRMKPKLSDYELATISYHRDTLGVNPVAVDVASRVMQVCYFDSDKKLLKNFQLTRSKFFEFVDKAPEPFLFGIEACGSCNYLSRYFESKGHQCRIIPASKVKAFLKLDKNDKIDATGIFKAMLSSVESIPAKSLENQLIMNLFTIRDQLVKQHTQCLNAAHGILYEHGIVAGGAGVETSAKITLGFTDAQESFEHDPMASAHFSVIKNAVFNILDNLKEQIDTINKYILKYGSSNNTCLNLTTIPGIGLQTAVALNTALDDPERFHSARAFAAYVGVAPIITGTGGKITVMGIRKSGIRSLKKSLYMGAMVYLSNAMKNGTESSWVKDRLKTKRKKVIICAIMNRLARIAYAVVKNGEVFDETKCNLIKNLR

SEQ ID NO: 183295 - protein, 351 aa, unidentified
MPRATSSTNVIATIGIDIGKNAFHVIGLDDKGAIILRHKLSRGQVYARLANIPPCLIGMEACVGAHHLGRQLSALGHDTRLMPARYVRPYSKGQKNDFRDAEAIAEAVQRPTMKFVAIKTVEQLDLQGLHRIRERLVCQRTSVINQIRAFLLERGIAIRQGLRILRTEMPIVLAKTDKLSQRMIHMIEDLCTDWRHLDRRIATVSKEIETLSEQDDGAKRLMTVPGIGPIISTATVAAIGTGEVFSKGRDFGAWLGLVPKQMSTGGRTILGPISKRGNRYLRMLFVQAARAVLLRPQSWEKHGLKLWIEAAARRLNRFKLAIALANKIARIAWGVLHGGRNFEVRPTNQAA

SEQ ID NO: 183296 - protein, 453 aa, unidentified
MNKGKKKKTGVKKITQFEIIRPHVAGIDVSDSNGMLVAYPINETEIVIEEFECYTRDLRRLSDTLKSHKIESVAMESTGVYWIPLFLLLQEDGFEVYLVNAKHVKNVTGRKDDESDAEWIQKLHRCGLLSASFQPDNQTRALRSIVRHRSSLVTTRSTYLNRMQKALEQMNLKIHTVISDIDGKTGQDIIKAILSGERDPEKLADLRDKRIKASREEIIKSLEGFWLEEHLFELSQCYKAYLFHNEMILDCDKEIEKFLQEIIQSKNYGVMLQLGKLKRKPRYKNDISIDVTNYLYTLNQVDIVGINGITGISEISALTIYSELGDNLDRFKNEKHFTSWLGLAPNTKISGGKIISSRVPKKKHYAGQVFRMAAMSLCNNKGPLGDYYRRIRAVAGGSKAIVALARKMAVIYFRMVTAKEGYNPQALIDYQKKHRERKIKYLEKYLDRLKTAA

SEQ ID NO: 183297 - protein, 340 aa, unidentified
MVNRTAVGVDIAKNVFQVHYVDQETGEIVNKPIKRAKFLEHFANRAPCVIGMEACGGAHHWARQLTKMGHEVKLMPAEFVKAFNIRNKNDAADARAIWLAVQQPSKSVAVKTEMQQAMLGLHRMRQQLIKFRTMQINNLRGLLTEYGEVMSKGRSKLDKEIPVVLERIAERLPAVIIDTFREQWNGLSKLDEQVAEIERRMREWKKEDKSVKAIGEIPGVGLLTATAAVAMMGDPKAFSSGREFAAWVGIVPKQTGSGGKVTLHAISKRGDTYLRTLLIHGARSVLENAKEPGEWVEQMKKRRPKNVVIVALANKMARTIWAVLAHDRPYRKDYVSVKPA

SEQ ID NO: 183298 - protein, 346 aa, unidentified
MTIVGCDFHPSWQQVAVFDSETGEIRELKLENGNGEAERFYRELSSRALIGFEACGNTQWFEDLLDRLGHEVWMGDAAAIRASYVRKQKTDRRDAAHILKLLIENRFPRLWRPSAEDRDQRQLLIHRHKLVGIRGRAKNGLQHLMLNRGVQMKRKLWSEAGQEALRALPLEGWAAQRRQDLLKLLSVLDPQIHQLDVAIQRAAQENPRARLLMTQPGVGAITALAYVLTMGDVNRFKRGKQVASYLGLIPSECSSSKRRRLGSISKQGNSFMRMLLVESAQTVNRLDEGFRKQYQHRCHRMAKGVAKVAAARRLAVRLFWMLRTNTGYPEIAHIEGSPREGVVGES

SEQ ID NO: 183299 - protein, 349 aa, unidentified
MAIVAEQFDHVVGVDTHARSHTYCIVRCRTGAVVDAATFPTSKTGLARAMNWVQDRAGGELLAAVEGTSSYGTSVTAMLTELGVEVAEVRPATKATQATTGKSDTIDAEAAARDVLGKEVARLARPRRPGDRGALRVLLAARLLMDQQRTANRNALNALIRTTELGVDARRPLTNAQVRTIATWRIGRHEASTPAGVARREARRLATTVLEQTRLLADNHRQLDELVNETAPGLQDRPGLGPVTAAIIICAYSHKGRVRSEAAFAALGGVAPLPASSGNTTRHRLSRSGDRQLNRALDIIVRTRMSRDPQTKAYVARRRSEGRTNREIRRCLKRYVARTIYRHLEASMA

SEQ ID NO: 183300 - protein, 349 aa, unidentified
MAEQRISYTGERIDVGIDVHKETYTVTCLWQRQMVKTATVPADPVCLAESLPRWFPGARIFSAYEAGFSGFVLHRALTTAGIPNIVVNPASVAVAANDKVKTDRRDAKRLARDLADGRLRGIYVPTEAEELARLLPRTRAQLVAHRATITRQIKAKLHQFGLIAPASRRLMSSRYLREIAAWELPPELRVSLTLLADQWRFATRQLLEVRRLLREQAKAQVALETVYRSVPGVGEVVARTLATELGDMTRFANERALLSYTGLTPSEYASGTAIRRGHISRQGVSRLRHVLVETAWRALPRDPILQAMFDRIAATRGKQRAIVAMARRLIGRIRACFRHGTTYAIGTVG

SEQ ID NO: 183301 - protein, 384 aa, unidentified
MTSMTSSIPTASRVHRMVFGGIDTHKDIHVAALLDRDGGLLGSASFPTTQAGYRRLQDWMGSAGTVARVGVEGTGSYGAGICRQLSTAGIEVVEVNRPDRSQRRRRGKSDALDAAAAAEAARIGHRTAIPKSRDGQVEALRVLRLARASAVKARTKALQQIDQLLVTGPALLRDQLRQLTRRKLIGRCAAWRPDSQQAGDPVVATRIALQQLARRYLQLDEEISHSDALLHGMVTELAPQLIAVAGIGTETAGQILLTIGDNPDRVHSEAAFAMLCGVAPLPASSGKTQRHRLNRGGDRQANRAIHIIATTRKRCDPRTQTYINKKLAEQHTRREATRSLKRLIAREVYYLLHPPHTPGRFLHLGQPAGAQARSRWSPPRAERP

SEQ ID NO: 183302 - protein, 399 aa, unidentified
MLAVGIDISKSKSVAAILNQDGSMHTSPFEFHHTQPELDALIKYILNSKQSATILMENTGHYHYPVLKAFQEAGLPVCMVNAYQIKKFGDMDLRKAKTDKKDAVRIARYALEKSYSLVPYTSMEQKYEDLRFLARQYNQRMLTLKTNKVFLLNLLDETMPGITNILPLTTRTPETSLSVLFINRFKSYDRIKKMGKSRFLDAFEKIARKSRNRQTKTYGLAIYEAALRNITTRGENEYTLAAQDQCLELVCESQKAADSIILKMQTLAETLPEYAVLRSMAGVGDRLGPLILAEIGDIRRFHSGKALNAYAGNDAPPYQSGTFESHNRHISKRGNAALRKYCFEVMQALKLTRPQDDPVYLFLLKKEQEGKPYNVAKMAGVNKFLRIYYARAMETLKQQ

SEQ ID NO: 183303 - protein, 371 aa, unidentified
MSTVRFVGLDVHAETIAVGVAEPNGEVRSLGVIPNRPDSIRKLMKKLGPADQLRVCYEAGPTGYVVYWQLTALGVTCAVVAPTLVPVKPGDRVKTDRRDGLKLARSYRSGDLTAVWVPDAAHEALRDLVRAREAAKKDQLRARHRLGKFLLRHGRRPPTRMKAWTQAHLTWVKRAVHFEHAAQEATLLDYLHEVDHVAARIARLEGAIDAAVTAAPARMRASIEALQALRGIARLSAATIVSEVGALSRFAKPRQLMGYSGAVASEDSSGERTRRGGITKTGNAHLRRVVIEAAWAYRHRPAVGPALRKRQAPVSAEVNAIAWKAQHRLHTRYRALTARGKCKQNVVTAIGRELLGFIWAIGVRVESPHVA

SEQ ID NO: 183304 - protein, 331 aa, unidentified
MKKNYFIGIDVSKSTLDVSICNENKMVHYTKINNEPKAIKMWLKADLKKFQINHQDCCVLIEYTGIYTFHVVNQMREAGIELFVVPALAVKRSLGLVRGKNDKVDSKRLAFFAYEKYASLVAYTPVRPVILELSNLVSLRSRLLKAKQALVVAQKESSRFTTTKFAKSILDLQSKSVLALEKDMKAVEKKIKQLVASDPLLSKKSQQIISIDGVGIVTAVNVIITTNEFKDIKEAKKFACYAGIAPFEHSSGSSVRGKERVSHLANKKMKHILHMAAISTLRMKGDLRNYYDRKVKEGKNKMSVLNAIRNKIVLRIFAVINQDKFYSKTLV

SEQ ID NO: 183305 - protein, 428 aa, unidentified
MNYNQNHKIAQITSQTLIIGVDIAKHKHVARAQDYRGLEFGTPFYFENTNFGFDGFLAWIRHLAHQHNMEKTIVGMEPTGHYWLNLAHFLKEQDIKFVVVNPMHVKKSKELDDNSPTKNDVKDARVIAQLVKDGRYAEPNIPQGVYAELRVARKIRDLLSVDLQAVQGQIHNWLDRYFPEFLTVFKDWEGKAALQLLKLNVLPHELLNLADEEILAHFKKAVKRAVGVSKVKQLKEAAHVSIGIREGSDMAKLELSTLLAKYILFKEKFEDLDSKIDNLLVQIPGVNQMLAIKGIGRDTIAGFFAEVGDLTSYSHPKQIIKLAGLSLKENTSGKHKGQTKITKRGRKNLRALLFRVIMPLVAKNSAFKALHGYFTKRSNNPLKKMQSLIALCCKLIRVLFIIGKKQCEFSEERLLSDIPHMASVSEAA

SEQ ID NO: 183306 - protein, 366 aa, unidentified
MLYSGVDLHRRSIVICTVNESSTVLARKSMKTQPELITNYFRQWPEDHRAVVECTTGWYWFCDLLRSIGVSAVLAHAKYLKAISYAKVKTDAVDALTLAQLLRMGYIPEAHQLPPEYRAIRDLLRQRMVMEHKRTNIIQRIHSILAQFNITRLPVPAYQPGFADFLTECPIPEQYRMTLSMYHQQCVQATEHRQTLEKYFKARLRPAPAVQLLMSIPGIGDITGSIVAMETGDIHRFADDKHYCSYCRLVPGAKDSGGKRSHRSGSKDGNQYLKYAFTESAIKAMRFYPEIKHFAARLERRATKAIARTVVAKELAKITYYVLTRQQEFKTFKGIEINKLRDWPRARPAVRDAVQRHKPVRLTGGV

SEQ ID NO: 183307 - protein, 342 aa, unidentified
MQITTIGLDIAKNVFQVHGVDAAEKVVVRKQVRRGQILAFFEALPPCLIGMEACATAHYWARELTRLGHRVRLMPAKDVKAYVKRNKNDAADAEAICEAVRRPTMRFVQIKSTEQQGRLMLHRARDLLMRQRTQVINALRAHLAELGIVAAQGREGIKELLKIIAGEENAGLPVDAHASLVVLAAELQAMQTMIGSIDKRIMAQHRSNEASQRLESIPGIGVTGATAIAATVPDPKVFRSGRDFAAWIGLVPRQASTGGKQKLGPISKRGDRYLRRILVVGACAVLRYARQQPQKYPWLTQLLVRKPFKVVAVALANKMARIAWALLAKGGTYRAPVLVAAA

SEQ ID NO: 183308 - protein, 338 aa, unidentified
MAIIAIGIDLAKNVFAVHGVDASGKAVLVRPAVRRDALLELIAKLPPCLIGMEACSGAHHWARQFQQFGHNVRIIAAKFVAPYRLSGKRGKNDAADAQAICEAVQRPQMRFVPIKSEDAQGRLSIHRVRQGFIEQRTATINRIRGLLSEYGHVLPQRAEVVRREAGKCLEELPGWANTAIGDLLSELHRLDERIAEYDRHIEVMAKADERCRKLMEVPGIGDKTATALMASIGSAHDFKCGKQLAAWLGLVPSQYSSGGKQRLGRITKAGDGYLRMLLILGARAVVAAAKKKQDRLSKWVTELAERRGYWKAVVAVAAKNARMAWAMLSKGEAFRPMA

SEQ ID NO: 183309 - protein, 327 aa, unidentified
MANVSSFVGIDVSKLSFTVSYRKENRVLTRDWEYTLDGLESFLKSLPPNAKCVMEATGVYHTKLAFFLFENNVFVSVVNPLSIKNYARMQMKRTKTDKSDSKLLLDYAELMNTNLAQWSPKVDYCVEIKQLYSMLESKNAQLTRVKNKLEALTHSKQQSSFCIKMCIEDIKHLEVEISSIEEEIEHIVKEHAKRNFDILTSIPGIGKKTACLFIAMTDSVKRFDNYKQVISYFGMSPRTYDSGTSVHSKAKICKVGLSTIRKNMYLCGLSARKYNKSCKDLYDRLVEKGKAKKLAIIAVANKIIKQAFALIKKQVFYDENFSSSLAF

SEQ ID NO: 183310 - protein, 391 aa, unidentified
MGRRQLVPEMGGLVLAQRSVSTAKSPSRKSPSRIKLGGGKTKPSSKGGLRVQEQQYVGIDLHRRRSVIVRMNDAGEVLNVSRVANDPVALAMTVAEAGPEPEVVLEACYGWYWAADLLQAEGARVHLVHPLGLHWDTRRVKNDVKDATELANRLRRNDLPEAWIAPPEVRELRELVRYRAKLTALRTSAKAQIHAVMAKLGILPPQPEMFGPSGRRLLDAMDFPGPYGLRVESLRDLLEIYDREHVMVDREIARWLKDDPGYNAIQALHGIGPVTAAILVAEIGDVHRFASARHLCSWAGMTPKLHESDTTSKKGRISKQGSTIVRWAVVESVARYHGGAPIAPTYRRIAERRGGKTGVKIAKVAAARKLLTLVYYGLRDGEIRCLDREAA

SEQ ID NO: 183311 - protein, 423 aa, unidentified
MTSMTLDPPLPNPLSPAVELVAGVDTHKNTHHVAILDLVGRPVADREFRADGRGYAQVIAFLRAHGDVVRVGVEGTGSYGAGLSRALNAAGLTVVEVARQDRQARRRRGKSDPLDAHQAAVAVLAGTDTAIPKTGDGAVESMRILLAERRSAAKARAQVMNQIHALLITAPELVRQAFRALSGQRLVTTLAKTRPGAIASPDPEVVARQTLRRFAVRHLTMQAEIDLIEHQLELLVRQVNPTLLSLSGVGPVTAATLLVAAGDNPERLGTRASFAALAGVAPIPASSGQRTRHRLSRGGNRHANAALHRIVLLRMRHREPRTMAYFERRRAEQLTDRDIMRCLKRHVANEVYAALLNPATDNPAGRELRARRQAIGIPISVLAATLGVPYQRLRRLEIGTRADPDLEARATAVLERISPPLAA

SEQ ID NO: 183312 - protein, 404 aa, unidentified
MKGPIVSIDVSKGKSDYQAFKDLNVKYTGSRSIKHNKEGFDEIVNLVREMEKKLETEVCVVYEATGVYHRVLKKVFEDNNIKQFIINPLLSAKTRKNDSLRSPKTDKLDPKSIAKTYYSHSLHNSHKQETIYHELRELSRYYEDILVHIRKDKVAFRAQLDIVFPGYDTLYDDLYGPVALAIIEKYPHPEMLQKKKINTVSKVIQNKTCHRQAVSDTMADKAIEYSKTIYSGCDKDDIEVLILQRFIKKLNEDMAEAERTIGEMIKLAQELPDFNIIKSIPGIGDNLAARIIAELGDMTRFKKKNELVAFAGLDPRISESGQNDGDHMHITKKGNKRLRCLSYLAVTCSIRLKRDDNSIKDFYIKKKQQSNPMCSKAAKTACASKLVRIIYSMCKTGELYQYNK

SEQ ID NO: 183313 - protein, 363 aa, unidentified
MEETKRRYVGIDLGKREYTMAIIGKDEKMRIHQGKTNDQGRQALYRLLEKTDKVALEAGNLAFITAREIHERVGSEVRVLNSAKLPFIWDAPTKTDKEDAMKLAHLVEERRDEKLPVVPLPSEKEIEQRKTLASYGREMKNRIRHINTLHALFVHQGHTTIVKKDLATAEKRREAVQLLTGLEREEAEWIVKYLDLHEQRIKELKGKMHKEARTDEGMKNLQSIPGVGPVVAYAFTAHVGDGSRFSTGAQVSNFIGFVPRLDYSGTIQHNGPITKHGNGYLRGLLVQAAWSAVRSKTGGALQERYKQKTAGQGASKKKTIVSIGRRLAEIMYSVLKNKSKYEPRQWKGVKDKTTVMVGQAMSA

SEQ ID NO: 183314 - protein, 344 aa, unidentified
MQITTIGIDLAKNVFQVHGANERGKAVLRKQLRRDQVAPFFANLSACLIGMEACGSAHHWARKLQALGHTVRLMAPQFVKPYVKSNKNDAADAEAICEAVTRPTMRFVPIKNIEQQSVLSLHRVRQGFVKARTAQANQIRGLLGEYGLIVPQGIAHIAKRVPDLIEDATNELPGGFRQLIDRLLEHLKLLDQQVDEIEVQIKAWHRDNEISRRLEQVPGIGPITASALAATVGDAKNFDNGRQLAAWLGLVPRQHSSGGNATLLGMSKRGDAYLRTLLIHGARSVIYRARQKNDPDSWLFKLIARRNVNVAAVALANKTARIVWALLVHDRQFRPDYTSAAAAA

SEQ ID NO: 183315 - protein, 342 aa, unidentified
MYYVGLDVHKKTISYCVKNAAGEIQLEGTVPATRAELDRWMKTLPQPWAGAMEATIFTGWIYDHLLPHAAELKVAHPLMLRAIALAKKKNDRIDAGKLADCLRCNFLPECHMASTAIRERRQTLRYRNLLVHQAVQLKNKISGLLMESGVSYNKQKLHKVGYFQELMTTSQEIPSRLRPLLKLCRESLERLQKTERALVYALSRDPVLAQRLERLQTIPGVGPITALTWALEIGDVKRFPSLRQVISYCGLCGDERSSADNARRTRLSKQRNKHLQTVLVEAAKLAPRRNADLALVYEKEKQKGNANRATLAVARKLVAYLLAVDRGERAFVASENHRHAAA

SEQ ID NO: 183316 - protein, 354 aa, unidentified
MKFYTKQHKYYCGVDLHARSLYVCIIDQKGEIVKHKNIDATREAFLKIIKDCREDVVVAVECMFAWYWLADLCQRENIPFVLGHALYMKAIHGGKAKNDRIDAHKIAALLRGGGMIPMAYIYPSEMRATRDLLRRRNHLMRKRADLLAHIQNTNHQYNLPKILKNVCYRGNRTGLAERFEDECVRKSMEVNISLIDHYDHLLKKLEYYMYKKAKVYDPEALYRIQSIPGIGQTLAMIILYEIHDIKRFPRVQDYVSYCRLVKPAKESAGKIYGHSGGKIGNAHLKWAYSEAAVLFLRKNPEAMKYKKKLEKKHGKAKALSILAHKLGRATYYILKRREVFNLDKFLNKQLAKAG

SEQ ID NO: 183317 - protein, 431 aa, unidentified
MPGGNQEKLMSQNQPEIQYAAFVSIDWADQKHVWSLQEANSRTREHGEVGHMPEAIEAWIAQMSQRFAGRPIAVAVEQSRGALVFMLSKYEQLHIFPVPPAMTANLRKAFYSSGAKTDPADTDLLQDVLQMHREKLRRLSPDTEATRLIQNLVEERRKLVDEKTAQSNRLEAHLKIYFPQIPQWFGDVDSPLVCALLERWSALEALQKARPDALRSFFRKHQCRKEELIESRIKAIGEAMPALKDRAVVEAQLAVVKVLVQVIQVLHQGIEDFNRQIQEAAEAHPDFFIFESLPGAGAVMAPRLLAAFGSQRERYRNAAEVQTLSGIAPVTESSGKSSWIHFRFACSKFVRQSFHEWAALSITQSQWARAYYELQCRRGKRHHAAVRALAFKWIRIIFRCWKERVAYDEKVYLAALAQHNSPLLAATKIAL

SEQ ID NO: 183318 - protein, 328 aa, unidentified
MIMLGIDVSKTKIDCCIFPQGLTGKRKNKIFTNTESGFGSLLKWLITLKIEPDQVTAIMEATSVYHENLGYYLYDAGVKVCVANPSRVRAFAKGMSMLNKTDKADSEALSRYGYTAKLIIWQPEPENVRLLKALLGRRDVYLGSLLQEKNRLEKAQSTHTSVVVIKLLEENIEYLNQQLEHIDKLINNHIDQDPTLKQDLKLLQTIPSIGERSGLLLLGLFHSHKFEKASQAAAYVGLVPVHQLSGSSVNKQSHLSKAGDSKIRSVLYMSALTAIKYNPHIEALYQRLLSQGKNKMCALGAAMRKLIHLCYGVLKHQTAYQRDYLLVE

SEQ ID NO: 183319 - protein, 406 aa, unidentified
MNIHDSPHIQVAVDIGSREHYVAIGLSEGGILDEFSMTHTPAGFEYFFSRIECQERLYSLPVEVAMEGYNGWARPLDSQVQKHGYQLYNVNNLKLARFKEIFPAPAKSDSIDTHKMLELFQLQDHLPLAKGVLQAVLPVPDANRRLKRLTRRRRQLINEKVALQNRIQPDLQATCQTLLAMTGSIDNLWFLHFLTCRDDLTKLMRLQTKSLLAIQGVGRNYLNLILDWQKQAEFSNEIEEVGPMIQEDARRLLALMASIKTMDAKIDSQIQKSAYAQHIDSIPGFGLVCSAELAGEIGTLDRFPKQSSFSIYIGMAPLDNQSGGYQGTKSPKHVNTRARKAMMTAVCRHMAYVPESRAYYDKKRSEGKTHNKAVRALGRHISRVIWSMLHHDRDYIELASINEKAA

SEQ ID NO: 183320 - protein, 376 aa, unidentified
MAKRVKEVGTSSGRGGPSVNTLGPTKATPSRRKKEAPVEREYVGIDLHRRRSVIVRKNAAGEVLSKVRIENSPMALAEAVAAAGPEPEVVLEATFGWYWAADVLEEMGARVHLAHPLGNNWGNRRVKNDERDANDLVDLLRLGRLAEAWIAPPELRELREVVRYRLKLVRLRGGLKAQVHAVMGKHGVLPSRVDMFYVGGGGPAQLDALELPGGYMARLDSLRDLIEVYDREINDLDRRIVKMLANHQGYRAIQAIHGVGPILAAVFVAEIGDITRFPSPAHLASWAGMTPTHRESDTKVRRGKISKQGSRHVRWAAVEAVSKNHGDGKIKADYRRISERRGRNIGRVAAARKVLTLVFYGLRDGEIRCLTKAERG

SEQ ID NO: 183321 - protein, 330 aa, unidentified
MKQYQHYFGVDISKKTVDITFVSDGQTTHQQFSNDPAGMQELLQWLNELNLDLNAVLFCMEATGLYCFPLTRFLTSNAIDIWIEHASQIKKANALSRGKNDKIDSKRIAEYAVKNLDRLRLWRPMDATLEKIKHLASLRERLVETKKRLITPIQEFEEVGNTEMAKMLAKTIKASLAAVDKDLKNVEGKIIETVNGDENLKQLYKLITSVVGIGFVTAINLLIYTNGFTVMKDARKLACYCGVAPFEYSSGSSVRGRTKVHFMANKKLKCNLHMASLSAVKLDADLKTYYERKVAEGKSKLSVLNAVKNKLLARVVAVVNKKQEYVKKSA

SEQ ID NO: 183322 - protein, 450 aa, unidentified
MKYRSYEKCQEKKKEVSGKKVIGIDPAKEKHQVTVLDEEGMQMGNSFSIEVSYKGFRDDLWKKLGKTLGSFSKDEVVFAVESSCNLWKVLTEYLSREGYTVLLVSPLTTYQSRPMMNNDYSKTDPKDALLIANNAGKGYYSTYRIYGPEVNMLHSLCITYDKLTKDRNKTLLRLRALLEEIFPEYLQCVNVAIDTSLYLLEKYFLPEHFAKLDVEEEEWNIRRISKGNHNADTLRKIKEHAKHSIGVEKTGEEDGVRLILDCWIAQIRQLNKSIKVISEKMIDLARENEYFEILTSVMGISDISAARFIGECRDLRLFKHFKQIEKSAGFNLRISDSGSGVGMRRISRLGNKRLSKLIYQMTTQTARFIPEVRIKFLNRQLKKKSYRKNIIASSSNLLKILMALIKDRRKYEFREEKAKEMELLEKKYEQAEKKDTRKKKTTKPKIKKAA

SEQ ID NO: 183323 - protein, 330 aa, unidentified
MSTQSENNTTQRKSNETHFVGIDVAKDELVVHILPTNQQLTVPNSKEGIKELVKLFKEIEPKQVVLEATGGLERTLLTHLVANGCAAVAINPRQARDLAKGLGELAKTDAVDARILARFAQLQCLPTRPIPSLEMQEMSDLVARKEQLIQMRTMEANRLHRTTQKPIKKSIEKIIKTFDEQISDIDAHIGKMIADNPDWSEKDKILQSVPGVGAKTSQVLISALPELGTLNRQEIAALVGVAPFCDDSGKKSGARRIKGGRANVRSALYMATFTAIRWNKTFKDFFDQLIARGKKYKVALVAAMRKLIAILNVMVKTKTYWKKQNPQTEK

SEQ ID NO: 183324 - protein, 402 aa, unidentified
MEVSIVGHDSVDVFIGVDVGKGEHHAVAVDRAGNRVFDKALPNDEHRLRELIRGLKDRGTVLFVVDQPATFGALPLAVAQDEGAMIGYLPGLAMRRIADLHAGEAKTDARDAAIIAEAARSLPHALRSIQLADEQVAELSMLCGFDDDLAGQITATSNRVRGLLTQIHPALERVLGPHLDHPAVLDLLQRYPSPAALASAGEERLGNRLSVLAPRIGRRIAAQIVQALSEQTVVVVGTNAASLVLPRLAAQLASLRQQRAEIAVEVERLVEAHPLHPVLTSMPGVGVRTEARLLTEVAGKQFASAGHLASYAGLAPVTRRSGSSIRSEHASRRGNKTLKRALFLSAFAALRDPVSRTYYDRKIAAGKRHNQALIALARRRCNVLYAMLRDGTLYQAPTPLAA

SEQ ID NO: 183325 - protein, 452 aa, unidentified
MKKEKMALDVVNPQAAGIDVGSRSHYVAIGQRDEDVKEFGVYNEDLMALAKWLLDNQVKTVAMESTGTYWQSLFTTLQGVGLEVILCNGKFTKNIKGKKTDVKDCQWIQKLHTLGLLSGSFLPDEATEQLRTYCRHRANLLEQAADTSRKMQKYLRLLNLRLDVVVKDVTGLTGLSIIDAICKGEMNPEKLASLRHGNCKKSEQEIAKALQSNGRKDLLFSLTHEYELYQIFQRKISECDKRIQKLLNEQINNDDNKKHHFIEGKVHKRLNKNNPDININLLSYQYFEGVDLLAIEGVSHSTVLTLMSEVGHGINKFESAKQFTSWLRLAPNNKISGGKILSNKIPKGSNRLKIALRQAANAVGNLKDTALSNFFKRIAFRKGRTSAISATARKLAVIIWNMITKKVPYKTDTQYEFLDQKRKRKVMEMKKLIHKFDITSDDLGLQLNINNL

SEQ ID NO: 183326 - protein, 315 aa, unidentified
MTEKTYVGIDVAKHKLDVAVLDTGESFQQPNTQDGCKAVVERLQGLLPEVLVVLEATGGLEQGVVIALTEAKIPVVKVNPKQVKDFIRASGRKAKTDVLDAMMLALFGKALQPEVRELPDADSRHLTELLARRRQVSDLITQEKNRLSVARDVRVRRDIQETIDFLEDKQKGLEQELQDFLEKNASWKARKELLMSMPGIGKVTAWTLLCCLPELGMLSGKQISALAGVAPFNHDSGQLKGKRAIWGGRAEVRKVLFMACLNAVRKNPALQEVYQRLVGRGKAKKVALVACMRKMLVMVNAMVKSNTAWTLNPAG

SEQ ID NO: 183327 - protein, 406 aa, unidentified
MELIALHKRVIGLDVHQAQITACAIIEEADGTTRIEQRQFGAFKRDRRALADWATSLAPDEVVMESTGIYWKSPYAALEAVGIRGQVVNARHVKNVPGRKTDVGDAQWLATLARAGLLRGSFVPPMLLRELRLISRQRQKLVGLLSSEKNRLHKVLTDGGIRLGVVVSDLHGQSARAMVKAIILGQSPNEVLQFASRRLKASREEIFDALQGEITDSHRFVLDELMRHIEEIEARIARFDARLLDGLKGERNTLALLQTLPGVDLIGAAMLLVEIGTDMDAFGSADRLASWVGICPGNNESAGKRKSGRVRKGNLYVRRLLCEFAHAASRTKSVFQSKFKSLIVRRGHKRSIVALAHKILRTIFFMIKRREHYRDSATDYEALSVQRNAPRWIKALTRFGFITAVA

SEQ ID NO: 183328 - protein, 377 aa, unidentified
MPSDNTPGIVPIAIELSAATWGVAARLPGRDKCRMFRMEAGDTNALAGVLDEIGARATPGGTVAVCFEAGRDGFWLHRWLTARGVAAHVVEPASILVNRRARRAKTDRLDAEGLVRVLAAWLAGDAGICRMVQVPTPGEEDAKRTHREREHLVQERTRLENRILALLATQGVRRRPSLRNWTAELEALRTGDGHPLPPHLRAELDRLRRRLGLTLELLREVEAEAAEASAVATDAAAGKITTLQRIRGVGQNFAAVLVREVFYRSFAGRRQLAGYVGLTPMPFQSGTMDRDRRISRAGNPRARTTMIQLAWLWLRYQPGSALAGWFRERVGALAGRTRRIAIVAMARKLLIALWSFVETGAVPEGIVIAAEPSGSAA

SEQ ID NO: 183329 - protein, 428 aa, unidentified
MNCNTQNAKIASITEKTLIVGIDVGSETHFARAFDWRNYEYTKKPLEFSNTEAGFLTFKAWVEDIAEKQGKTAVIPGMEPTGHYWFALGKFLQDNGMKPVHVNPHHVKKSKELDDNNPNKNDRKAPKTIAALVNEGRFSYPYIPTGIYAEIRSLSNLRFQTQEELTRIKNRIARWFAIYFPEYKDVYGDLKAVSGRMVLKVAPLPEDIGKLGVEGVNQIWRNAKLRGAGIKRAKTLVSAAEHSVGSKEAPEVARMELKNLLDDMDVYVSRLDELLVNIEEKLKEIPYVDKLMEIKGNGLVTVSGFIAEVGDIGRFDNPKQLQKLAGYAIVANDSGKHNGESRISYRGRKRLRYVLYEAAISLIGKNAEFKSIHEYYRTRKENPLKKMQSVVAVACKILRVFYTILTKGVDYDPVKLLGDIKRPQLQAA

SEQ ID NO: 183330 - protein, 363 aa, unidentified
MLIVGCDYHPGFQQIALVDTETGDVSEHRLGHREEAEAFYRILRQRNLRARVGMESSGHSRWFERLLQELGVELWIGDPAEIRTKRVRKQKTDRQDAQLLLRLMLENRFPRIWVPDAGNRDLRQLLWHRHRLVQMRTRVMNQLHVVALNEGLRRKKALWRPAGRKELESIALAPWASRRRQDLLDLLDQLTPKIQDLTRALEEEVEKRPVTRLLMTHPGVGPLTALAYELVIGTPERFHCGKQLASYVGLVPTEESSGDRRRLGHISKQGNVLLRFLLVEAAQVTVRSHQEWRNKFFHLAMRRGRKIAKVAMARKLAVHLYWMWRQGCDYAQAQKFGSHAGGPGNPDGVQSITDVMIGHPAPL

SEQ ID NO: 183331 - protein, 307 aa, unidentified
MNRIVVGVDIAKRVFQLHWVEPETGEIVALQLKREKFLEHFANRENCLIGMEACGGSQHWARSLQKLGHEVKLLPGQMVKPFVVGNKKDAADARAIWTAVQQPKIKAVAVKSEEQQAVLALHRMRKQLVKFRTAQINGLRGLLTEYGEVMPQGRAGIKRDIPGALGRLSDRLPAIVIETLREQYTRLGELDEQISQIERRLRQWQREDPTTQRIAAIPGVGLLSATAAVATMGDAKAFKSGREFAAWLGLVPRQTGTGGRVRLLGISKRGDTYLRTLLIHGARSVLTNSKSLPEWLKELGVIVETSG

SEQ ID NO: 183332 - protein, 326 aa, unidentified
MALGDNGKVLLKKKFTQKQLIAFTANMQTCLIGMEACSGSHFLGRALREQGHDVKLIPAQFVKPFVKSNKNDFIDAEAIAEAVDRENMRFVPIKTDDQLDLQALHRVRDRLMARRTSLINQIRAFLLERGIVFAKSPIRLREALPEVLENVNENLTPRMRNLVAMLWSEWKDLELQIVQMNDEVERIASSDAACRRLRQIPGIGPLVATAIVASIGNGAAFRKGREFAAWMGLLPKQHSTGGKARLYGISKRGNSYLRKILIHGARAVVLRSKRDRIAMGAWMTSLETRAPRNVLIVATAHKLARIAWAVLSTGQDYRAVPEALTV

SEQ ID NO: 183333 - protein, 347 aa, unidentified
MAPDSSRTIDWAITPVIENERNMNQNLTKSKTKKTQDTTYVGVDLSSRNLDVYINGKYIRYNNSETGRAHMLNKLNSTCNNMLIAYESTGWVSRNFSMYLDEKRVPHCCLIPCRVRSYAKSQGIKAKNDRLDSRVIAEYADNIKASPDKPLNRKIQELRQLNNLRTLITKKLKDFKVTTAAYTEESSLSVIAEIRKHLQEQIREIGNKMQGIINENPLLSELYAFYLGQSGIGPVIAYNLICELPELGHLSAKKIASLVGVAPFDCESGGKKGARSIRFGRKRIRNLLYMGMLQGIRKDEAMKTKYDRLREKGKPFKIAIVAVIRQQLTILNARTRDWLAEHGDPLY

SEQ ID NO: 183334 - protein, 345 aa, unidentified
MKISTIGIDLAKEFFQIHAVDHHGKVVQKKKLKRKEMTTYFANLEPCLIGMEACGSSHYWARKLQSMGHTVKLMAPQFVKPYVKSNKNDAADAEAICEAVTRPTMRFVGIKNAHQQSMLCLHRARRLLVADRTAQANQVRGLLAEFGIVAPKGIRTLKDQIPFILEDGENELTPQMRELISMMSDRINELDQRVDDLELKIKQSNQQNEMIAELQKIPGIGPLTASALVATIGDFKEFKNGRELAAFLGVVPRQHSSGGKQNLLGISKRGDGYLRTLLIHGARAVIRVAEIKQDKNAWLVNLIGRRNKNIAAVALANKNIRIIWAMMTRGEKFTPSRISLAPEPT

SEQ ID NO: 183335 - protein, 373 aa, unidentified
MFQHTFIGLDVHAVSVVGCALNPDTGELVRMSMDADPAVVLDWIRHFEQPVKAVYESGPTGYVLARFLREAGIDCVVAASSKLLRAPGDKVKTDRRDARLLAEMLALGQVTEVRVPSREQEDLRDLSRLRARAAKDLAHARQHVNAILLRHGIRYQKETKWTVEHRAWLHRQRFESDVLEFTWETELEQSELLAENLKRIDQRVAQVAKTCQYTPVVDALMCLRGIEVTTGFGLAVEIGDWTRFTGSSIGSYLGLVPSEQSSGQSRHQGPITKAGSKYARKLLIEAGWQHRRPYSRPGLRLIRQMDLVGPDTRIRALEGNHRLHHKWEVFDARKKRSVTANTAIARELAGWCWSLAAPLQCKKLYGRGHMTAT

SEQ ID NO: 183336 - protein, 427 aa, unidentified
MRYRIAGIDVHKRMLAVAVADISVEGEYEFERRRFGTGPGQLRALAEWLVAEEVEEVVMESTAQYWRPVWAVLERIWQTQRRKHEGSGPMSGALHLAQAQSNRGAAGRKKDFPDAERLVRRLVAHELTLSFVPDGEQRIWRTVMRRKYQLTCNRTRLQNRLECLLEEAQIKLSSLVSDLLGLSARRMLQAIAEGETDPHKVAALGDRRLHATSAQFCDALSACADLHPVYRRLLKMALEELRLLEEQICELDQEMAVLLSAHQQAVERLAEVPGLGPDSAQQIIAEVGPDAGTFPSAKHLASWVGACPGEEESAGVNYSHRSPKGNRQMRRLLNQAANAAVKLKGSIFELLYKRLVVRLGHAQTIGVISHRLCRLIWIILHRGVRYEERGPAVSRSRALNRASRMIRELRKLGYRVEPGPSPSGSSA

SEQ ID NO: 183337 - protein, 459 aa, unidentified
MRQKSKRTKGIEQTHPFDGLSKVNPHAAGVDIGAEEIVVCVATDPSTQLVRGFGNYTVDLHAIADWLTEHRIKTVAMESTGVYWIPLFELLEQRGFECLLISSRSLRRVSGRKSDVTDAQWIQTLHNYGLLESSFRPQADLVALRSLLRHRRNLIDHRSPHVLHMQKALLQMNIQLSQAVSDVTGVTGQAIIRAILSGVRDPQELAALREPGCKKDEAEIAKALTGTWREEHLFVLKQAVALYDFYSQQILECDEEIERMSAETRPDGDGGELPPLPPRKRNSHSKNRHHESEKIRGHLKRISGVDLSLVDGMGVSLAQTVIMECGTDMTKFPTEKHFGSWLGLAPKHEISGNKVLNNQVLKTKNRAGQAFRMAAQSVKQADCPFGVFYRRLRARLGPAQATVATAYLIARVVYRMLKYQIEYDPLSVNEYQQQYEAQQIRYMQKRAAKLGYQLVPALA

SEQ ID NO: 183338 - protein, 411 aa, unidentified
MRRIIGMDIHRTFAEVVFWEDGRLRPVGRVDMTRSGLEGFGRTLSKEDEVVIEATGNAMSVVRVLGPYVARVIVANPMHVKAIAHAHVKTDKIDAGVLASLRAADFLPEIWVPDANTERLRRLVARRNQIVRQRTRIKNEVHSILHAHLISPCPHAELFGRLGRSWLGRQPLPSDELMAIDRHLRELDRLGEDLAVLDRELAQAATDDSAVKRLLTISGINLTVAAGLVAAIGDVKRFASPQKLVSYVGLNPRVRQSGLGPVQYGRISKRGRAHARAMLVEAAWAAAQAPGPFHAFFLRIRARRGHQIAAVAVARKLAVLCWHLLTKETDYLWARPALVATKLRAMELQAEMPAKKGNKRGPAYAYNVKELRDREIDVARHAERAYECFVSQWQPRRPNVRRTGAAKEERR

SEQ ID NO: 183339 - protein, 444 aa, unidentified
MERATRFVGMDVHKDTIVVAVTATGEVGKATTYGTIPNTAAALETLVKRLRQAGDGPIKFCYEAGPCGYGVHRTLTKMGEDCMVVAPSMIPRKSGDRQKTDKRDAASLAVLHRGGLLTAVWVPDAAHEAMRDLIRTRLAAVRAVRAARQQLSAFLLRHERTYPGNKPWTKAHRRWLADQSFAQPAHQIVLEECIEAVRQGEQRRDRVDGYLRAQIPSWSLFPLVQNLCALRGLDMIAGAGLAAAIGDPSRFATAPDFMAYLGMVPSEHTSGPKRRIGAITKTGDVHARTLLIEAAHSYRLPARIGRHKVAAVDAVSVAVRAIAWKAQTRLCQRYRHMMARGKLKQVVVTAIARELAGFVWSIACITSDPVVSKKVTELHDEGTALCEKVTIGSEGVAQQVQQITPGTGQPRVPRRSQSLKGTTARRAGPTRANQGGIGQQERTG

SEQ ID NO: 183340 - protein, 412 aa, unidentified
MDVIVERPAALDVHNATVMACVRAPDGGRRRVEHVAEFQTTVQGLLTLRDWLEAHEVDQVAMEATGVYWKPVWAVLEDRFKCLLVNARHVKQVPGRKTDVMDAQWLCQLLEAGLLRASLVPPKPVRTLRNLTRYRKSQIRDRQREMNRLHKVMQDTGIKLDCVATDMMGKSGRAMLDALVSGTTDPNVLADLARGQLRKKLPALRAALRGRFDAEHVLVVGRILAHIDFLDEAIDELSGAIEEQLGPFAPAVELLCTIPGVGRRAAEVIIAETGGDMTAFPTAKHLASWAGMCPGNDESAGKRRSGKTRKGSKWLSQTLVECAKSANRSKDTYLAAQYARLRARRGANKATIAVCHSILTAVWHMLSTGETYTDPGGDFFARRDPERTRKRLVGQLERLGYTVTVEEGAAAA

SEQ ID NO: 183341 - protein, 324 aa, unidentified
MQGKVMPEQGGAMAAVYAGIDVCKERLDIHLHPIGEHFTVPNDAGGWRRLKRELGRHQVVRVVMEATSKYHRRAHRSLDAGGFAVAVVNPLRARLFAEAIGALAKTDAIDARILSLMAERLDPAATPPIREIVEAVQELTRARTAAIAERVAIGHRRTTAITSFLRAELARRIRTIDTHVDRLEAEITSLIAEDPGLARRYAILLSIPGIGPVAATAIIANLDEIGQLTDKQATALAGLAPFARDSGPVQGMRRIRGGRPNLRSPLYMAALSAARCNPDLKSFYQRLIANGKAKKIALIAVARKLLILANALVSSDRTWSLVRP

SEQ ID NO: 183342 - protein, 448 aa, unidentified
MDVLYPVCAGLDVHKKLVVACICGSDAGGHLRKEVRTFSTMTVDILALAAWLTACGVTHVAMESTGEYWKPIYQLLEGSFTLLVVNAQHIKAVPGRKTDVRDAEWIADLLRHGLLQASFIPPQAQRDLRDLTRQRTNLIADRGTVVKRLQKVLEWSNIKLASVVSDVMGLSARAMLEAIVGGEANALVLASLAKGRLRAKHADLVLALEGAVRDHHRFMLAQHLAQIDFLDEQIEALDAEIVARVTPTATEPGGSSATEVSVIERECTENGSPAAPSDAPSTWAEAVRIWDSIPGIGGRIAEQLVAEIGTDMSRFPSAAHLASWAKLCPGNRESAGKRLSGKTGQGNRWLRSALIQAAHAAVKVKESYLGAFYRRLASRHGVKKAIMAVAHKLLVIAYTLLTNRELYQEPGPNYLDARRKDQTLRRLRARIEQLGYTVNLERREAVAT

SEQ ID NO: 183343 - protein, 340 aa, unidentified
MDNLELLGLDIGKSTFHLIGHDAKGKVVLRKKFNRNRLLEFVARLKPCTIVMESCGGSHCLARKLISFGHQAKLIAPQHVKPYVTGNKNDYIDAEAICEAASRPRTRYVAIKTVEQQVLSTQHRLREALVGHRTQTINRIHGFLLEFGIALPATKAAMNQVHQILDDPAAELPQQLKSFIEHLLEEMKRLTDEIKAIDRSIKEQVDADDAGTRLMSIPGIGPIIASALLADVGNASNFHSARDFAASLGLVPRQYSTGDQTVLLNISKRGDKYLRKLMIQGSRAVLVHIDKRTDALGTWCRDLLIRKHPNKVACALANKLARIVWAVLARGVSYKAQSMA

SEQ ID NO: 183344 - protein, 389 aa, unidentified
MILVGIDVAKDKHDCFIQTVDGKVLCSSLTVANNHEGFEELYAKIASFDDAEIKVGLEATGHYSYNFLGFLLSKGLKTFVFNPLQTNQFRKTLSLRKTKTDKVDAKTIALMLVASPNLNAYSLQAHRNEELKSLTRYRFDKVKQRSKLKQSLSRLVTILFPELESAVSSLHSSSVYAMMLKYPSAKDVAKSQLHSLTNLLESTSRGRIGADKAKLIRSLAKKSVGIYVSAKVLELRHTIKLIQILNEEIAEIEQQIQSHMQELHSPLESIPGISFRLAAVIEAEIGDFRRFSSPDKILAFAGLSPSTYQSGKFTSQNAVMEKRGSRYLRHALFFAAHLVGRCSLTFATYLKKKRDEGKHYFVALSHVAKKLVRVIFHLHRTGESFSDFA

SEQ ID NO: 183345 - protein, 350 aa, unidentified
MLIIGCDFHSRFQQIAMLDPQTGEVIERRLEHENGEARKFYAALTTPARVGMGATGYAQWFERMLAEQGHQLWVGDAAEIRAAMVRKQKSDSRDACHILDLLLRDKFPRIWIPSTEERDVRQLLRHRYKLVCLRTSLKNQLHAMAMGQGICRKKKLWTAVGRKELQGLSLGPWASRRRQHLLNLLDQLEPVLDELDRAVIQEVEKRPAAVRLMTQPGVGPVTALAFVLTIRPVSRFQRSKQVLGYFGLNPSEESSGGRQRLGSISKQGNSMLRFLLVEAAQTASIYDPELRRDYQRLKFRRGRGVAKVAIARKLAVRLYRKLREAAQPVPPAPMQGSPAVSVVGESLSCF

SEQ ID NO: 183346 - protein, 317 aa, unidentified
MGTHETVVAGIDVSKEILDVFLLPSGTTYRFANSERGCAELTGVLAEANPSRVILESTGGLEMLAAGILSAAALPVAVVNPRQVRDFAKACGLLAKTDKLDAKILASFGLKIEPEIRPLKDEATQELSALVTRRRQLVEMSTAEKNRLSASPKGIRKGIARHIEWLDEQIRSLDEDISRFIQSSEAWKAKVDILTSVKGVGPVTAATIASALPELGTISRQQISALAGLCPYNRDSGKHKGKRTIWGGRAAVRTVLYMAVLAAIRFNPTFKAFYNRLKKAGKPHKVATTACMRKLLCTLNAMVRDHRPWDDNFYCLA

SEQ ID NO: 183347 - protein, 333 aa, unidentified
MEKNLLYCAIDVSKDKLDLDRTALALPEQLGNDQAGYRQLIKAAKKYQGAVQFVFEATGPYHLGLALALWEALIPLSVLNPARVRFYAKAQGKAKTDPLDTQVIGDFARSFRPPPTPAPDPVRRELTELLQRRDGLVSTRAAEQNRLGQCRHTLIKGQIHRLMTQLSQQTDQIDRLMKKLVGTSQELKLKVKALCEVKGVGHLTAVTLLITLPELGTLGRNHIVRLVGLAPLNDDSGKLKHKRFIQGGRKRPRCALYMPALTASRHNPVLKEFYERLLKAGKLKKVALTAVMRKLLICLNARLRNFADQHSSPERSLPCKALVTFTAQRVAKC

SEQ ID NO: 183348 - protein, 341 aa, unidentified
MTMVMIGVDPHKGSHTAVAVDRDENELGELSLRSSVKQCELLLDWADRFPQRRWAIESAAGLGYLLAQQLVAAGEDVVDVPPTLSARVRVLDSTKASKNDPHDARSAAIVALRHRHLRPVVADDHSTILRMLANRHHALTRLRTQAVCRLHAQLANLKPGGLPATFTEKRARELLETVPSTNGVAAERKQQALVLLDDVVRIDNEVRAIKRRMRTAVVATGTSLLDIYGVGPVSASIVLGHVVDVHRFPSSGHFASYAGVAPIEASSGPKKRHRLNPRGNRQLNHALHVIAMAQISHDSLGRVYYDRKIAEGKTKKEAMRSLKRRIADVVYRALVADTTRG

SEQ ID NO: 183349 - protein, 409 aa, unidentified
MEVLYGKCAGLDVHKDTVVACIRIHQGSEGELKVRTFGTTTRALLELSDWLSEHDVTHVAMEATGVYWKPVWHVLDGTFELVLANAMHIKNVPGRKTDVNDAQWIAELLAHGLIRASFVPPTSIQDMRTIMRTRKQLVRELTQHVQRIQKTLEDANIKIASVISNVVGVSGRAILRAIIDGRTNPIDLLRVTTGRLKASERELQEALRGRIRAPHRFLLKLHLEQIESLERSIAEVDKEVGALLEPFRAKCERLTTIPGVSDVVAEVIVSEIGIDMSRFPTPGHLISWAGLCPRNDESAGKRRSTRLRMGATWLKTTMVQAAWSAARCKDGYLPAQFHRIKTRRGPKKAIIAVAASMLTAAFFVLRDDVEYRDLGSAHFQQTVDRDKAASRLVKRLTNLGFTVEIKNAA

SEQ ID NO: 183350 - protein, 340 aa, unidentified
MTIVMGLDQHRAQITAEWLDSGTSEVSRARLAPAHRESVRRFLSRFSGQDLEVALEATTGWRFVVEELRRVGAGVHLAEPAQTSALRGNKKRPKNDRADARHLRELLMIGRLPESWIPPDHLLDLRSKVRLRHTLVDQRGEWQQRIRAVLYHHGLPHRRELHLLSGEGRAWLQDVELPDAAREQITVAIAMSESLDMQIAPLDRQLRLYARRQAGCKALQAHYGIGELTSVAILAELGDCRRFSSSRQAVRYAGMDITVYESDQRRSPGHLSRQGPPALRWALYEAAQVARRAGSPDRGYYDQATERLGSNRACLAVARKLLMRAYHTLRELGEEALQPA

SEQ ID NO: 183351 - protein, 422 aa, unidentified
MLTTTHDNEEIIERVAALDIGKAELMCCVRVPDGDHPGRRLQEVQACPAMTRAVLGLADHLARLGVTRVVMEATADYWKPVFYLLEAAGLETWLVNAKDVKHLPGRPKTDKLDAVWLCKVAERQMLRPSFVPPPPIRQLRDLTRYRADLVAARTAEKQRVEKLLEDACIKLSAVVADIFGVSGRDMPAALVAGERDPKVLAQLARRSMRAKIAVLEEAFTGHFTTHHAFLLRTMPGRVDAISADIAALDDRIAAQAAPLAGAVARLDEIPGISLASAHVILAEIGTDMTRFPTAAHLASWARLAPGISESAGKKKGKGATGHGNAYLASVLGNAAAGAAKTDTFLGEKYRRIARRRGSKRAIVALGRSILVIAWHLLSDPEGRFYDLGPGYHAARIDPERRKRTHIRELEALGYTVTLKPAA

SEQ ID NO: 183352 - protein, 346 aa, unidentified
MSAFTIGVDIAKRVFQVHAIDHETGEVTSKKLARGEFLAHFKKLPPSHIGMESCGSAHHWARELGALGHGVRMMNPMYVKPYVKRGKNDAVDAEAICEALTRPTMRFVPLKTIEQQSVLVVHRTRALLIRQRTMLVNALRGHLSEFGIVAPLGIERIPELIDRVLGREGDEFGITPLVRSIVVMYAEQIENIKEQIRKLERELRIWHRTNEASRRVASVPGVGTITATALVAAMPDPSAFQSGRAFAAWLGLTPKSSSSGGKERNGRITKAGDRHLRVLLVLGATSVLRRVRAGQQTPLYGWVKKLLDRKPPRLATVALANKMARIAWAVMARNVNYQPELAAAVG

SEQ ID NO: 183353 - protein, 356 aa, unidentified
MSQNIILAVDYHDENTVIRQFEERTGVETLRTMSTTAAALAQAVKEARRQLRRGGRVVWIQESTSGWARVQALLGKQVTFILANVVQMPRLPKGHRHKTDRTDTGRILREYRNGSLPQAHQPSVWWRQVRRLVSLRENLVNRRTALRNWINRYLAHETWESRANLWSEKGLRGLRQLLGRLPAWDRLVLDAKLTELEGLAQPLTQVEAWLHEVYRSWPEAQRLDAVRGIGVIAAVAIAARIGPIERFADAEALIAFAGLAPGVRQSDQTRREGRIGGGGTDGHLRHYLIEATVWARELPRYRSTYERVAKRRGKKIGRLVVARLLLRSIFKVLRDGLHFSGERPARGAPATTATMA

SEQ ID NO: 183354 - protein, 321 aa, unidentified
MTYVGIDVSKATFVVAYSSAKSSETKTFKNTTKGIREFIRTISPEENHCVLEATGNYSMLLVYLLSKAGFTVCMENPLKIKNFARVMLSVVKTDEIDARLIALYGERMQPAPFKLRSDSLLLLKQKRTVLRQLKKQLTANRNLEGSLKVLPFIDSKCKKVLEKTIKFLEKQIEEMEEELTSLAEIEYKKQMDLLTSIKGIGATLAAALIIATGGFTYFDNAKQLTRYLGLSPTYQQSGTSVNVKGHINRNGDAYLRSQLYIGAMASLRCNTECKACFDRLRSNGKPGKLAIVAVANKLIRQAFAVVAHEKKYIDGYKSVKP

SEQ ID NO: 183355 - protein, 413 aa, unidentified
MLKIVYQICCGMDVHKSFVYACIASTNDQGVTTYKSKRFSTFTKDLRFCAEWLAANNCKDVCMESTGKYWIPVYNILEQTCNVVLAHPKYVKAIKGKKTDKKDAKWIADIFKHDLVSGSFIPPADIRQLRDLVRYRWKLTNFVVGEKNRAQNCLTVSNIKLDDVFSDVFGKASSNIISRMLDNPSEKITDVADFRTKGMKATDEEVLAAVDGEFCPEQAEKLRIIRSHMDSLELCKLNVESLILTVAEKYIPQIDLVSTVPGIQTFAAIGIISEIGVDMSVFPTSKHLCSWAGLTPQNNESAGKKKTTRIGRAGDYIKPLLVQCALCAIRKKSNPEIRNRYLSIKKRRGHKKAIIAIARMLMTAIYNILKKNEPYNSDLYIRSNDPPAHRTVSVDEAIFILQRQGYLVTPATS

SEQ ID NO: 183356 - protein, 419 aa, unidentified
MIRIETKKLRIVNTKTLMVAVDISKATLMGYCRCPDGRDCNPFEVFNHTEGFKKLWDRICWMKAAHHLEEVVVGFESTGIYGEPLVHFLRSKPLRLVQVNPLHTRRMKDLEGNSPNKTDQKDPKVIADLMELGHALSVVIPEGAAAQLRRLTQARERSVQRRTTLYNQLHDLVFLLFPEFVQVMKDLRTQSAQYLLRHYPTPQAVVQCGLETLNTILRRVSHGKLGRERAQALYEAAQESAGLQEGRDGMSLEMEHLLLEIDSSNRFIERVEQEMSRYLDQIPYSSLILSLKGIGEITAAGLIGEVGDFKKFPTASEVEKLAGLDLFEISSGKHKGNRHISKRGRPLLRKLLYFAAMNTVRTGGVMHAPYQRHLERGMPKIKALVAIARKLLRIIFALVRDHSLYDEKYSQRETLKLAA

SEQ ID NO: 183357 - protein, 351 aa, unidentified
MNYNTVYVGMDVHKESFSLCAYTIEAEKASHYQRTEADYKKVLNYLEFLRTIYGDDANFICGYEAGCFGYTLYHQLTANNVKCIILAPTTMLEQRSKKRIKTDRRDAEIIAKCLAQHNYSPVHIPTAKDEETKEFLRMRDDHKLALKKVKQQILAFCLRHNYRYDGKSHWTAAHLKWLKALTPEALYKEILDEYLLTYQTLSDKIERLDKRIEELATQDEYKEAVKKLCCFIGVKTHTALSVLVEVGDFKRFASAQHFASYLGLVPGEDSSGDDQNRLGITKAGNRHVRLLLTEASQCYARGQVGFKSKELKSRQSGNTPADLWQISGYFFDDAKVVAETITVWWEMRRNC

SEQ ID NO: 183358 - protein, 343 aa, unidentified
MDYFAGLDVSVKDTSVCIVDSTGKIVREVKVVSEPDALLTVLGNPAYHFKRIGLEAGPLSQWLFSALAETGLPMICVETRHLRAVLKAQINKTDRNDARGIAQMMRVGLYRPVHVKTLRSQKLRMLLTHRKLLQAKAIAVENDLRATLRNFGLKVGMVGTAKFEARIKELVESFPDLVALVEPLLVVRRVLREQLGILHRHVLAAVRDDEVCRRLMTVPGVGPIVALTYRATVDVPARFRKSKSVGAVFGLTPARDQSGERDRPGAISRCGDEMMRTTLYEAAQVMLLRSAKWSWLRAWAMKIAKHRGMKKAIVALARRLAVIMHRIWTDGTEFRWSREAAAA

SEQ ID NO: 183359 - protein, 453 aa, unidentified
MSNKRAEKKKGCSPGSGLQPDAAGVDVGATEIYIAVAEGRDAEPVRRFATFTEDLQAASEWLVRCRIKTVAMESTGVYWIPFFQMLESRGLQVCLVNARHVKNVPGRKTDVSDCQWLQYLHSVGLLRGSFRPEQQVCAVRSLARHRESLVEMAAVHLQHMQKALDQMNLQLHHVISDLSGTTGMAIVDAILAGERNPQRLAKLRDPHIQCDGRTIAKSLVGDYRGEHLFTLRQSVTAYRHYQQLLAACDVEMERLLEEFSDRNGPATPALEEPAKRRKPRRNEMRFDLRGHLYRILGVDLTAVPGISALTAHVLMTEVGPDLSAFRNEAAFSSWMGLCPDNRVSGGKRLGSRTRKVNSRAAKALRMAANALYRSQSWLGHYFRRMRAKLGAPKAITAAAHKLARIVFHLLTTRQPYDESIFATEELLHQRRIQRKLQKQAKLLGFQLVPIQLA

SEQ ID NO: 183360 - protein, 351 aa, unidentified
MRNLAAPEGDRRFERKVTRVGVHPDGSTLTPEGIVMQSILDLGADVDSRFIVLACAAGSFGPQRIANQRKAILGWLRTVPRGSRLGMESTGGYHELLAELACKAGLHVFVINARDLRRYAEGIGRRAKTDRVDAEVIARYVAREHGELHAYLQPTKAQRELAQLIGRRAKLVQTKDAISQSLRGVPALRADTKRLIAGIDRLIARVESMMQRALQQTPAARDAAEHIETIPGFGTLSSTYLGHAFTRLPYANSDAVVAASGLDPRPDDSGQRKGRRRLSKRGPGEERRLLFNCARSASLTKLWQPYYQAQLAKGLSSTAATVILARKMLRVAFAVYKHGQPFNPALLGDRA

SEQ ID NO: 183361 - protein, 387 aa, unidentified
MSQTVAAPIPAAVDHERTLVLAIEVSNKSWVIAAQVPGLPHTKAKRTIDPEAEALLAAIAAYRARAAATGRSIERVIAVYEAGWSGFWLARWLMRHGVEVYVVQPSSVPVDRRIRRAKSDGIDSELLLRTLLAWLRGEPRVCSMVPVPDEADEDARRCVRERSELISERIGLTNRIGAILATLGVSDYNPLLRNRGRRLAELRTALGEPLPANAHAKLKRLLARLELVLTQIAELERERDAVVETEASDGASKMIQQLTALRGIGVQSATVLVREAFVRRFANGKALGSYAGLASSPYSSGGMDREQGIGKAGNRRVRTVMVELAWLWTRYQPGAAQVCWFRERVASTGRRVRKIMVVALARKLLIALWRFVIDGVLPEGAVLKPAA

SEQ ID NO: 183362 - protein, 353 aa, unidentified
MAHPQPPRITVGVDTHKDLHVAAARDQLGRRLGTTMARATSAGYATLLVWAQALGDVQAWGVEGTGSYGAGLARFLTARGQRVLEVNRPDRAARRRRGKSDPVDADAAARTVQAGEATGVPKAQDGVVEMLRALRVARQTAVKARTQAINAIKALLVTAPAELREPLDGLANPKLVAAAAALEPGTLTTPTAATMLALRGLAQRYQHLDAEISLLTSRLDQLTTRTASALRQLLGVGPDSAAALLIAAGDNPGRLRSEAAFAALCGASPVEASSGKTVRHRLNRGGDRQANAALHRVVIVRLRWHQPTRDYVARRTAEGKTKKEILRCLKRYVAREVFAVLPQLGEQLLVAAA

SEQ ID NO: 183363 - protein, 520 aa, unidentified
MSTSRTRKRPGTRRFDHCVAKPRGLLHPRVQQVGPEHFGIVCFDCAKLRSKFLLADFYGRVLIPPTTVAHNRPELDDAVAKVRHAFAQHQLRDGLVAIERTGRYHRLVQRTFAAAGFETRILHPFVTKQYRQPVDPGNKTDDTDLAAIHRATVTGCALVEATRDEAWTTLLLLVRQRRDLVRKGAALNCQIREHLDAALPGFAACFDKLWDSVVPWHLLQHFATARQLRDAGRTTLCQSLRQAGIRFQQRTVQAVLDWADQAAPGDVAAEQHRRIALAYYRDRQQKTQEIQALEGDIAGRLAQTPYVLLLSFPGINVVSAADFAAEMGPIEHYANAKAISGRAGLRPSRYQSDQGDKANGPLVRVCNRSLRAAILGIAENLIVCNHHFQVLATQWAAQGKDPRHTRVKVGLRFCRIAFQMVAGRQVFRHPAIPGRHYILDKLTAFHRDHDTAMPQVLRDLQATIAQVPPRDHAAEAKPLHEELQKIHEGRRRGPQPLGDILPLVLARLGVDVVQSTESGE

SEQ ID NO: 183364 - protein, 408 aa, unidentified
MKRYYIGVDWGDRLHQVYVGDQDGKKVREVKVQESPEGLAEIGRWLDENRAEGIELWAAIEKPAGRIVDFLLDHGVEVYPVNPKAVDRVRDRYRMSGSKSDAFDAYVLAEFLRTDQAHLRVLRPNSEKAQELKMLSRDQRRVGRHKTRLLNQLTTTLKEYYARPLEAFENLETEIALDFLKQYPTPAHLSALKRKEFNRFATQQHHLSKQRCEQLWEKLNQPQLAVPEHVVRAKAQWVEVLIEQLRASIKAVKIYNHKVESFFAASPAAQFAKTLPGAKSGTLVAAIWAELGDAPGRWQSSRHLQAEAGAVPVTKASGKSRVVHFRFACNKHLRHTMYWFSFVSLNHSEWAKLYYRRQRDKGHSHHQALRALGAKWLKIIFVMWRDHKPYDENYHLANIARQKMRQAA

SEQ ID NO: 183365 - protein, 318 aa, unidentified
MATYIGVDIGKKSLEVYFPDTAKSFSVINNESGFCKLLNCLNKNYQSLSEVIIVFEPTGGYERPLRNFLKTCQLNFTTVHPNKVRQYAKAKGLLAKTDSLDSKLLYDYATCFSLKVKSDYSTENQEVLHNLIKRREQLILFQNQEIARLDTEYDSLVKKSVESHLSYLQYELSEINATIKNLCHKDPDIKNKIDQLTSIPGVGITLATNVVCKVPELGYSEFKNLTSLIGLAPFAKDSGNYKGKRSIFAGKNSLRKVLYMAAVASLRCNRKLKTFYNRLVSNHKPPKVALVAVMRKLLSFMHALIKNNSFWCNNYACS

SEQ ID NO: 183366 - protein, 414 aa, unidentified
MKVIYERCAGLDVHKKTVVACRIGVGEDSQWRRQETHTFKTMTNDILALADWLQAGGVTHVAMESTGAYWKPIYNILESNFEVILVNARHIKHVPGRKTDVKDAEWIAQLLQHGLLKASYIPETPQRALRDLARYRTKLVQERTREINRVQKVLEDANIKLGSVVSDIMGVSAKAMMAAIVSGQDDPQTLAQLAKGRMRPKIAELEQALNGRVADHHRLMLSLHLEHIDDLNIKIERLQQIIDEYITPFNQNREVERLDGIPGVGPRVAQVIIAELGIDMSRFPTSGHAASWAGLAPGKNESAGRNYSAKTMKGNRHLKAMLVQAAHTVARSKDNYLSAQFRRIARRRGKKRAAVAVAHSILVIAYHLLRDGTEYIELGGDYFDKLNKQQIERGLVKRLEQLGHKVILEPALSP

SEQ ID NO: 183367 - protein, 355 aa, unidentified
MKIIGCDFHTRQQQIEMLDTESGEIVQLRLEHGNGEARRFYEQLRGRVRVGIEATGYTLWFEKMLAELGHELWFGDAAAIRASVVRRQKNDERDAAHILQLLVENRFPRIWMPTVAERDLRQLVLHRVKLVQMRTKVMNQLHAMAMSQGLCRKKKLWSQAGRQELEALRLGPWAARRRQELLAMLDQWEKPIAELDRAVQEQAEAHPAAARLMTHPGVGPLTSLAFALTIGEVERFRRSRQVSSYLGLDPRLNCSADRMRMGSISKQGSSTTRWLLVEAGQTAARKDAELRRLYQRLKFRRGSQMAKVAVARRLAVRLYWMLRRQVDYAGLMAQLVRLRGSSGNAVMEAVGPSRG

SEQ ID NO: 183368 - protein, 403 aa, unidentified
MTQHERTIVIDQHKTQLTINVRNEHGDVVQKGQVSANHADIDNFFATFTKKAAKHRGYMAIVEVCGFNDWLLAKFQKTQCSEIVVIQPENSAMNKTDKRDANALCELLWNNRKRFQGGQRPNGIRRIIPAEPIDAQVRQLANSRRHLVRQRTMSINKIKSILNKHNMAQDAPTEKYDTKKFREWIKKVQLPVVDRLEVNLNIQSWELLDKQILEIEGELVKRSEASKAKMADVHRLTAIPGISTIGAITLLSRIGDITRFKTPDSLANYFGLTPGCHNTGGKHRVGGITKRGNAIARQVLNFAVMHIVRKDPAMKEWHKKIKKRRGTKTARVAVMRRLATIIWHILRWGKPYQFRYDPPPTPKTTLKKDDTRPSEKVLGGIDNRNHPRKKKGTPLKCRSKTKA

SEQ ID NO: 183369 - protein, 339 aa, unidentified
MGLYTGFDLHSSNTYVGIIDEDGRRLWKKKLRNDPSLISATLKPFKEDIEGIVVESTYNWYWLVDLMMEEGYRVHLANPSRIQQYSGLKHGDDEHDAFWLAEMLRLKILPEGYIYSKEQRPLRDLLRKRGHLVRLRTSLIQSLQNILARNIGTKMNTHHLKSLSTDYVSPLLEGNNDLSLAGRVSKEAIDALTRQIKAIEVVVEKRIDIRRPYDLLLSLPGVGRVLALTIMMETGPIERFAEVGNYVSYCRKVPAARFSNEKKKGTTNRKNGNKYLSWAYGEAAEHARRLDREARAYYDRKLRRTNAPVAHSALAHKLARAAYYMMRDGVPFMPGKAFA

SEQ ID NO: 183370 - protein, 433 aa, unidentified
MEEVTDEPLYRDRVCGIDIGKAELYATIRVPSDTRPQRRMSETRSFATTRRGVLALADWLRCWQVPAAVMEATSTYWMGPFFRLEAEGFECVLADAKQVKNLPGRPKRDPSDSSWLAQCFERGAVRPCFVATKEFRVIRLHTRYRRDLINERTREKNRAEKLLETAAIKLSSVITDLHGVTGRDIMGHLIAGERDPKVLAQLARTRARANITELQHALEGAEFFTGHHARLLKTMLERIDQIDAQISDLTAVTEELLAPYEEQLQQAESMPGWGRRSAEDAVAETGTDMTRFATGGHLVSWAGRAPLDKQSGKRKGPARHKKGNTYLGGVLGETAVCAGRTQTREGARYRKLARSRGKNKACVAVGNTQLKVYHTLLSHPGMRYADLGPDYYQRRAQTRRTIDYHVRELEALGLEVTLCRLPEPGQAATTPAA

SEQ ID NO: 183371 - protein, 341 aa, unidentified
MEEVTVIGIDLAKSVFQLHGADASGRPVFRKKLSRAQLTRFMAEHPPCLVAMEACASSHYWGREFVKLGHEVRLIPPIYVKPFVKRQKNDANDAEAIAEAVVRPTMRFVPVKSEEQQARSMVFKTRDLLVRQRNALINALRGHLMEYGIIAPPGRTFVRKLEAQVDAPESMLPSGVTELCRLHLEQIGSLDVMIMKIEKRLKEEAKSDPETIRLQTAPGVGPVSAMAIQAFAPPMEGFRRGRDFAAWLGLVPVQKSTGGRQILGRTSKMGQRDIRRLLIIGAMTRVRWAVKNGPPKGSWLEQMLARKPRMLVAIALANKTARAIWAMMTKQEDYRDPALAA

SEQ ID NO: 183372 - protein, 353 aa, unidentified
MTDIVTHTDRIATIGMDLGKRSFHLIGMDARGNVIMRQQLSRGRLERHMANLQPCLVGIEACAGAHHIGRRLSAFGHNVRLIPGQYVKPFRKGQKNDYRDAEAIAEAVQRPTMRFVPIKSAEQLDLQALHRIRSRLVGHRTAVINQLRSFLLECGVIVPQGPARLREILPSVLAQRTDVLSPRMIRLIEELADDWRRLDDRVDAVTSEVHALARQDECCRRLTSVPGIGALTASAVVATIGNGAAFRKGRDFGAWLGLVPKQLSTGDRTILGRLSKRGNKYVRTLFIIGARAVLAKPGSWAKFGLQGWLAAAAKRRHHNVLAAALANKLARIAWSVLYHGRPFARNFEPQSVS

SEQ ID NO: 183373 - protein, 382 aa, unidentified
MRIVYKRCCGMDVHKDSVTACVLLIDEDGEFREQKRHFSTMTRGLREMSAWLAGLGVEAIAMEATGVYWKPVWNILEAEQKFQLLLVNAHPIKQVPGRKTDQKDAAWIADLLQHGLLKGSFVPPTVIRRLRDLTRTRVKIRQMLASFANRIQKVLEDANIKLGSVASDVLGVSGRDMLHAMVEGQQDPKQLAELAQGRLRKKLGDLQLALEGQITDHHRFQLKFLLEFVVFGERQLVQLEDEIRRLITQVEPTTVQPEEAGAAELAAPGAGATPETSPLQAVVELWDTIPGIDELTASTLVAEMGANMDQFPTARHAAKWAGICPGNKESAGKRLSGKTPKGSVWLRRALCQAAWAASRTKDTIWRRNTIASLGARAKRRRS

SEQ ID NO: 183374 - protein, 342 aa, unidentified
MLNHYREGEVVEEITTVGIDLAKNVFSVHAVGSQGEVVVRRTLSRAKLSELIAQLPPCLIGMEACSGAHEWARRFAASGHTVKLMAAKFVMPYRKSGKNDGNDAEAICEAVARPNMRFVPVKSLEQQSDLSLHRVRQGFVEERTATLNRLRGLLSEFGHVLPLRASEVHRRVPQLLGKLPTRVAVCARDLLEHAARLQAKTLEYEHEIKIHVRSNALACRAQTRLGIGPITASALVATVGNGHDFKNGRQFAAWLGLVPRQYSTGGRTRLGHITKRGDPYLRTLLVMGARAVLQRAASLTDPLSRWALAVRERRGYHRACIAIAAKNARVAWALLAKEPVAA

SEQ ID NO: 183375 - protein, 407 aa, unidentified
MEVLYPRCAGLDVHAGSVTACIRIASGTEVTYTHRTVATTTRGLLDLDEWLTSHRCTHVAMEATGVYWKPVWHVLDGHVTLVLANAMHIRNVPGRKSDMNDATWIADLLAHGLIRSSFVPPASIQVLRDLTRTRKQLVGEIARHTLRIQKTLEDANLKLTQVMSDILGTSGRAILTALVAGETDPERLADLTRGRLKASRAALVDALHGRVTEHHRFMIQLHLTQIATLDTAVATIEARIGDALGPFRAAVSLLTTMPGLSDTTARVLIAEIGTDMTRFPTVGHLISWAGLCPRLDESAGKRRSTRTRRSAPWLKTTLTTAAWAATRKTDSYLRAQFLRIKSRRGAKKAILAVASSMLAAAYVMLRDGVEYHDLGPHFLAHRDKEQVTKRLLQRLRDLGVVVEVKAA

SEQ ID NO: 183376 - protein, 412 aa, unidentified
MQDILTCAMGLDVHRDIIVACLVKGAVDAEPEAETRTFSTLIPEMQKLRDWVIESECRNIAMESTGIYWQPIYEMLESCFDGEISILVVNARHMKNVPGRKTDMKDAQWIATLLRAGLLKGSFIPDKSFRELRHLTRYRKSVVHDITAQKNRIDKFLQSSGFRFTAFLSDTFGASGRNIIRHLIEHGSIDREALDKCLKTKTRNRIDEILVALNGSLSEHQRRFLNMVFRHLEDLEAHKHTVEDEITEEVLKHTDALNLLCSIPGIDVTAAAAIIAEIGTDMSSFQDSQHICSWAGLSPGNNESAGKRKSVHINKGNPYLKSMLCEVAWIMASHRKLYLSGWYWKVKQRKGAKRATIALARKILSIIYTMLKTGTPYNEECFEQRRLRCEWKRANRLVNELQKLGYVVVAPD

SEQ ID NO: 183377 - protein, 354 aa, unidentified
MKILALDLGKDKSVSCLYETQTGQHTFEQLPTSPECFGELLSKSQANRVVIEVGPSAGWVSDLVRSRGLELQVANPNHEAWRWRKVKSKTDRLDALKLAKLSAVDQLPTVYIPSVRTRQWRSLIVYRQTLVARRTAIKNRMRSILEGQGLKVLKKGKPGWSEKSLLLLRSLAQPIEQVDLDELWRGELWIELEQYVQLAGQIKQIETKLDAIGRSDVRVQRLESIPGVGQRLAETVVAILDDPHRFRSGKQVGSYAGLTPRTFQSGQSNRQGRISGEGNRHLRSMLVEVAWLGLRWNPWMRAVYDRVHRGSKARKKIAIVAVARRLLVRCWAMLRDESDWRPPQERSVQIGAAA

SEQ ID NO: 183378 - protein, 430 aa, unidentified
MKFNTQNTKIEAITETTLVLGIDVGSETHFARAFDYRGIEYSKKPFKFSNTEAGFVTLKAWILDIKEMHGKDKVVPGMEPTGHYWFNLGKFLQDNEMKPVLVNPHHVKKSKELDDNHPTKNDRKDPKVIAGLVREGRYMIPYLPDGVYADLRTASNMRFQLQGELTRIQNRISRWFNIYFPEYKTVYGKPDAKSGMLILKRAPLPKDILTLGVDGVNRIWRDAKIRAVGKARAKALVEAAEHSVGSKEGEVSARMEIRMLLEDYESRNTRLQEVMALIEELVKQIPMAEKLLEIKGVGIRTVSGFLAEVGDISRFDTPKELQKLAGLALVENSSGKHKGQTTISRRGRKRLRYLLFEVAMSLVAKNAEFRELHHYYTTRKQNPLKKMQSLMAVAAKLLRVFFAMLTKGVDYDPKKMLSDIKRPAVYLQAA

SEQ ID NO: 183379 - protein, 359 aa, unidentified
MVKYRKKTKMRKLDSITCDDKAYVGLDVHKRSIHGAVRINGKQISTFVMPAKKDAVIKTLEPLAAGLEKIVYEAGPTGYSLARSLQEIGWPIEVIAPGKIPKEANQGSKSDRLDCKKLAEFAEKNLLKAVAIPTEQEEADRQLTRLRDHLKKKDKRTKQQIKSFLLQHGLKEPNGLSNWSQCGIDELAELELNSELRFVLDIFLEELKDLKNHLKITHNRIKQIAKAERFEKKIALLKTHPGVGPQTSIKFLTEVYQPGRFTEYTQVARYTGLAPRVRQSGEKRREGPLIKAGQAPLRCMLIQAAWAWVRYDPHAAMVYRRLLKNTGKTQKAITGIARRLAVDLWCMLMRNEVFRTAAV

SEQ ID NO: 183380 - protein, 341 aa, unidentified
MSIFVVGIDLGKNVCSLVGLDEAGAVVLRRRLRRDGVADFVGSLPTCIVAMEACCGAHHLGRVLGAAGHTIRLMSPEYVRPYVKANKNDDHDAEAIAEAATRPTMRFVPVKSEPQSDIQALHRARSRLVTERTALINHLRALLLERGIIAPKGRKQLEAQLAVFADENDPRLSPRMRLLVEDLRTEWRNLDERIAAFDAEFVQMAREDKAARRLATIPGIGVINATALVAAVGDARSFGRGRDLAAWLGLTPRQATTGGKPRLLGISKRGNRYLRANLIHGARAVLPRLMAQDTPLGRWVRSLLQRTHKNVVVVALAAKLARIVWAVLRKERGFDPAIAAS

SEQ ID NO: 183381 - protein, 389 aa, unidentified
METPTQSHMREEPVMSKVRFIGLDVHADTIAVAVAEPGGEVRSLGVIPNRPESIRKLVKKLGPAEQLRVCYEAGPTGYVIYWQLTALGVRCEVVAPTLVPVKAGDRVKTDRRDAEKLARSYRAGDLTAVWVPDAAHEALRDLVRAREAAKKDQLRARHRLGKFLLRHGRRPPTGMTSWTQRYLAWIKTAVHFEQPAQEATLLDYLHEVEHVAGRIERLERAIDEAVQTAPARMRAVIAALQALRGIALVSAVTIVAEVGALSRFARAPQVMGYSGMGAREDSSGGRTRRGGITKTGNAHLRRIVIEAAWAYRHRPSVGGALRKRQAALSDEVKAIAWKAQHRLHGRYRKLLGRGKCPQQVVTAVGRELLGFIWAIGVAVEQRTPQASAA

SEQ ID NO: 183382 - protein, 313 aa, unidentified
MAASEVFVGIDVSLAELVVAVRPTDETWTAANDEAGIAALLERLRPLAPTLIVLEATGGYERAVVGALTTGHLTVVVANPRQVRDFARATGQLAKTDTVDATILALFADRIRPEPRALPDAATQALAALVARRRQLLDMLTAERNRLGHAVPVIAKDLRRHIKWLERRIEDVNRDLDKQIQASPVWRAKDDLLQSAPGVGPVVSRTLLAAVPELGHLGHKALAALVGVAPMARDSGTWRGHRTIAGGRSAVRAVLYMAAVVGIQHNPVIRGMYRRLVAAGKPKKVALVACMHKLLTILNAMVRSNTAWRDAVA

SEQ ID NO: 183383 - protein, 347 aa, unidentified
MAHFVGLDVSVKETSVCVVDDAGKVVCERKVATEPDDITVLLTSVGGEYVRVGIEAGPLSQWLVNGLTEAGLPVVCVETRHMKALLTAQQINKSDRNDARGIAQMMRVGLFKPVHVKTLAAQEQRMLLTSRKLVQRKLMDIECDMRGTLRNFGLKGGVVNTVGYEARIRDLVEGFPVLAAIVEPLLTIRRVMRQQLAALQKMLLHTVRHDPECRRFMTVPGVGPVVALTYRASVDQPHRFVHSRAVGAHVGLTPKRHQSGETDYDGGVSKCGDAMLRTMLYEAAQTMLTHSQKWSWLKAWAMRVAQRRGMRRAIVALARRLAVILHRMWIDGTDFRWSNAATAVTAA

SEQ ID NO: 183384 - protein, 339 aa, unidentified
MITMKQVVGIDISKDSFDAQFAVTDEKQQQRFVALAKFCNTLPGFRKLSRWAKKMAGSSTAPLWFVMEATGVYHEHLAYYLAEQHQRVTIVLPTKMKNYVRSLDIKSKTDRLDARAIAQFGLERMLQPWQAPSTQLRILKALVREYDAATEQLTKIKNQLHAKDHSYQPAIQTLARLEAQHKLYEAQLKAIEVEIRALVEDDDDLRARIGNITSAQGVGFMTAVRVIGETNGFALITNAKQLTSYAGFDIRIKQSGLRSGKPSISHKGNSNLRRALFMPALAATRCNPALRRFYLRLVQSKGNKMVALVAVARKLLCLIYALWRDNVPYQPNYRQTAVL

SEQ ID NO: 183385 - protein, 355 aa, unidentified
MSQEKYIGMDVHQATISVAVMDAAGKLIMECLLETKAATIVEFMEGLHGTLSLTFEEGTAAAWLHDLLKPHVSRLVVCDPRKAALLKQGNKSDRIDARKLAEMLRTNQLHSVYHGERGMRTLKELGRSYLTVTQDVTRGLNRIKALYRSWAIPCGGTTVYASRHRAEWLAKIVEPGVRVRAEHLYQQLDSLQPLRLEARRELLRESQKHLEVKLLRQIPSIGPIRAALLVALLQTPHRFRTKRQLWAYSGFAVETHDSGEYRYVRGKPQRNRERITVRGLNDNYNKDLKNLFKGAAISASTRPGPLHDFYVASVAQGMRPTMARLTLARKIAAVSLTIWKKGVSFDPKQLQQQAA

SEQ ID NO: 183386 - protein, 326 aa, unidentified
MEHTSRFVGIDIASTKVDICWDTAEALSHQTLEYDEQIFDDFLAKHPEIVSDNTIVGMESTGDYHLKAARYFLNKSFSVKVINPIITKEYIRATVRGKKTDKTDAMLIHKALSEGHGDCVNLSQLSDEPKELLRLSTTLSHITTQLILRLQSTERKDLPGTEEIQKQLQGVVDQLREVNKMIVKQATKDRSQEEEFIDSIPGFAIKLSAITHHEVGDINRFHNAKALVAFAGLDPRIKQSGNNLNTTGRITKRGSPYLRAALFLAANVARQYDQDLAKYYTKKKEEGRSHKEILCMISRKLLARIYTVLKEQRMYRSAPILSTEND

SEQ ID NO: 183387 - protein, 383 aa, unidentified
MKAVCGLDVHKDSVYLCILNEFGELIEKVFGVLTYQLEEMRDLMLHHHVVEVSMESTSVYWIPIWRVLFPHFKLNLANPYFIKQLPGRKSDVKDAQWIAECTMKELIRGSFVPPETIQQLRQYDRRIFDLNEEIVRKLSKLDAVLQRCNIRLSNYVSNVDSKSYKAVVRAISQGITAPEELVKLIHGRIINHHGIDVITASLKGVVSLAEIDMISQLRDELDMAEAHKEKCQAKMLEICEREFPEELKRLQTIPGIKERAATSLIAEIGTDMNKFETANHLASWSGLKPRNDESNKKIKSRSITHGNVYLRKTIIECAWAASRTKDCFFSRFSYHQTQVRKKNKMKVLVAVARKMLIAVWHVLHDNTIYIDFTTDRKTSRTKG

SEQ ID NO: 183388 - protein, 343 aa, unidentified
MSIDTMIGVDLAKSVFQVHGASMNGEVQFQRKLSRQAFCTLMARHPAAAVVMEACGSAHYWARVLRGFGHEVRLIVPRYVRPFVKRQKNDAADAEAIVVAAQRPGMRFVEPKSEAQQSAAILYRSRQRLVRQRTETVNGLRAALYEFGHVIPQGIQHVDRIRALLEAANSDLPTLMREECLAMLEQIAVLNGWIDTKTAKIKELAAATPVSKRLQTMPGIGPLVAMAVETFAPDMASFHNGRDFAAWLGLVPRQFSSGGKERLGRITKTGQADIRQMLIIGAMSRLNWMGRKAIPESSWLARMMDRKPRMLVAIALANKMARQIWAMLTKNEDYKNPTPIMAA

SEQ ID NO: 183389 - protein, 368 aa, unidentified
MKQVTTYVGIDAHKKDLFIARLMGPESKPVTGQLANEPNAVRRLVRKLAREAPGPVRVFYEAGPCGYALQRQVTTSRVSCDVVAPALIPRKPGERVKTNRRDARKLAELGRAGLLTAVQPPTAEDEAVRDLARARDDAREDLQRCRHRLGKLLLRRGLHYAGRNWTRAHRQWIEGVTWTHAAERIVVDDYLLAIDHTEARLVELDARLAEIAEREPYREPVGWLRCFRGIDTLTAMLMLAELHDFRRFASAPALMAYLGLVPGEDSSGEKHRRGRITRTGNALVRRLLVETAWHYQHRPTVGTALTRRRKGQPARVIAIAEKAQQRLCRRFRKLAAEHKPPPKIAVAIARELTGFLWAALQREPATVN

SEQ ID NO: 183390 - protein, 304 aa, unidentified
MKKTSTVRVNGNMIFKGHKLTIGVDLGDRWSNYCVLDEAGEVLLEQKVATTPEGMKQTFEKMPRSLMALETGTHSPWVSRLLKELGHEVLVAHAQKVNLITKSTRKDDRHDARTLARLARIDPELLGPVRHRSAKAQIHLTVIRARAALVSARTALVNAARGLAKSYGQRLHKCGTQQVSRELAAELSVELREVIEPLLKEIESLNERTKEYDVRMEKIARESYPQVALIKQVKGVGTQIALTYVLTLEDPQRFPKSRDVGCFLGLRPGRRDSGESQPQMHISKEGDPYLRTMLKAACFFCCLP

SEQ ID NO: 183391 - protein, 340 aa, unidentified
MRIIGCDLHRSQQTVSMLDRDTGEEVKKTLPHDGDAVRDFYAALAAPVVVGIEATGSMGWFLQLMETLGITCHVGHPAAIRKAETRRQKHDRRDADLLLRLLVEGRFPTIWMPSTDVRDLRALLLHRHQWVRMRTRVQNALQAIALGHGVRRGQGLWTRDGQAALSAIPLPPYTDDRRTALLTLYASLNDEVDQLDARVREVAAARPSASLLMTHPGVGPVTALATEVFLGDPTRFRDGKALASYVGLIPREYSSGSRQRLGSISKQGNPFLRFLWCEATLHAARVDPALHRFHRRTLARKGLGKARVATARKLGIRLWIMMRDQITYDEFCRRSARPAA

SEQ ID NO: 183392 - protein, 407 aa, unidentified
MEVVYRCCCGIDVHKKLIVACLNKGGRQELREFGTATSEIKAMANWLIESECEMIAMESTGVYWKPLYNLFELMDLNAIVVNASHMKALPGRKTDVKDAEWIADLLRHGLLKASFIPSREQRELRELARYRKSLIEEHSRELNRLQKILEGANIKLASIVKDINGVSARKLLDRIIADDLPDADETSRLIHGRLRSKLPEIMSSIEGIVTPLQRKLLSQVLDHIDDLDKRVSTLDAMVKDYMTEYEAAISAIDEIPGIGRRSAEVILAEIGADMNRFPSAAHLSSWAGICPGNHQSAGKRKHGKTTKGNKTLKSILVECAKSARNVKGSYFSAQYQRIAARRGKNRAAVAVAHSMLIAIYHVLKYGVPFRDLGEDYYNSFNREHKIRGYLRRLQSLGWTPDSSLASA

SEQ ID NO: 183393 - protein, 366 aa, unidentified
MLIIGCDYHPSVQQIAWADTETGECGEKRLMHSDGEAERFYRELKQKGVQVRVGIEATGHSRWFERLLAELGFELWVGDAAEIRAARVRKQRNDRFDAKHVLKLLMEDRFPKIWRPSPENRDVRQLLLHRHRLVGMRTRVMNQLQAIAMNEGLRRKSGLWSKKGRARLESLSLAPWTSRRRQGLLELFDRLNPMIDELSQAIEQEAARRAEVQLLMTHPGVGPITALAFVLIIGTPERFHCGRQIASYLGLIPCEESSADHWRLGHITKQGNALMRFLLVEAAQTVARCEPEWRQHYFHLVLRRGGAIAKVALARKLAVRLFWMWRKGQDYQQVKKFGSDTGQLEVPNGVKSITVKVIERPALSMA

SEQ ID NO: 183394 - protein, 399 aa, unidentified
MLAVGIDVSKSKSAAAILNPDGTVHTKPFEFRHSQPEMDALIRYIKDQNQPVTILMENTGHYHYPVLKALEAAGLPVCLINAYQMKKYGDMELRKAKTDKKDALRIARYALEKGYSLVPHTSMDQKYEDLRFLARQYDQRMGTLTTNKVFLINLLDETMPGITKLLSLTTRDPETSLAMLFIKRFKSYDRIKKMGRTRFLDSYNKLARKSRNRRAYGYGLAIYELAVNSITTRGENEFTLVAQDQCVDLVSESQKAADAIILKMQTLAETLPEYAVLRSMAGVGDQLGPLILAEIGDIRRFHSGNALNAYAGNDAPPYQSGTFESHNRHISKRGNAALRKYCFEVMQALKLTRPQDDPVYLFLIKKEQEGKPYNVAKMAGVNKFLRIYYARAMEALRLQ

SEQ ID NO: 183395 - protein, 345 aa, unidentified
MEHHAGIDVSLEWSSVCVVDASGKIVREIKVASEPEVLVEFFKGLSLPVTRIGLEAGPLSQWLHAGLTRAGFETVLLETRHVKAALSAMSIKTDRNDARGIAQLMRMGWFRPVHAKSVGSREVRALLVARKQLLSKLMDLEASMRGILRGFGLKMGVVTRKGFEARVRELSAGQAMLERVTSAMLEARAALWREFEQLHREMLRIVRDDEICRRLMSTPGVGPLVAITFKSAIDDPGRIAKSKMIGALFGLVPKKYQSGERDVSGGITRTGDESVRTALYEAANVMLTRTTRFSSLKRWALEVAKRRGLKRARVALARKLGVVLHRIWIDGTTFRWTKHNPAIAG

SEQ ID NO: 183396 - protein, 313 aa, unidentified
MRASCHIGIDVSKNSFDVFIYETAIHKKFEMNKKQIHTALNWIKKQEPVLIVLEATGGYECTLVAELVTMKLPFVISNPRLIRDFAKATGKLAKTDTIDAAVIAHYAAVIKPKIRPLLNEQEQKLSALTTRRRQLVDARAVEKNHREHSHLPEVKSSVELIINQLTIEIEKIEKLINEIISSDPDMNNKIDQITTVPGIGKATAAILIADLPELGSLNRKQIAALIGVAPINRDSGQYRGKRMTGSGRRNVRSALFMAMLSSIQFNPILKKFYKHLVDQGKSKMVALIAAMRKLIVILNSMLKNNEAWRLKIA

SEQ ID NO: 183397 - protein, 369 aa, unidentified
MKHSITFVGLDVHKDSISIALADDGRDGDVRLYGSIGGETGALDKAIRRFRRADTELRFVYEAGPCGYEIYRHLTKQGFHCDVIAPSMTPKKSGVRIKTDRRDALSLARLYRAGELTPVYVPREDDEAMRDLVRGREDAVNATRTARQRLSALLLRHGFRFTGRKAWSVAHLRWLADIKMPHPAQQITLQEYIHSIEENSERVDRLTEQILKLTPTWRMAPVVNAFQALRGVAPIVATTMVVEIGDLRRFENPRQLMAYLGLVPSEDSSGQSTKRGGITKTGNGHARRMLIEAAHTYGVPAKVSRVIRARQEDLPRTIKEISWKAQVRLCGRFRKLMARGKSRNSTVTAIARELSGFMWAIAREVSIPA

SEQ ID NO: 183398 - protein, 365 aa, unidentified
MKTKTTPSVVPTLTPVAISGFTLGLDLGDRAHHVCVLDATGQIVREASLPNTRPALAQLLTEFPRATVALEAGTHSPWISRYLTDLGAKVLVANPRKLHAISRSERKCDRRDARMLARLARVDPALLHPIQHGSAQAQHDLLGLKLRDALVRTRVNLINAVRFTLKSLGHPVRNPSSESFHKTVDVPADGLPVVQPLLTVLAHVTEQIKAMERDLVARSKKDYPATQRLQQITGVGPLTALCFVLKIGDPQRFSRGRDVGAYLGLCPRRDQSGGTDKQLRISKCGDGLMRRLLVSAAHYVLGPFGPPCALREHGQRLTGTGSAREKKRAVVAVARKLAVLLLSLWKHGTNYEPRVTKSILVLTPA

SEQ ID NO: 183399 - protein, 360 aa, unidentified
MRNEITNNSFKDQSFYVGIDYHKKSWKVTILGEQYEHKTMSQDPSANILARYLKKNFPGATYKAVYEAGFSGFTSCRELNQLGIDCIVIHPADVPTNQKERLQKTDKADSRKLARALKNKELEAIDVPDPELEADRALVRQRFRLVKDISRTKNRVKSLLLQFGIPIPDHISCAQSRHWSKAYTNWLKELPVEMNSLRQVIDNYVRIAESQRKELLLVNRQFRQLSMMHGYQSDYTLLLSVPGIGIMTAMTFLTQVGNINRFERLDDLCNYIGLVPTMYGSGDKMVTGKMIHRGRKELKIMLIEASWEAIRKDPALMLKFNELSKTMHKNKAIIRIARKLLARIRFVLQNQQQYELSVVK

SEQ ID NO: 183400 - protein, 386 aa, unidentified
MTIDKKLWRNRKERKELARRLRSEDPGLEVVHPCAAGIDVGNEAHYVAVRPDRDLQPVRRFECFTADLHRLGDWLQNCGVKTVALQSTGVYWIPLYDILEERGFEVYLVNARHTKNLPGRKSDVQESQWLLKLHTYGLLNNSFQPTSEIRVLRTYWRQRAEHVRGIGTCIQRMQKALTQMNIQLANVISDLSGVTGQMIVRAIVAGERDPRRLAELSDRRIHASKEEIAKSLEGNWRQELLFVLQQEVEMYDTYQRRIVECDHELQKHLSRFADTGPQPATDKAKKKKSQSKHHPQFQLADELLRITGVDLTRIDGIDVMVAQTLLSEVGLDMSRWKTEAHFASWLGLCPDNRISGDKVLGRGTRHVINRAATALRMAATSLLRSL

SEQ ID NO: 183401 - protein, 326 aa, unidentified
MNLSATALGIDIAKLKFDVCLIKENGKTKHKVFSNNRHGFEQLALWLDSHQTVDLHICLEATGSYGQALALFLSDAGYLVSVINPAAVKAFAASRLPRTKTDKVDAELIARFCLAQQPAAWSPPAREVRELQALVRRLESLIEMRVAEENRLSSAVSTVAVKQSLEAHIRYLIEEIKQTEAAIQEQINNHPDLKQKSDLLDSIPGIGQTTAALLLAEIVNLKQYKSARQVAAYAGLVPRERRSGTSVRGRTQLSKIGNARLRKALYFPAITALRCSGFFQQWASGLCERGKCKMSVIGAAMRKLIHLAYGVLKTGKPFDPNWAKAA

SEQ ID NO: 183402 - protein, 406 aa, unidentified
MSDIFALDVSMGKSYCVWYRGKHCLKEFSLVHTKAGFNALRDMIKKAQKPIIYFEATGIYSRVIEHFCETNGLRFCRLNPLELHLKSESLRRVKTDQKDAHRIALTVQENAFRLTVPWKKDYLQLHELSRFYNQLNADWNYRLNHLHTALEQVFPELKQLFVNRTSKLALNIVELFPHPALVRPYSRVKLKNILMASTDKRISKVKAYKYADRLINLAQKSYPAVSGDAIQVEEVRYYARQLIALTHKREEVIKRMESIAQRLPEYILYCSFPGIGKQTAAQLMGELGDISRFDNANQLNAFVGIDIRRYQSGTYLGQDHINKRGNPIARKLLYFTVGNMIRQQHANSNHIVDYYYHLKEKRPHPKLNKVAMVACMNKTLKCLLSMIKHHEKYHYRYTDSMVPVKA

SEQ ID NO: 183403 - protein, 348 aa, unidentified
MDHIIRIGMDTSKHVFQLHGVNAAEEPVLRRKLRRNDMVVFFERLAPTIIAIEAAGASHHWARLLRSFGHEVKLIAPQLVKPYVKRGKNDTADAEALCEAMSRPTMRFVPVKTAERQAALMLLGLRDRLVRNRTQLANAIRGYAAEFGLAAAKGIAHLAPLLARIQSDESLPGLARELFAAHAQEYAQLQAQIDEVEGKLMAWHKTNPGSRRLAQIPGIGPIGAAMLIMKTPAPEMFRSGRQFAAWIGLTPKDHSTAGKVRLGVITRAGDEGLRSALVVGATAVIRHLRNGKGRSMLSAWVEQLLKRKPPKLAAVALANKLARIAWKLMVAGETYTAKPRPIASAGIA

SEQ ID NO: 183404 - protein, 312 aa, unidentified
MMDAVYVGIDVSKDRLDVHALPQGAAFMVARNGEGVAQLVERLKELSPALIALEATGGFETVVAAALAAASLPIVVVNPAQVRHFAQALGRRAKTDPIDAAVIARFAQATQPAARPLPDEMTQLLADLVARRRQIVEMMAAEGQRERRADKRLKKSIARLRKALEKELAELDGEIDDYMRGTPAWAEKQDLLASVPGVGPVIARTLIAELPELGALDRRRIAALAGLAPYTRQSGQWRGKSFIGGGRKTVRSMLFLGAMVAARHNPVLKAFRDKLVDSGKPKIVALIAVARKLLTILNAIIRDAKPWRTQNA

SEQ ID NO: 183405 - protein, 412 aa, unidentified
MLKIVYPICCGMDVHKSFVVACIATTNDHGVTNYKSKRFSTFTGDLRRCADWLSENNCKDVCMESTGKYWIPIYNILEHTCNIVLAHPKYVKAIRGKKTDKRDAKWIADIFKHDLVSGSFIPPADIRQLRDLVRYHWKLTNFNVGEKNRAQNCLTVSNIKLDDVFSDVFGKAASAITTRLLESNEPFDVKPYLTKNIKKPIEQIQAAVDGEMCAEQAEKLRIIRSHMDSLELCKLNLESLILSTAEKYIPQLNLVMTAPGIQSFAAIGIISEIGVDMSVFPTSKHLCSWAGLTPQNNESAEKKKTTRISRAGAYIKPLLVQCALCAIRTKQFPEVRNRYLALKKRRGHKKAIIAIARMLLTAIYNILKWNEVYNSELYRKADRPPAHREVSVEEAVFILQRQGYLVTAPAVT

SEQ ID NO: 183406 - protein, 350 aa, unidentified
MPVKGLRQQQLLLKQKKECMQSKEFFIGIDVSKLTLDVSVSGTKNHLRIQNSSEGFKQLQSWLKSVNIAVSDCWFVFEYTGGYEYRLVQFLQSKGILFTRVPGLEIKKSMGMQRGKNDKIDSKRIAEYGYEKRDKLKEHKACSTAITRLKLLLTQRSGFVDDKKAHEHRMKELEAMMDLKAGDPILKHYKQAVDFAVKMIAKTENEIMKIFSKNEAMNKNFTLITSIPGIGKVNGWMTIAYTENFERFPHGRAYGAYIGVVPYEHSSGSSIKGKSRVSHMANKTLKADLSMAAKASVKNDPEMKTYYERRTALGKRHMGIMNEVKFKLVLRMFAVVNKGEVYVKNLKSAA

SEQ ID NO: 183407 - protein, 316 aa, unidentified
MDHKQAVYGVDVSKAKLAIAQYEGEAVVEVDNAPEAIAAWLASVPAGSAVAMEATGVYHRVLAQLAHAAGLVIYVLNPQVLKHYARAVGQRGKTDGCDARMIARYLVHERSKLRPWQPPLAAADTLSRLLVRRRALVGARQTLAQSLTGMPMLKAPRQTLLASFKRTIATLDLLIRRELARLPEMAALHRRLKTIVGIGEVVAAQLVAALSTLCFTRAAAFIAYTGLDPRPDDSGQHRGRRRLSKRGPALLRCLLYNAAMAAAKSKVFKPVYRRLRERGLQSTEAIVILARKLARIAFALYKSGETFDVQKHLKTT

SEQ ID NO: 183408 - protein, 343 aa, unidentified
MSTYYYIGLDIHKRTISYCIKAIDGSLIGQGKIEADRKSLDEWAKGLPGPWVGAMEATIFTGWVYDFLKPHAVALKVAHPEMLKAITAAKKKNDRADAEKIADLLRVNLLPECHMLSEEIRELRRVLRYRNHIVRTAVKMQNKISGLLMEVGVSYSKRRIHGKKYFHEILERVEEIPPSVKGLLQLSRSSYEMFRSFQKRLVETLRTNNLIRERVERLMTIPGIGELTALTWVLEIGDSGRFTSIRKAVSYCGLCSAQRESAGKEQRGPISKKRNKHLQTMLIEAAKLAPHWNEQLAIVHERELKKGDRNRATLAVARRLVAYMLAVDKKQADFKLPAEMQAA

SEQ ID NO: 183409 - protein, 429 aa, unidentified
MNYTQNEKIEQVTDTTMVVGVDIGSQTHYARAFDNRGRELTKRVFSFQNDIEGFNSFHLWTEKLKNENKKTAVLIGCEPTGHYWFAFAKYVQDHQKTLVMVNPFSVKKIKELDDNSPKKTDAKDPKTIAKLVVDGRYSIPYMPEGIYAEIRDLVYSRDRIMKQHNISANRIQRWLAIHFPEYLGLYTRFDATSGLAVLEQAPLPKDVIALGVEGIRKIWHDKKMRGRGVTEDRAKTLVEAAHNSVGLDGGIGTKSELYMLLEEHLLWTSQLEAVNKVLEESIRKVQHVEKLLAIKGVGSVTIAGFIAEVGDIRRFKSPKQIQKYAGLELVENSSGKHKGRSRISKRGRRKLRKSLYQVMVPLLARNKEFRTIYDYYVTRVKNPLKRRQAMIAVSCKLIRVFYAVLTKGVDYDRFKMMSDIHHESGLIAA

SEQ ID NO: 183410 - protein, 369 aa, unidentified
MGHRSMFVGLDVHKDSIDVAVAEGGRTGEVRHYGVIRSDHAALEKVRRRLRALGRRLHFVYEAGPCGFGIYRYLTEEGEDCAVVSPSRIPRPSGDRIKTDRRDATTLARLHRAGELVAIHVPTVDDEALRDLVRAREDAVGVSTQAKHRLKAFLLRQGRRYDGRAGWSRPYRRWLATLTFASAPQHIALQEYRDTIDETERRVSRLTEQLRHLVAQWRWAPLVEALQALRGVSFVTAAGLVAELGDLRRFDHPRTLMAYVGLVPSEHSSGMSVRRGGVTKTGNAHARRLLAEAAWAYQCRPRVGRELLERQEAVPPAVREIAWNAQLRLTGRFRRLVARGKAKPKVATAIARELTGFIWAIGQEVTFSQ

SEQ ID NO: 183411 - protein, 370 aa, unidentified
MKNVITYVGIDAHKKDLFIAMLVGDQKTPVTWTVPNEPNAVRRLVRKLEREAPGPVRAFYEAGPCGYALQRQLTTPRVSCDVVAPALIPRKPGERVKTNLRDSRKLVELGRGGLLTAVRPPTPAEEAVRDLARARDDAREDLQRCRHRLGKLLLRRSLHYQGRNWTRGHRQWLNRLTWTHAAEQAVVDDYVLAIDHTEARLIELDARLAAIADTEPYRTRVGWLRCFRGIDTLTAMLILAELHDFQRFPTPRALMAYLGLVPGENSSGEHHHRGRITRTGNALVRRLLVETAWHYQHRPKVGVALTRRRKGQPSRVIAIADKAQQRLCRRFRRLAEHHKPAPKIAVAIARELVGFLWAALQPDSMARRTA

SEQ ID NO: 183412 - protein, 381 aa, unidentified
MQLTRIGMDIAKHVFQLHGVDEHGRTVLRKTLGRARVLEFFAQLKPCEAGMEACGGAHYWARELTRLGHTVRLVSAHKVKPYVDGNKNNHHDAAAICEAMSRPRMRFVQPKSLAQQDMQSLHRARAMLVRERTALANQMRGILHEYGIVVPQGFTPLRRVAAELLASDDRGLTPVLREIVAESLSRLKFIEQRAADYQRRIERMCQQDERCMRLRAVEGIGPLSATALVASIGNGREFNNGRHFSAYLGVVPGHSNTGNKTVMLPITKRGSRYLRTLLIHGGRSAVYAARRRSDPKSRWLNRLKAKSGANVAAVALANKNARIAWALLRYGEEYRPARAHAQSSSPPARSARPAEQQPASALQGAAPRSQNPHFSGPLRAG

SEQ ID NO: 183413 - protein, 431 aa, unidentified
MTDVHILAIDLAKRSFQICATAAGGAVLFNRMISRAKLETVPREQTPCIVAMEACATSHFWGRFAQGLGHEVRLIPPIYVKPFVKRQKNDAADAAAIAEAALRPNLHFVAVKSAEHQARAVAFRTHQSFVGQRTQLINALRGHLGEFGLVVAQGPTGLKTVAGMIDDNATELPDAVRDIVRLYLDQIAVLTQKIDDLHFKLRAAIKVDDAMRRLCTVPGVGPVTAGAIMAFAPDLRAFASGRNFAAWLGLVPRQRSTGGKTRLGGVSKMGQADIRKLLIVGAMSRIRWIIRRGVLPDSWLGRILGRKPRMVAAVALANKMARMTGGDSAFRRGHEVKLIAPRYVKPFVKRQKKDADAEAIVIAAQRQKCVSSSPSLRSSKAVPSCFALENGWPASCDTSRREASTASVKLGRPTTAANAERYALSARAQAF

SEQ ID NO: 183414 - protein, 338 aa, unidentified
MNIVFLGIDLAKNVFQLCGLNQAGKPVYTKRTGRKELLQTLANIPACLIGIEASTGAFYWQREFEKLGHKVKVISPQYVKPFVRGQKNDGNDAQAIAVALMQPTMQFVPPKSPEQQDIQALHRARQRIVNHRTATVCQIRGLLLDRGIPIGSAVSRARRAIPLILEDAENGLSSRMRRTIAELYDLFNDPERRIHFFDKEIETVFRQSEACQRIAKVKGIGPETATAVVAAIGKGTEFKNGRHFAAWLGLVPRQHSSGDRQVLMNMTKKGDKHLRTLFIHGARAVVRVATNNNDGHMNQWVNQLKERRGFNKTTVAVANKNARIIWSMLRNETGYQVV

SEQ ID NO: 183415 - protein, 323 aa, unidentified
MQFIGCDVSKLKLDLASATRSHQVDNTRAGWNALIQWAQAHCAADPSEICIVMEASAVYHLQAAGYLSLAGLKVLICNPGRSSDFARSQNQLNKTDRLDAKALQRYGSTLKTPHFFKPDPPEISELKALLGLLDQIDRDTQRWQNRLEKACHQYPASTITRSIKRQIAHLQREHARVQKAIDVLIASHPVLKRNQRLMCTIKGIGARSSQRLLLLLHSNRFASARQLAAFLGLTPCVKSSGTTLNKPARLSGRGNATIRAALYMPALSAKQHNPELRALYDRLIARGKAPKQAITAVMRKLVHQCYGVVKNQTPYDENFAALT

SEQ ID NO: 183416 - protein, 364 aa, unidentified
MYDSTTTVTVGLDVHARSIRLAAVRADELLEERTLPYDEQAVEQVLRRWPVVRCCYEAGPTGFGLQRFLVERGIDCSVVAPGLVPQRPGDRVKTDPRDARKLARLLAGGLLEPIHVPSRELEAARDLVRGREDARLDRMRDRHRLSKFCLRHGRVLPTSSWTVMRRKWLGEQRFEFAAQQITFDSYVHTVDLVDARIEQLERAIRETAEQEPWRGLVARLRCLRGIETLTALALVTEIGDFDRFTTAEELMAFVGLVPSEHSSGEKRRQGSITKVGNSHVRRLLVESAWHARRRPKVGYELARRQRGQDAVVVERTWRCQQRLYQRWQRMAGRGKPQQKIVVACARELAGFVWAIATEQPLRNT

SEQ ID NO: 183417 - protein, 319 aa, unidentified
MDPTSHTLVGIDVAKHSLDVYLASEDCSFTITNDTAGFGQLLEELPAAGSCLVVIEATGGYQSRVVGVLVAAGHRVAVVNPRQVRDFARSLGILAKTDRLDARVIARFGAQVNPRPVEIGSEKQAELRELVTRRRQLVAWRTAEQNRLETTLTKVVRKNIRHLLEQLDKQIRQLEEAIGELLQNEPELASKAALLETVPGVGPVTVTSLLVDLPELGRLDRQQVAALVGVAPFNRDSGKFHGRRAIWGGRAALRSVLYMAALTARRSNPLIRDFANRLEAAGKPFKVVLTACMRKLLVILNSIVKNNLPWNPKLKPHCG

SEQ ID NO: 183418 - protein, 360 aa, unidentified
MAQVRTWVGLDVHAAKVVAAIADSESGELAVRRMGGATEQVAEFCAGLPAPVRVAYEAGPTGFGLARALAARGIDCTVAAPGKIERPAQDRVKTDRRDAERLVRLLMIGGLHPVRVPTPAEEAMRDLVRAREDVRGDLMRARHRVAKLLLRHDLRFDGNNWTQRHLDWLGRIELPEPVAQSVLLDGIGSIDALLVRRESLESQMASLVEGSPWEQQVARLRCLRGIDTLSALGLCAEVGDFERFARPAQLMSYLGLVPSENSSGEKRRQGSITKSGSRHARRLLVEAAWHYRRSPRKGRELRRRQEGRPQAVCAISWKAQQRLHRSWVRLDSERGKRRTLCAVAVARELTGFCWAVATTG

SEQ ID NO: 183419 - protein, 338 aa, unidentified
MDILRQNVGIDVAKKSFVAAFTILGKDQTVACKSTKLFSNSPVGFQELMIWVKKHMVKDFQISYTMEATGVYYELLAYFLWEQGVRVHVILPNKAKKFAESLDAKSKTDNLDAKALGQMGVERNLKDWTLTSKIYRKLKTLTREKEELIKERTRLKNQLHAEQHSGDPIRSYLTRHENHVKYINKQIRAVEKEIKTLVIGDEFISKKIEKVTTIPGIGFITAVTVAAETNGFVNIQNIKQLTSYAGYDVRLRESGRWKGKTAISKQGNSHIRHALYMPSISSVQHSLTYKRVYERLNMQKHNGIISGTAIQRKLLGLIYTLWKNDSEYIENYESKIAS

SEQ ID NO: 183420 - protein, 367 aa, unidentified
MNSVVQTAGPIHLGLDVSKNKIAVGVLRWDEQVPDTEMLVNDEASVRRLIGRFPDRSQLRVCYEAGPTGFGLHRLLRSMGVACDVIAPALIPRAPGDRVKTDRRDCRRLARLHRAGELVAIRVPTEAEEAVRDLCRARAAVVGDRTRIRHRVSKFLLRHDRVWRESGWTVRHEQWLGRQRFEDPALRAAYGHYRGMLTAREAELAALEADLAHWFTHGPFTDAVARLGAYRGVAQVGALTIASEVGDWRRFPTARTFMGFTGLVPSEYSSGDAVHRGHITKAGNTHLRTQLIESAWAYQHHPNLGVTLRRRHERVDAATAARSWSAQQRLCARFRRLNARKTSRSVVAVAIARELAGFLWAEMTASQ

SEQ ID NO: 183421 - protein, 425 aa, unidentified
MDVLIECCAGIDIGKDEVVACVRTPAATGRGRRKRTRTFSSFTGSLEAMADWFADAGVTEIAMEATGSYWKPVWYVLEDRAFGLKLVNAHHVKILPGRKSDVLDAEWLAELLEHGLLRGSFVPPPAIRELRDLTRYRKRLIQAHTSECQRIQKTLEDAGIKLDSVASDVLGVSGRAMLTALVGGERDPRVLAELAKGRLRKKIPALRQALRGRFTDHHALLIGLCLEHTTHLEAAITRLDDRVDAVFATQISKTGQDGEGGVPFARARDRLDTITGVGKRAAETILAEIGGDMSRFPTAAHLASWAGVAPGNNITGGKRGSGKTTKGDVWLIDILTQCAWAAARTRDTYLSAQFWRLARRIGKKKAAVAVAHSILVICWHLLTDDCDYDDLGGDYFTRRNADRQRDRLIKQLHGLGYRVTLDKAA

SEQ ID NO: 183422 - protein, 342 aa, unidentified
MDHSAGLDVSVKETSICIVDDTGRIVREVKVASEPEEVLAVLVNPAYHFKRIGLEAGPLSQWLYSALAEAGLPVICVETRHMRAVLKAQINKTDRNDARGIAQMMRVGLYRPVDVKTLRSQKLRMLLTHRKLLQSKAIAIDNDLRGTLRNFGLKVGVVGAVKFEARIKELVENLPDLAELVEPLLVVRRVLREQFLIQYRRLLAIVQDDEVCRRLMTVPGVGPVVSLTYRATVDVPARFHKSKSVGAVFGLTCAKYQSGEVEWSGRISRCGDEMMRGVLYEAAQAMMRSKKWSWLKAWAMQIARRRGMKKAIVALARRLAVIMNRIWVDGTEFRWTREVAAA

SEQ ID NO: 183423 - protein, 341 aa, unidentified
MGEVSTIGLDLAKSVFQAHGADASGAVLFRKKLRRHQVLAFFSSQPPCTVAMEACASSHHWAREISRLGHAVRLIPPAYVKPFVKRQKNDAADAEAICEAAQRPTMRFVAPKSDGAQASALVFRARDLLVKQRTQIINALRGHLAEFGIVVAKGPAHVSQLAQAVENSDEPVPELARPILQMLIETLHRLDEQIARLDREVAQRAKEDETARRLMTIPGVGPVTAVALAALAPPAETFKRGRDFAAWVGLTPLQHSTGGKQKLGATSKMGERTLRRLLIIGANSVLLGAARNGVPAGSWLSRMLARKPPMLVRVALANKMARIVWALLARGEVYRAPAVGA

SEQ ID NO: 183424 - protein, 397 aa, unidentified
MSTHQRIWVGIDAGKGHHWAVAIDSDGSKLLSRKVVNDETEILDLIGDVCPLADEVRWAVDISSRPSALLLALLLAHDQEVVYIPGRTVNRMSGAFAGDHKTDAKDAQTIAETARMRSDFRALELAPDLVGELSLLTSYRSNMTADRVRMINRLRELLVGICPALERAFEFRKRPGLVVVSGYCTPSSLRRIGVTRLSTWLAKRDVRNASYFAEKAVEAARSQTTSLPGEKRAAALASDLAQQILDLDERIKKIDREIAEVLSQDERSAIIQSMPGMGPLLTAEFIALTGDLSGYRDAGHLASHAGISPVSRDSGKRTNNHRRPKFYNRRLCRLFYLSAQSALLRPGASQEYYRRKRAEGMLHPQAVLCLARQRINVLWAMLRGGRAYSPDPGLHRP

SEQ ID NO: 183425 - protein, 293 aa, unidentified
MSQRATSAIAHMGIDIGKTAFHVVGLDAAGKPVFRSRFTRERLIEFLARASPTIVGMEACPGSNWLARKAADCGHKVRIVPAQFVKPFVKSNKTDFIDAGAIAEAISRPTMRFSTPKTEAQLDLQALHRVRQRLVSSKTAIGNQARAFLLEYGLTIGVGAAYFVRDMPSILANENNGLTPSMRRLLQELWEEYRSVEARLLQLRHQIESIASADDTAVRLTSVPGIGQLTATAITAFAGTGAQFKSGRHLAAWLGLVPKEFSTGGKQRLLGISKRGNPYLRKLLVRRCCINRI

SEQ ID NO: 183426 - protein, 406 aa, unidentified
MVGYVYALDVSKGKATKVLYKNSQCIEEGLLEFTRKGFEELLQNIRRIPGQVVLAFETTGIYSKPLERFCHENQLTYHSLNPLEVYNRTNSLTLRRNKTDQADAHKLAQIMSIFDFQPSVMKEPLYEEMKRMNAYYLELQEAIDKLYVKFLEAIYLCFPGIEKAFSKLKNEFALTVIEKYPHPDYVLGVSRTVIKNMLKKSTSKNISNQRAFQKADQIIECAVSAYPSVHKDSFYCQVLSFYATHLKKLISQKEVIQDKMITLGSQFSEFTIYSSVPGIGELSACQLIAELGDLSRFKNHKQLNAYVGIDIRRYQSGKYTGQDHINKRGNRKARKILYVVITNMIRSQRHAPNHIVDYYYTKKQPPFNKCHKVAVIACMNKLLKCLYALFNHHTKYDYELNASHRN

SEQ ID NO: 183427 - protein, 343 aa, unidentified
MNDITTIGLDTAKSVFQVHGVDADGEVVLRRQLKRRQVLAFFTKLPPCLVGIEACGASHYWSRELTKLGHTVRLIPPRYVKPYVKSQKNDATDAEAICEAVTRPNMRFVPTKTSEQQSILMLHRTRHLLVRQRTATINAIRSHLAEFGIVAGVGRNGVEALLKVIADEQDDRVPAVARDCLMALGAQLEMLKRQALELDTKILATHRNNELSRRLEAIPGVGPCIATALVASIPDPKAFRSGRQMAAWIGLVPKQNSSGGKDRLGGITKAGDRYLRSLLMLGALSVIKRAKQLGYTRRPWLAQLMARRPVKVAAIALANKIIRMVWAMMVRGESYREPVALAA

SEQ ID NO: 183428 - protein, 338 aa, unidentified
MYYTGIDLHKFTSYLTTVDSSGAIVKQENLKNVAHNFIQYFSSIPGEHKTTVESTMTWYWLNDLLTSINIPLVLAHAKYVKAIAYAKVKTDKVDSHTLAQLLRMNYIPVAHKISNDNRLLRDALRARLKIVQRHTSVTNSMQLLLAKYNYDSPTQLSGIPEFQYEQLSEVEALLNEQMLDLEKQLYPFLIPNDDIQRLLWIPGIGKMNAFTILLEIDDINRFPDVKNFFSYCRLVPSARNSGGKSKQRSSKDGNKYLKVAFSDAAVHAVHYYPVIRKYHNSLLRKKNKQIAKTIIAKEIAEIVYHVLKNKTDFNNKFKGQELEHKKSLQWPRITSPYA

SEQ ID NO: 183429 - protein, 373 aa, unidentified
MKTTITHVAMDTHKKEHVVALAYPDTGEIEVFRVRNSLREITKMVHRLQRRAPGEVRFCYEAGVCGFVLKRQIEALGSACAVIAPSLVPVKKGDRIKTDRRDARKLLGQFLAGQLTEVFSPSIEQEAAREQTRCRQAAQENLKRSRQQLNTFLTRHGYLYGEGRRWTQRHTRWLLSLEFDSPDLREVFECYYSEVEHCRQRLATLEKEVAALAERPAYREIVGLLRCLRGVDTLTAITLITELFEFGRFDSPRKLMAYLGLVPSEESSGEKRRPGAITKTGNGRVRRLLIESAWHYRHRPSVGGTLKKRRQGQPSWAIDTADRAMLRLHKRYRRLMERGKSANIVVVAVARELAGFLWAILRGHQMRASEPPA

SEQ ID NO: 183430 - protein, 315 aa, unidentified
MTLHSMKTCIGIDIAKSHFDANTPTGNHHQQFSYDEQGMQQFFNWLQQFQVEIICLEATGGYQRKFVNRLHDKNFNIAVVNPRQIRDFAKSMGQLAKTDKIDAKIIAIYAEKLIPRKTEKVSENRVKLDALTSRRKQVDKIITQENNRLQQTDDTHVQSLIEQALELYRQQLKQIDDEIASLIQVDEDFQKTNKILQSAKGIGPVSAAVLIANVPELGKITKRQIARLLGVAPTNRDSGTFRGKRMTGGGRRHVRASLYMPTLTAITHNPQIRSFYQHLLEKGKEPMVAIIACMRKLIIILNSMVKNNQMWKQNT

SEQ ID NO: 183431 - protein, 367 aa, unidentified
MIQTIVHHEGAAALTVAAQTIVLTSSVIKLGLDIHSRLYVVVAQYDHGLPKAARRFAPQEFVPWVESLLRAGHTVHVVYEACGFGFGLYRQLLAAGAHCSVIAPRKLDEQRTGVKTDPRDAATLCQRLSRYVDGNTRELAVIRVPSEAEERARHTSRQREQLVHHRQRLEAQGRGLLVSHGLPAPAHWWKNQTWSRLIKVLPGWILAHLEIYRPALFALQEQIGALTAQLEAAAPAQIPRGLGKLTTVVVTREICEWARLKNRRTISSYTGLCPGEYSSGNKRAPGSVTKRGNPRVRAALVECAWRMVRFQPQYPPVKKRLALLAKGARATSAARKKAIVAVARHLAIDLWRLHTGRCTAAQLGLTT

SEQ ID NO: 183432 - protein, 372 aa, unidentified
MGDYSVAYIGFDTAKLRHAVAVAEEGRTGEVRFLGEIENTEAATIKLVKKLAGRYRTLQFCYEAGPTGYELYRLIKRLGHDCLVAAPSLIPRKAGDRVKTNRRDALGLARLLRAGDLTAVWVPDPRHEAMRDLTRAREAAVEDLISKRQQVLSLLLRIGRHYPGKRNWTRMHMNWLASQKLEHGEQRIAFEEMLLAIREAQERVARLEQAIRNALPEWSLADLVTALMAMRGLDLVSASAFLAEMGDLSRFASARELMAYLGLVPSEQSTGEKIRRGGITKAGNRRARRILIESSWSYRHPPRLGKEKLARTAGVPREAREIAWKAQHRLNGRYRTLIRKGKKPTVVVTAIARELSGFIWAINRVVRPAMTG

SEQ ID NO: 183433 - protein, 387 aa, unidentified
MIYCVGIDISKYKHDFCIISSAGELIVENSSFQNNKIGFQSLLDQLKPYNKSEIHIAFEATGHYSLNLELFLVNNGYSFMKVNPLIIHQFLKTRSLRRTKTDKADSLTIAKYLMSVPYKPNSDLLYTFFTLKSLCRARENLVKERSKFAVLLTNELDKSFPELKPFFNNMISSTLLYILEKYTNTKHIAAMKDYDSIRKLSRGKFTYAKFAQLKELAKNSVGFSNENTDLLISTYISIYNDFNNKIDPINKQISTIIKELNPRMLTIPGIGEISAATILSEYGDIKNFSNSNKMLAFAGLDPSINQSGTLEYNGKMVKHGSGLLRYTIMNSAMAILRFSPEFYDYYLKKRSEGKCHRVALSHVCKKLIRVIYSLEKNDIDFNPSLLK

SEQ ID NO: 183434 - protein, 350 aa, unidentified
MDNTFPPLGIDVSKVTLDVRLLSQHRPGPPRRFATTTDGLTLLAQWLESQGTSRVHACLEATGTYSDAVATFLFEHAHQVSVINPARVTAFRLSEGMRTKTDRHDALVLARFCEQKRPALWRPTPVEIQRLQSLLGRLDDLQLTVQQERTRFENLRLDAQIRQEIGAHVSWLQQQRERTLQCAITHVQQYPHLQQACDRLDSIPGIACLTAMRLYSVYFDQHRFRGAPQLVAYAGLCPAQRLSGTSVHGKPSIAMAGNAQVRQWLYMSALSVLRYDPDFAQWAGELKARGKCGRVIVVAIMRKLLHVVHGVLTSDEDYDPRKAFPTHEHSTGVQAPMPTDQKHVASARKE

SEQ ID NO: 183435 - protein, 314 aa, unidentified
MATDKVYVGIDVSKAWLDIGFHPGQESWRIENTQKGIRKLIKRFQSMPIENIVVQATGGYEAKLVDELSLAALPVSRVNPGRVRKFAQGLNWFAKTDKIDAKVLALFGEKAQPRRVLLPSAAQKRLSALLKRRKQVLDMLTAEQNRRELAEKDVQASIEKVIQVLKRQLEDLEGQIQDLIEKTPELKQKQDLLQSVPGVGPVLSATLIPQVPELGKRARKEIAALAGVAPFNHDSGKKHGKRMIQGGRPFIRHVLYMATISATRFNPVIKAMYQRLLTAGKQKKVAIVACMRKLLTILNAIIRTQTLWQPALSS

SEQ ID NO: 183436 - protein, 360 aa, unidentified
MFTERTSVGLDVHARSVAAAAIDGVTGELFQAKLPPGNDRILDWVRGIPGPVAVAYEAGPTGFGLYRALTGAGVRCVVAAPSKLQRPSGDRVKTDAKDAVHLARLLRLDEVTAVAVPSADQEAARDLVRAREDCRGDLMRARHRLSKLLLRHGIVYDDGAAWTTKHDRWLARQRLTGAASQAAFDAEYETVLQVKASRDRLDRAIEALANDSEFTPVVRRLGCLRGVSTLTGFALAVEIGDWDRFTGNSIGSFVGLVPSEFSSGQSRVQGPITKTGNGHARRLLVEAAWHHRPRYRIGAVMQGRWEQATVAARARGDLGNRRLHDRWVQFIERRKRSTIANVAVARELAGWCWSLAVMDD

SEQ ID NO: 183437 - protein, 389 aa, unidentified
MKIYVGIDIAKLNHFAAAISSDGEIIIEPFKFTNDADGFQLLVSKLESFDKNSLIIGLESTAHYGDNLVRYLVTELYQVCVLNPIKTCQMRKNNVRKTKTDKVDTYVIAKTLMMQDNLRFVSFFDLDMMDLKALGRFRQKTIKQRTRLKIQLTTYVDQVFPEIQYFFKSGLHQHAVYALLKEAPSPKETASMHMTHLANLLKVNSHGHFTKEQAKELRVLAQKSVGANDSAISIQITQTIQQIELLDSQLEKIEAEMTDIMKFNDSVIMTIPGIGYINGGMILGEIGDIHRFSNPNKLLAFAGLDPSVYQSGNFQAKTTRMSKRGSRVLRYALVNAAWNVVRNNATFKAYYDAKRAEGRSHYNALGHCSGKLVRVIWKMLTDNVEFNLK

SEQ ID NO: 183438 - protein, 314 aa, unidentified
MQSASEVFVGIDVSKAQLDVAVWDSSGTWQVANDEKGISALVNRLKELSPTLIVVEATGGLEVPAVAEMAFAGLPVAVVNPKRTRDFARSTGQLAKTDVLDARVLAHFAQAVRPQVRSLRTEEQEQLAGLVTRRRQVIDMITSEKNRRCSTRPRLRERLDKHIEWLDGELKALDEEIAQFIKGSPLWKEKEELLRSVPGVGPVTAATMLAQLPELGTLNRQKIAALVGVAPVNKDSGKKRGKRRVFGGRAPVRSTLYMATLSATKFNPIIRSFYERLLKRGKEKKVALTACMRKLLVILNSIIRHRQPWQPHLA

SEQ ID NO: 183439 - protein, 357 aa, unidentified
MWYVGIDIDKKMCHGCIKEKNGNIKKELKFPNKSYGTDKLLEAIEGREAKAVIESTGNMWLRLYLGLEEAGVEVVLANPKKTKAIAEAKLKNDKVDARTLADLLRANLIAPCYVPPEQTRELRSMVRHRINLARDMTRVKNRIQAILDKYELEFNGTDMFGKAGMKWLKCIVSDLSEVDQFIFDAELRHIETLKGLVKEAEARIAKESEESEDVKLLMGIPGVDYYIALLFTSEVGDYSRFSSANKLISWLGLAPRVHQSGETSYNGRITKEGSPRVRWALVQAARSAVQWDNHFRTKYQRIRERRGDGKAIVAIAREIAVTMYHMLNRREAYRFSSDAFKTRKLKKLERESKKWAK

SEQ ID NO: 183440 - protein, 433 aa, unidentified
MQDVQDEPLFCERVAGLDIAKAEVEVTIRVPSDTTAGRRQQETRTFGTTRRELESLGDWLACWGVTRIGMEATGDYWKPVFFLLESRGFDCHLYNAAQVKALPGRPKTDRADSIWLARITERGSVCSSFVPPEPIRALRTHTRYRRHLTQARTAEKQRVEKLLEEGHLKLSSIISDIHGVSGREMLNAIAAGQRDPRVLAQLARGTMRAKIKRLEEALDCAFFTGEHAAVLAMMLATIDHYTTQIDNLTAKIEVLAEPYLHQIRQLDEIDGVGPVCAQDIIAEIGTDMTVFPTAPHLVSWAKWSPQVKQSAGKRKGSNATGRGNPYLSAALGEVSISAGRTQSFLGAKYRRLARRMPKKKALVATGNSALTIIHALLSDPAARYTDLGPDYYEQRMHARRQARNHVRSLERLGYKVAIQAINPDTGELQAATT

SEQ ID NO: 183441 - protein, 310 aa, unidentified
MGRCVGVDVAKNHLDWVLGPDGEVERIENSPAAVRRLVRKLGQLDFDRVILESTGQYERLLFEALEDSGIPVCRINPFRVRRFGEGMGVLAKNDSIDAKLLALFGEKVEPEERPKKTDRERLLGDLSARRRQLISNRTAEKNRLEHASGFVATEINRLIRTLERHIEKIENKIDQRIAEDERQRQDFVRLQTVPGVGPKVARSLIVDLPELGQLDRRRICSLVGLAPYANDSGQKRGKRSIHGGRSAPRTMLYLAAMVGSRFNPDLIVMKKRLQEAGKPPKVILIAIARKLLTILNAIVRDQTEWKSIVA

SEQ ID NO: 183442 - protein, 348 aa, unidentified
MKNKSFVGIDISKNVIDVSIFREDTNIKMFPHEVFNNTRKGFGDMCSWLKNSRVVLSQALFGMEFTGCYSLDLEKFLTSKNYSFCMLSTRIVKHHPMGTIDKRDKNDSAKIADFLYRYDGTECAKPYKLPSKAMQQLKQLVNERKFLVEQRTNFMNRMQMFETKEDSAMYESYIKKLNHDIEKIDQEECELMSKEEDVFDTFQNLLTIPGIGFVNATNIIAITRNFTAFDTARQYARYVGVAPCSHTSGTSVKWRARPSAHCNGQVKADLSMAALRAVEYDVEMQMFYNRKLGGRKDSDTKRKALNAVKFKLIRRMFAIGKQKRKWEVLNTSDDRKNLHIEKSKASEL

SEQ ID NO: 183443 - protein, 348 aa, unidentified
MAHFVGLDVSVKETSVCVVDDAGKVILEQKVLTEPDAIIALLTSLGATYGRIGIEAGPLSQWLVNALTAADLPVICVETRHMKALLTAQQINKTDRNDARGIAQMMRVGLFKPVHVKTLVAQEQRMLLTSRKLLQRKLLDVESDLRGTLRNFGLKVGVVSGGRYDARVRELVAGFPRLAAIVEPVLSVRRVMRQQLAVLHKMLLDTVRGDLVCRRLMTAPGVGAVVALTYRATVDQPQRFLHSRAVGAHVGLTPKRYQSGETDYEGGVSKCGDALLRTMLYEAAHVLLTRGAKWSWLKAWGVRVAQRRGMRRAIVAVARRLAVVLHRMWVDGSEFRWSKDGTAVPAVA

SEQ ID NO: 183444 - protein, 414 aa, unidentified
MAAQEQRWAGLDWSDQSHTICVIDDRGIRVSVFTVAQTEDGMAELVRRLRAVDGLAGIALEATRHLVVHTLSSHAFTVYPVNPKMAAAWRKGWSVTGAKSDPGDAEILADGLRHYYERLRPLRPDNPRARELALLCEEKQAFITERTALVNKLQATLKGYFPAALEWFDDWTSPTAWDFVLTFSTPHALAAASSKKLYGFLKTHCLGLKPKWRERVERASKATALAADEATEAAMTLRAGTLAKQLKTLAASLDAYRQRINQLFEESPDAALFRSLPGAGEKLAPRLATIFGEDRERLDSAKAVQQLTGTAPVTYASGKKTVICFRWACSKYWRNTMHLFAWCSIRQCAWARAFYDGCRARGGSNALALRKLSFKGLKIIFTMWQRHETYNESRYIEALKKQGSPLAGAIACNT

SEQ ID NO: 183445 - protein, 355 aa, unidentified
MDTTKYVGMDVHTEAITIAVVNSAGKIVMESTLETKANTILEFFQGLRGNVQVTFEEGTWAAWLYDLLKPHVTTVVVCNPRKNALLKDGNKGDKIDARKLAKLLHLNNLKPVYHGENGIRTLKELSRSYLTITKDLGRVMNRLKALYRSWAIPCGGQQVYAPRHRSEWLSKITEAGVRRRAEYYYQQLDALQALRHEVRRDLLAESRKQTATKLLRQIPCIGPIRAALLIALIQTPHRFRTKRQLWNYSGLGVKTRDSAQYRFVGGELQRSKRPQLLRGLNENHNHDLKNIFKGAATMATISPGPFHDFYEGLLVKGRKPTMARLTLARKIAAITLIVWKKGDSFDAKHLKQQAA

SEQ ID NO: 183446 - protein, 362 aa, unidentified
MQKYILKAAADAQMPEAGVIVYIGIDQGLNKWVYAVRWGGVLRQTLATPGEIEHLQALVKRFRGHEVRIVHEACGFGYGISRWAEKYTEQVVRVTVVPPSTIEQRPGRRVKTDRIDARKLALKLEQGDLKSVWVPSVEQEIARQLSRTQQQVAKERRRAQTQVRSMLKAHGYKAPAQAKSWSGFVRWLKQLELPERLQRCIEHLLAMRQQAVKSERTLLAELRQMSESEPYAKVVEAWTELSGVGWLSAIRMMLELGDVNRFPRRGSLPHYLGLTPSEYSTGDDVSRGPVLRCGPARVRAHLIENSWIAIRKDQELRARFNRIAGANPTSQQKKSAIVAIAHRRAMQMRAMWKQMQAAQPAS

SEQ ID NO: 183447 - protein, 459 aa, unidentified
MSRKHKKAKRAGQGGAVPSLSCIEPNAAGIDVGATEIFVAVPQDRDPGPVRSFETFTEDLHRLKSWLQHGGITTVAMESTGVYWIPLFQILERAGLEVCLVNAQHVKHVPGRKSDVIDCQWLQYLHSVGLLRASFRPEERICAIRSLLRHRDSLVQMAAAHVQHMQKALTQMNLQLHHVLSDITGQSGLAILDAILAGERNPAVLAQLRHARVQASQEVITKSLVGDYQREHLFTLRQSLQAYRYYQSLITTCDQEIAEPLQNLDSRTPPDASPLPPEPYPHRPRKNEFRFDMRSELYRIYGTDLTAIPSINALTGYTVLAEVGTDWSKFRNGDAFASWTCLCPQNKKSGGKILSAHTRRSANRVNRALRLAAQTLERSTSYLGTYYRKMRARHGAPAAITAAAHKLARIIFHLVTTGQAYDESLFAAEEQRQRKRLENKLKRSAQQLGYQLIPLGQTA

SEQ ID NO: 183448 - protein, 359 aa, unidentified
MQRNKISFKGQKIFLGIDVHAKTWEVAVLTESGYKERHPQEASSKSLFDFLKKHFPDGEYHAVYESGFSGFATYYALKEYGIDCVVTHAADVPTTQYEEVMKTDRIDAGKLARSLRAGEIRPIYIRERENIDDRSVIRIRKTIQKQLSGYKARVKHLLYCNGVEMPERFSKPGSYWSRAFIKWLKEDVRLLSSSRLSLDLLIRQVETIRMTLLDATKAMRNLGQTERYSKNCRLLMTVPGIGVSVTMCILTEIYDIRRFRNENQFASYLGLIPTCHNSGEKTSNGEKTFRGNKHLGPMIIEAAWTAVFRDYGLGMAYANYKQYMKPQEAIVKVARKMSNIIFSVLKNGKEYEPYKWGKE

SEQ ID NO: 183449 - protein, 348 aa, unidentified
MTIAIVGIDLGKNSCSVAGLDGHGAVVLRRRVSRGKLTGFVGRLPTCVVAMEACCGAHHLGRVFEAQGHAVRLMSPEYVQPYVKAQKNDDRDAEAIAEAATRPTMRFVSMKAEAQLDMQTLHRARSRLVNSRTRLINQLRAILLERGVTVAKGRRALAIALEPLLDPEDNGPEVTGLSPRMRLLLADMRREWDALDTRIATLDREFVETARHSAPERRLATIPGIGALNATALVAAVGEAEDFAHGRDLAAWLGLVPRQMTTGGKPRLGGITKRGNVYLRTMLIHGARAALPGLSRSDTPLGAWLRELMTRAHVNVAVVALAAKLARIAWAVLRSGADYDRRAGATAA

SEQ ID NO: 183450 - protein, 396 aa, unidentified
MGWLVLGLRPAGARRGVTQKRYGSRGPEVGMSFARADGEGPTETEVHALMNVLIGVDPHKRSLAVAAVDEAKGELLERASFPQSRTGLRSLERWAKRFPERRWAVENAGGLGRHLAGRLAAASESVVDVPPKLSARVRVLSTGNARKNDGLDALATALAASRNEQLAPVDPEVGSEVLRLLSERREDLVAERTRALNRLHALLRDLVPGGVARMLSAERAARILRGIRPKGGASARLRRRLASEVLRDVRTLDRKIADLERRIEAEVEASGTTLTEIFGIGPILAARIIGTVGDVTRFPTKAHFASYCGTAPLEASSGEVVRHRLSLVGNRKLNYALHMIAICQARSDARGGAYYRKKIDEGKSRKEALRCLKRRVSDAVFRSLMADSLVPSSSAA

SEQ ID NO: 183451 - protein, 385 aa, unidentified
MRRAKKRGPGPSHLLMTPDHAGNVVGVDPHKRTLTATVADARGGILSSAHFRVSGEGHRELEAWARQFGQIARWGIEGAAGWGRHTAMFLTGRGYDVRDVCANRTPRSDRARQRGKSDTLDSERIAREVLAHPLLPKAFKRAGQEQGPDVGRQLLALWNNRRRSILTARQHLVGEAEYLLCELPLELRERLPDAKAVRPRLAALAYRNRRCRYDAPAKLRLQLLDGYREQIKALDRQERQVVAELEALVRQSGSTLDQLCGLSIRSVGELLVEVGDPRRFTEGGFARFNGSAPLPASTAEGPGEPVRHRYNPGGNRRINAILHRMAVTQLRCEPRAQRIYANARAGGHTKKEARRILKRHLSDVIYRRMIRDLAADSAQPDLLAA

SEQ ID NO: 183452 - protein, 389 aa, unidentified
MIYVGIDVAKDKHDCCILGPDTEELFPVFTIRNNSDGYGELFHKIESVSKDKSQIKIGLEATGHYSYNILGSLLDHGYHTFVINPLHTNLYRKGLSLRKTKTDKVDARSIAMMLMTNKTLKPYSDISYHNEELKSLTRYRFDKVQERAKLKSSVARLVNILFPELEKLVPSLHMASVYSLLSKLPGASYITECHLTHLKNLLETASKGHYGRDMAITLRNTARDSIGSVIPAKSMELKHTIHLIKVMTEEIDEIEDSIKSIMDTCNSPIMTIPGISYRMGAMILAEIGDFTRFNYADQILAFAGLSPSTYQSGQLDSSYSHMEKRGSRYLRYALFNAAKFVCKWDENFGAYLSKKIGEGKHYNVAIGHATKKLVRTIYRMELTGEAYRR

SEQ ID NO: 183453 - protein, 479 aa, unidentified
MSRSTSRKATEREAQFRREAEAAAKLQSMPVANRHAAGIDVGDSTHWVCVDATPDDTDTVREFSAHTPGLRELVAWLRQCGVTTVALEATGVYSHVLFLTLLEAGFHVVTTSAKFTRQIQGRPKTDKRDCQWIQRLHRHGLLPSIFQPDEATQTLRDYVRQRANLVRLSAQHVQRMQKALGLMNLKLTAVLEDITGVTGLKIIRAILAGERDHLVLAKLRDKRCKRSSSEIATALDGRYRDEHVLELRCCLAMWEKYQEMIGVVDQSIANQLQKMKQQTSLPPLPPKKRVRGKRPHDPNFDVRTALYLVLGLDLAVIEGIDEIHALTLVSELGCDFSKWPTVKHFTSWLGLCPNFKKTGGKVQSSKTRRGKGRAAYTFRLAAWSLMRSTSYLGAYLRRQRSRLGSPKAVTATAHKLARIVYHLMRYGEAYVKKDEAAYAQQVRERLEKQLRRRAKELGFEVVPKSPSMPEHNPDPTTAA

SEQ ID NO: 183454 - protein, 318 aa, unidentified
MKTTTNQNVNIGVDTGKYHLDIYIRPLGDFFSVENTEAGIKKAITRIKKHAPKRIIVEATGRLEAPFIMACAKAKLPFVVANPIHVKRFAGAIGRRAKTDKLDAQLIAHYGEAIKPPLSTLKPEVMQAMSDLVARRNQLLVMQTMEKNRLQILPKNLVSTIKPILTAFRNQIEKVEEKILKLIKSCPEYKTKNDLLQSMKGVGKIAAASIISNLPELGYMSNKQASALVGVAPMNRESGRFKGLRKIQGGRHQVRTVLYMAMMSAIQSNPVFKEYYQRLVASGKPKKVAIIACIRKMVVILNSMLRDGKTWEAPMCSN

SEQ ID NO: 183455 - protein, 410 aa, unidentified
METIVERPGALDVHKAQVTACVRGPAEGGGRDQHVAEFRTTVAGLLTLRDWLAAHGVTQVTMEATGVFWKPVWHMLEDEFELLLVNARHVKQVPGRKTDVQDAVWLCQLAEAGLLRSSFVPPKPIRALRNLTRYRKTQIQERAREANRLHKALEDTGIKLDCVASDILGKSGRAMLDALISGTTDPEVLADLAKGRMRAKLPALREALEGRFDHLHAVWIGAILSHVDFLDEQIASLTDTIGAQIAPFEKAVELLRTIPGVQRRTAETIIAEIGTDMSVFPTAKELASWAGQCPGNDQSAGKRRSGKTRKGSKWLDWALEEAALAATRTNDTYLQAQYRRLRPRRGHKKALGAVKHSIIVACWHMLTTGEIYNDLGGDYFQRRDPDKTAKRLIAQLERLGHTVTLEKVAA

SEQ ID NO: 183456 - protein, 386 aa, unidentified
MVNGQKVNDYAISNDMVGFNRLLGDLKQVTKPQIIFEATGVYSRRLQAFLDMHELRYVMMNPLEAKRKTKDDLHQNKTDKLDALYLAKLQSEHPQRLAYVQNKEYQELMANNRIYEQASHDLITNKNRLHKAVQLTFPEIEHLLANPRGKNYWSIALRFPHPDIVLETKEADIIDFLKGLTGIGKKRANDIAQSLIRLAKVACPAVKKNSAHVRGLKMAINNILSAEEECQTALQEMAKLAPKRDLEILTSIPGIGENTALRIISELGDIRRFNNPSQLNAFVGVDPQVYESGNLTAHLSISKRGTAIGRKVLYLAINQIQSAKKAGNPCHIADYYEKRKRSSETASHKKAAIASIHKLLRTIFALIKNDQLYSYDVAKHNQRLLS

SEQ ID NO: 183457 - protein, 272 aa, unidentified
MDYFVGLDVSLRSVAVCVVDADGKHVFERSVACEIEGIVACLHDVPPGRCRIGFESGAMSQHLYFGLQGAGFDVVCMEARQVNAALSAMRNKTDKTDARGIAQVLRSGWFSKVFIKSREAHAYRALLSSRKAVQKKCIDLANEVRGLSRALLPLLDARAMLYKTYRELDRRVKQAASHDAICLRFIAIPGVGPIVALTFRAAVDDPSRFTSSRTVAAHFGLTPRRHQSGETDNPGRISKAGDSDVRATLYAAANAMMMRSVASSESNSWGCA

SEQ ID NO: 183458 - protein, 313 aa, unidentified
MNTSLTPTFVGIDVSKDSLEIAIHGQPGSWQIANRNSEVKKLADQLARVQPELIVLEASGGYEMLSVSILSQAGLPVALINPSRSRNFARSAGFLAKTDRIDAQILARFAQAIQPEPRPLSTEQDEHLSALVTRRRQLINIQCAETSRLKSARLQAQQSIRRHLEYLETELDELQQKIALLLEDHHDWQQKKDLLESVPGIGSVTAFTLLAHLPELGLLNEKQIAALVGVAPMNHDSGKWKGKRFVQGGRSSVRSSLYMAALSASRFNPRICKFYESLIARGKPKKVALVACMRKLLVILNAMVRDQKAWIQA

SEQ ID NO: 183459 - protein, 418 aa, unidentified
MKSNKTEKVKIINEKTLIVALDIGKNVHYVYFRTPKNKDIKPFPIYNTGQSFKKFWEKLCRFKEEHMLDEVVIGFESTGPYAEPITNYLRKKPVNLVQVNPMHTKRIKELTGNSPNKTDKKDPRVIADVISLGHSLTVVIPEGAAAQLRRLSHARERAIGRRTAMNNQLQDLVFVIFPELGSIIKPSTKTGMYLIENYPDSESIASIGIENLSDIIRRVSRGKFDKDRAKELYNAAKQSIGITEGKESVILETSHLVSNIENENRYIESLEEQMIEHLEQIPYSHSILSIKGVGHVTAAGLIGEVGDFNKFNTISEITKLAGLDLFEISSGQFKGQRRISKRGRPMMRKLLFFAAINMVKSTGIMHEKYKQMLDRGMLKMKALIAITRKILSIIFAIVRNNTMYIENYTKQNHYKLAA

SEQ ID NO: 183460 - protein, 363 aa, unidentified
MEGGKRRYVGIDLGKREYTMAIIGKNGKMSLHPGKTSEQGRSALYRLLEKSDKIALEAGNLSFIMAREIINCVGCEVRVLNASKLPFIWDAPTKTDKEDAMKPAHLIEERRDEKLPIIPLPSEEEIARRKLLASYSREVKSRTKLINLLHAMYVHQGHTTIVRKNLSTSAHRREAAELLTGQEREEAEWLLKHLELYEQRIKELKDRMKKEAKTDEHMKNLQSIAGVGTVVAYAFVAHIGDGSRFRSGSQVSNYLGFVPRLDYSGTIQRQGHITKRGNSYLRGLLVQAAWSTVRSKSGGALKERYRYKTKVKGLSKKKTIVSIGRRLAEVMYSVLKNKTVYEARPWVGMRDDAASLAKQALSA

SEQ ID NO: 183461 - protein, 414 aa, unidentified
MEVIHMHCAGLDVHKKVVVAALIVPDGAGGLLRETQSFKTMTADLLALSDWLIGQGVTDVAMESTGEYWKPIFNILENNFEVMLVNAQHISKVPGHKTDVSDAEWIADLLRHGLLKASFIPPEGQRELRELTRYRSTFVKERSTLVNRVQKVLESANIKLASVASSVVGVSGRAMLEAIITGTATPAQMAELSKGRLRSKRTELSQALEGRVKPHHRFVLTELLYQIDNLDETITRFNQQIEEYCRPFEEAVVLLDTIPGIARETAEIIVSEIGTDMSRFPTANHLASWAGVAPGNNESAGKKRSGKTTQGNKPLGVALNQAAHAAAHTKNTYLSAQYHRLAGRRGKKRAIVAVAHSILVIAYHMIIRKEPYHELGGDYFDQRRPEATAKRLVRRLEQLGFQVSLEQLMVPASS

SEQ ID NO: 183462 - protein, 400 aa, unidentified
MDKDRIVAGLDVHKDTIYLCVMDNTEAVIFAKVYGTLTPDLELMCSEMVSHGVTEAAMESTSTYWVPVWNALCESMSLKLVNPYFIKQLPGRKSDVKDTQWIAECLLKNLIRGSFVPDKTVQDMRKYNHRIFDLNEDLTYNTNKLDAALQRCGFRLSNYVSRVRGKSYQKCVRAIITGTTDPEGLVKLIHGKTLRKYGRNTIKDAVTGDFHQADICLLKQYAELIDVIERQVEECRNALIAMCQEHFPNQFKRLQSIPGVKERAASAIIAETGADMKPFEKATNLVGWCGLKPRNDISNNKVKNNRTTHGNRFLRQILIEISWVASRTRNCFFSNFSYVQCTQRHKNKMKIQAAIARKLLVSIWHMLTKDEDFIDVYLKRLEKKIEQQNEILALESSLVG

SEQ ID NO: 183463 - protein, 450 aa, unidentified
MEELKEDHDDGSVARVAAIDIAKASGMVCLRLPHDTIEGRRVQQIWTVASTTNAILELGDRLVCQGVERVVMEATGSYWRPFFYLLEARGLECWLVNAREVKNVPGRPKTDKLDAVWLAKLAERGMIRASFVPPKPIRQLRDFTRTRTVFVQERTRHKHRVDKALQDAQIKLSQVVSDLFGLSGRAMLDGLVGGERNPRILADLAKGSLVKKKAALAEALTGQFEDHHARLLSVLLSTVDHLTAQIQELDRLVTDLMDQFAAPHADTGPVPSATANTSTPPVRADMTGRQLAERLDAIPGVGQATAQIILAEIGPDMSCFPTPEHLVSWAKLCPRTIQSGAKNTAGPAGKGNPWLRGALGEAASAAARTDTFLGARYRRIVKRRGHTKALVAVARSILVIAWHLLNDLDASYRELGPDWHQRHLNPARRTRDLVRQLQALGHQVALTPTV

SEQ ID NO: 183464 - protein, 274 aa, unidentified
MNIIGLDISKDTIDATLHKTNGSIHYIKFKNNDDGLKQFRLWIKGNRIRKAYIGMEATGIYYEKAADMLSSYYTVYVINPLKIKDYGKSRFNRTKTDKADSNLIADYIKRHQDTLIPYQIPKNKALQKLINLKNQLQQQQKQIKNRLHSTEEDFIRNIHQDLIDTIQDKMEQVKIAISEQIKKQTDNNHYRNLQTIPSIGKDTASVLYAQLTEKHFKTANQFVSYAGLSPAIIQSGTSVRGRGRLSRYGNRRLKSTLYMPALCAYRFNAFPKLK

SEQ ID NO: 183465 - protein, 483 aa, unidentified
MKKHIDRKHACPRGAGRKQIQLIQGLEQINLQAAGIDVGSAENYVCVPQHSVRPGEKNVRKFGVFSQQQDDLVEWLKACGVTTVAMEATGVYWMSLYDKIEATGLEVVLVDPHSVKQVPGRKSDVLDCQWLQQLHTYGLLRGAFRPDAAVRDLRGLCRQRADIVMNGAAYLQQAQKALVQMNVQLALVVSDINGETGLRIIEAILSGQQDAKELVKLRDQRCKKSSLTEMEAALKGHYTPELLFVLGQTIDGWKFCQKQLALCDQQIAKALAAIPTAKPRPAEVKVPPKTVAVDPAAAEKAKRPKRPRGNNQATVDFSEALRRVCGVDLMRICGLNVLSVLMLIAEIGPDMRHWRSQKAFSSWLGLCPGTKISGGKILSRRTRHVVNRAATILRLAAMAAGRTDTWIGRFYRRKQSHLGAPKAITATAHKLACVIYHMLKYQEEYLPIDVAIHDLQAQQRRLRHLRNEAEKLGCQVVEIQPAA

SEQ ID NO: 183466 - protein, 424 aa, unidentified
MKVTFQTCCGVDVHKSFLVATIIKTSSGIEPSYQKRRFSTFNNSILEFKKWLLENECLYVCMESTGKYWIPVFNLLEDEINVTIANPKWVKAVKGNKDDTKDSKWIGDLFRLGLVRGSYIPCKKIRILREFTRYRYKLVSCRSSEKNRYQNALTVCNVALDSVVSDIFGKSSTSIIDYLLEQSGTSIDHEVIASKLLKRLKAKEDAVIESIEGYQMTDSQKYRMHLVRAHMDYITAAINDVDSEIESLIASDPDYENAVELLCTIPGVKYDSAITIISEIGIDMSQFCSSKRLCCWAGLTPGSNESAGKKKSVRITRAGVYLKPALVQCAHAAVKSDKSPYYKKKYESLVKRRGKKRAIIAIARMILTAIYQMLSTGEQWNPSDLYKVDMPEALLEKQKQKAIKQAQKLLIREGLLPPTEPIAS

SEQ ID NO: 183467 - protein, 322 aa, unidentified
MQGKITSVGAGDAVYVGIDVCKAWLDVYLHPTGQSFRVPNSKEGIRRLRKELGRAKVALIIVEATGKLHRLAHRMLSQAGYAVAAVNPSRPHEFAKAIGQLAKTDKIDARLLALYGACLGPRATPVPANTVAELQELVLARQAATADETAIKNRYGAAESGLLKRLLKKQLPACERMIAKLEEAIASLIGSDSVLKSRYDILVSIKGIGFVGAATLAACLPELGQLPAARTAALAGVVPFNADSGGSKGLRRIQGGRAHVRSALYMAAVSAITHNPDLKAFYTRLRAKGKEAKLALTAVMRKLIILASALIRENRTWAEKHA

SEQ ID NO: 183468 - protein, 407 aa, unidentified
MEVICPRCAGLDVHKQTVVACVHIARDGAPLQEVRSFDTTTSGLLALADWLESFGVEHVAMEATGVYWKPVWHVLEGHFELVLANAAHVKNVPGRKTDVNDAMWLADLLAHGLIRASFVPPVAVQELRTLTRTRKQFVRERAAHVQRIEKVLEDAKLKLSVVLSDILGKGGRAVLQALVDGHSEPEYLASCITTRVKASRTELLEALRGRVSAHHRFMLKVHLSHIDALDKAVASIETEVGAGMKSFRQAAKLLSTMPGLSEVSANVVVAEIGIDMSRFATPGHLLSWACMCPRNDESAGKRRSTRLRRGGQWLKTTLVQAAWAAIKVKGSYLQAQFHRLRARRGTKKAIVAVAASMLTAAWHMLRDGTEWNELGATHFDRADAAKTANRLIRRLQQIGYVVQATPA

SEQ ID NO: 183469 - protein, 423 aa, unidentified
MRSNIENERICEVVASKYMEGDKVHVLGIDVSRGNSSCALLHDHTVVKEFRIVHNKSGLAKLKSIITSDSPVMAVFETTGIYSRVLTRFFIDERMNYLEINPLESSIRMAGLRRQKTDRSDAVKLALLGIDQKLLIHGRRPYPKPYEQLHLMAHRYLEITKERSRIINHLHAALDQTFPELNDIFNPIRSVLGLTFVNLFPHPDFLIGCIPGTMVKQIIGLVSPKIHSDLIVRRCKEVWQAGQLSYPAQPADSFLISQIRGYCGEIQRYNQDHDLLKRQLITYAKTFPEFKIIASIPGAGEISTALLLGFTGKIARFPSYKQLNAYIGIDLRRIQSGGFKEADRINRRGQSSARYIMFEMIRSMLRNQARIDNHIVDYYYKLKKGPHPKPDMVAMIACVNRLDRTIMNLVHTNQIYNYARTSH

SEQ ID NO: 183470 - protein, 375 aa, unidentified
MKIIGCDYHPSFQQIAMVDTETGEVTERRLYHGNGEAQRFYESLSGAVRVGVESSGNMLWFERLLARLKQELWIGDAAAIHWQNPRKQQLTDKRDAQHLLDLLLENRFPRIWVPSMEERDLRQLLKHRHTLVQMRTRVKNQLQHIALNQGLQKKSQLWSQEGQEWLKKLELDPWTQRRRDDLLQMLEDLDRQVKQMNREAEKAAAARKDAQLLMSHPGVGPILALATVLTLGDVSRFQCGRQVASYIGLVPTEMSSGQHRWLGSITKQGNSFMRFLLVQAGLSAARGDAELGRVYKRLAQKKHHGIAKVAVARKLLVRLYWMLRTQKQYPEVVRMQGSPSHPVAEAKADRLSGRPASRPEPKDQKQKQKNRKKQK

SEQ ID NO: 183471 - protein, 254 aa, unidentified
MNYTHFVGIDVSKSKLDYAVYHGKQLSFQYESGNNLEGIKSFLKLLKKQPGYLMEQTLFCMEHTGIYNQYLLHSLHTFKANVCLESSLQIKLSLGLQRGKNDRIDAVRIAQYAYKSREELRLWQPKREVIEQLRHFTTLRYQLIQAKKQLTVAVKENIPLNKKLQKQLTATCKTTMAALQKDIEKVDHHIEEIIVSDDELTRLFSLITSVQGVGKVTAAEIIISTNEFKNIDDPSKFACYSGVAPFEHTSGVKY

SEQ ID NO: 183472 - protein, 413 aa, unidentified
MIIIGVDFHPEFQQIASVDTDTGEFQEKRLTHREEAEKIYRALACAGQKVRVGMEASGHARWFERLLAELQIELLIGDAAEIRTKRVRKQKTDRQDAQLILSLLLEDRFPRIWVPSWENRDLRQLLWHRHRMVQARTRIMNQLQAVALNEGLRCKKKLWRERGREQLESFRLAPWASRRRRDLLELLDRLNPTIAELSQAIQQEVEKCPEARRLMTHPGVGPLTALAFVLIIGEADRFQCGKQVASYLGLVPLEDSSGNRRRLGHITKQGSSMLRFLLVEAAQVTARSLPQWRSKYLHLMMRRGRKTAKVAMARRLAVHLYWMMRQGWDYQQWIKFGSSLSSVRLDIVCSSKILLRTTPTVLECRLEARTTPPYLPRNCAPKELFRCALVLCSPSCLHFAHLLLVRRLKPFSP

SEQ ID NO: 183473 - protein, 343 aa, unidentified
MDHFAGLDVSVKETSVCIVDGTGKIVREVKVASEPDALLAVLINPSYRFKRIGLEAGPLAQWLYSALAEAGLPVICVETRHMRAVLKAQINKTDRNDARGIAQMMRAGLYRPVHVKTLRSQKLRMLLTHRKLLQSKAIAIENDLRGTLRNFGLKVGMVGMVRFEARIKELVENLPDLAVLVESLLVVRRVLREQLAILHRRLLAIVREDDVCRRLMTIPGVGPVVALTYRVTVDVPARFRNSKAVGAVFGLTCSKYQSGEINRTGAISKCGDEMMRMMLYEAAQVMLTRTNKWSWLKAWAMKIARHRGMKKAIVALARRLAVIMHRIWVDGTEFQWTREVAAA

SEQ ID NO: 183474 - protein, 440 aa, unidentified
MPTSAADLAAPSAPPPVCFPPLPPGEYAALLGLDWGDQSHALALAPRGVQAPAEELVLDHCAETLHGWLDQLGERFGYQPVAVAVEASKGAVVAALLEHPWLVIYPIHPATSRRFSTAFTPSRAKDDGPDARILLELLEYHRARLRALVPQEPQTRRVALLVEARRKLVDRRTLLTNQLQSLLKNYYPQALLLIGDKLSSALSLDFLERWPELAVLQGSRPQTLRSFYYRHRVRREEVILARLALQQSARPLSTDRALIEVGILQLRALLSEVRTLNAHLAKMEEAIASAFAAHPDASLFRQLPGAGKAMAPRLCVLFGVDRRRWPSAVELQKYYGIAPVIEKSGRQRRVHWRWNAPVFARQTLVEWAGQSVKACPWAKAYYLQQKQRQMGHSAILRSLAFKWLRILWRCWIDSKPYDDALYLKQLKDRNAPLLAFLPAP

SEQ ID NO: 183475 - protein, 416 aa, unidentified
MTGSQNTRGYERYFAIDTHREYHLVGRQNEDREWVVPPRRVSIEKFPEWAQKTFCAGDVVVLETTTNVWNTYDIVAPLASRVFVANAAAVGEIAGARVKTDKEDIKRLLKLLFGGIVPEVWVPPAHVRELRAFISYRNRLVKMATMIRNRLNSLLHKHSLLLPKEGILDQDWWDAQSSISSLEKTQIRQELYLLAEIKTLQSAVNEELEKQSTSELWGKPALQLMQLPGVGVIVAMTVLSAIGDITRFESAKKLVGYAGLGAGVHSSGKTHKEKRITKKGRKELRWIMVEAAWRAVRMSPYWQGEYEKRLRRMRKPNQAIVVIARKLLVAIWHVLSKEETDVHANEEDLAYKMLLLSWSLTEKVRQGMTYKQFAKYALMKLGVEKDITRFVRKDVARRLAPKDEVLERMKELGLTL

SEQ ID NO: 183476 - protein, 347 aa, unidentified
MRFYNNQHNYYCGIDLHARLLYVCILDSLGNKVLHKKIDADPDALLELITPYQDNIVIGVECMHCWYWVSDLCLDYAFDFVLGHALYMKAIHGGKTKNDRIDSFKIASLLRGGNFPIAYVYPKAMRATRDLLRRRTKIMRHGADLKAHVANTFSQYNQQSHNVQLRYPCARKQVRNQFDEPSINRSIDMDLNVIAFYTKELASVEHFIEKTAKQHSAQDYNLIQTVPGIGRILALTILYEIGNIERFPSVQNFASYSRLVKCKAESAGKQKGTNGNKIGNAYLKWAFSEAAVLYLRGNDPAKKYIQRLQKRMSKAKALSALAHKLGRCVYFMLRDKTVFDEKRFLPQ

SEQ ID NO: 183477 - protein, 461 aa, unidentified
MSKKQGSKSSSQATMSLPVVNLHAAGIDVGSRFHVVAVGQNKDNDVQQFGVTTPDLHDLCLHLQSRGISQVVMESTGYYWIPLFWMLQSYGFEVMVVNPTDVKRYNRPKTDVLDACWLQQLHALGLLKSSFQMDNFGEMLRSYVRRRRNILQDRTRQMNRMHKVLILMNVQIGTQLTDLGGASGMDIIRHIVGGERDPKKLFSHIRKGVKTPEKELLKALEGTWQPQYLFELSQLLQTYDLAGQQLKACDAEIELLLEHWCAENDITPPDPKEPPTPSERKAKDGKNLPPLRVAKMLRSITGVDMLAIGGVNGGCFLDIVAETGRDLHQFPSGQHYASWLGLAPNNKISGGKILSSKTPKRVNRAAFAFKQAANAVGRCNNHELKPFFHAMLKRKGWNGAVTATARKLAVIYYNMTTKQEPFNYQNPEEQKAKRRTAILKKIQKSIKELQFTMDELNLTAA

SEQ ID NO: 183478 - protein, 344 aa, unidentified
MEYYCGIDVSLEQSSVCVVDATGSIVCEATVASDRDALIAWFSDLDVALSRIGLEAGPLSQWLYAGLVKAGFAVELLETRHVRDAFKAMPVKTDRKDARGIAQLMRLGWFRPVHCKSLPAQEVRAVLTARKLVQAKLHDVEMSLRGILRGFGLKVGRTTPHTFEDRIRELVEGHPTLTTIADALLAARSVLHREFQGFERKVRSLARRDDRARLLMSTPGVGVLVSLTYASAIDDPGRFKRSRQVGAHFGLTPKRYQSGEKDVSGRISKIGDRGVRTALYEAAHIILTKPVKAGALKSWAMPLAARAGKNKAKVALARKLAVILHRMLVDNTPFVADKAAMVRG

SEQ ID NO: 183479 - protein, 355 aa, unidentified
MNSEKYIGLDVHQATISVAVLDSTGKLVMESILETKAATILEFFAGLRGTLSVTFEEGTWAAWLYDLLKPHVAELVVCNPRKNALLKDGNKSDRIDAHKLAELLYLNKLSSVYHGETGVRMLRELARSYLTIAKDLTRVMCRLKAVYRSWAIPCAGRDVYYTRHRAEWLGKIKEAGVRRRAERLYQQLDMLQYLRQQARRELLAESRKHAITVKLRQIPSLGPIRSALAVALIQTPHRFRTKRQLWAYSGLALETRTSAEYCYVKGGLRRSKKQISIRGLNKDHNHDLKGLFKGAATRASVLPGPFQDFYQRSLAKGIKPTMARLTLARKIAAITLTLWKKGENFDADKLKSQAA

SEQ ID NO: 183480 - protein, 348 aa, unidentified
MSGLSCETNPIERGSPMNAVCTLGIDLAKNTFSVHGIDAEGVVTVRRTISRAKLGELVARLPPCLIGMEACSGAHEWARRFSEAGHAVKLMAPKFVAPYRKSGKNDGNDAEAICEAVGRPNMRFVPIKSVQQQCDLSLHRVRQGFVEERTATLNRVRGLIAEFGYVLPLGSERLCREVRDLLERLPARVASCVRDLLEHAERLRSKALDYEREIRSSVQHNELASRAHTRPGIGPITASALVATVGNGHDFKNGRQFSAWLGLVPRQYSTGGKTRLGHITKRGDPYLRTLLVMGARSVLQRAYRETDPLSRWALALQQRRGYHRACVAIAAKNARVAWALLAKGTAIA

SEQ ID NO: 183481 - protein, 367 aa, unidentified
MTIVAHAHPFVVGVDTHAKNHALSILATPAGVQVDDGEFPTTAAGMARAIEWVARRTGGDLAVLWVIECAASFGSQLAHAVTAAGYQVVEAARMSAKANRGVGKSDPLDARRIAAAVLPLELDRLRHLRKDDGVRVGLRVLIAARDHMTGERTATVNALIALLRVLDLGIDARKPLTAAQIIEVSKWRTRTEDIGAAIARAEAVRLAKRVIVLEAELAENTKTTTDLLRRSPARVLLDKPGIGPVTAAVAMAAWSHDGRLRSEAAFASLAGVNPIPASSGNTVRHRLNRGGDRRLNQALHMAVVVRTRMDPATKAYVERRLTEGHTKKEIRRCLKRYLARQIYRTLTAVTRADEALAAVTSATPIPA

SEQ ID NO: 183482 - protein, 408 aa, unidentified
MWEVKPIMQGLLAGAIMSTQKSRLLSVTMKMDLLHSKHGWMDDIAEKHEMEKVIPGMEPTGHYWLNLGAYLQGQGMRPVHVNPHHVKKSKELDDNNPNKNDRKDPKTIAGLVNEGRFSYPYIPTGIYAEIRNLSNLRIQTQEEIIRIKNRIARWFSIYFPEIKDVYRNPDAVSGLMVIKQAPLPCDIKGLGVDGVNKIWRDARLKGAGLKRAKTLVTAAEHSIGNTEAPRSARKEIRNLLNDYEIYKSRMDELMEEIEELLSEIPYIDKLMGICGIGIKTVSCFIAEVGDIERFDNPKQVQKLAGYAIVADSSGKHNGESRISHRGRKRLRYALYEAAISVIGKNKEFKEIHHYYRTREKNPLKKMQSVIAVACKLIRIFYTILTKGIDYDGQKMLRDIVRPGMQSAA

SEQ ID NO: 183483 - protein, 333 aa, unidentified
MNVAGIDVGSEKLAMVIGKDGRLHKPRDFINESTGHAAIINALRSAKVPRVCIEATGVYHLDLAVALHDAGIGVMVVNPKAARRFAEAMMSRTKTDPVDAALLAEFAARMPYVAWVRPSDEVLALRAYARHLAALTKLRTQLKNQLHAWQQSGTVPAAIVAAVLEHIKQVDAHIESMRGKALDLVGSHASLQKPYELLLSVKGIAEASAIALLGELLVLPEGMSARQWVAMAGLDPRHSQSGKSVNKKPRISKAGNRHLRMALYMPSLSACRHDPHLRGFYRHLIDHRGLKKLQAVCAVMRKLLTALHAILKTAKPFDGSRLFALRQEAPANA

SEQ ID NO: 183484 - protein, 423 aa, unidentified
MEVSDEPVQLVERVAALDLGKAGLTACVRVPHEDRPGRRRQEVREHSTLSRSLLELADWLRCERIELVAMEATSSYWKPVFYLLEAEGFTCWLLNAKHVKNVPGRPKTDKIDAVWLAKVVEWGLCSPSLVHPKPIRQLRDLTRYRRSLIRERTRGKQRVEKLLEDAQIKLSSVISTIFGVSGRQMLEALIAGQHNPKTLAAMAHGTMRSKAAVLEEALTGHFEDHHGYLLRSMLAHIDSLSTQIDDVGARIEAVIAPFAPAAARLDEITGVGLTAAQELIAEIGVDATRFPTPAHLVSWAKFAPIDKNSAGKKRGGSTGKGNPWLAGTLGEIVASTSRTDTFLGERYRRLARRRGKKRAIVAVGNSVLTIIWHLLADPEAHYHDLGPDYYQTKINARRRERELVRQLERLTGKKVSLEPAAAA

SEQ ID NO: 183485 - protein, 363 aa, unidentified
MHYIGIDWADSSHQIAVLTAEGQCISEFAIDHTSDDVMSKLCQQLELLAPVQVSIERLDGLLIDQLLEAGIEVYVIPPRIAAHRRPRKSKDDRGDARLLANLLRTGDEDCRRLERHGSTVETLRQLLQAFEQLQRQQLRTSNQLRQIVKQYYPVLLSMFSDVATHISLTFLETYPDPNQAQRLTYTELEQFLKAHRYTHIRRLDTIYQRLRKSPLEARVWQGFSVHAQALVPILRLLNQQITALKREIRETFARHLEASWWQSLLGSGELTSPRLLACIGDNRSVFPTAAVLQARAGTVPVTRRSGKSHAVRFRWACDKTLRKALVDFARNSIEHSGWARSYYFDQFERGHDKPRAMRGLANR

SEQ ID NO: 183486 - protein, 426 aa, unidentified
MTNAHSIPDNAVLVAIDIAKARNDVLIEIAGQKRRRRMVVQNTRAEHDRFIDLLRSFERPVVAGFEATGNYHRAVAWRLLDAGFETRLISSMALARTREAIHNGWDKNDPKDAQVILHMLRTGLSQYYQDPLAAGISDIQELSKTHEMVSKAKTETLHRILTHYLPLYFPEIERFRQNSRSEWFFAFLEQFPTPASIVALDKEAFVSAAWDVVGRKVSKARLIADIYETARESIALPIPIDSQAVAMFRMVLAEIRSLIRQRDAIEAKAEDLLGGQRDYEALKQVPGIGPINALTILAEAGDLRRFGHHRQFLKFCGLDLSTHQSGAFRGQTKLSKFGNARLRRTLWMAAQVAIRQKENSFREKYERYVAKDRNNADLKRKAFTAVTAKMARVVHAVIKSGNQYRPFFEGSAPSGRTPLCKGRGGA

SEQ ID NO: 183487 - protein, 402 aa, unidentified
MNAVGIDVSKSKSVVAIMRPFGEIVSTPFEIKHTASDIHSLIELINSVEGESRIVMEHTGRYYEVLAHQLLEANLFVSAINPKLIKDFDNDSLRKVKSDKADAVKIARYALDKWQNLKQYNVMDELRNQLKTMNRQFGFYMKHKTAMKNNLIGILDQTYPGVNTYFDSPARSDGSQKWVDFASTYWHVDCVRKMSLNAFIDHYQNWCKRKKYNFSQSKAEEIYGKAKELVPVLPKDAITKLIIKQAVDQLNSASTTVESLRTLMNETASKLPEYPVVMAMKGVGTSLGPQLMAEIGNVSRFTHKGAITAFAGVDPGVNESGSYEQKSVPTSKRGSSDLRKTLFQVMDVLIKTHPQDDPVYQFLDKKRAQKKPYYVYMTAGANKFLRIYYGRVKEYLASLPES

SEQ ID NO: 183488 - protein, 274 aa, unidentified
MTSTKYIGMDVHKESISIAVMNAAGKIVMECVIETKASTILQFIDGLRGDLRVTFEEGTWAAWLYDLLKPHATEVVVCNPRKIALLKDGSKSDRIDARKLAEQLYMNKLKPIYHGEHGLRTLKELARSYLTITRDVTRVMNRLKALYRSWGIPCAGNEVYAPRHRSEWLGKISEAGVRRRAEHYYQQLDALRSLRQEVRRDLLVESKKHKAWKLLRQIPGIGPIRAALLIALIQTPHRFRTKRQLWTYSGLGLETHDSAQYRVVEDSSNVPRNP

SEQ ID NO: 183489 - protein, 344 aa, unidentified
MEKLSRIGMDTSKHIFQLHGVGVSEQVVLRRKLRRKEVLSFFAGLEPTQVGLEASGGAHYWGRELARLGHSVRLMAPQYIKPYVKRGKNDAADAEAICEAMSRPTMRFVAIKSAENQAALMLAGMRERLVRNRVQLANAIRGYAAEFGVVAAKGRASIKPLLLRLQSDRTIPAMARELFAEHAKQYAALLVQLAAIDAKLLAFHRGNALSRRLARIPSIGPVVASLLVMKVPDPQAFRSGRQFAAWLGLTPKNHSTAGKSRLGVITRAGDETLRSLLVVGATAVIWQARRGKSRSASPWLLALLKRKPPKLAAVALANKIARIAWKLMTTGEAYDIRRFLAATA

SEQ ID NO: 183490 - protein, 354 aa, unidentified
MMIIGCDYHPAFQQIAFVDTDTGELQERRLQQREEAEKFYRDLAAQGIKVRVGMEASGQARWFERLLVELNFELWIGDAAEIRTKRVRKQKTDRQDAQLILKLMLKDDFPRIWVPSWENRDLRQLLWHRHRMVQARTRIMNQLQAVALNEGLRCKKRLWREAGRGQLEAFRLAPWASRRRRDLLELMDRLNPTITDLTQTIEQEAEKCPAAQRLMTHPGVGPLTALAFVLIIGTADRFQCGKQIASYLGLVPLEESSGNRRRLGHITKQGNALLRFLLVEAAQVSARSIPEWRNKYFHLAMRRGRKIAKVAMARRLAVQMFWMWRKGWDYEQVRKFGSHAGQPGNRDGVQSNTE

SEQ ID NO: 183491 - protein, 372 aa, unidentified
MKYVGVDLHKQLIVLCVVVVVEGKRQVLRRRRLACQDEGRIEAFFAELGRFEVAVEATSAYDWLVELIEPLASRIVLVNPRKMRIIAESRRKTDKLDAQILAEFLAADELPQSWRPTPRVRRHRTLVRQLDYLRRKTSGLKCRLRNLLARYNADIPGLFTARGAAHVSSVRLNSADRFVAQQLWAALEFQHQQRLAICSRLRQFAQAAPIAEREARAVLESVPCVGPVTIEVLLSELGDVGRFGNQNQVAQYVGLAPGIRESAGHRKEQGITKEGSPLLRWTMIQLAWRLVNKSRRWSSTYESLKRRCGSKKAIVAVARRVLCVLVSLLRSGQRYNLAVDGLSFDKSSAGTRGRNQRPQVPPPRPHLLPSSL

SEQ ID NO: 183492 - protein, 338 aa, unidentified
MTIYAGLDVSDKTTHLCVVDADGVVLKRDVVASDPDVIAKWLGKHCLGLVRVVLETGPLSTFLYHGLVERSIPVECICARHAKGVLATRVNKSDVHDAEGLAQLARTGWFKRVHMKASATHIDRAALRIRTQLIGTRVALGNQLRGLLKLFGLRLGSARTPGKRRERLHALYQQRPDLEPLFAPLVATMEVLEEQLRASNKLLESRAAEDAVCSRLMSVPGVGPITALTFTATVEDPHRFARSEDVGAYAGLVPRRNQSGERDVRGNISKAGDPMLRRALFEAANIMLSRVQRPFALQLWGKRIADAKGSKRARIAVARKLAVLLHRLWLNETEFRWT

SEQ ID NO: 183493 - protein, 332 aa, unidentified
MNNNTKSILGIDIAKYKFDTTLRVDQRIFRQQFTNDPAGFAALLKWLRQHQVDQLHAGLESTGRYGLALAHLLHGRGFRVSLLNPLSLHHYARSKFQRHKQDKLDADLMAEYLQKENPPAWVPMTVHQTQLQELSRLLQVRKEQLAQENNRLENLPQSPAAARVIKGFIRILERQITKLHQQLLDSLKSDPQAWADWKLLLSIPGIGELTAAILLAELPRYLQSARAAAAYTGVTPARHQSGTLDYSKGLSVLGNRRLRKALYFPAITALRGHNQLIAAKAQRLRAKGKTEMCIVGAAMHQLVRQAWGVLKHQKPFDPNWQPPQLIPAPTPR

SEQ ID NO: 183494 - protein, 389 aa, unidentified
MKRLFCGIDVAKYEHVASIYDPSSGEYILDSLHFENNEKGYKSLVSVLSKLKKEYEIVIGFESTGHYHMALFSYLTERKYRCYLINPYMTSRFRSVSLRDAKNDDIDSRAIAAFLSFEYTGLLEEEFTNNELKELSLQRNFLMIDSSKMKIKLRAYLDRVFPELESIADINTAAVRAVLKLYPTAKDIAQTRIDRLKNLAYEASRGKYPLSKIERIKEAARRSVGYHSEAIGLNIGQCIETLEMKERQIDQIESSIVNHPLVIKSPLKQLKGINDIEIGYIMSAIISISRFGSAKKLVAYAGLDPKIRQSGTWEASRTRMSKRGNKLLRYALIWTSYNMARYDGPMKDYYELKRSQGKSHYNALGHCAAKLCRYIFWILNNPEKQFIYR

SEQ ID NO: 183495 - protein, 316 aa, unidentified
MARYIGLDAHSKNCVYVIQDENGKLAGEGSVPTTLEGLQLLRARYELPAGTRVALESGTMAFFVARRRARLGLDPLVVDAHEIRMKALRPNQKSDRRDALERCEGLRRGTYRSVVHVPPESIERLRETLGCRRHFVRLKTMQVNAVKRLLRAAGLQALGRSLRTDAAWNKLLAAVAFDPSLHAFLTAHRAVWQCAHEQVGVLEDSLHSQQEPLQRDLDRLQSVPGVGSIVGLTVLAVFSDVQRFPTAKHAASYAGLVASTFDSGERVRHGRITRRGSSELRAMLCEAAHQAGHPDHPLNPYFAALCVERVLAFVEK

SEQ ID NO: 183496 - protein, 428 aa, unidentified
MNYNQNEKIAQITSQTLIIGVDIAKYKHVARAQDFRGLEFSAPLYFENTNSSFICFIEWIKKLMDQNNMEKVIVGMEPTGHYWLNLAHFLKEQNIKFVVVNPMHVKKSKELDDNSPTKNDVKDARVIAQLVKDGRYAEPNIPQGVYAELRVARKIRDLLSVDLQAVQGQVHNWIDRYFPEFLTVFKDWEGKSAIQLLKLNLLPHELVELSEQEILEHLRKAVKRAVGLSKIKELKQVAMVSIGIREGSDMAKLELRTLIDKYELIIEKFEELESNIDKLLEQIPGVEQMLAIKGIGKDTVAGFFSEVGDLSFYSHPRQIIKLAGLSLKENTSGKHKGQTKITKRGRKTLRALLFRVAMPLVAKNTAFKALHEYFTKRQNNPLKKMQSLIAICNKLIRILFTIGKNQCEFSEERMLRDIPHMAVLQKAA

SEQ ID NO: 183497 - protein, 347 aa, unidentified
MSHKLNAGIAVIGIDIGKNSFHVVGLDRRGAIVLRQKWSRGQVETRLANLPPCLIGMEACVGAHNLSRRLTSLGHDARLMPAKYVRPYSRGQKNDFRDAEAIAEAVQRPTMKFVATKTAEQLDLQALHRVRERLVSQRIINQIRAFLLERGVAVRQGLRFLRAELPRILATPCDALSPRMMRVIEDLAGDWRRLDERIEGLSSEIEVLARRDVGCERLMSVPGIGPIISSAMVAAIGAGDAFSKGRDFAAWLGLVPKQISTGDRTILGKISKRGNRYLRVLFVQAAWVVLIKPKSWDRHGLKPWLEAAKKRLHHNVLAIALANKLARIAWSVLARGRAFEASRIQVA

SEQ ID NO: 183498 - protein, 409 aa, unidentified
MRIIGLDIHRAFAEAVAWDEGELKRMGRIDMRRPLLEAFAKKLSKDDVVVVEATGNASSVAAVIAPHVKKVVIANPKQVRIIAHAKIKTDTIDASVLAQLYASGFLPEVWIPDEPTQALRRQVTRRNQIVRQRSRLKNIIQSILHSHLIPSCPHADLCGASGRAWLFHQVLPEDERLAVERHLREFDRLGEDLKVIERDLARSALGNEGVKRLMTIPGVDMVVALAIVAAIGDVGRFEQPQKLVSYLGLNPSVRQSGPGPAYHGRITKQGRGHARGMLVEAAWAAARAPGPLRAFFLRVRARRGQHVAAVATARKLAVIIWHLLRKGESYAWARPALHAKKLRDLELKAGYKAERGQRGAAHTYNVKSHRDQERRWVEQAETAYARFVAGWNPRGPKRARTGAANEGRQ

SEQ ID NO: 183499 - protein, 396 aa, unidentified
MTTVGIDIGGRTHVVARCRGGETRADREILRVTQDRAGFDALDAWLADQDEAVSLVTMESSGHYWMALASHLRGRGVPVAVVNPLAAKYFAKSRLGRTKSDPADARSLAEMAMRDAPSTRDPLEGAELRQAARFAMTLVDQQARVTQRLVRLVEIGFPELGELFTDPLGRLGREVLRVAPTSGAATRRRTATLANANAGPDRRRLGSTRAEHLRAAAADSIAVPELEAEVAFEVGMLLDQYDLLERQIEEADRRVAGLLDGELARRLQTIPGIGAAITATLISEIGDIFRFDDVDQLLAYAGVHPAERSSGKKGANPETAWHMSKAGNSHLRAAAYRMALVGIRHNPVIAAHYARKREAGKSKMNALGHCMRKALSLVWGVWRNGVDFDPEWEART

SEQ ID NO: 183500 - protein, 357 aa, unidentified
MLSSSVKYIGLDVHKEAIAIAVLNGAGKLVMESIMETKSSTVLDFLHGLRGELHVTLEEGTWAAWLYDVLKPHVREIVVCNPRRNALLKEGSKSDKIDARKLAELLRAGLLRAVYHGENGLQTLRELARSYLTISKDLKRIKNRLKALYHSWGICCAGKQVYAARHREQWLSKLAQVGVRRRADLFYQQLDGLLVLRNTARGELLAESRKHQAVNILRQVPSIGPLRAALLLALMQTPHRFRSKRQLWTYSGLAVVTHDSAQHRYVDGQLQRSKKPQQIRGLNQNHNHAMKEIFKSAALNASRCAGPLQDFYNNLLAKSMKPDMARLTLARKIAAITLALWKKGGSFDAEHLKSQAA

SEQ ID NO: 183501 - protein, 344 aa, unidentified
MGLYMINNFLGIDVSKDRFDVCLSFISKKGKRETRRRNLKNDDSGFQGLLNFLQKHNVEQVKACMEATGCYSEALAEFLHNAGHFVSVVNPYCIKSYARSKLARQKNDQIDAEIIADYCQRQEPSRWTPPSPELKKLRHLYRCLAALKDELTLMNNHLENKERLPKEVANAWEDLAINIAQKIETIKDSIRELLKQHKELLENFQLLLTIPGIGEESAIAILAEVPDMEAFRDARQLAAYAGVTPRNITSGSSVYGKPRLSKSGSQTLRKALFFPAIVAKNHNPIIMSFCQKLKEKGKHNMAIVGAAMRKLLHIIFGTLKSKSAFNPDHIKNYRARRLTEGLII

SEQ ID NO: 183502 - protein, 341 aa, unidentified
MNSVTLGIDLGKRWFHVVGCDAAGKVVLREKLGRHQLLQLMAQHPPCLVGIETCCGSQYLARKFQGFGHDVKLLPAQYVKPFVKSQKNDFNDAQAIAEAVRLPTMRFVPLKSEEQMDVQALHRARERMLQQRLALTNQIRGLLLDRGIEIAQGFYALRTVLPALLEKEDSGLTSMMRDLGRMLLDMWNRTETTIEQMNDRLKCLSRESDLCRRLQTIPGVGVLLSTAIVSAVGNASTFRRARDLAAWVGLVPQQHTTGGKPRLLGITKRGNSYLRRLFVQGARALWVWKDKHPNDPIQHWLIQLAERRHAHIAVCALANKLVRITWAVMRSGAEFNLHHHT

SEQ ID NO: 183503 - protein, 357 aa, unidentified
MKSQDSNYVGIDCGKKSLEVIRINSEGSYERQQFSTTEIGISKLINWLNPNDVVGFEAGSQSFRIAKSILNKGIQVIVLNPGDLATIYQSLKKTDKEDSLKIARLIQRFPIEELPTVPIPNDEEEDNRRLCSEQENWTRQLTQGKNRLHSLFTQAGLTHITKKHLRTKANRETSVTLLPSRYQKEAERILQVLDLVEQNLKLIEEEIKEALRKNQTYTQTIMSMPGIGMITSLAILSYMGDCKRFSSAKQAAYYVGLVPRVDISGDSAYYGRIVNRGCHSIRRVIVQAAWSLVRCQHGGKLKEFYERLYSKKGAKKSIIAVSRKMIEVLYSMIRTGTLFDSMPEEVLNRKLAQYGLM

SEQ ID NO: 183504 - protein, 520 aa, unidentified
MSRSFPSRSVAQTVNNYVANSFEFCFRLERTPVNLGFGFGTNRLSARSTSLAQSLDQSRSPNADTHSQVPMLYVSPYTACAPRSPFKPKMNMETDNTTNWPHSSEASDTPPQAWIGWDWGDQQHAISLQMRGSDAVETLVLEDSPEDLHRWLKELEQRLGGHLVRLGIENCRTAVLAILLQYPWLEIYVINPVTSARYRSAFTPSGAKDDAPDSKICLELVRDHAPKLRPLCSEDPHTLKLKGLSVARRGIVDRRTTLLSQLSSLLKSYYPQALAVLKNLDTPMAAAFLKRWPDLISLKTAKPATLKKFFYRHNVRSEELVKERLELVAQAIAVTTDPARVSVAVLQLAQLVDQLEVFQKHVAIFDAEIQAAFAEHPEAYLFRDLPGAGRQLAPRLCAAFGSDRSAYPDPANLQKYAGLAPVREKSGKQLWTHWRWNAPKFLRQTFVEWAGQTARYCPWSRTYYQRMAKKGKPHAVIIRALAFKWVRILWKCWQQRVPYSEAQFLKQLAHRKSPNAPLSE

SEQ ID NO: 183505 - protein, 321 aa, unidentified
MINRIYVGVDISKNWFDVCTSVEENAPVERYSNNPDGHAKFIKAVTTLARKIQVCMEHTGGYETPLALACIAANLTVSLLDGAKLADYRKSHGRAKAKTDRQDARLIARFSKERKPALWLPVPDEYLKLRELVRHRQSLKKAKTAWSCRAAHTVQSELVTAQRKALCTILALQIKEVDKAIAAHIQSCSELKEARELLISVPGIAHISAASILAESGPISNYKSAKDYALAAGLNPIVNHSGKKTPPGKLPVYGNAELRSALYHPAMTCKSHNIGVAKFMDRIQNNGNKMKMTVITAGMRKLAHIIYGVLTSKTKYDKNKP

SEQ ID NO: 183506 - protein, 310 aa, unidentified
MTITTVGIDLAKNVFAVHCVDQHGKTVLVKPKVSRAALPELIASLPPCVIGMEACSGAHYWARLFRQYGHEPRLMAAKFVSPYRMAGKSGKNDAADAQAICEAVRRPHMRFVPVKDESQQAMQCLHRIRQGFIEEKTATYNRLRGLISEFGVIAPQSTDALRHMVSEQKSSLPLQVQQCVNDLLEHIDRIEDNITEYDRILSRMAKTDHRSQRLMELKGIGPTTACALVASIGNAHDFKNGRQLAAWLGLTPSQYSSGGKSKLGRITKAGDSYLRRHCCKVSDEAAFCLIQRPYISKTLLTRRISPRGSP

SEQ ID NO: 183507 - protein, 386 aa, unidentified
MYFVGIDISKYKHDCFICTETGEVIEENLSFTNTNEGFNQLLNLLKSLDNNQEIRIGFEATGHYGMNLKLFLEKNNYSFMEFNPALVKRFISTQTLRRTKTDKKDAMHITKYLISADYKPHPKQFYHKYSLKSLSRMREKLVKQRSYYEVQITNTLDIIFPEFKPFFNNTFSKTSLYILKKYKTPDKIKNMKDFDSIRKVSRGKFTSANFIKLKELAKNSIGVSNDIFETELESLLILLSQIEAEINKLENKIESIIKELNPPILSIKGIGTISCAGIISEFGDFSRFKSADACVAFAGIEPSISQSGTESYTGHMVKHGSGHLRYFLMNAADYVFMHEPIFTEFYYKKRSEGKSHRVALTHVAKKLVRIIYKLESENITFNSNIN

SEQ ID NO: 183508 - protein, 341 aa, unidentified
MNNVAIVAIDLGKHTFHLHAQDDRGHELYHKKFNRTGLVRYLANLEPCTVAMEACGGAHYMAREAAKWGHVPKLIAPHLVRPYVKSNKNDFADAMAICEAASRPTMRFVSPKSEAQQALAMLNSQRDAYIKERTASVNRIHAGLLEVGISLSPGFHAIKELPALLEECSFSAQIKQILLGLRDHFNYLDGQVKALDKQVERQATEDDLASRLMTIPCVGPITSSVLAAELGNGQQFKCGRDYSASIGLVPKQHSTGDRTVLLGISKRGDRNQRRLLIQCARVYLMGLERQTGALADWVRQLLARHHCNRVVCALANKLARIAWSIAAHHDEFKAGPSAINA

SEQ ID NO: 183509 - protein, 345 aa, unidentified
MKITTTGIDLAKALFQVHGVDKHGKVGLRKQLKRKDVLSFFANLEPCLIGMEACGSAHYWARKLSALGHTVRLMAPQFVKPYVKTNKSDRNDAEAICEAVTRPNMRFVAVKTAEMQAVLALHRARQGFVKARTAQGNQIRGLLAEFGIVIAKGIGHIAKRLPEILEDGENALPGMMRELLQRLGENLQDMDRQVGELERHIMLWHRENEPSRKLEAIAGVGPLTASAMVATLGDAKSFKNARQVPAWLGMVPRHEGTGGNVQLGGISKRGDVYLRTLLIHGARAVIAHSERKPDQADAWLKKLLARRNKNVAAVALAAKNARIAWALLAHERSYQHDYVATRMAA

SEQ ID NO: 183510 - protein, 467 aa, unidentified
MVACSSGTARDGLDVLPLDGLFELVASSLPGRVIGTREQPLRGPNNEEPTVDPAPAAMSACGGDQVFCGWDWGSTRHGVCVIDAEGVIVRRWLVQHTDDDLARLFEELDDVVDAKALPIAIERGEGLVVGLMADAGHPVLMVEPAAFKAARPRWGSAGAKSDLGDAFMLADYARTDGHRLRRIEPVCQATRELGALVRARASLVEARTAASNQLWAVLAEHWPGAGVLFQKLISPIALAFLTDYPTPQSAALLGEGRMSLFCKRHAYRGAKTPVELLGRLRAAPASADPIAPAVLTVIVWSSVAQIRMLNTEIAQLERELRTALSTHPKAGLLETLPRVGRVSLAQLIAEIGPLLDRCDNPEQVAAMCGAAPVTRASGKTRTVGFRYAANKPARVAITGFADNSRHQSAWAGDAYRRARARGARHPHAVRIVARGWIRVIWACWHTGTVYDPSRHRREQLLTTPDLT

SEQ ID NO: 183511 - protein, 385 aa, unidentified
MLVIMEQSRFAPFGLLFLGLEKLMEGRQNVTAPYDYHIGVDYHKSYSHLVVQDSTGKTLRSGRVKNDRLSLGSFLERYRENSHAVVEATRNWMVMYDWLDDICDDVVLAHPLKVKAIADAKIKTDKIDATVLAHLLRADLVPEAYAPSDKARELRLALRERMFYVRLRTMVKNRIVTAFDRYPEQTAQLKRLGDLFGKTGRQQLAALNVSEIDRIQIDRSLAFIGDIDGRIKQAEATIRAMTKTNANVKLLKTIPGIGEFFARLIDAEIDDIGRFRNAKKLAAYAGLVPSTYSSGGKTYHGKIIKQGNKWLRWAFVEAVQPAVATDPQLRAHYEHLKFRGANKARVAIARKLLTIAFQILRDQRPYERRDANGEEGASSTISRLS

SEQ ID NO: 183512 - protein, 344 aa, unidentified
MHIASIGIDLGKTTFHLVALGERNKVLIRKKFSRAPLLAYTANLPASLIGLEACAGAHCLGSKLREQGHEVRLIPAQFIKPYRKSNKNDFLDAEAIAEAVTQENMRFVQIKTEEQLDVQAMHRVRDRLVQRRTALINEIRGFLLERGITFAVRPIQLRKNLLGVIEDAEQNLSSRLRWLLERLWQEWKQVEVDRKTITDEIERISEENALCRRLRQIPGFGPLVSTATVAAIGNGAAFRRGRDFAAWVGVVPRQYSTGGKQKLLGISKRGNIYLRRMLIHGARAVLFRVKYDTGGFGQWVHRLAQRAPRNKVVVAIANQLARMAWAVLSSGKDYRHQSLQPVAA

SEQ ID NO: 183513 - protein, 386 aa, unidentified
MQKLNDLSRSLTALEPDGTLIAVIEMSLSSWLVAGIVPGVERQPLKKLAVDESALLKLLHRWREEAEKAGRRIERIAVAFEAGRDGFWLARWLKARGIEAYVIHASSVAVSREHRRAKTDRLDTELLKRSFLGWLRGERDHCKMVEIPTMKDEDAKRPNREHDSLIGERSRIVNRMKAALVRLGIRGFNPKLKRATTRLDGLRTPEGEPIPPNALAELRRDMERRRLVNNQIRQIEKERLERIEQAPCDGPHVMVRLLARVMGVGIETADMLVHEVLSRNMRDRRAVARYAGLTGSPDESGRKRREKGLARSGNARVRRGMIQLAWRFLLHQKNSALTKWFRSRTENARGTRKPMIVALARKLLIALWRLVREGIVPDGVVLRAAQ

SEQ ID NO: 183514 - protein, 479 aa, unidentified
MCLPSLRLVRLKSLQTCLFGLSAHRLLFNGHALNVDPIMSRCSYVARLRLSFKTRTSLISYNLESGDFMNDLLLYLFVGIDVSKENNQVYAMNFSQDKLASFSTPNHQSGAQTLEAKLLEILDRHHLSKIIIAMESTGIYSAHIATYLSASKSLFPFDVRVYVLDPKISRNYRHSFSDMDKTDPKDAFVLADLARVGRCDRLTPFKGPQKIALQRLTRHRHHIAELLAKEKVYALNNVFLKFSEFRGVFSNDFSKTAVDLLLNFKSVDEIIDIPLEELVEFVMTSSKNRFSDSNQIALTLKAAARNSFRLDKMAYEPINLSLAASFNCIQTYQNQLKSIDTAILKQVKGLNPNHYLSLISIPGIGPVYASGILAEIGHINQFDSEDALAKYAGITWRKSQSGNFDAEDTKMTKTGNVYLRYFISEAANLARIHNPVFKDYYLKKFDEVKTHQHKRALALTARKLIRLIFGLLSTDRLYK

SEQ ID NO: 183515 - protein, 344 aa, unidentified
MDHYAGIDVSLECSSVCVVGTSGKIVREAKVASEPAALIGWFGSLGFGLARIGLEAGPLSQWLYAAMKQAGLAVELLETRHVSNAFKAMPVKSDRNDARNIAQLMRLGWFRPVHCKSMDAQEVRAMLTARKLVQSKLLDVENSLRGILRGFGLKIGKTTRTSFASRTEELVKGHPNLEEIGRALLRARAVLLAEFNNFEKRVRATSRLHAQARLLMSTPAVGPIVSLTFASAIDDPARFTSSKQAGPHFGLTPKKHQSGETDYTGRISKLGDASTREALYEAAHIMLTKPIKGCSELKSWAMRIARRAGINKAKVALARKLAVIMLRMLKNNAPFNPAAKPAAA

SEQ ID NO: 183516 - protein, 372 aa, unidentified
MKKAILAKLDLVFHKRARRRGCRPTSERRIAMKDNVYCIGIDLGQQSSFWVVKDGEGRIHQRMKIANDRASIEAALKPFLCQPCKTVMEATTNYYWMYQLLKGLGCEVVLAHPLKTRAIASAKIKNDRLDATILADLLRADLIPQSYIPSEEIRALREITRQHIRLVQARTRIKIQCRTLLVKLNLRPSERFSDLFGKKGIEWLGKTLLPEPFELQKKQCLDQIQYYNRLIEEVDRGIEKMLPAFPESKRLLEIPGIAALAAAVLIAEIGPIHRFPSPKQLVGYAGIAPGLYESSQTSHSRGITHEGNRFLRWILCEIVQNHIRSTGPLRHFYLRLKERKGHGKAVIAAARKFLIYIYWTLKGKTHSFVFAG

SEQ ID NO: 183517 - protein, 332 aa, unidentified
MYYIGMDLHKQDLVMAVEDEHGPVGRVRRIACRDTGAIRAAVGRWRPFRAVVEASASYRWLYDLLEPQGEVVLAHPLRLRAITAARAKTDKLDAALLARLLRANLIPAAYVPPAPYQRLRDLTRTRARLSCNATLAKNQMHALLARANVHPPLRTLFGPRGRRWLAGLDLGLSGNLVRDELLRRLEHYGREIATLDAHLEAVASEFPQAEALEVLHGIGRYSALLVVAEIGEPERFRNARQVGAYAGLTARVHQSGKTEHRGNISKQGSRWLRWILVQAAIKLVRRDERLANFYQRVRRRAGRNVARVAVARKLAGICWVRLRRWQREQAAA

SEQ ID NO: 183518 - protein, 372 aa, unidentified
MNSNGITWVGMDAHKISIKVAALFPDRPEPVEWTEATTPEAIRRLGRKLRREAPGEVRCCYEAGPTGYALQRMLEAAGMICEVVAPSLTPVKPGSRIKTDRRDARKLAELLRAGLLTDVHPPSESDEALRDLCRCRDDVRVDLVRTRHRLTKFLLRRHCIYRQTKHHWGTRHWAWLEQLRFDDPVSQATFDSYVLAVQQLEERLARLDAQLAEFGGRDPYRQPVAWLRCFRGIDTVTAVCLVAELHDFRRFRSARELASYVGLVPSEHSSGERERRGSITKAGNRHVRRLLVETAWHHRHRPLISQPLRRRREAQPTRVLAIADRAQERLYARYRRMTERGTIHPKTIVAMARELTGYLWAVLHPDASATRS

SEQ ID NO: 183519 - protein, 341 aa, unidentified
MSKFIRIAIDLGKNYFQVHGLESEGGRSISRKIKRSKVHEVCSQIEPCRVGMEACGSAHYWARELTAMGHEVVLIPPAYIKPYVKRGKNDAVDAAAICEAMSRPNMRFVPVKSAEQQAVLMLHKTRDLLVKQRTMAVNALRGHLAEFGVVAARGIGRVDELLALAKADAALPPVARTAVTCMAQHLEALDLSIGAVYEEIAKAHRQNPVSRLLDEIPGVGTLIASATAASVSDPGVFKSGRDFAAWLGLTPRQNSSGGKERLGAITKQGNRYIRKMLVTGATSVLRVAGKRKGALADWINALRARKPERLVAVALANKLARICWAIMTTGEGFRTDTYVKA

SEQ ID NO: 183520 - protein, 353 aa, unidentified
MKPKTESNTASLAVIGVDIGKEVFHLVGFGTDGKIAFRRKIRRLGLKDAFEKLPPCIVGMEACLSAHFVSRTLRALGHEPRIIPAIYVKPFVKGQKNDYNDAEAIAEAALRPNLRFVQEKSQDQLDLQACHRVRARLVSRRTATINQIRAFLIEQGIAVRAGPRALRNSLFAILENRKDEISPRMARLILDLYKDWCHLDERIDTVTGEIEELSRVEAKCQRLMTVPGIGPVISTGLVAAIGTGEAFERGRDFGAWLGLVPRQYSTGGRSVLGRISKRGSKYLRTLLIQAAKVLLMRPHNWPRYSFGAWLKTASERLHRNKLAVALANKLARIAWSVLRHDKAFDTHLETAAI

SEQ ID NO: 183521 - protein, 354 aa, unidentified
MPKTASAQIAVIGIDIGKNSFHVVGHDSRGAIILRQKWSRGQIEARLANLPSCLVGMEACVGAHHLARKLTAFGHDARLMPAKYVRPYAKGQKNDFNDAEAIAEAVQRPTMKFVATKTADQLDLQALHRVRERLVSQRTGIINQIRAFMLERGIAVRQGIRFLRTELPIILASRTDMLSPRMLHVIEDLAGDWRRLDERIETLSREIETIARQDAGCDRLMSVPGIGPIISSAVVAAIGSGDVFSKGRDFAAWLGLVPKQISTGDRTILGKISKRGNRYLRVLFVQAAWVVLIKPVSWERHGLKSWIEAAKKRLHHNVLAIALANKLARIAWAVLAKGRGFEATRTIDGSTQPA

SEQ ID NO: 183522 - protein, 368 aa, unidentified
MGQKSSKLYVGLDVHKESIDITIAEEGGEVRHHGQIGGDANALWRAVRKLESSGRKLVFVYEAGPCGFGIYRGLMKRGHVCWVVAPSNTPRRVRDRIKTDRRDSVKLAGLARAGELTPIYVPDVCDEAMRDLVRAREDAVVMQRQARQRLAALLLRNDVRYPGKTAWTAAHRRWIADVRLPQPAQRLAFEEYVQAVEEATVRVERLSGYIAQEVAQWRWQPVVHALQACRGIQLIHAVRIVAELGDLSRFNHPRQLMSYLGLIPSEDSSGERRRQGSITKAGNGSARRALVEAAWAYQYMAKVSGLIARRQVKVPKAALDIAWKAQVRLCARFRRLAARGVSRNKIVVAIARELAGFVWAIGQQVKPV

SEQ ID NO: 183523 - protein, 347 aa, unidentified
MRYVGIDVGKQRCRAAIMDQSGFITNEFTFINNHEGIEHLASSLSMDDRIVIESTGSVWINLYNRLDEKRILVVLANPLKTKAIASARINSDKVDARILAHLLRSNLIAESYVPPRELREIRALIRHRASIVKIGTMVKNKIHALIDKYGLRCEYSDLFGKGGMQWLRSLELPSLDILMLNNHLDHIESLNKQIERIDEEIRSKASQDEDVRLLLSMTGIDVYTALLIRGEIESIERFADYKKLVSWAGLAPSLHQSGSIEYHGAITKQGSRMLRWIMVEAARVAVSHDERMRTFYERVKHRRGDQKAIVAVANKMLKIIWFMLTRREPYQSRNPQLYERKLNSLAA

SEQ ID NO: 183524 - protein, 389 aa, unidentified
MKIYVGIDIAKLNHFAAAISSDGEILLEPFKFTNDADGFQLLVSKLESFDKNSIIIGLESTAHYGDNLVRYLVAEFYQVCVLNPIKTCQMRKNNVRKTKTDKVDTFVIAKTLMMQDDLRFITFFDLDMMDLKALGRFRQKTIKQRTRLKIQLTTYVDQVFPEIQYFFKSGLHQNAVYALLKEAPSPKEIASMHMTHLANLLKVNSHGHFTKEQAKELRVLAQKSVGANDSAISIQITQTIQQIELLDSQLEKIEAEMTDIMKFNDSVIMTIPGIGYINGGMILGEIGDIHRFSNPNKLLAFAGLDPSVYQSGNFQAKTTRMSKRGSRVLRYALVNAAWNVVRNNATFKAYYDAKRAEGRSHYNALGHCAGKLVRVIWKMLTDEVEFNLE

SEQ ID NO: 183525 - protein, 405 aa, unidentified
MQLTTLHKRVIGLDVHQAQITACALIEDDDGSTRIEQRQFGAFARDRRELAQWAAALRPDEVVMESTGIYWKSPYAALESVGIIAKVVNARHVKNVPGRKTDVSDAQWLATLSRAGLLRASFVPPADLRELRLIARERQTLVAQLARDKNRVHKILTDGGIRLSVVVSDIHGKSARAMIKALLAGSSPEEVLKLASRQLKASREQLLDALQGNLTWSHCFVLEELLEGIERTEARIARFEERLLKTLQPMRDVLALLQTLPGVDLIGAAMLVVEIGTDMNAFGRPERLASWVGICPGNNESAGKRKSGKVRKGNRYVRRLLCEFAHAASRTTSVFKSKFQALIVRRGHKRAIVAIAHKLLRTIFFIIQRREHYRDSAFNYEELSVRRNAPRWIKALTRFGYIPAA

SEQ ID NO: 183526 - protein, 414 aa, unidentified
MKLFVGIDVSAQELEACFMNPDGDTLETLKVENNLHGASHLRDRIVAAADKLSPSEIHIGLESTSVYSWHPAMFLHQDESLRQRNTKVFTINPKLINKFREAYADLDKTDRIDAWIIADRLRFGRLTTTIVMQEQYIALQRLTRMRYHLIHNLTREKQYFLQNLFYKCNAFRSEVDSSVFGHAILEMLSEKYSLDEIANMDVADLADYLKEKGKNRFPDPEHVARCIQKAARASYRLSKVVEDSIDIVLGTSIQSIRSIQTQLKELDKAIERILEGISGALCLRSIPGIDRVYAAGILAEIGDIDRFSDQAAVAKYAGLTWRRHQSGSFEAEDTKRIRSGNRFLRYYLVEAANSVKNRDPEFGEYYRKKFNEVPKHQHKRALVLTARKLVRLVDVLLRNDQLYTPRRKVNSAKE

SEQ ID NO: 183527 - protein, 354 aa, unidentified
MSQTLKTSVAVIGVDIGKNSFHVVGQDRRGAIVLRQKWSRGQIEARLANLPPCLIGMEACVGAHHLSRKLQMLGHDARLMPAKYVRPYSKGQKNDFRDAEAIAEAVQRPTMKFVATKTTEQLDLQALHRVRERLVSQRTGIINQIRAFLLERGVAVRQGLRFLRGELPGILATRTDVLSPRMLRIIEDLAGDWRQLDERIEGLSNEIETLARHDQACARLMTVPGIGPIISSAMVAAIGSGDVFSKGRDFGAWLGLVPKQISTGDRTILGSISRRGNRYLRVLFVQAAWVVLVRVKQWERYGLKSWIEAAKKRLHHNVLAIALANKLARIAWAVLNKGRAFECIKTDAMASRPA

SEQ ID NO: 183528 - protein, 334 aa, unidentified
MQNVTLIGIDLGKNSFHIHCQEKHGNTLLRKRFSRIQLTQFLATCPPCIVAMESCAGAHFMARHISQLGHQVKLISPQFVRPFVKSNKNDFIDAEAICEAASRPSMRFVTPRTEDQQAMSALHRVRDALVRERVKATNQMHAFLLEFGISMPRGIAVIKRLATVPEEHELPPYLVRLLTRLHQHYGYLCEQIEEIERELKNHLADDETAQRLLTIPGIGTSTASLLATKLGDGKNYLSSRDFAASTGLVPRQYSTGGKSTLMGISKRGDKNLRRLLVQCARVYMQRLEYQSGRLAEWVNGQLTRHHSNVVACALANKLARIAWAVTTQGTVFSK

SEQ ID NO: 183529 - protein, 352 aa, unidentified
MERYLGVDTHALSCTLGLLSSSGQRLKSWVVETNGSALVEAVRNIPGRVHVCLEEGTQSAWLFELLKPHVAEVVVAVAPERKGAKDDQRDAWARAEELRTGAIATKVYKAPEHLASLRNAVRAYGFVVTDLVRAKNRLKAVFLSRGISTDAGVYDAKKRPQWLKKLSSPHRELAEWLGRQLDQVEPLRDEAEEWLLKESKSHPIIRKLAKAPGLGPIRTAQVVAIVATPDRFRTRRQFWSYCGLGIVTRSSADWVQDKSRKWVRSQVAQTRGLSRKRQPRLKAVFKGAATTVIAQLPNDPLHADYERMLQSGIKPTLAKLTLARKIAATVLSMWKHQEVYDPKRHRPSSDKS

SEQ ID NO: 183530 - protein, 397 aa, unidentified
MSACYVGIDVSKEASTAQGIDEKGKKLFYVEFTMEAEGFSKLLGAIRLHCQDLSLLKAAMESTGCYHTNLLCFLATEGIACFVINPLLIANFAKLSLRKTKTDKKDAMVIAQFLLMHKDALIKAEPSQGLQDLKDLARERESLTVLMSGLKNDIKRMLQITFPELESLCNIFGESMRDIVKQFPSARLIRIADVRAVTKALTPSDARRTPPFYPEDLIAAAQKSVGIDSIAKELILPDKYTTLEHLMKRKERITEALVEACQAMMIKEIEIITSIGGISDTMASAFLAEVGDYKAFPSYKHLIAFAGIDPSIHQSGKFEGLSKISKRGNRHLRHLSYLMTTCVVRLDNIFREYYLRRRAEGLPYKKAILATAHKLLRVIFSMLISRTTFQTKVVIAK

SEQ ID NO: 183531 - protein, 338 aa, unidentified
MLYSGIDLHKRTVVIATVDETGKVVCEASLPTSRFAVARYFAELPDSTRATVEATSSWYWLRDLLHQEGVPLTLAHAKFVKAIAYAKVKTDAVDALTLAQLHRVDLIPRAHMVSPELRPLRDLLRTRLQLVEKRVSAKNSVHRLLEKFNVPDPASLPDEAALSASLYEEQIELLDSQIRRIEQQLQPRLIPEHDIQRLLWIPGIGKITAFTLYLEIDGIDRFPSVRQFFSYCRVVPGAHNSGGKNRHGRRKDGNRYLKLALSHAAVRAIQYYPEIKRFYQRKARQKNPAIARTLVQKELARSVYIVLAEGVEFNHTFKGQPLERRKQSKWPRQASPDV

SEQ ID NO: 183532 - protein, 405 aa, unidentified
MVRYVGMDVHREFAQLAVVEDGVVRDEGKIGVTPEALRAWASELRPDDEVALEATGNSDAIATLLTPLVARVVVSNPSKTRAIAEAKVKTDKVDARILAQLLAADFLPPVWLPDDRTRSLRRQVMRRAHVVRQRTRLKNQVHAILARNLAPTPPVSDLFGKTGRHWLSRQPLPEDERATVQALLRQLDFHAHELALVDRELAQEALTDPMVARLMTIPGVDAIAGLSIVSAVGDFSRFDDPDKLVAYVGLNPKVRQSGNSAPVHGRISKAGRAHVRGVLVEAAWSASRAPGPLRAFYQRIKARRGFQTAIVATARKMTVLAWHLVTKDQDYAFARPGLLTHKRRKLELAAGAPSRRGNYRQPGAAYNSKQRRDEENAIVEQAERAYEVLVAHWQPRKPATNHRSP

SEQ ID NO: 183533 - protein, 432 aa, unidentified
MSQYLNDFVVGIDVSSEFSIVAMLAPTGELIRKLFRIDHNPAGFHKLLDILKKEEERLKRKPIYFVESTGIFHLPLFFFLKSNDLKGFILNPLCVHSTKNFDLRKVKNDNKDSEAIARLAKYQDIKVSIVPEPQILALRMMTREYYAVSDMLTEMKNRLCTDLYLLFPGFLNVFSGPFGKTALAVLKSYPSPRAIRDADKDVLNLLIAKTSRKSSEWASNKVALLHDCAQLASSMPSEFSLLDTKIRFHIDGIEHMQASLNGIEAQIHSMIESPQFPAKVRRNVELLDEIPGVGFLTAATLIAEIGDFTLFNSPKALTAFFGIDPSVNQSGKFNGDRNKISKRGTRIGRRILFTVAMASIRTTRNGKEINPVLRDFYASKCVNKKKKVALVAVMHKLLHYIFAVLRDQKPFEFRRPEDHQSWRTTKPQPVAA

SEQ ID NO: 183534 - protein, 351 aa, unidentified
MDKITTVGLDLAKQLIAMHAVDARGQVVLRKVLRRDALLRWSATLPPCEIAMEACGGAHHWARELTQQGHSVRIIAAEFVRPFRKSGKNDANDAEAICTAVRQANMRFVAIKSVEQQAALCVHRLRQGLVEERTALINRMRGLLTEFGVVAPLSPEKLRRELRLCLDEEKTHVPLMVRQLVTDELAALDALEQRIADYAAQIAAQVRDNVSAQRLQGIAGVGALTAAAMVATVGQPQAFRNGRQFAAWLGLVPRQHSTGGKSRLGRITRRGDAYLRTLLILGAKSALQAALRKPPPLRHRLRRWIVDVFTRIGYHKTLVAIANKHARIIWALLVKGEDFDVQRLTLTVVAA

SEQ ID NO: 183535 - protein, 355 aa, unidentified
MNSSKYIAMDVHTATISVAVRDAAGKLIMESVIETKASTILQFIRGLRGDLHVTFEEGTWAAWLYDLLKPYVTNVVVCNPRRNALLKEGSRNDRIDARKLAELLRTNLLRPVYHGEKGLRTLKELARAYLTISKDLTRVMNRVKAIYRSWGIPCGGQSVYNPRHRKEWLSKITQASVRRRAELYYEQLDALVLLRKQARQELLAEGKKHQAWKLLRSIPALGPIRAAVLMAIVQTPHRFRTKRLLWKYSGFGVVTHSSADHRYVKGQLERSKKPVSVRGLDRDHNHQLKDLFKGAAIQASTRKGPFREFYEALVAKGMRPEMARLTLARKIAVIALTVWKKGGAFDAKYLKPQTA

SEQ ID NO: 183536 - protein, 355 aa, unidentified
MERQKVSFEGQHLYVGIDVHKKQWSVSIFSPEIHHKTFSQAPSPLALRSYLDHHFAGAKISCAYEACKFGFWIQRDLASYGYDCLVVNPADIPTTNKESSGKTDPIDSRKIGKALRTGLLTTVHVPRLITEGDRQLFRYRKKLWGDLVKVKNRIKDKILFAGIVIPPKLDNSNWTKAFLRWLQGVKILSPTSRLTLDLLLEQYNSLYKHFLKVSTEVRHLQRLPRYKANAKLLRTIPGIGPLTTVQLLTEIEDVNRFSSFRKLNSFVGFKPTTHASGEHDWRGRITYRQHKGLRSALVECAWTTIGADPAMMQRYEELKKRLTAKRAIIIIARKLLSRIYFVLKNQKPYELGVAQ

SEQ ID NO: 183537 - protein, 310 aa, unidentified
MEMISVGIDVSLDRLDVAVRPSGEVFAVERKAAGLDQLIIRLRELGPQLVALEATGGYETVAAAALASAGLPVVIVNPAQVRSFAKALGQRAKTDPIDAAVIAHFAEATKPEVRPLPDEATQTLADLVARRRQIVEMIGAERQREKRMTRRHLKADIARLIKTLEKELSKLDRELGDMIRGSPVWREKEELLASVPGVGPVIARTLMAELPELGSLGRRQVAALAGLAPFTRQSGRWRGKSFIGGGRTSVRTALFMGAFVAMRFNPILKTFFDRLVAAGKPKMVAIIAVARKLLTILNAIVRDNRPWQTA

SEQ ID NO: 183538 - protein, 368 aa, unidentified
MGSIEAFIAFDVAKLKHAMAIAEGGRSGEVRFVGEIENKPATIERAIKKLSKRYDRLHVCFEAGPTGYGLYRQVRDLGHDCTVVAPALIPKRSGERIKTNRRDAVTLARLHRAGELTGVWVPDAVHEAVRDLVRAREAAADDLRRKRQQLLSFLLRHGRIYDGGGHWTLAHRRWLARQAFEHTAQQIVFQEQVEAIAEAVERLHRLDGQLAVIVPTWSMAPVVEAYQAMRGASFLVAVIFAAEIGDVRRFDSPPQLMAFLGLVPGERSTGETVRRSGLTLTGNRRARRALVEAAWTYRYPARVSETLRARLEGLPKAVRDIAWKAQVRLCARYRRLSATGKKLPVVVAAIAREMAAFLWAIGREVAPA

SEQ ID NO: 183539 - protein, 465 aa, unidentified
MSKLRKRNRARSSQGETRPFEGMRQVNPHAAGVDIGAHEIVACVPDGDDQQIVRTFGTDTVDLQTLADWFVDRGIQTVAMASTGVSWIPLGEEREARGLPCCLISAQSIKRVPGRKSDVLDCQWIQTLHSYGLRAASCRPAADLVALRTLLRHRAQLLEHRAPHVLHMQQALLQMHSPLSHALRDITGATGQRLIRAMVAGARAPQHWAALRNDRCKKDAHEIAMALTGTWREEHLFVLTQALALFDFYTTQLSACDAQVEHAFAVITPHFESTAAASVPARAAVPPRRKPHSPSKNAPEGNTRAHILRITGVDLVAVHGMSDSLAPTIVAEIGTDMSQWPDDTHFCSWLGLAPNNDISGGKVLKSRTMKHRNRAAQAFRMAAQSVIRSHCAFGAFYRRLTGRLGPAQALVATAHKIARTVYHMLKHRVPYYDIGAAEYNKRFREREMHSLQKQAAKLGYKLSPG

SEQ ID NO: 183540 - protein, 405 aa, unidentified
MEIIIERGCGLDVHKGTVVACIMGTGIKKEIRTYLTVTNDLLRLKEWLRETGITHVAMESTGVYWKPVFNILEDNFEVILVNARHVKNVPGRKTDVQDSEWLCRLLRSGLVSGSFIPPRDIRELRDLTRHKRKLIQAITAEKQRVEKVLEDANIKLSSIASDTFGASGKRIIEELIKGKLRAEEMAELSKGRLRQKREGLKEALVGEVREHHKFMIKASLKHIRAMEKILSDIERKIQEKIDRQYKEEYALLQTIPGVKGEASTLIAEMGVDMERFPSEEHLSSWAGMSPGNNESGGKKKPGSTTYGNKCLKTMLTEFAWVASKTKGTYLRLKYHSLVGRKGKKKALVALGHKILIMCYHILKYRCAYKELGADYLDKRRKDKIARSYIKRLHHLGYEVILQEAV

SEQ ID NO: 183541 - protein, 459 aa, unidentified
MKQKSRRTKGIEQAHPFDGLSKVNPHAAGVDIGAEEIVVCVAVNESTQLVRGFGNYTVDLYAIADWLTEHHIKTVAMESTGVYWIPLFELLEARGFECLLISSRSLRRVSGRKSDVTDAQWIQTLHNYGLLESSFRPQEDLVALRSLLRHRKNLIDHRSPHVLHMQKALLQMNIQLSQAVSDVTGVTGQAIIRAILSGVRDPQELAALREPGCKKDEAEIAKALTGTWREEHLFVLKQAVALYDFYSQQILECDEEIERMYAETRPEEDGGELPPLPPRKRNSHSKNRHHESEKIRRHLKRISGVDISLVDGMGVSLAQTVILECGTDMAKFPTEKHFGSWLGLSPKHEISGGKVLNNKVLRTKNRAGQAFRMAAQSVKQADCPFGVFYRRLRARLGPAQATVATARAIACVIYRMLKYQIEYDPLSVNEYQQQYEAQQIRYMQKRAAKFGYQLVPALT

SEQ ID NO: 183542 - protein, 343 aa, unidentified
MQTVTAIGLDIAKSVFQVHGVDAAGQVVIRRQLKRRYVLAFFQKLPSCLIGIEACASSHHWSRELQALGHTVRLMPPAYVKPYVKRQKNDATDAEAICEAVTRANMRFVPTKQPEQQSGLVLHRTRHLFIRQQTSVINAIRAHLAEFGIVAPVGRRGVEELLHAVTDPNDKRVPEIARACVLALGAQLRRIKEQVLEFDRMIAAWHRSSETSRRLDDCPGVGPALATALVASVADPRAFRSGRNFSAWIGLVPKQRSSGGKDRLGRISKQGDRYLRGLFVAGALAVVRYAKIHGTKHRPWLTALLARRPTKVAAIALANKIARMVWAMMAKGERYREPVALAA

SEQ ID NO: 183543 - protein, 313 aa, unidentified
MDTNYFVGIDVAKDHFDIHILPDNTAFQTGSAAEDIAKLIVKLKKLSVKLIVIEATGGYETQLAAELQANDLSTAVVNPRRTRLFTSATGRLAKTDRIDAKALALFAQKLQPPARPIGDENTLKVKAIVARRRQLIRMRTAELNRMHQAKNKGIRQSIQMILDLIKQQIKDIDDQLGLAIAESSQWTKKAELLKSVPGVGDVICNTLLAELPELGELNRRAIAALVGVAPMNCDSGKFRGYRRIRGGRTPVRNALYMATLVAIRHNPKIRTYYQRLVESGKKKIVALVAAMRKLLIILNIMLQRNQPWQPELC

SEQ ID NO: 183544 - protein, 344 aa, unidentified
MGEITTVGLDLAKSVFQVHAVDAEGRVAIRRQVRRPQLVKFFAGLPPCLIGMEACATAHYWARELTALGHEVRLMPPAYVKPYVKRQKNDAADAEAICEAVTRPTMRFVPMKSPEQQSAAMLHRSRALLVKQRTMLLHAIRAHLAELGIATGAGVSQVTKMVGALVRGEPLDLPDLARVVLETLARLVFDLQERLRTIDKQLAHWHYTNDLSNQLETIPGIGLVTASALASSIPDPSTFRSGRHFAAWLGLVPKQNSSGGKTRLGRISKQGNKYLRQRLILGATSVLRYLRREGSQPSPWIAGLLRRRPPKVVAVALANKMARFAWSVMTRGGEYEDKPVLRAV

SEQ ID NO: 183545 - protein, 361 aa, unidentified
MSESMVLVGLDVHQAQTVAAVLDPSTGELSVQRLRGEPASVVPVFLEELDCPVRAVYEAGPTGFALARVAEGRGLDVRVIAPGSIPRAPGDRVKTDRRDAKRLVRLFAAGELSYAFVPSEADERFRDLVRCIEDARKDLMRSRHRLSKFLLRRGHRFPCKAWTQPHERWLGKLRFEDAPSQATFVDYLCAVQTLVGRRRTLIEVLEQTVPETSHAETVARLRCFRGINTLTAAGLCAEVGDFARFAKPALLSGFLGVVPSEHTSDEKRAQGQITKAGPPHARRLLVEAAHHYRHQPAVRLELKARQAGQDPRVVQVAWRCQRRLHERWVHLQGRRGKRTGTVAIACARELAAFCWEAATLD

SEQ ID NO: 183546 - protein, 407 aa, unidentified
MCILNDSVPLRYIGLDIHKAYFVAIGVNRDKEQVFGPQRVANGQLAAWIRQELTDRDAVVLEMTTNTWTMVDALKPYVHSVTVTHPPHVHLITRAQVMTDKKAALILAQLHAAGLLPAVWIPPVEVRSLRALVAQRWKMVQLATQAKCRLQSMLHRYHFDRPPKSDPYTPQMRDWWEALPVEPLERFRLQSDLDTVTFAQQQKVRIETCLAQFAARDVRVPLLAQIPGIGFINAVTILAAIGDIVRFPTANQLVGYAGLGTKVRASGQTQWRGRITKMGRRDLRRAMVEAAQSAARCHVHWRAEYNRLCRQTASKKAKVAIARKLLIAVWYILSNGEADRFATDAQVACSFFALAYKLQVRNLPDGMSALQFTRHHLDRLGIGRDLTHIHWGSKTFKLPPSGLAQSG

SEQ ID NO: 183547 - protein, 428 aa, unidentified
MSENSTTHPEPEFVAFVGIDWADQKHAWCSQRAGATQREHGEVEHTPEMVEVWVSQLAQRFGPGPIAVAVEQRKGALVYMLSKYECLHLFPVPSTMSASMRKSLYPSGSKDDPRDAELLLDLLLQHRNKLRRLMPDDEVTRRIQNLVEERRNLVDEKTTQLNRLTGYLKVYFPQMLEWFEKLDTKLVCDLLERWPSLEELQKVPPAELRKFFGQHRGRHQELTERRLEGIGQAMPAIRDRAVLEAKRAMVQVSAQLLRILLEGIANLDSKIEEAASAHPDFFIFESLPGAGSALAPRLLAAFGSQRDRYGSAEEVQTHSGIAPVMEKSGKKKWVHFRWACPKFLRQSFHEWAGHSISQSTWARAYYQQQRGRGKDHHAAVRALAFKWIRILFRCWQDRVAYDENKYLAALARRGSPLSSVLPVTAATL

SEQ ID NO: 183548 - protein, 414 aa, unidentified
MKKTNNSSTKSEPCSKQPKSRVSVQRDSKEVMAELLGKLTEKLNPKAISASAGKEKQGRGPNLDRLTVGVDLGDQWSVYCILGLEGETLIEGRLPMTKQTVAEFFQGLPAARVVIEVGTHSAWVQEVISGYGHEVLVANPRLMEGSKRRKRKNDRIDANKLARLGRMDPQSLHPIQHRSPEVRQDLVILRARDALVAVRTELINATRGLVKSVGARLPTCASPSFSKKVEESIPVEIREALLPLVRLVAAISDSIQEYDQQIEKLGSEKYGHTKLVRQVTGVGPITAMAYVLTLENPKRFAKSRDVGPYLGLVPNQQDSGDIQPQLGISKAGDAMLRRLLVGSAQYILGPFGPDTDLRRYGLRLCERGGKNAKKRAAVAVARKLAVLLHHLWVSGEVYEPLRQGLSATLTQVAA

SEQ ID NO: 183549 - protein, 350 aa, unidentified
MTTIARRITGGVDTHLDVHVAAALDERGALLGIESFATTPAGYRRLLRWLESFGTLELVGVEGTGSYGAGLTRHLLAHEVAVVEVDRPNRQLRRLAGKSDPSDAEAAARAAQGGHATGLAKSRDGNVESMRVLRVARFSARRSRTQAINQMRSLVSTAPDELRAELRDLSIYKILTIAGAYRHTGRTDVTTLTKLALRTLARRALSLEEEVKEIDALLKKLLVETAPELLAVDGVGTDVGTAILVAAGDNPERLKNEATFAKLCGVSPLDASSGKQVRHRLNRSGDRQANSALWHIVFTRMVNDPRTQHYIERRMKDGRTKKEAVRCLKRYVAREVFAALPRSQFGVDNP

SEQ ID NO: 183550 - protein, 342 aa, unidentified
MEYYAGIDVSLECSTVCVVDGSGKIVREAVVQSEPAALIGWFGSLGLKLTRVGLEAGPLSQWLYAAMKPAGLAVELLETRHVHDAFKAMPVKSDRNDARGIAQLMRLGWFRPVHCKSMAAQEVRAVLTARKLVQSKLQDVENSLRGILRGFGLKVGKTTDKSFAERIRELVQGQPSLEVVGEALLSVRAVLLSEFNAFEKRVRAMGRSNTKARLLASTPGVGPIVSLTYAAAVDDPARFRSSKRAGAHFGLTPRKYQSGETDYSGRISKIGDASVREALYQAAHVILTKPVKGCSQLKSWAMRIARRAGMSKAKVALARKLAVIMHRMLATGKPFNAAAAAA

SEQ ID NO: 183551 - protein, 416 aa, unidentified
MEALHARCAGLDVHKDTVVAGIRIAGGGPAKTEVRTFDTTTPGLLALSAWLAEAGCTHVAMEATGIYWRPVWHVLLDGEVTLILANAAHVKNVPGRKTDVADAVWLADLLAHGLIRPSFVPEAATQEMRALLRTRKQLVREQASHVQRLQKTLEDANIKLSSVLTNIMGKSGRAIIEALAEKQTDPEELLALVQKGVKAPAERIKAALTGRVTDRHRFLLRLHLRQIDTLDATLADIDAEVDRGLDPFRQAVTLLRSIPGVSDLTAQVIVSEIGTDMSRFPTAGHLVSWAGLCPRNDESAGKRRSNRLRHGAAWLKTTLVQCAWAATRKKASYLQAQFQRLRHRRGPKKAVCAVAASILTAAYHMLRDGTFYYDLGPDHFRRTSPETHAKRLAQQIAKLGFTCTIAPASTVEEVFI

SEQ ID NO: 183552 - protein, 363 aa, unidentified
MANRTSVGLDVHARSVLACGLDGETGQLYERRLTPDHGELLSWILGLPGPVAVTYEAGPTGFGLARFLIGHGIDTLVAAPSKLQRPSGDRVKTDRRDARHLARLLHLGEIVAVSVPGVEQEAARDLVRAREAVRGDLMRARHRLSKLLLRHGIVYYGGRPWTASHDLWLRAQRRQAMFALPGLGLAFDTAYDTVLATLARRDRLDAAITAMAADSAFTPVVSRLGCLRGVATLTAFGLAVEIGDWHRLTGRSIGAYLGLVPTESSSGQTRSRGSITKTGNGHARRLLIEAAWHHRPSYRVGVDLRRRLERADPAARDRGQRANRRLHARWAAFDARLKLPVIANTAIARELAGWCWSLAVLED

SEQ ID NO: 183553 - protein, 331 aa, unidentified
MKNRLIIGIDVSKLVLDVFILSCNFHFTVENSPKGFAALLEISCTKLKTSKQQLYFCFENTGRYSRMLAVFFHQAEITFSRIPALDIKASKGISRGKTDKADARDIALYARRKGAEMEPTKISSAETSELRQLVSLRDKLIKHRTAYKNSLNDLTDCYYEGETDFIRQTQLRMVKQLDNEIKNVEKRMDTIICSMPDWEENYKLIRTVRGVGPVISRYLIIYTENFTRFTKYKKFACYAGIAPFEYASGTSVKGRTRVHPCANKQLKSLLNMAAMNAIKINGEYKQYYLRRQQEGKNNMSTLNIIRNKILARIFAVVRRQSPYVDLHKFAA

SEQ ID NO: 183554 - protein, 346 aa, unidentified
MYARKDIILAVDYHAENTEVRWLNCASGEERCLRIPTTRGGILRLVEKTILEAAQVGGQVIWIMESTTGWARVKELIGSRVQFILANVLQMPLLPKAYRRKSDKIDTGRILREFLNGSLPQSYQPTAWWREVRRLVDSRQDLVERQTAGKNWVTHFLHHETWYDREGLWTQKGMKRLRAFRLPASDRMVLDLKLQELEQLAQRRGQMEAAMQGVYDQWPEAQWVDEVRGIGMVTAVSILAHIGTIDRFPSAEDLISYAGLAPGHRQSDQTAHNGRIGGGGTDSQLRYLLIESMQWVCQIPRYRPAFERAQAKHGTNIARIIVARMLLRSLFKVLRDRVRFNQVQAA

SEQ ID NO: 183555 - protein, 465 aa, unidentified
MIFIHPQSYYTMAKKAKKNKTGKGLKLEIVNPHAAGIDVSSTEMQVCVPENRDPDNNRRFGAFTEDLHYISSWLKACGITTVAMESTGVYWVQLYMILEEDGFDVLLVNAKAIKNIGEKKTDEVDAEWIMLLHSYGLLKASFQPDNRARRIRNLARHRDNLLKASSREVLHIQKSMELMNIKLINVISDILGKSGQDIIRAILSGERDAGKLAALADPRCKSSKEIIEKSLVSNWDDDLLFMLGQSYDLYLYYQTQMKACDKKIESIAQEYLAEISVTAPEKELLRSEKKKAQKNAVTIDIEKYAFQMWGVNLMRIHGISDGALLRLTGELGHDFTDKFETYKEFCCWCNLTPNNKISGGKLLSSKIPKRKNAVGQILRSSANTLKASKTPLGFYFRRIQSKNGYMAAIVATANKLARIIYVMVKTKSEYNESYNQFNEEEILKKKLMATQLALERIQKRIEKAA

SEQ ID NO: 183556 - protein, 422 aa, unidentified
MLTQSQDNEEIIERVAALDIGKAELVCCARVPDEDHPGRRLQEVATHSTMTRALLGMSDHLACLGVTRVVMEATSDYWKPVFYLLEAAGFETWLVNAKDVKHLPGRPKTDKLDAVWLCKVAERQMLRPSFVPPPLFRRLRDLTRYRADLVATRTAEKQRAEKLLEDAQIKLSVVASDIFGASGRDMMAALVAGERSPKVLAQMARLSMRKKITVLEEAFTGYFTEHHAFLLQKMLDRVDGISADIAALEARIESQMAPFAAAVEKLDEIPGISLATAHVILAEIGLDMTRFPTAGHLASWARLAPGVKESAGKKKGKSSTGHGNIYLARVLGNAAAAAGKTDTFLGERYRRIARRRGSKRAIVAISRSILVIAWHLLSDPDARYHDLGSDFYATRIDPERRKRSHIHQLEALGYTVTLQPAA

SEQ ID NO: 183557 - protein, 359 aa, unidentified
MAVYAGIDLHSTNSYVAVIDGEGKKVYEKKLPNDGPIILSGLEPYRGDLRGVVIESTFNWYWIVDLLMDDGYKVHLANPAGIQKYKGLKHSDDRSDALWLAEMLRLGILPRGYIYPKEDRPVRDLLRKRGHLVRLRTSVINSLQNIIARSVGGFLSSDKIKQLTRDHVADVLDGEEYLALTGRVSKEVIDHLTRQIKKIEKAALQKVRPLPQYRYLTTMSGVGDILGLTITLETGDIGRFSGVGNYASYCRKVPVSWTSNDKKKGRGNKKNGNKFLSWAFAEAAEFARRKDPSVRTWFNRKAAKTNMMVARSALAHKLARAAYHMMRQEAPFDQKRLFGYSVGPGGETDGGVGETTKSD

SEQ ID NO: 183558 - protein, 333 aa, unidentified
MKSDAVHIGVDVSKAKLDIYVPAEKEGSRPVTKEVDNDVKGFRELRDLARKAGATVCVEPTGGYELELVAFMHKFGVPVAYTDALRVRQFARAEGSLSKNDTMDAALISRFADKIGVRILGAQEAGAVELRRKAKFRQTMVDSRTAMVNRLETEVDAEMKALLKEQIRLAGRIIEKAERLCLDAVRKNGRMDGLRERLTQIGGVGDLTAISILSGLPEIGTLSDRKLNRLVGISPEENQSGTKEWQRRIWGGRKDVRNALYMAAVASIKWNAILGSYYRKKRAEGHPHKWAIVPTMRKLLSLLNRIARDPGFTPMPEPASTKQNAHVGRKKAA

SEQ ID NO: 183559 - protein, 360 aa, unidentified
MFIERTSVGLDVHARSVVAAAIDGVTGELVQTRLTPSREHIRSWLSGLPGPVAVAYEAGPTGFGLARSLTPTGIRCEVVAPSKLQRPSGDRVKTDARDAVHLARLLRLDEFTSVSVPTVDQENARDLVRAREDCRGDLMRARHRLSKLLLRQGIVYSDGQAWTDTHDSWLRRQHFSSPALQMTFESDYDAVLTVKARRDRLDAAIAAMAADSEFTTMVRRLGCLRGVSTLTGFALAVEIGDWHRFTGNTIGSFVGLVPSEYSSGASRVQGAITKTGNTHVRRLLVEAAWHHRARYRVGKTMRDRWELATPAARARGDAGNRRLHARWNTMRARHKRHVVANIAIARELAGWCWSLAVLEE

SEQ ID NO: 183560 - protein, 372 aa, unidentified
MENIIYIGMDVHKESFSLCALHGTTGEIVGEARCASNVSLVKKFVEKLKTKYGEDIKIKAGYEAGCLGYSLHNLLEQNGIDCDILAPTTMYSSSKNKMVKNDRFDAKMIAINLANGTYKEVYVPEEEDVAVKEYIRMLGDFKTSLKKMKQQIKSFLLRHGCVYEGKSSWTIAYMKWLKNLDLQGLFKETLDEYLLQYDVLVDKIERFSLRLEELSHSERYEEPVGKLRCLKGIDTTSAMTVHVEIADFTRFPTAKAFMAYVGLTPSESSSGEKISRNAITKQGNSTVRSTLVECANALVKGTIGLKSKRVKARQKGQRSEVISYADQAVERLQRKYHRMIYQGKPRNVAVTAIARELGCFIWGLETGKIHRK

SEQ ID NO: 183561 - protein, 322 aa, unidentified
MTPPEIYVGIDVAKEQLQVAVRPDGEAWSVTNDRPGLRDLVKRLAVSKPALVVLEATAGMEMPVVAALAAAGLPVVAVNPRNAREFARATGRLAKTDVIDAHVLAQFGEALKPPLRPLPDAATQELNALVTRRHQLVEMLTAEKNRLAQAAAKAVRAGIREHIRWLERRLANIDQDLADAIRQTPVWREKDELLRSVQGVGPVLSTTLLAGLPELGTLGRKQIAALVGVAPLNRDSGRYRGKRTVWGGRARVREALYMGTLVATRFNPVIRTFYKRLLDGGKPKKVALTACMRKLLTILNAMARHETPWQTMHLTLVRQDGC

SEQ ID NO: 183562 - protein, 392 aa, unidentified
MSQHFRFDASRSLTALEQDSTIVAVIEMSQTKWLVAALVPGVERQPLKKFDAQEEMLLKLLHRWHCEAGQAGRNIKRIVVAFEAGRDGFWLARWLRARDVEAYVIHPTSIAVSREHRRAKTDRLDTELLMRVFLGWLRGEKRHCSMVAIPTIEEEDARRPNRERQNLVTEQTRIINQIKAIFARFGLRTLRPTMRKLAEGLEDLRTAEGTPLPQNTLSELRRHLARLRFVRDQIRAVEQERLRKLAVAPAAETKSPDAMVRLIARVFGAGIETADMLVNEIFSRHWRDRKAVARYAGLTGSPDESGSRRRERGLARAGNVRVRCGMIQLAWRFVRFQKNSALAQWFAARTADGRASTRKTMIVALARKLLIALWRLVTRGEVPQGIVLRPAS

SEQ ID NO: 183563 - protein, 372 aa, unidentified
MRHHTEAFVGIDTSKLRNAVAIADSGRGGEVRYLGEFPATEAAIQKLVAKLAAKYRHLTFCYEAGPTGYGLYRLLKSLGHECLVVAPSLVPKKAGDRVKTNRRDAVSLAKLLRAGELTAVWVPDERHEAMRDLSRARQAAKKDLQGKRQQISSLMLRLGRIYPGKTTWGPAHMKWLMAQKIEHREQRIAFEELLEGIRQEGERLERLENAIREVVPEWSLSEVVAALQAVRGIDLIAAVGVLAEIGDLSRFQNPRELMGYLGLVPSESSTGDKVKRGGITKAGNGRARRILVEAAWSYRYPPRVSRDKQPKVAAAPRRVREIAWKAQTRLCGRFRSLERKGKRRTVIATAIARELSAFIWAINRELMPHRPA

SEQ ID NO: 183564 - protein, 476 aa, unidentified
MKKHKKTKPKPEAPKPLHEPEPDAAGIDLAATEIWVAVAPDRCELPIRRFGAFTQDLMAIVAWLLECGIRTVAMEATGVYWIPLYQLLSDAGIKVCLVNARHVKNVPGRKSDVRDCQWLQYLHSVGLLRASYRPDQAVCSARSIYRFRQNLLTQCAEHLQHMQAALDQMNIKLHHVIDDLSGVTGMAIIGAILNGEREPLRLAKYRDTRIKATEETIAKSLEGDWRSEHLFVLRLAWENGKHVQEQIKKCDQELMEYTRQLEASTIVAKPIVPIKIVSLDAEPGAPELNAIPAVRPSKPRRKTSKNEPDGPWREELHRFFGVDLTVIPGISILTGITLMTELGNDLSAFKTPQHFSSWLCLCPDNETSAGKVLHNSTRCSQNRVRQALRMAASSLHHDKSYLGEKYRRLRAKLGAPKAITAMAHKIARIIWYLITHQVPFDMSIFAAIEQANQKRRLKGLYSVARQMGYQLIPIAA

SEQ ID NO: 183565 - protein, 394 aa, unidentified
MKLVGIDVGKNSHHFCVMDKETGEFNVAPSSFSNNKEGFDFLINSLKPYSKKSILIGMEDTGHYHVALLKFLLSNGYTVALINPKTTDLTRKMEGGITKNDKLDTITICDVLDTPERKKQYRITKVDRFDFYEQRQLTRHHHDLKEELNVYCNRLQKSIDLVFPEFNTLFSSKYSIVYMNLLKTFGSAEAIASTDIRTIRKCFEIKGRGNRISLTPEKLKECAKNSIGISSEVETIQIKHLVSQITLIKEQIAEIDKKIEEFSITNNSPILSIPGISHFSGTSILAELGDIGNYSKPSQIIKFAGVAPYHYESSQYNAQHTGITKKGSKYLRKTLYQIILTVINNNPVFKKYYLLKISQGKGHRCAQGHCIRKLLRIIYHLLETGQSFDPALLR

SEQ ID NO: 183566 - protein, 368 aa, unidentified
MLEQSHYKVGCDAHKHYSLFAVLDHRGKPVEQTRVNHVPGAIRAFVSRFPPGTPVALETVGNWYWIVDEIEQAGCVPLLAHAQMAKKMMGHVHKTDKLDAQGLAILQHLGSLPTVWIAPGEIRDERELPRTRMALSKVRTMLKNRMHSTLAKYALSLDTQSDIYAPKWRPQLLELICSLPDETRRCMRQELELLDQVQEQIHRLEARILERVQVTPTIQLIQSVPGPAKILSIVIDREVGSIDRFPSPHHFASYSGLVPKVKASGGKTHYGKMIKAANNYLKWAFIEAANVVVRQQHHPRWRQKYVVALFERTRQRKGHAVAVGTVARYLPEATYWVLKKGEPYREPAPRLPAGIKSAPSRKQRQARA

SEQ ID NO: 183567 - protein, 325 aa, unidentified
MKSRVQIKHDSGILYVGIDVSKDKLAVYAGDLFEEEIDNTRRAIARMVKTIGRGVDRPIRFVLEETGCYSLPVHLELDRLGQQVCVVNPSRVRHYAIGCGVMAKTDRIDARIIRRFAEANDCEPTPIPSETRMLLRELIRTRGLLVKIRTMIQTLRKMTVSPSSRTLLGEVDRFLRTKIDKLEAEIVRHGKEDEEIERVSRKLDELPGVAALTATTIATLAPELGTLGKRQAASLIGLAPFVHDSGKYKGQRRIGGGRWDLRHALYMPVLTAVQKDATLRAFYRHLVDDRGKRKKIALAAAMRKMFIHMDRLIAGLNGKEEAMPT

SEQ ID NO: 183568 - protein, 336 aa, unidentified
MAQPTPLFVGLDVHKDSIAVAHALGQCADPPVFVGAIGSRQADLDQLIRRLHAKTPALVFAYEAGPCGYGLHRYLTSRGFSCQVVAPSLIPKKPGDKVKTDRRDAVDLARLLRSGDLTRVYVPTVEDEALRDLCRARDAARITLKNAKLRLKAFLLRLGRPYVGRADWNEAHRRYLAKVVCPTPTQQIVFQESVRAVDEQVDRRHRLEAELLERAPAWRLYPVVQALQALRGVQWLVAITVVAELGDLTRFDSPRQLAAFVGLVPSEDSSGPRRRLGAITTTGNGRARRALIEGAWRIGIRPKCPSTFSDASTRCRNRFRTSAGRRRSGCASAFVA

SEQ ID NO: 183569 - protein, 354 aa, unidentified
MPRKTTSTEAVATIGIDIGKNTFHLIGLDHKGAIVLRQKLSRSQVEARLANMSPCLIGMEACVGAHHLGRQLKALGHDARLMPARYVRPYSKGQKNDFRDAEAIAEAVLRPTMKFVAIKTVEQLDLQGLHRVRERLVCQRTSVINQIRAFLLERGIAVRQGFRALRTEMPIILTKTDKLSPRMIHMIEDLCTDWRHLDGRIDAVSNEIETLSEQDDGAKCLMTVPGIGPIISTATVAAIGRGDVFSKGRDFGAWLGLVPRQMSTGGRTILGPISKRGNSYLRMLFVQAARAVLLRPQSWQKHGLKTWIEAAARRLNRFKLAIALANKIARIAWGVLHGGRNFEVRTLRPAPHVA

SEQ ID NO: 183570 - protein, 401 aa, unidentified
MSFESKRSCIAIDVSKGTSHFQGFYSAGVPASEATSFEHTKSGFARVTELFNFLKEQNDQKPFIIFEHTGTYSRPIEVYCKRNNFSYMAIPPLLSAKMRKSDIRPTKTDKIDCATIANVYYLKRLRVTKSNSKVYSDLKTLCSYYNFKVQLMVQMKVKYREHLDLVYPRIDTLFGVYTNTFLDLITRYPNPHKLQKKSKKELTEFFIKRDYCGLPKAQRLAILVKEYFKDVEIPVTENDVLITIFSNHLKELRFIMNEVDDLLERIITLGMKTKEYPYLMSIPGIQKNTAARIAAEIQGIERFESASKLCAYAGIDPTVHSSGNYLGEHLSITKKGNYRLRCLLYLVVAGTSKSKADNNPVRDFVQKKKSDGLAPKAAIIAGCTKLTRIIFAVCSKEEFFV

SEQ ID NO: 183571 - protein, 340 aa, unidentified
MKLCGAMDLHSNNNVTVLSNEKDEVVYRKRLPNDLKLILQQLAPYQSEIEGIVVESTYNWYWLVDGLMEQGYRVHLANTAAIQQYNGLKYTDDDSDARWLAHLLRLGVLPEGYIYPREQRPVRDLLRKRGQLVRQRTTNLLSIQNLFTRNTGSSLSGNEIKGLQVEDIDGNVAVSDLALAIKANLAVMQSADEQVQILEQTVRERVKLRAEFKFLKTVPGIGQILALTMMLETGDIRRFPSVGNYASYCRCVGSQKLSNGKKKGKGNTKNGNKYLGWAFVEAANFAIRFSPKIKSFYQRKKSKTKGIVALKAVAHKLCRACYYIMRDRVAFNMTKAFGQN

SEQ ID NO: 183572 - protein, 332 aa, unidentified
MYLGIDVHKRYAQVAVMDEAGKIVEEVRVKNANLDELAQRYAGAQAVLEATSNYYHIHDTLSEHLDVTVAHPKKINQIADTDKKTDRVDAKELARMLRLNSVPESYVPTEEVREARALVRGRQTLVENRTKYANKVHGLLSDHGITEDVKPLNVTGRESLRELSLPVPFDTLLESYLDLIESLTEEIQKLDETIEERAGSLKETQLLMTIPGVSYYTALTIYAELGGINRFDGDKEVVSYVGLNPVIRESGDSRIEGSISKRGSGRVRWLLVQAANTAVHTSNDEYLSRFYDRLASRKNSQKAIVAAARKMLVSIYHMLDRGEVYDPPGVTA

SEQ ID NO: 183573 - protein, 342 aa, unidentified
MDHYAGIDVSLECSSVCVVDASGKILRETKVASEPEAVIAWFRSLGFGVERIGLEAGPLSQWLFAAMKAAGLAVELLETRHVRKAFEAMPVKSDRNDARGIAQLMRLGWFRPVHCKSMGAQETRSLLTARKLVQSKLRDVENSLRGILRGFGLKVGKTTELKFAGRIEELVVGHPHLQVIANALLAVRAVLRKEFAAFEKQTRKMARSDARTRLLMSTPAVGPIVALTYASAIDDPSRFKSSKQAGAHFGLTPKKHQSGETDYTGRISKIGDSSVRTALYEAAHIMLTKPLKGCTQLKSWAMRIARRAGMSKAKVALARRLAVIMHRMLADGTPFNAAAAAA

SEQ ID NO: 183574 - protein, 311 aa, unidentified
MTNATIGIDISKDHLDAHRMRDGERRRFANDKTGHGALIGWLGQPGARIVYEPTGPYHRALERRLAEMGFGLVKVNPRQARRFAEATGRLAKTDRLDAAMLARMGMLLDLEARPARSAVLNDLKDLAMARAALVKNRTAAKTRAKSLILAILRRHNAEQLRQIERQIAAVEVEIMALVKADPDLARRFDILVSIPGVSATTACALIIDMPELGTLENGQAASLAGLAPVARQSGNWTGRAFIRGGRANVRQALYMPALVATRFNPDLKAKYDQLKAAGKASKLAITAIMRKLIVLANALLKDGRKWSQSLP

SEQ ID NO: 183575 - protein, 344 aa, unidentified
MENYAGIDVSLELSSVCVVDAQGKIVKEAKAASEPEALVAFFRTLGFAVKRIGLEAGPLSQWLHAGLKRAGFEAVLLETRHVKAALSAMTVKTDRKDAHGIAQLTRMGWFRPVHAKSIGSQEVRALLVARKQLLERLIDVELSIRGILRGFGLKVGPVTRKGFEARIRELVAGQATLERIAGAMLSARAALKAEYEKLHKAVLALVRDDAICRRLMTVPSVGPLVAITYKSAMDDPHRITKSKSAGALFGLTPKKYQSGEKDITGGITRAGDEMVRTALYEAANVLLSRITRFSKLKRWGMDVAKRRGSKRAKVALARKIAVILHRMWIDGTTYRWAAAEPIAA

SEQ ID NO: 183576 - protein, 341 aa, unidentified
MNVKTIGIDLAKNVFQIHGVDEHGKRLFNKQLRRAQMASFFANIPPCLIGMEACASAHFWANKLISMGHNVKLMAPQFVKPYVKTNKHDAADAEAICEAVTRPNMRFVPVKTSEQQAVLALHRSRQSFIKQRTAQANQIRGLLAEFGIVVPRGIQQLQRRLPELVEDADNPLPVLFRTQLSLLQHHMAYLFDVIATLDKQIEQCYRQNALCQRIGKIPGIGPVTASALIATIGKANNFENGRQLAAWLGLVPRQHSSGGKQVLLGISKRGDTYLRTLLIHGARAVLQSAKHKQDAVSSWANQLMARRNNNIASVALANKNARTVWALLAKEREYCAPIISA

SEQ ID NO: 183577 - protein, 370 aa, unidentified
MKGGLPGGSLRVVTWEATMRRPLNIMLHVGMDLSRHRLDVRVLEDGGATVAELVVAPTEPELRQLAARFKPGGPVRGVIESMNGARFVHDTLELAGWEVEIADAQKVKGLAPLACKTDRIDAWVLAELSRRDLVPAIWLPDPAVRAHRERARFRLHLVHHRVELKNRIHASLITFGHACPTSDLFGRVGRQRLTELEFPEPWASDIAAAVELIDHLNAQIATIDTDLRREGADHPYVPLLMTVPGIGWILAYTIAAELGDITRFATPKKLCGYTGLCPRVYQSGSVDRRGRLAHNGPKYLRWALIEAAVHACRHEHYRDHHQATKVRLGRQRGAKVARVETARKLTEAIWHMLTKGEPFAPQVPRQSLAA

SEQ ID NO: 183578 - protein, 368 aa, unidentified
MNTVKFIGMDVHKNSITIAIAEEGSRDAARPFGAINNDLEALDKFCRKMVSTASELYFVYEAGPCGYGIYHHLTGKGFNCMVAAPSMIPKRIGDRIKNDTRDAKTLARLHRAGELTAVYVPDTQDEAMRDLSRAREDAVVAGRKAKQRLNAFLLRHGMSYSGKTKWSKAYFNWLSDIAMPHPAQQIAFQEYIDAVHESLARIERLTEQIRQMVSDWRLAPIVDALQAARGVSLIVAVTMLSEIGDLNRFQHPGQLMAYLGLVPSEHSSGNHIKRGGITKTGNGHARKVLIEAAWAYRLQPRVSRVLLKRQENLPEPVRQIAWKAQLRLCARYRRLVAKGKTKQVVVTAIARELSAFLWAIAKQLQPVT

SEQ ID NO: 183579 - protein, 727 aa, unidentified
MHNRQSNQRSSALNWNYKLNYLALIFTLFAGIFSYFSYSSLQELQKASENRYLSYLLTEQLRLSSDQLTQMVRAHAVTGDKKYLTFFKRILAIRNGQSPRPINYHRVYWDILMPEKGQAPFIDGEQQSLELLLTQAGFTPQEFEQLQKSRKASDKLTELEFIAFKQIENAQTEKGDYSSTTMRESALALLYSEDYLLAKSEIMSHINEFSQLQEIRTKREVQFIAKMHNIMTVCALTSLIVLLIVLAFNFRLKHKVNQQLIDILKQDVNLHTAKIQEQNIKLTESIEIMENAKKQLVESEKMASLGSLVAGVAHEINTPIGIGITAITSLQDEEKQLRKSIDNNTLSKGLLKEMYGLLPLAGVLRYKVKSIHSNQLLPGVHTMTQCNVIAIDLAKDIFQVCIMTPKGKITFNKAMTRAKLKEWLVKQKPSLVAMESCGGAHFWARFAKSLGHNVLPIPPKQVKPFRTGQKTDANDAIAIAVASRAPNIKPARVLTIEEQGLQSVSKMRDLLDKQKLQLSNQVRGLLLEFGIIISKSIKIFKERIPEILEDGENQLPMPMRHSINKMWALYSRLEDDFKALNNELMHLTEQDNDCKKLMKLEGVGPITSMRLKIQLGCGEHFKSSRQVSACIGLTPKQHSSGGKIQLGSVGKSSCDKPLRSCLFLGARAVVAKLKNRPAKTEKEQWLKALIERRGANCASMALANKNARTAYAILKNNTEYSPVLLAA

SEQ ID NO: 183580 - protein, 389 aa, unidentified
MCICGIDVAKLNHVALVQDEQGHVDVPAFSFSNTRSGFEELHRCLAALPTPVTIGLEATGHYWWALFEYLTQLNYPVVVLNPLQVHAYRKTGIRKCKTDRTDAFWIADLVRIGSGRLLHSNTPSLLQLRELTRFRAQLSDHIGDCKRKVLSVLDRVFPEYETLFSDVFLRSSRALLAEAVAAQDFTEFDLGELTHVLRSASHGRFGSPKAQTIQAAARQSVGIPFLADAARMEMRCLLEQIDLLETQRQLLDQTIADLMAQLPQHITSIPGVGAVTGAAIMAEIGDVQRFATIEKLVAYAGIDASVHQTGKFQAAQMHMSKRGSPHLRMALWQAASMAIRYDPDLATYYQRKRSEGKHHSTVIGAICRKLLARIFIILKEHRPYVIHQF

SEQ ID NO: 183581 - protein, 309 aa, unidentified
MKEQLVYLGVDIAKSYLDAAVWNEKRRFSNDAIGHRELIKWVKQLKAPVQVICEPSGGYERALVQGLARARVKISLVQANRVRQFARAAGILAKTDRIDAELLCEFGKVMRPQIVTAAKLEQEHLRELESQRRHLTHLLVMELNRGARLSDASVQRLNRNLINQIKKQIEQLDLLIKGHIDQSPELSAKAAKLTSISGVGARTAALLLAQLPELGELNRREIAALVGVAPFNRDSGRMRGKRAIYGGRKPVRHGLYMAALVAAHHNPILRNFYLRLRAAGKPAKLALTATMRKLLIVLNSALKTDLSYA

SEQ ID NO: 183582 - protein, 338 aa, unidentified
MPITTVGIDLAKNVFELCGLDADGEVVFRRRVRRETLLKAVGELPACIIGVEACTGAFYWQRRFEELGHEVRIIAAQHVKPFARRQKNDRNDAEAIAVAIRQPRMRFVPKKTIEQQDIQTLHRARRRLVNHRTALVCQMRGILLDRGIAFGQSITRARRMIPEIIADRSNELSDMCRDIIASLLAFMHEIDARIREFDRRIDQVFRENRACQRIAKIRGVGPKTATAVIAAVGTGRDFDNGRHMAAWLGLVPRQHSSGNRRVLMGISKRGDRHLRTLLVHGARAVVRTAAGKTDRFSLWVNDLKERRGTNRAIIAVANKNARVIWALLNSGEEYRPAV

SEQ ID NO: 183583 - protein, 312 aa, unidentified
MTSKIYVGIDVSKCWLEVRVHGTAESKKIGNDAEGLAALVGEMKAVQPQLIVVEATGGYERRAVKALNESGFGVAIANPTRVRRFAEAIGVLAKTDKIDAKVIAYFASVVKPAVNSRRTALEEQLAAFVERRRQLLVEVVAEKNRLSTSSACVREGIEEHVAWIEEKVAQLEAKIQACIIENHNWQTQIEIMESVPGVGPITAATLVAELPELGQLSNKEIAALVGVAPFNKDSGPKRGKRRISGGRSGIRRTLFMSALSAIKCNPVIRPFYESLLKRGKEKKVALVACMRKLLVFLNAMVRKSEAWSPPSA

SEQ ID NO: 183584 - protein, 347 aa, unidentified
MHYMGVDHHRQYSQMAVLDEEGRLVRTARVANLRREIKPFLDGLDEIRAVIETGRATYAMVDLLEDLGVEMTIANPTQVRAIAQAKIKTDKRDARILADLLRAGLIPAVYQRSRTNRDRQQVLRQRMFYVRMQTMIRNRVSALMARQDESVQMKIGCLKDLFTRKSREVLRGLRLAEPDRSLLDGLLQTHDHLTEKIGESNVMVRGLYREMDEAKRVSTVPGFGVFFSVLVTTEIADIKRFAGPGKLHAYAGLVPSTHASGERMYHGKIIRAGNPWLRWAAIEAAWTAIKHDFDLQLRFERMARRKTRSSAAVATARRLLTIIYKILKENRTFIPYLRNESAAFKHS

SEQ ID NO: 183585 - protein, 316 aa, unidentified
MKTEVFVGIDVSKQHLDVAVRPQSRHFIIPNDDRGLKQLLKRLTALKPQLIVLEASGGYELLATAALAEAQLPVALVNPLAVRQFAGATGKLAKTDKIDAQVLAHFAEAVRPELRPLPDQEQQLLKAALQRRVQMVQMIGQEKNRLEKTFIPALRQDIQAHLAWLQQRLAQLDRDLNDQIRRSPLWRDRDRLLQTIPGIGPAVSRAVMAQLPEAGRLPGKKAAALVGVAPYNRDSGRFRGKRMIRGGRSYLRRMLYMAAVVAARWNPVIRTFYQRLLAAGKPKKLALTACMRKLVLILNAMLKNNQPWNQFINQVP

SEQ ID NO: 183586 - protein, 343 aa, unidentified
MAQPMIIGIDLAKHVFQVCMVTPQGTLKTNTTVTRGKLFTLMARQPPALIFMEACGGAHDWARRFCALGHEVRLLAPQYVTPFRRGQKNDPNDALALTEAGQRPNIPTVPIKTIEQQDLQALHRVRERLVKHRTAVVNQVRGLLLEYGIVIPQGIARLRKRLPRVLEEADNGLSFQMRDLLQSLQSELSALDTRITDITGQLARLSHEMEACQRLQEMEGIGPLSATALVAALGNGHDFQTGRQVAAWLGLVPRQHSSGGTTRLGGITKGGNSYVRRLLIHGARSVISHVRDKPDAKSAWIRQLVTRIGVNKACVAVANKMARVAWALLHTGEHYRKPAVLSL

SEQ ID NO: 183587 - protein, 343 aa, unidentified
MKSTLIGIDLAKHVFQVCALNRAGKVMLNEAVKRPKLLHFIRQFEPTTIAMESCGSSHHWARRFRNLGHTVELIPAQHVAPFVRGGKSDARDALAICEAAQRPGLHRVPVKSLEQQDLQAMHRLRQLYVEQTTATANQVRGIAREYGVFFSVGLRPLIKQVPEALESADNELTDTARALLAERMADLNTLRERVLSVTRRIVQVSSAHPAFERLQALPGIGVLSASAYLNTVGSGEQFKCGRQVSAWLGLVPRQYGSGGQLQLKGITKSGDRYLRGLLIHGARAAISVTKDRESPLIRWAEPIVARRGFNKAVVALANKNARIGWLIVARDAQYDSSKAFAPA

SEQ ID NO: 183588 - protein, 345 aa, unidentified
MNRGDASKIQGCDFHPGWQQVAVLDSETGEIRELKLENGNGEAERFYRELSSPARIGFEACGNTQWFEDLLDRLGHEVWVGDAAEIRASYVRKQKTDRRDAAHILKLLLENRFPRLWRPSAGERDLRQLLMHRHKLVGIRARVKNGLQHLMLNRGMQMKRKLWSEAGQKALRTLPLEGWAAQRRQDLLNLLSHLDPQIRQLDDAIERAAQQNPRAQLLMTQPGVGPVTALAYVLTMGDVSRFQRGKQVASYLGLIPSERSSSHRRRLGSISKQGNSFMRMLLVESAQTVTRLDEGFRKQYQHRCHRMAKGVAKVAAARRLAVRLFWMLRRNTAYPEIAYIESSPR

SEQ ID NO: 183589 - protein, 339 aa, unidentified
MVEVYVGLDVSDKSTHLCVVDGSGGVIWSGACATDPEVIAKTLKSRAAGLVRVVLETGPLSAFLYHGLAERGVPATCVCARHAKGVLSARVNKSDPHDAEGLAQMARTGWFKAVRIKAEATHMDRARLKIREQLIASRRAMAGQLRGLLKLFGLRLGQVTTPNKRRERLTALFLQKPELEPILAPLVESLEALEAQIARSSKQLAAQAAADPVAQRLMSVPSVGPITALVFKTSIEDPGRFARGEDAGAFAGLAPRRNQSGERDYKGRISKAGDPMLRSALYEAANSLLVRVKRPCALQAWGKRLAETKGPKRARVAVARKLAILLHRLWASETEFRWA

SEQ ID NO: 183590 - protein, 407 aa, unidentified
MRKPNDLSRSLTVFDGDKTLIAVIEMSLTSWLVAGIVPGVERQPLKKLAVDEGALLKLLDRWRIEAEKAGHRIQRIVVAFEAGRDGFWLARWLRARDIDAHVIHASSVAVPREHRRAKTDRLDTELLKRAFLGWLRGERDHCKMVAIPTIKDEDAKRPNRERASLVGEQSRIVNRMKATLVRLGIRGFNPKLKKAAERLSELRTPEGEPIPPNTLAELRRDMERRRVVSNQIKQIENDRLERLERSPGDGPNAMVHLLARVIGVGIETANMLVHEVLSRNLRDRRAIARYAGLTGAPDESGKRRREKGLARSGNARVRRGMIQLAWRFLMFQKESALAQWFRARTAKARGTRKTMIVALARKLLIALWRLAHEGLVPDGVILRPAQGTQVAEATQQFRPCPHASSGR

SEQ ID NO: 183591 - protein, 390 aa, unidentified
MRFFVVPPQNGNIKKRLPSKDVKKGLKSRDIFGSQGSNGIVNCKQLPSTLEGGLMKKYIGLDVHSSTCSFCVMDGNGKIIDTATLSTNGRLLIGYLRGIGGKKKLTFEECELSSWLHEILRKEVDELIVCNPVENKGYKKAKTDKLDAKKLANLLRGNYLKGVYHDGTLREKFRDMMSGYQDLVEDAVRMKNRYKSLFRKTGNRIRGQKVYNDENFLEGLKRKDFRFIGKQMYEMLEKMEESRRIYETEIKKSCRKFKEIKYLKTIPGIGDIRAAGIVAQVVEPGRFRSKYKYYSYCGLVRHRQISGDRSYGDKKIWGNRELKCIYKMAAKSALQGDNGLRKYYDRLREKGTGHKNAQNAVSRKIAAISLVLWKKGETYREEMITNDLIK

SEQ ID NO: 183592 - protein, 393 aa, unidentified
MRKPQKQKKPLNDLSRSLTPFDPNQTLTAVIELSKESWLVAGVIPGVERQPLKKLAPDQNELLKLLERWRAEAEKAGHKITRITVAFEAGRDGFWLARWLRARGIEAHVIHAASVAVSREHRRAKTDRLDTEQLKRAFLGWLRGERDHCKMCAIPTSAEEDAKRPHRERETLVGEHTTIINRVKATLARLGIRGFNPKLKKAPECLGHLRTPEGEPIPPNTLSELQRDLARKRFVAEQIQQIEKARLEQLKRAPKTGPNLMVLILMRVIGIGIETADMLVKEVLSRNLRDRRAVARYGGVTGAPDESGKTRREKGLARSGNARVRRGMIQLAWRFLDYQKESGLAKWFRSRTENAPRLRKKMIVALARKLLIALWRFVRDGVVPDGVVLRPAH

SEQ ID NO: 183593 - protein, 419 aa, unidentified
MKNIETKKVRVINKETLIVTVDISKVTNVGYCRCPNGIEVKPFSFMNNTQGFNTFWCRIVKTKNANNLKDVVVGYEPTGPYGEPLTHFIRKKKVKLIQINPMHTKRVKELDGNSPNKTDQKDPKVIADIIELGHALTIVQPEGSAAELRRLTHARERAMRRRTAIFNQLQDLVFVIFPEFSQVFKDVKTRSARFLLENCPTPEDIIKYKLKNLTITLRKVSRGQLGEERARELYAAAKSSVGVREGRQSILFEIKEILSIIETTESFVTEIEKEMSHHLEKIPYSKFILSIKGIGDITVAGLIGEVGDFREYKTISEILKFAGLDLFEISSGIHKGQRRISKRGRSLMRKLLFFASINVVHKGGIMHEYYQGCLARGMLKMKALTAVSRKLLGVIFALVRDHSEYIGNYAVEQELKKAA

SEQ ID NO: 183594 - protein, 364 aa, unidentified
MTKERYYIGMDVHKDSVQMAVFEQTGEEPIYERKLNNDPALLAKEAKRFGQKGETEAAYEAGCLGYVIQRAFEKAGIACHVLPANKVAKKRDSRIKTDKRDARLIGRELRSHSIRPISVPEEIDEAARDILRCREDLGEDLRRAKQRLLKFLVRHGHIYSAGGNHWTAKHRQWMGKVQFGHEYEREVYEEYKSHIESLEERLERMNLKVKEVAESPRYKKAVGRLRAFKGIDYVIALALVCEIGDFRRFASAKSFMSYLGFVPSENSSGGKRRQGGITKAGNGHLRKLLIEGAWHYARGGQTGKRLEQRRVGCPIDVIDTADRALHRLHKKYLRLVMKGKHVNTAVTAVARELAGFIWAVQVSA

SEQ ID NO: 183595 - protein, 355 aa, unidentified
MDPKKYIGMDVHQASISVAVRDAAGKLVSESIIETKATSILEFVRGMRGSMCITFEEGTSAAWLYDLLKPHVTKVIVCNPRKNALLNAGSKNDRVDARKLSDLLRAGLLTPVYHGENGVRTLRELGRSYITITKDLTRVMNRLKALYRSWAIPCPGAKVYSRRHRNAWLEKLSEGGVRRRAEQLYQQLDALRKIRQEVRAELLAESQKHPAHQLLRQIPLLGPIRVALLIGLIQTPHRFRTKRQLWAYCGLALQTRASGEYRFNAGELQASKKAPALRGLNVNHNHDLKNLFKGVAMNVSTSTDPLADFYRNLLAKGMKPSLARLTLARKMAAIVLAVWKKGVGFDPGELKQNAA

SEQ ID NO: 183596 - protein, 316 aa, unidentified
MFIGIDVALKHLDAAATEVAARLPHRVPNTPEGIARLVTALGAVAPDLVVLEATGTYHLPLLAALLAAEVPVSVANPAQVAAFRQSRLGRHKSDRADAQLLARFAQLHHAELRRATPDEPELAQLRALVGYRDDLVAQRTAARNRRHAAQWSASGPVVAWLEADLAAIEARLREVEATITALLATRPETVILTAQAGVGLMTAAAVLAYLPAGVLGNPKAAAAYAGLHPRHEQSGQRDHSRLSKQGSPPLRRYLYLAAMSAIRYDPEIASWYHCLCARGKAAQSATCAVAHKLLRRMMGRIHALRQQRPVILPLAA

SEQ ID NO: 183597 - protein, 342 aa, unidentified
MQITTIGLDIAKNVFQVHGIDATEKVVVRKQLRRSKVIAFFEALPPCLVGMEACASAHYWARELRKLGHKVRLMPAKDVKAYVKRNKNDAADAEAICEAVRRPTMRFVQVKSAEQQGGLMLHRTRDLLMRQRTQVINALRAHLAELGITAAQGREGLKELLKIIASDADERLPADAHASLVVLAAELQAMQTLIGSIEKRITAQHRGNEASKRLETIPGIGVIGATAIAATVTDPTVFRSGRDFAAWIGLVPRQDSTGGKQKLGPISKQGDRYLRRILVVGAIAVLRYAKQNPEKYPWLTQLLARRPFKVVAVALANKMARMAWALLAKGGTYRAPALAAAA

SEQ ID NO: 183598 - protein, 328 aa, unidentified
MIYLGIDVSKLKLDCTLLLDPENDKRKSKVVPNSRDGVHELVRWCAKHGVGADQAHAVLEATGPYHEQAATTLHDGGIAVSIANPASVHDFSRAMAMRSKTDALDSLVLARYGVAMRPGAWQPPPAHVRELRALITQLDALSKDRLRTMNRQEKIEASSASELVERSISDTLSFYDKEIARLEKAIDDHIDRHPDLKDDTKLLSSIPGVGPKVARTMLRVMRTHQFKCAEDLAAYLGLVPVRRQSGTSLRGRSRMSKAGPADVRAKVYMAGVVASKHNPHVRALYQRLLAAGKTKMSALGACMRKVVHLCFGVLKTRQPYRPDYAFST

SEQ ID NO: 183599 - protein, 407 aa, unidentified
MEILHPRCAGLDVHKDVVVAAVRCVSMPTHQEVRSFGTTTKELQALSDWLESHGCTQVVMEATGVYWKPVWHLLEGNFELVLANAQHVKNVPGRKTDVGDASWLAELLAHGLVRGSFVPPAPIQELRDLTRSRKQLVRELSQHVLRIQKVLEDANLKLGSVLSDITGKSGRAMLAAIVQGETDPEKLASLAQGNARKKKAELIEALRGRVTPHHRKMLKLHLGLVDTLQTAIDEVDVSVGKALEPIQARATLLTTIPGVSDIVANVIVAEIGVDMSRFPSPGHLVSWAGLCPRSDESAGKRRTTRVRKSGTWLKTMLVTAAWSAVRVKDSYLRAQFLRIKSRRGAKKAILAVAASMLTAVYFMLRDDKPYADLGSQYFDRHDKGKTIGRLVRRLQDLGCEVEIKPAA

SEQ ID NO: 183600 - protein, 467 aa, unidentified
MVVPNDEPSKPKKSRRKSLPVPVPASSAPLNVINPDAAGIDVHSDMHMVCVPADREAEPVRQFGANTADLQEIVVWLKECRVKTVALESTGIYWIPLFELLESEGFEVYLVEPGQLSRCGARPKTDVLDAQWIQRLHSYGLLRGSFRPPNSVLALRAYWRQRQMQVRYAASHVQHMQKALEQMNVKLAEVVSDITGHTGMSIIGAILDGERDPIKLAKLRDERCHHSEDQIALALQGTWRPEHLFELRQARALYQFHHEQITECDQQVQAELAKFSNRAGEKTRTKKPRTRGRKSNDVRFDAKGPLFQALGVDLTLIEGIDVGTALVILAEIGVDVSRFPTEKHFASWLRLCPPQDQSNKTKKRRGHRKGTNRVASALRMAARSAGKTMSPLGLFYRRIRSRIGGLGAVKATAHKLACLVYRMLKYGEEYVIQSMEEYEAQMKAKVLYSISRRAATLGFQLVPMPAK

SEQ ID NO: 183601 - protein, 368 aa, unidentified
MDSPFADGIECAKLEESTTSNQHKGGVIMKGTTMGIDLAKNVFEVYVEAESGAVIERKRLSRKKLLSWFANRPPALVGMEACGGAHYWARELEKLGHTVRLMAPQYVKPWVQTNKSDQADARAICRAMQEPGMRFVALAGEAQQAVQAVHRVRSRYLGNRTALVNQIRGILLEYGVAIPQGVGAVRKALSLLLTEERWSPLVRQFLLEQQAELTDWDTKIEVVTARIKRENATQPICHRLEQARGIGPLGASALWVKAAGQPYQHGRHFAAALGLVPKHTGTGGKIRLGGISKRGDRYLRQLLIHGARAVVRQVGEKPDRLSEWIRRLVARRGMNKAIVALANKNARMAFALISKDQPYDVAKMCEAV

SEQ ID NO: 183602 - protein, 415 aa, unidentified
MALKIVYKICCGIDVHKTFVVACIASTDKHGVTSYERHRFSTYTKGLKNLLQWLLEHNCKDVCMESTGKYWIPVYNILEKDCSIVLAHPKYVKAIRGKKTDKKDAKWIADLFKHDLVAGSFMPPADIRQLRDLMRYRFKLTCFKSSEKNRLQNCLTVSNIQLGNVVSDTFGKSAQAILDKILENPADTSFDLEPLVFKSLKKKLPELRDAIDGYITTEQAGKLKVIKAHYENLESRKAELEELILALAAPYQQEFAILQTAPGISSDFTAIGIISEIGTNMEAFPSAKHLCSWAGLTPTNNESAGKKKSVRVSKAGCYIKPLLVQCANAVVKSTKHPEMRNRYLRLKKRRGHKKAIIAIARMLLTALYHMLKNGENYNAELYQKSDLLPVDREITVEQALMIARNQGYKIKSATA

SEQ ID NO: 183603 - protein, 343 aa, unidentified
MEAITTVGLDIAKSVFQVHCVDANGDVVLRRQLKRRYVLTFFQKLPPCLVGIEACASSHHWSRQLQALGHTVRLMPPAYVKPYVKRQKNDAADAEAICEAVTRPNMRFVPTKTPEQQSCLTLHRTRHLFIRQQTAIINSIRACLAEFGIVAPVGRKGVEQLLEVAANVDDTRLPEVARACVAAMGAQLMALKAQILAFDRRIMAWHRSNETSKRLDAIPGVGPALATALVASIADPKAFRSGRDFSAWIGLVPKQNSSGGKDKLGSISKQGDRYLRSLFTTGALAVIRYAKIHGTKRRPWLTALLARRPTKVAAIALANKIARMVWAMMTRGERYKEPVALAA

SEQ ID NO: 183604 - protein, 429 aa, unidentified
MNSTQNKKIDQVKETTMIVGIDVGSEKHYFRAFNWRGIELTRKPVAFSNSMEGFNSFYNTIVELMQKRELEEALVGIEPTGHYWFDLGQFMGEKNIKFVMVNPHHVHKTKELDDNSPSKNDRKDPRVIAGLVRDGRYFYSYMPTGVYAELRNASNRRFVLVEEQTRAKNRLQKWIAVYFPEYKGIYTHIDAKGGLLVLKQAPTPEEIVRLGVEGIIKIWKDAKLRGNGHKKAMLILNAAMKSIGLKSGLTEARMEIQDLIEDYELQTKRLERVNDLIKELCQQVRYADKLLEIKGIGITIVAGFIAEVGDITRFDSTKELQKLAGLELVSDSSGKHNGKTKISKRGRKRLRYLLFEAAISVVGKNEEFKEIHSYYTTREKNPLKKMQSLIAVACKLIRVFHVILTKGISYDASKMLKDIRHQGEQLKAA

SEQ ID NO: 183605 - protein, 403 aa, unidentified
MEGPLISLDVSKGKSNYRFFENGTDRKGKKGVIRHDIQGFDSIRDEAEKMEKRLRIKPSVIFESTGVYSDVVEKYFTDKGFDVYVISPLLSASMRKEGVRPAKNDSLDTLSIAKVFYSRDDLRKCSENDKNAERLREMSYELDMMNRRIRPMKCQFLRLLDKVWPCLDEVSDYSSRFMLDFIIAFGHPENIKTVKGVLSVIRKSEMGTAGRKDKIAQDLFDYCHTHLSAVSKDSSYVELLKRMAIELKAMAKKKSELIDRMAEEARNKDEFARLLTIPAVAKTTALKIMARVGDISRFRNAEALVAYCGLDPRVYQSGKMTGEHRTITKKGDCILRSTLFLAVKLMVMLYPDTKVARFVAAKAKNGLSYKQAVVAGSAKLARIIYSMLTHHENYVEFNADIVA

SEQ ID NO: 183606 - protein, 339 aa, unidentified
MSKRSIQVQETMCCGIDVSAKSLTVAIQRVHQPIEQKSFPNNLNGHRALIVWLRKAKSPIRVSLEATGIYSLDLAFALDAAEGIEVAVLNPKVANRFAQTMRRSKTDAADAEVLAEYTHRMPFRAWIAPSANSMRLRAIVRHVETLSVQSAQNQNRLHAAHGSASTPGCVVQDLKRSVASLELRIRSLRRKAMTLVRQDDLLRKRYELLVSIPGIAQVSAMQLLAELSTLPSDLTVREWVAHSGLDPAHEISGSSVRKASRISREGNRHLRRALYMPALVASRCDPHAKAFFESLLARNKARLQALIAVARKLLHAIYGIFRSGLKYEGTKLFPRITLS

SEQ ID NO: 183607 - protein, 426 aa, unidentified
MLKSQIQKIESITPEVMIVGIDVAKKKHWARIFDYRGLELTKGFSFKNNIEGFNRLVGKLSEIKEEKGLEKIIVGMEPTGHYWKALAWFLKEQGVTVVLVNPYHVKQVKELDDNTQTKNDPKDAMVIARLVKDGRFSYAYLPEGIYAELRVLSTMRQQIRAKLNSAKNALVSILDEYFPEFTEVFKNLDGKAAMHILYHYPFPQDVRELGVEGILEEFKKATKRAVGQKRAEKLYEAAKRSVGVKEGLAAAKIKIRLCIEEIRFFKKQLEEVEREMAVRLQETGIGRYILSIPGIGIVTAAGILGEIGDPSRFESWKQIRKYAGLNLIEDSSGERKGKTRISKRGRAMLRNLLYQVAVVMVSKNKEIKALYTYLKTRRENPLEKKQALIVVAVKVIKIIFTLVKKKEEYDGKKVLGIFRERQIQAA

SEQ ID NO: 183608 - protein, 389 aa, unidentified
MYYVGIDVSKYKHDCFIVTSDGEIIRDPFSFGNDHDGFQALLSALSSLGDRENIRIGFEATAHYTLNLKLFLENAHYSFMEFNPVLLAKFNKSQTLRRTKTDAIDCAAIARWLMTVEYKPYPTGFYHAYSLKSLTRLRDSLVRQRSFYLVKITNVLDHTFPEFKPFFGNRFSKTALYLLENYGTADKMSRMNSQSYENLRRISRGKFSTKKFLDLKSLATNTVGESNEMFDAQLSSLLSLYRSSAKEIDSLEQQIIDLIYQVNPRSLSIPGIGPLSAAVIYAEFGDISKYSSPQKMLAFAGLDPGYYQSGTSAHGGHMVKRGSSYLRFTLMNLCIPLTQYNVVFAEYYAKKRAEGKPHRVACTHMVKKLIRIIYALETKGIDFDPEKLR

SEQ ID NO: 183609 - protein, 353 aa, unidentified
MEQFIGCDAHKKFSVFVAVNEKGHAGEALRVAHDRQLYREFLARLPAHSAIAVEASGSYGWLIDEMERLGHRPRLCNPLEAKRRMGLTNKTDKLDARGLAILLRNGTLPEVWIPPSELRDQRELLRLRIFLVRLRTRVKNRIHGTLARHNVQIPGADLFGVAARRQLELRLPELPEHSREAVEQELVTLDFLETQIESAEDRLESIMQVSVEADLLKTLPCVGPILSMVLMLEIGRVDRFPTAAHLASYAGLVPRVHSSGGHTRMGQVYGNVNRNLKWAFVETGNLIVISQRRLAGTHVVRLYQRIKRSKNHQKAVVAVARHLAEAAWWVLTRQEVYREPLGSRQQALSSTHG

SEQ ID NO: 183610 - protein, 391 aa, unidentified
MSMYFVGIDISKYKHDCCIICAADQLVVSKFTFKNNKDGFSELLTALHSLSSPEDIRIGFESTAHYALNLELFLEKAHHSFMEVNPVLISEYKKSTTLRRTKTDRVDSESIARWLMTVEYKPHSKGFYHAYSLKSLTRLRDKLIRQRSFYLVKITNVLDHTFPEFKPFFNEHFSKTALFLLENYGSAEKMARMNAASYEKLRSLSRGKFSPQQFLALKSLAANTVGVNNSIFDTELNSLLTLYKATAAQISILENQIIELIEEVHPHYMSIPGIGPLSAAVIYAEYGDISNFSKPSQMLAFAGLEPGVNDSGTESHGGRMVKRGSSQLRYVLMNCALPLIRFDMTFAAYYARKRAEGKPHRVALSHVVKKLIRVIFALERQNTDFAAQALR

SEQ ID NO: 183611 - protein, 455 aa, unidentified
MMKKRQRKKGKSVKVLHQIQPDAAGIDIGATEIYVAIPDDHRASETIRCFGTFTQDLHETARWLQSCEIKSVAMESTGVYWIPIFQILEIYGFEVLLVNARHVKNVPGRKTDVQDCQWLQYLHSVGLLQGSYRPAKDVCAIRALLRHRDSMVKISSTHIQHIHKALTQMNLQIHNVISDITGLTGLAIVDAILAGEHNPKKLATLKHGRIKASVSVIEKSLEGNYLPEHLFTLKQALQSYRHYRQIIGACDKEIESYLIDFESRIDPEKNPPPLPRIKKSKPKGNEPDFNLHSHLYRIFGTDLTQVDGVSVLTAQTIFVEIGPNLSKFPTVNHFCSWLGLCPNNKISGRRILASKTRPGSNRAAQAFRLSAHALWRSQSYLGYYYRRIRARHGTPKAITATAHKLARIIFHLIQTGKTYDETVFADQEILHKQRLERNLKKQANFLGFQLVPCVA

SEQ ID NO: 183612 - protein, 318 aa, unidentified
MPQGTCVVGLDVAKRKVDACIRSMRLRLSTPSTPEGEAQLVAWLRANRVGLAVMEASGGYERRWAEALRAAGVEVRIVDPKRIRHFAKAAGRLAKNDPIDADTIAWFAEAFPDADPQPHDAAREELDRLVQARAALKDEEDRIKQQCEHRPPPIVAQALAAVAKAIRAERRKLEAVIAARIKANPAFARPAEIIHSVPGLADQTAAGIIAWAPELGRISNGAAAALIGAAPYDDDSGGRKGARHIKGGRRKLRNLLYMPVMGAATQHNPVLKAYYQRLRAKGKEAKVALIACMRKLIVILNTMLARDETWSPPPRAAA

SEQ ID NO: 183613 - protein, 340 aa, unidentified
MENTQIKQIQYPHVVGIDISKMSIDVAIIDTNALKTNTALFSNDSEGFQKMKKWIKQHGNDCGENILFCMEHTGIYTRNIVKYLLKRGCKVWLESSLHIKRSMGLVRGKSDKIDAERIAKFAFDHQRDAKLVKLSHPTLNRLKDLMKTRVRLQKSLLSQSVAISELTKVDKKAGGEIERMSRDAISGLKKSLAKVEAKMEELVSIDKELRALYELVTSVKSVGKVLAVDLIVYTEGFTRMLDNRKLACYCGVAPFEYRSGTSVYATPGTSSFANKQLKHHLHMCAMNAVKCHKELRDYYMRKTENGKSKMSALNAVRNKLLHRVVAVVKRGTPYVEKIEK

SEQ ID NO: 183614 - protein, 386 aa, unidentified
MTQPNDLSRSRIPFCQESTLIVVVDMSQSSWLVAGIVPGIERHPLKKLDPDEEALLQLIQRWRDEGVKVGRPITRIALAFEAGRDGFWLARWLRTRGIESYVIHSTSVAVPREHRRAKTDRLDSELLKRVFIGWLRGEPDHCRMVAIPTLEEEDAKRPNRERENLIGERTRIVNRMKGCLARLGIRNFKSTLRKASKLLATLCTPEGRPVPPNTLAELRRDMARLRFIMDQIQEIERTRLQGLKQSPEKGPHAMVRLLARVIGVGIETADMLVHEVLSRNLRDRRAVARYAGLTGSPDESGRKRREKGLAKAGNSRVRRGMIQLAWRFLMFQKDSSLARWYRARTEGAPSTRKTMIVALARKLLIALWRLVTTGELPVGVTLRPVA

SEQ ID NO: 183615 - protein, 317 aa, unidentified
MAAMICGVDVSSISLDAAIGWQGTEGRFENNPEGVAGLIAFCQQHAVDLVAMEATGGYERLAFGLLWGSAIPVALLNPRSVRRFAQGMGLEEKTDRIDAGVIAWFAEVKKVVPTPPASAAQARLEALVTRLRQLTELRAAQRNQRLLVSQAEVLAGFSELVALLTAQIRALETAIAELIAADPLWQQLDAAFRSIKGVAGRTVSRLMAEMPEIGTASNKAVSKLAGLAPLAQDSGKTKGKRLVRGGRGNVRTILYVVADIVRRYNADFAAFADRLRAAGKPKRVIRIALAHKLLVRLNAKARDIRLRYASAPCCQTC

SEQ ID NO: 183616 - protein, 326 aa, unidentified
MQGKESSEQKTKVKSSAGIDVCKSWLDAHALPEGCSLRVANDARGHRQLKKWLTEHDVSLVAIEATGKWHRQVHRMLHGSGFGVAVVNPLRARLFAEAIGLLAKTDRLDARMLALLAVSLSPPARPPMPEAVEALQELIAGRSGAVAEQTALENQLAAANTTFLRRQLKGRIDRIAKDVASLQTEIERRIGCDQALARRYAILLSIPGVGPVTAATLIAGMTELGTCSAKQIAMLSGLAPLADQSGARDGQRAIRGGRAAVRRVLYLCALSAKRCNPAMTAIYNRLIDAGRPHKVALIAIARKLIVLANTLIAQNRPWQSQPPIHA

SEQ ID NO: 183617 - protein, 311 aa, unidentified
MASFLGIDVSSLSLDALVRPQGIKISVRNDPAGFEELVKSLRGLSIKRVLLEATGGYERDVMRFLQNASYKVIRVNPKRARWFADSLGIKAKTDAIDAAVLAHFAEVIPDKPTLKTSPERALLRELLQQRDRLVQQRDDDRRRLKQAQSAMVAIFLKTNLQHFASQIKLVEQAIKRQATVLNDERIAKLDEVKGIGMVTATKLVALLPELGHVESREIASLVGVAPFNHDSGKSVGKRFISGGRFEVRRALYMACLVAVKHNPTLKARYEALRGRGKLAKVALVACMRIFIVRLNAMLRSGTPWRDDLPQP

SEQ ID NO: 183618 - protein, 450 aa, unidentified
MSPLALDVVTKTGKTPVLGRMLSKYVGRKTSSIENGITKARNHSRQRGNIMRVVFGIDVSKASSEVAILVNGEKVHGYTIPNDAIGFNRLLGDLKTVHQPEIVFEATGVYSRRLQAFFEDNSYTYTRLNPLESKKQLDSLRVRKTDKIDAEKLAMSQFILNRKPSYVQEALYQELRDLSRFYQNLTEDIVCAKNRLHKVLQITFPELENILSAPTGEQYWNLVITFPCNSFVLESDDATLTAIIRQSTAKRISEKRVTYLVDKLTKLANQSYCAVKKTSPVIEEVKYYAGELLRLSEHRQGVVEEMVTLAQSLPEYEILLSIPGIAETTATSIIGELGDIRRFHSANQINAFIGIDLRHYESGNFLAKEHITKRGNPYARKILFKCIHNIASASHTNPCHIADFYEKRKRQSQVTSTKPHTIASIHRLIRTMYYLITHNKLYDYTSTQNR

SEQ ID NO: 183619 - protein, 377 aa, unidentified
MSMYFVGIDISKYKHDCCILSAVDQNVVTKFTIKNNKSGFEQLIKTLHSLSNPEDIKIGFESTAHYALNLELFLENAHHSFMEINPVLIKEYKKSTSLRRTKTDSVDCESIARWLMTVEYKPHSKGFYHAYSLKSLTRLRDRLIRQRSFYLVKITNVLDHTFPEFKPFFHERLSKTALYLLENYGSAEKMARMNAASYEKLRSLSRGRFSPQQFLQLKELAASTVGINNSIFDVELNSLLMLYKSLVKEIGTLEAEINKLIEEVHPHYMSVPGIGPISAAVIYSEYGDLSNFSTPAQMLAFAGIEPGINQSGTESHGGRMVKHGSSQLRYVLINCCLPLIRFDMTFAAYYAKKRAEGKKGFNSENVDFVDDYSINLR

SEQ ID NO: 183620 - protein, 393 aa, unidentified
MLFVGIDVAKSHHDVAVLDDNGLVVLRHLRILNNRQGFSTLHQFLIQLSADTNDDIRIALEATGHYHLNLLLFLQSNAYPAFAYNPFLIKEFARTLTLRKTKTDKADALTIAKKLATDLSPDRFKPNFNMQELKFLTRHRNRLTDTRSKLKTQYIRLLDILFPELAGFIGKTNLHHQYVYDLLTKYPSPAKLSRAHTNALVKLLHNHGNRLDMAQQLKALAKQSIGLSSPANAFELVQTISAIRLYDEQINAIDQEIAQIMNSLDEAAIVTSITGISNRLGSVILAEVNNINNFHSPDQLLAFAGLEPSVYQSGQMSATGKMVKRGSTSFRWALFQAAEYASHWSPTIHQYRQKKLGEGKHYYVVMTHVAKKLVRIIYYLLKHHQYYDESKLI

SEQ ID NO: 183621 - protein, 347 aa, unidentified
MNYIGVDCHISSLDFAVVNEKGTITQKAKVNTGVKEFMVFVKSIPKPRKIFIEEGELAGWMLETSLKFGEELIITDPKINKWIGKAGQKDDTIDAEKLARLARGKYIKEIYHPVSNRRRFKELVFAYHDTVKSQTRIKNKIKANFRRNGIRCSGDTVYSDKYRDKWREKLSKNKITHLIVEELWVQLDQLRECKEKLKRNIRIRSKQYPEIKRFMKLPGIGLIHASTISAIIETPHRFANKKKVWMYAGIGLMERSSGEKVYSRKLTREYNRPLKNAIKKAAEAAISAEDNQFRRQYLRLTIEKGIASHKAKLTVARSMLAALYGMWKKGEEYDREIDKKREKGNKK

SEQ ID NO: 183622 - protein, 328 aa, unidentified
MNETGKVKLRRKLRRSDLIAFFEKQERCTVVMEACGAAHHWARILSGLGHTVKLIAAEAVKPFVKKGKKNDAADAAAICEAASRPDATFVPVKSVAQQGILALHTTRSLLVKQQTMLANAIRGLASEFGLVVPKGLHNLEPLVALVEADEAVPAQARRAIAELYKRCGELATGIQAFETAIVAHARSDATARRLATIPGIGPITASLIAATVVDISRFKTARQFAAWLGLVPRQNSTGGKTRLGRITKAGNREIRKLLVLGATSMVGRAEGWHSAVGSWLRAILQRRPVRLVTVALANKMARIAWSVMTRNEVYRPQGGVAAKAQAAE

SEQ ID NO: 183623 - protein, 291 aa, unidentified
MVVFGVDPHKHSHTVVAVDEASRKLGQLTVSSAQDGQLRLLRWARQLGSDRRRWAVEDGRHVAGRLVAQLLGAGEAVVWVPPKLMAQTRASGRTRGKSDPIDALAVARAALREPGLPAAQLPGAALAVRLLVDHRDDLVAERTRMINRLRWHLHALDPELAPPVRTLDRLWVLDRLAGQLAGLEGVRAQIAVELVAAVRQLTGRINQLERDLATQVAPLSGQLRQVVGVGALTAAKLIGHTGGVGRFGRSARFAMHAGVAPIPVWSGNQTRHRLNRGGNRQLNAAIHQPER

SEQ ID NO: 183624 - protein, 349 aa, unidentified
MTEHLPGVEYVVGVDTHKASYTAAVVSRAGAELEVATVASDAFGHQRLLAFAQRLGPGQRLWAIEGTGSFGRGLTSFLLEHGEAVAEIDRPARPARRNGAKTDALDATRAAREALVRPYLSQPRRRGAREALRVLVRTRTTAVRARSIAICHLKSLIVTAPAQLRDQLRHWSDLRLAPKCARLRTALHHSPEHRATIAAIRSTARRILFLEAEAEDHASAIELLVQQIAPRLLAERGVGPLTAAELIIAWSHPGRLRSEAAFAQLAGVAPIPASSGQVTRYRLNRCGDRHVNCALHQIIVARLGHDADTKRYAARRTEEGKSPKEIKRCLKRFLARRLFRLLEGSAVAS

SEQ ID NO: 183625 - protein, 436 aa, unidentified
MAKIVNPNAAGIDISSKDHFVAVPEEKSKQVKCFGAYTRDLHLLAKWLKACEVETVAMESTGVYWYQLYVILLDYGFEVYLVNSCHFKSVPRRKSDVCDAQWLQELHSLGVLRGSFQPDNLTRTLRNYVRHRKMLVKQMSRATQHMQKALEQMNIKLNNVIRDITGKTGMAIITKILEGERDPDILSNYRDGRIKATKEQLIKSLEGNWREDQIFSLKLAYQHYMFLQSQLRECDRESEKVIAQMSDHNVATKQIKQPETKKNQPRFNVSQHLYQALGVDVTRIYGFKQTTALTVFSETGSNLKDKFPTQKQFQSWLNVVPNNKISGGKIISSKVKKKKNNAGQAFREAANTLWNAQNPFGEYLRKKKAKSGSGQAIVATARKIAAVYYKMVTEKVEFDPYIIEGGRQNYLSKRMKYLQKKLIETETQLADCTNFT

SEQ ID NO: 183626 - protein, 449 aa, unidentified
MVVPLEIGDEEYERVLERVAAVDVAKATGMVCTRVPHPARPGRRLTRVQVVDADTGSVMELADHLAAGRIAKVTLESTSGYWRIWFCLLEAAGLDVQLVNSRDVSNVPGRPRSGKLDCVQLAKLTERGMLRPSFVPPAEIRRLRDYTRLRTDLTRERTRHWSRLEKLLEDALIKVTAVASKTGSKPVRDMVEALIAGERDPEVLAGLARGKMRARHDRLVEALAGRFDDRHGELARVLLDQIDSLTAHIGKITGRAGELIAAMPGAWGVDAGGVTGPGAGLGAGAPVLPAVARLDEVTGIGAAAAQVIIAGVGLDMGVFPTPGHLVSWAKLSPRTIQSGAKNRPGRTGKGNPYLKGVLGEAAAAAGRTATFLGERYRRIARRRGKLRALVAVARSILVIVWHLLADPAARFRELGAGYYASRTDKNRKTRSHVRQLEALGYTVTLAQAA

SEQ ID NO: 183627 - protein, 341 aa, unidentified
MGQAHTIGLDIAKRVFQAHGADASGRVVFRKRLVRAKVLAFFAAQPPCTVAMEACAGAHHWARELGKLGHTVRLIPPAYVKPYVKRHKNDMADAEAICEAAQRPSMRFVPVKTEEQQANGVVFRARDLLVRQRTQCINALRGHLSEYGYVFPQGITHAEAVIAHVEDPDSAVPESARAVLKVLIGTFQALEAQIQALDAEITQRAKADPVARRLMTIPGIGPIAATAITALVPAPEGFRAGRDFAAWLGLTPLQKSTGGKQKLGAISKMGERTIRRLLILGASAVVRWAGQRGTPAGSWLARMLARKPKMLVTVALANKTARIVWALLVKGGVYRAPAPAA

SEQ ID NO: 183628 - protein, 335 aa, unidentified
METVYFLGIDISKKKFDAALTQDGSNMYELGVINNATQIRVAFRELRKKFGFSYDQLIVCLEHTGIYCQPVLDFAVAHNIKVCLEPALQIKQSQGMVRGKSDRIDAKRIAAYAFKNHRQLKFWRPQRQVVQKLKALLVTRERLINAKVQLQTPLTEGQEFIEESIRKTMVKCCQKALRGLASDIERIENQIHLILTQDQHLSSQMKWATSVPGIGKITGANLIVTTGEFERIVEARKCACYAGIAPFEHSSGSSIRGKVRVSKMANMTMKKLLHLSAMAAIRHSEELRAFYARKVAAGKNKMSVINAVRNKLISRVFACVKDQRCYEKNYKHALA

SEQ ID NO: 183629 - protein, 453 aa, unidentified
MRKRPKTGQKVNPLTMECIEPNAAGIDVGATEVYVAVPPERDPQPVRQFATFTADLRAMAEWLKACGITTVAMESTGVYWIPVYDVLEEAGVAVCLVNAHYVRHVPGRKSDVVDCQWLQYLHSVGLLRASFRPTSAICALRALSRHRASLVEVAAIHVQHLQKALTQMNLQIHNVLSDITGMSGLAVIDAIVAGERNPEQLASLCHAGVRAPQETIEKSLVGNYRREHLFTLRQSRDAYRHYQQMLADCDREIERHVRELESHGDEQQPPLSPDPAGPKRRKNQFHFDMRGELYRILGTDLTAVPGISALTAHAVLAEVGPDVSRFRSAAAFASWLGLCPGMHKSGGKVLSSKTRRSSSRLALALRVAAQALHRSQTYLGAFYRRLRARLGAPEAITATAHKLARIVFHLLCTRSSYDESIFALEEKRQAVRRENRLRKEARAIGFQLVPILA

SEQ ID NO: 183630 - protein, 391 aa, unidentified
MIYVGIDVAKDKHDCFITNSDGEVLFKSFTISNNREGFETLFQKVQSVSDDLTKVKVGLEATGHYSYNLLGFLLDKGLPTYVINPLHTNLYRKSLSLRKTKTDKVDAHTIASMIMSDVNLKSYSDTSYHNEELKSLTRYRFDKVQERAKLKTSVSRLICILFPELEKLVATIHMASVYALLSEFPSAHAVASAHLTRLTNLLSESSHGRYGKDTAVMFREAARNSIGSNMPAKSLELKHTIKLIQELTSEIDEIETEIKSIMDEVNSPILSIPGINYRMGAMIIAEIGDFNRFDSPDKILAYAGFSPSTYQSGQLDGAYSHMEKRGSRYLRYALYNAAKYVCNWDPTFAEYLAKKRAEGKHYNVAISHAVKKLIRVIYHLEKTNQQYIKAV

SEQ ID NO: 183631 - protein, 371 aa, unidentified
MSRKGNGGSPMKKIQEYVVKGKDVFVGLEDSKRTWKICVRSEGMIVHQISMPAKYEVLGNYLKLRYPSCRIRLMYEAGFGGFWLHDSLKEDGVECVVTPPNKVTEEKLNRVKTDRVDARRLSINLENGDYTACHVPDRERREDRQISRTLVQIQKDIVRTKNRIRRFLDFHGLNGLILSDPWKPSDYKNLRNVKLGEKLQFSLDLYLDQLEKLMEYRKQLKKELWQLAKKERYRKTFQYFESSPGIGWLTAIRLVLEWGEDLSRFKTGKRFSSFVGLTASEYSSGDSIHRGRITGQSHAFVRMWLIQCSWIAIKHDPVLLKKFQDVWRNTGSKKKAIVAVARKLSVRLWHLAVFGESYVKGLLEEQRPVVA

SEQ ID NO: 183632 - protein, 345 aa, unidentified
MNHYAGIDVSLESSSVCLVDATGKVVAEAQVMSEPEALVAWFGARPEQMAGIGLEAGPLSQWLFAALEAAGLPAVLLETRHVRTAFKTMPVKTDRKDARGIAQLMRLGWFRPVHCKSLAAQETRALLTARKLLQAKRYDVEMSLRGVLRGFGLKVGSTTPKTFEARVRELVEGHPTLETVAAALLAARAELLDQFKVLERRLMAVGRADPRVRLLTTVPGVGALVALTFTAAIDDPGRFRSSRQAGAHFGLTPRRYQSGETDVTGRISKVGDHGVRVALYEAANVMLTRPVKGSALKDWALAVARRSGPKKAKVALARKLAVVMHRMLADGTCFEARPVAAAAAA

SEQ ID NO: 183633 - protein, 397 aa, unidentified
MIAVGIDISKAKSTVAVIDSDGTVLASPFTMAHTQPEMEAFVTYLKGLGEPTTILMEYTGHYHYPVLKKLQDEGFPVCIVNPYQMKKYGDVEIHKAKTDKKDALRIAAYALEKSYKLVPYSSMEQKYEDLKFLSRQYNQRISYVAKLKVQLIALLDQTMPGITRILPLNSRNPEKCALLLFIKRFKSFDEIQRIGKARFLASYDVLAKKASERSASSKGLSIYELAVDSITTRGEDPYIWLSQNQCVDLLSATQNAADEIISQMRNIAETIPEYKVLRAMHGVGDLLGPIILAEIGDVHRFHSGKALNSYAGNDAPPYQSGQFESRNRHISKRGSSALRKACYEVMQALKLTKPQDDPVYLFMLKKEQEGKPFNVAKMAGVNKFLRIYYARAMELYK

SEQ ID NO: 183634 - protein, 385 aa, unidentified
MAQFSESPQAAIDYNSTIIGALELSEKKWVLAVQLPGVDRHSRHGLDAGGERLVSFVDRLKARCGSAGRKIARVILTHEAGRDGFWLARFLARRGIEVHVMQPSSLPVDRRARRAKTDMIDAEMLLRTLMAWLRGEPRVCSMVPIPSEADEEARRAHREREDLTRERRSIVNKIDGILATLGVKGYKALRRDRREQLSCARQPGGDPIPQKARARIERLLDRLDLVLKLIDQVESARDAVLKKDAPADEAERMIRSLTDLRSIGPDVATLLVREAFVRQFRNRRALAGYVGLGGTPFSSGGSEREQGIGKDGNRRVRAAMVELGWMWLRWQPDSALSAWFRARVGARGGRIRKIMIVALARKLLVALWRYVTDGVVPEGAKLKAA

SEQ ID NO: 183635 - protein, 359 aa, unidentified
MEYIAFDAHKHYTLASVAHADGRLLREVRIEHERGALQAFLARCERGSPVALETVGNWYWIVDAIEAAGCQPKLVHARKAKLMMGQINKTDTLDARGLNLLQRTGTLPTVWIPPGELRDQRELPRTRMVLVRQRTRHKNRIHATLAKYALRCDEVSDLFGVRGRALLRRHLEALPPHTAFATRLLLEQVEHLDRQVRALEERMRRVFQPTPLIQWLMTLPGVGFILAVVIALELGDVRRFPDAERFAAYAGTTPRVHASAGKIRHGPLRPDVNRYLKGAFIEAANVTNMHRAYYPRRHLTRLYARLARRKGHSKAIGAVARHLAEATYWMVTKQEAYREPIASRPTRLGPSRGASAVSP

SEQ ID NO: 183636 - protein, 351 aa, unidentified
MSQKTNAVAVRTIGIDTGKNTFHLIGLDEQGAIVLREKLARGRIGRRLANVSPCLIGIEAGMATHYVARELLALGHDVRQVPPAYAKPFRQGHKNDFRDAYAVAEAVQRPSTRCVPVKTDDQLDLQALHRVRSRLVGQRTAVINQIRSFLLERGIAVRQGPRFLRRQFPEILAKRIDVLSPRMIAIIEDLGGDWRRLDERIERVTEEIEQLAHGSESCRQLMTVPGIGPLIASAMVAAIANGAAFAKGRDFAAWLGLVPKQRSTGDRTILGHISKRGNRYLRTLFIQGARVILLRPANWARHSFGPWLTAAAKRLHHNVLATALANKLARIAWTILAQRRNYETRVVTEAA

SEQ ID NO: 183637 - protein, 432 aa, unidentified
MKHHKRSGARAESVVFQLNYQILVGVDLGQWLHQACVLDANGEFLEERGFEHSLSALSVITDWLLNLAGNDAERIAVAIEKPHGAVVETLLNSGIAVFSINPKQVDRFRDRHSMSGAKDDRHDAFVLADALRTDSHRFQRLQLPPPEIVGMRELLRTRDQLVKNHVALSSQIRDLLTRCWPHLVSLAPRDKALDSFFCELLQLFFDASETADLAPKVKDLVSKYRIRRLQTEQILETFQQSPLRVAPATIEATSAHLKLLLQQLLLVRRHRRDSDQLLEKWFRQQRATDEPYTDAAIIASFPGVGAFVLASVLSYAHDPVRLRNLGAFRSLSGIAPVTQKSGKRGQKKPKILMRRARSLPLNNALHHWARVAVLQDQAFKEHYDRLRDRGHTHARTLRGVMDRILTMAVAMLRDRTLYDPARPSTRKKLDSS

SEQ ID NO: 183638 - protein, 388 aa, unidentified
MHVYVGVDIAKELHYAAIMDSDGVVSKPFSFENNDKGFNLLLSHLAPYNKESILIGYESTAHYQENLAYFLKSLGYRTAEINPLQTAALRKANIRNTKTDSVDARLICLALMNHHIQGDQRDSVRLDDLYQLCKMRMDTMKKRTTCKIQLVATMDRIFPELASFFDNNLHTNTIYRLIESFPLPSQIKKTRIDILTKLLHKASRGHFKKEKAQKLKDLADISVGIPSDIFAFQAQQLVHQIEFYTDQIQTIEERINTNQDVMSSPLMTIPGIGTFCVACILSAIKNINDFGAPCKILAYAGLDPVIRQSGKFNASHTRMSKRGNSLLRYALVWSAGNVVKNNHTFAEYYRHKTEDQGKSHYQALGHCAKKLVKSIYHMLKCNESFNLD

SEQ ID NO: 183639 - protein, 397 aa, unidentified
MLAVGIDISKSKSVAAILNQDGSMHTSPFEFHHTQPELDAFIKYILNSNQSATILMENTGHYHYPVLKAFREAGLPVCMVNAYQIKKFGDMDLRKAKTDKKDAVRIARYALEKSYSLVPYTSMEQKYEDLRFLARQYNQRMLTLKNNKVFLLNLLDETMPGITNILPLTTRAPGTSLSVLFINRFKSYDRIKKMGKSRFLDAFEKIARKSRNRQTKTYGLAIYEAALRNITTRGENEYTLAAQDQCLELVCESQKAADSIILKMQTLAETLPEYAVLRSMAGVGDRLGPLILAEIGDIRRFHSGKALNAYAGNDAPPYQSGTFESHNRHISKRGNAALRKYCFEVMQALKLTRPQDDPVYLFLLKKEQEGKPYNVAKMAGVNKFLRIYYARAMETLK

SEQ ID NO: 183640 - protein, 414 aa, unidentified
MKSARNTLPTEPVNGITCGIDWARDDHALSIVDAKGREVTRKTITHDAAGLRDLLSTLDSAGAREVAIERPDGPVVDTLLDAGVTVVVISPNQVKNLRGRYGSAGNKDDRFDAFVLADTLRTDRARLHPLLPDTPATIALRQTCRARKDLVAHRVAVANQLRAHLKIVFPGAVGLFAAIDSPISLKFLTRFDSQDRADWLSLTRLTAWLANASYSGRTHPRELHRRLTSAPRATNEVTGAHITGAFVATLTALNTQITALDDSIADQLAAHADAHIFTSLPRAGSFRAARLLSEIGDCRARYPTPEALACLAGVAPSTRQSGKITHVGFRWAADKQLRDAVCDFAGDSRRANPWAADLYNRARARGHDHPHAVRILARAWLYVIWHCWQDHTTYDPTKHRALQALLERPQPGAA

SEQ ID NO: 183641 - protein, 319 aa, unidentified
MLGIDVSKDTLACTLFDPHTHKALWTKSFPNTSQGIARLLKQTPAESPWALEPTGRYSTAPAKLARKAGRDVRLAQPKAAQRFLQSLQSRAKTDRLDSAGIGLFALSRSLPPYPLKPPVIEELDQLLSARKGLGQAIASLGLQARELPHAAPALQMAIASLKEQQQQLEVQIAALTAQEESLEVARRLQSVPGIGPIVAATVASRLAAHHFVSSDAFVAYCGLDIGVRQSGKRSGNTGLTKQGDGELRRLLYLAAQANLKTLNSPFKHHYQRERDKGLSSTAALCAVARKLARLCWSLHAHNTFYQPERVYQNSSKTIA

SEQ ID NO: 183642 - protein, 348 aa, unidentified
MLADQLDYIVGVDPHRDSHALAVVHALSGAVLFEAAVDASSDGYAQALKLAEEHAPGRRVFAVEGTGSFGAGLTRFLMVRGEQVLEVGRLRRERRSGGKTDALDAVRAARSVLTSERPATPRAGGERQALQALVAAREGAVNAKRAGLCQLRDLVITTPEPLRSQLRPLTRARLLQRLAATRPGGARDPELRGSMLALRSIARRVLQLTAEERELAREIETITRRLAPQLLEQPGVGPHAAAQLVLSWSHRGRITSEAAFARLAGAAPIPASSGQTVRYRLDRSGDRKLNRALHMILVTRKRSHPATIAYIERRIQEGKTRREANRCLKRYLARSLYRLLEHGPPLAT

SEQ ID NO: 183643 - protein, 355 aa, unidentified
MSQDTEVRFDGQEFQIGIDKHRSSWVVTIRSSGLELKTLSMSADAKALYAYMSRQYPGGVYYSAYEAGFSGFGAHRELQSLGINNKVVHPADVPSMEKDRRYKSDQGDSRRLSKGLENRTLEGIYVPDAASEQLRGVVRMRQSLSRDQTRLKNRIKSLLYIEGLGSVIQQYGSSWSSRFMEQLGRQQLAEASSRTLQTWLEQLLQNRRAQHQTLRWLREYVKQRPSMARDIELLQSVPGLGFVGSITFYGELMGIERFKRYEHLCAYVGLRPTSRGSGERQRAAELTPRCNNRMRRILIEASWVAVRTDPAMLAAYKRYCVRMKPQMAIIRIARKLLRRIRMVLLQQQPYQKSVA

SEQ ID NO: 183644 - protein, 424 aa, unidentified
MKRTQNEKILQIKNETLVVGIDIGKETHYARAIDWRGIELAKLLRFENTAQGYEALDEWIQNIMQQKGKTEVMVGFEPTGHYWFTLGDHLRTKGHKMGIVNPFHVKRARELDDNSPTKSDHKDPKTIAMLVKDGRFREVYIPEGLYQELRESVYERERIQEQLIALSNQIIRWLDIRFPEFSEVFKDWRGKTAWAALRAFPTPAKVIAAGINGIMANWQRQLKKPSRKKAEKLLKAATESVGRTAGAEAAEVALQNMLSQYEMILQQRCELETLMQELLLQVPNAAKILQIKGIGMLTAAIIVSEIGDISRFRDPRQILKMAGLNLRENSSGKHKGKTTIAKRGRRRLREGLFNGMIPMLANNVEFRQLHQRNLTREKNPLNKMQSIIALCGKLIRVLYAILTKGCEYNATKMINDINRMAMAA

SEQ ID NO: 183645 - protein, 315 aa, unidentified
MAEQVVVGIDVSKAKLDIAVLPSGEQLTVSNDHKGIAELVQRLKHLAPTRVVLEATGKLERLAVSELAGVGLPVVVVNPGRVRHYAKARGKRAKSDPIDARLIAEFARDLELEFHPLPDADTQALAALCQRRNQLMEMQQMETNRLERAEPATRKSIQASLRFLQREIEQMEEEIERRIKKFPGWEAKRELLASMKGIGTVSCSALLAWLPELGQFSRQKICALVGVAPYDDDSGEWHGRRHIAGGRAAVRRVLYMATLSAVRYNPVLHAYYQRLRERGVEPKSALIAALRKMLTILNAMVRDNTPWRPPCPALQ

SEQ ID NO: 183646 - protein, 370 aa, unidentified
MGNRSMFVGLDVHKETIDVSIAEGARHGEVRHYGVIASDLEPLDKVVRALRAPDRRLHFVYEAGPCGFGIYRHLTKRGEDCVVVSPSMIPKRSGDRVKTDRRDSQMLARLHRAGELRAIYIPDATDEAMRDLVRAREDAVGVGTQVKYRLKAFLLRQGRRYPGREGWTLPYRRWLTDLSFPSAAQHIALQEYRNAIAETEQRIDRLTEQLRQLAPTWRWAPLVAALQALRGVSFITAVGLVAELGDLTRFRHPRELMAYLGLVPSEHSSGPTVRRGAITKAGNPHVRHLLAEAAWAYQGIPRIGRQHAYRQEALPKVVCDIAWKAQLRLTTRFRRLVARGKAKPKVATAIARELSGFIWAIGREVSPAPR

SEQ ID NO: 183647 - protein, 354 aa, unidentified
MADEIAVVGGIDTHTDLHQAAVIDSIGRHLATKRFETTPEGYRRLLDWLRSHGEVLAVGVEGTGAYGAEIARFLTANGVAVVEVDRPDRKARRDNGKSDPIDAYGAATAVLSGRAGGTPKARNGIVEAIRALRVVRKSAVKARTQTINQIRTLIVTAPSVVRDKLRGLSTRELIDTLARSRPAGELDDPACAVKTVLRRLARRYQALDEEIKDADKEIGPLVTKAAPRLIALPGLGPETAGQLLTSAGDNPDRLRSEAAFAHLCGAAPVPASSGRTNRHRLNRGGDRQANNALHTIVLVRMKYDQRTRDHVARRTAEGMVKKDVIRCLKRFVAREIYRHLPHVIHTTKPLPQTA

SEQ ID NO: 183648 - protein, 355 aa, unidentified
MMNDKQVKVYGGIDTHADTHHLAVIDQAGRRLADAQIPTTATGYQAALRFLGSWPGLVSVGIECTGSYGAAVTRAVREAGITVFEVNRPNRFDRRLHGKSDPFDAYSTAEAVLGGRASAAPKGGDGLVESLRVLRTSRSSALQARTATINQIKGMLITAPEDLRTRYKGLSTPKLIAALAASRPTATPVTAAEATAYSLRLLARRWQALTGQIEDLAGHLQRLLDDHAPDLMRVFGCGRDTVAQLLITAGDNPDRLRSEAAFAALAGVCPIPASSGKTKRHRLNRAGDRQANSALYHIVMVRLRYNQETRDYVARRTAEGKTKMEIIRCLKRYLVRQLYPLIVETLHPRKEVAVA

SEQ ID NO: 183649 - protein, 345 aa, unidentified
MEIRTIGIDLGKTVFHLVGVNARGEVVVRKKCSRMQLLRFTSNLRACLIGMEACGGSHFLGRALREQGHDVRLMPAQYVKPYVKTNKKDYIDAEAIAEAVTRPTMRFVPIKSDDQLDLQSLHRVRERWVVRRTAVINQIRGLLLERGITMRKGRKHLEASLPHILEDAENKLSGALRALLIQLRVEMQHLHRQIEECDQLIARIASELEPCRRLIAIPGIGPVIATATIAAIGNGAAFKKGRGFAAWLGVVPGEHSTGGRQQMTGTSRRGNKYLRKLFVLGAHTVLLQRTKQSSGLSTWLASLAARKRKQVATVALANKMARMAWAVLCKGEAYRPPLLPQQNAA

SEQ ID NO: 183650 - protein, 454 aa, unidentified
MPKTTSGGRPEFKPVNVRAAAIDIGSKMHMAAVDPACTDTPVRAFGTFTQDLHDLADWFKACGVTSVAMESTGVYWIPAYEILEQRGFEVILVNARYAKNVPGRKTDVSDAAWLRQLHSYGLLRGSFRPDAEIATLRAYLRQRERLVEYAAAHIQHMQKALMEMNLQLHHVVSDITGVTGMRIIRAIVAGERDPDVLATHRDVRCHSSSETIRAALVGNDREEHVFALTQSLELYDTYQAKMLDCDRKLECLIAALSNGGTKPVGKLPKPRVKTKQVNTPSFDVRTALYGVLGVDLTEIHGLGPSLSLKLIGECGTDLSAWPTAKHFTSWLCLAPGNKVSGGKVLSSRTRRSSSRAAALLRLAATTVGRSDTALGAFYRRLALRAGKAKAVTATARKIAVLFYNTLRHGMTYRDPGADHYEEQYRSRVVANLRRRAKSLGFVLHAAPGGQLAVS

SEQ ID NO: 183651 - protein, 340 aa, unidentified
MKKDMKCYLGMDVSKNWVDITLMRVVDHQKQPALTERFDNSEAGMKALDKWLGKQQVPFDDNSLLVIENTGVYHRLVWEYCSSHGLPLHIGNATHIKHSFGIARGKNDKIDSQRLCSYAYKNAEELKASPALNPVLLQLKDLMTARSRLLSQYNSIKQYLSELKLSNPKEVQQLLEQAHTAALEGIKTSLKTVEGQIKQLIEQDAAIKNNYELLISVPGIGHLTAVYLICCTNNFICKITGKQLACYAGVAPFGNSSGTSIKGRDKVHQMANKDLKKLLSMGALSAIQHYEEFRAYYERKVKEGKHELSVLNAIKSKIALRAVAVINNQQPYVDNYKKAA

SEQ ID NO: 183652 - protein, 422 aa, unidentified
MLGVGIDWAEEFHDIALGTVEKGVIEQFRIEHGPAGVDRLIGRCLALEPDPAEVRVVLETRHGLLVEALLDAGFTVVPVNPDLVARRRGPARKKDDAEDARICCLLALDRHAGLKALIPHGDLGGELRAIARDDERAARDQRRLLNRLRADLQTTYPAALVLAGTDLGAPTMLRLLERWSTQSELTTATRDELVDFARAGHHGWPEKFADRVAAALATPALPTRDYLVRAKAAGIRLAAVQLLALHEARRGWHQRMGELLLGGRRSGREHTVKDPDPGKAFPGGEIYLSMAGLGDILAARVAGEIGEHIEQFASPSGLQCYAGQAPVTRRSGKSDFVVARRLAHNRYLGTAVHQWAFCSLTQSGWAREFYDHKIAAGKSHHAALRALGNRWLEVLWHCLTKGVLYDEAVHVANRNRAPGRAA

SEQ ID NO: 183653 - protein, 346 aa, unidentified
MKILALDLGKYKTVGCAYESESGAHQFKRGCTTPAGLAKLVQEVKPDRVVIEVCSIAGWVCDLLWGLGIEVQVANTSDDAWRWRKVKQKDDRRDALKAARLSAVNQIREVYIPALEVRQWRALITYRQQLIRRRTKIKNHIRDLLLREGQILARGSSCWSAVGIEPLAAQARSFSECGPAELWRGELQLELEQLREVQRQVVTVTAQLDKLGAGDTRVKLLRTVPGVGPRLAEAIVALLDQPQRFRKASQVSGYIGMVPKALDSGETERRGHITRQGSRVVRSLLVEVAWAGLRHNAWVRQTYQRLSGGKKARKKIAIVAVGRKLLVRCWAMLRDNRAWDWQPQIT

SEQ ID NO: 183654 - protein, 342 aa, unidentified
MQIAILGIDLGKNSCSVVGLDVAGRVVLRRRLRRDGVIKLAAGMPGCVMAMEACCGAHHLGRLLRDHGHQVRLMSPEYVRPYVKAQKNDDRDAEAIAEAATRPTMRFVELKSEAQLDMQSLHRARDRLVGERTALINQLRAVLLERGIVVSQGRRKLERYVDALLAEEEIRLSPRTGLLVEDLRAEWRELDRRILAFDDEFAAQARTDKTARLLTSIPGIGPLNATALMAAIGNAQTFGRGRDLAAWLGLVPKQVTTGGKPKLLGISKRGNGYLRKMLIHGARAALPTLSKVETPLGWWLRGLLARAHVNTVVVALAAKLARIAWAVIRRGEKFNMKAATAS

SEQ ID NO: 183655 - protein, 337 aa, unidentified
MKRYLGVDLHRTQLTVCTRLENGRTYLRQWPMKELRLFAAQLRKEDEIAVEATGNTRLFYDAVEKYVARVVVVNPGQFKVISQSVKKTDRNDAETLALYLSKDLLPEVRMRDRKQREVGHLAQTRDLLVKQRSALKAKINNLLSAEGINLKREALSSNKALARVLAMPLPPILAAEARVLVAQIRSLSGSIAELEELIEEEGPKLAGHQNLMSIKGIGPVSAAVLLSAIGRIEDFHEPGKLAAYLGLVPRTQNSNQTEHSGRITKQGNKLARTALVQCALIAKRYSSYLQQFYQRIQRRRGGGKANIALARKFLGVIYHTLKNNWVFEDFPNFVLAS

SEQ ID NO: 183656 - protein, 327 aa, unidentified
MDESRENVSVVGIDMSKHKFDVALLRDGKFKHKALRNDRGGHTALVSWLQARGVSTAHVCMESTNIYGEALGEYLHDRGFSVSIVNPARIKGFAQSELIRTKTDKADAALIARFCAAMRPGLWQPDPPEIRALRALVRRLDALVEMRQQELNRQQVANEVLLETLTDHIAYLDESIRAIKKQIQDHIDNHPDLKAKRALLESIPGIGEATIQVVLAEFADITRFKRAKCLASFLGVAPREIQSGCSVRGRTRMSKVGRSQLRKAFFMPALVAMRYNPPVIAMKERMLKAGKPKMAIVGAAMRKLVHLIYGVLKSGKPFDAEYITNQA

SEQ ID NO: 183657 - protein, 402 aa, unidentified
MIDGPTRFFGLDIHKEYFVAVAVNQERETVFGPQRVSNYQLEDWARRILTPQDAIVLEMTTNTYLFHDTLLPLVHSVIAVHPPNVPLVTNVHVKTDKKAAETLAQLHAAGMLTGVWIPPHEVRDLRSLIAHREKLVHLSTMAKNRLHALEHRKHLVLPDNPFSLDQRTWWESLGLSTTEKLLVHSDLDTLEFARKQVEQIEECLKQKSSQDECIPLLIQLPGVAMLTAMTILAAIGDIARFPNAKKLVGYAGLGTRVHDSGMTHSSGRITKAGRKDLRRAMVNAANHAVQDHAHWKAKMERLEPHLGRSKAIVAIARKLLVAVWHVLSKQVADRFADPQNVARSFLSHAYRVRIRNLPKGQSAPVFIREQMDRLGIGKDLQKISSGSTFIKLPPSKLLIEKK

SEQ ID NO: 183658 - protein, 407 aa, unidentified
MEVIIERACGMDIHKDSITACIMTPEGKVIQTFSTKTVFLLKLIDWIKEHGCTHVAMESTGVFWKPIVNILEAESIEFLVVNAQHIKAVPGRKTDVKDAEWIAKLLRHGLLKASFIPDRTQRELRELVRYRRSMIEERARQHNRIQKVLEGANIKLGSVVSDVMGVSSLDMLRAIAEGENDPEKLAGFARRSMKKKKAELELALRGYIQPHQRLMIKTILTHIDFLTAQIELLNQEVTCRLSTHQEDIERLDSIPGIATRMAEQILAEIGTDVEKQFPSAAHLCSWAGLVPGHNESAGKRKSSAMKKGNKYLKSALIEAAHSVRGSRTYLGALYRRTAARKGKKRAGISVAHAILRIAYYLLTRKEMYIDLGEDYFDKQKEQSIIRYSVRRLESLGYDVTITETDAS

SEQ ID NO: 183659 - protein, 352 aa, unidentified
MNTPHYIGFDVHKKSISYCVKSADGTIVEEGKLPATHRALREWAGKRSEAWHGAMEATLFSGWIYDTLKPFAAKLEMGNPSMMKAIGAAKKKNDQLDARKIADLVRCNLLPACYVAPAEMRDLRRLLRYRNLVVGQAVQMKNRMSGMLMEVGAEYSKQRLHGQQYFSALLDRLEEVPESVKDLLRLSRGALETFTATQQQILDRLQKEPLLSKRVKLLKSIPGVGEVTALTWALETCDPRRFPSIADAVSYCGLCSALVASADKAKRGPISKQRNAHLQTGLIEASKLAPRWNQQLAEVYNRERGGGGDRNQATLAVARKLVAYLLAVDKSGQPFEVRSLPPAAPEEVAKMA

SEQ ID NO: 183660 - protein, 350 aa, unidentified
MHYVGVDYHKKYSYIVVKDEQGKRVHKGMVNNTRDEFQRFLAPYQLGKAALEATRNWGLIYDWLEEILDVALAHPLKVRAIAEARIKTDKISADILADLLRADLLPMAYVPDKETREDKNILRQRMFFIRIQTMVKNRTHAILDRHPEIPSQAPDVSDLFGASGMEWLRSVVLPGEDNRLLVSELELLEVLKQKISQSDGIVKELGKRDKRAKLLRSIPGLGPFFSVLVAKEIDDISRFKSDKKLCTYAGLVPSTHASGGKVFNGRITKQGNKWLRWAVVEAVPHAIKSDPDLYSYYERIRIKKSKNAAKLAAARRLLTIIYRVLSQQRLYEKRINNSRRSLAPAALVTP

SEQ ID NO: 183661 - protein, 469 aa, unidentified
MPEGQQVEVEDHEQIVERVAAIDVAKASGMVCTRVPHQAKAGRRTTTVWQVVAPTNEILELADQLVGQGIERVVVESTSDYWRPFLYLLEARGLVVWLVNARDVKHLPGRPKTDKLDAVWLCRLNERGMLRPSFVPPAQIRQLRDYTRLRADLTQERSRHKQRLEKLLEDALIKLSTVATDIFGVSGRAMLEALISGQRDPKVLAELARGRLRSKHARLVEALTGQFSDHHAFVARMLLDQVDALGGQIDQLTARIEQTITQIPAAQPTAQGSGPDATLQAGIQPTRSVPSPAAAVDPQTGELLAAPLPVVDRLDEVAGIGRVAAQVIIAEVGLDMGQFPTPGQLVSWARLSPRTAQSGATHRAGTTGKGNPYLKAVLGEAATAAAKTDTFLGERYRRLVRRIGKLKALVAVARSILVIVWHLLADPTARFHDLGADYHASRIDKGRKTRNLVHQLEALGHKVTLEPAA

SEQ ID NO: 183662 - protein, 346 aa, unidentified
MEHYAGIDVSLELSSVCVVDAQGKIVKETKVASEPEALVAFFEALGFAVRRIGLEAGPLSQWLHAELKRSGFETVLLETRHVKAALSAMTVKTDRKDARGLAQLIRMGWFRPVHAKSMGSQEVRALLVARKQLLGRLIDVELSIRGILRGFGLKVGPVTRKGFEARIRELVTGQATLERIAGAMLSARAALKAEYGKLHKSVLAIVRDDAVCRRLMTVPSVGPLVAITYKSAMDDPNRITKSKAAGALFGLTPRKYQSGEKDITGGITRAGDEMVRTALYEAANVLLARITRFSKLKRWGMDVAKRRGSKRAKVALARKIAVILHRMWVDGTTYRWAAAEPIAAQA

SEQ ID NO: 183663 - protein, 343 aa, unidentified
MQAVTTIGLDIAKSVFQVHGVDAAGQVLIRRQLKRRAVLAFFQKLPVCLVGIEACASSHYWSRELQALGHSVRLMPPAYVKPYVKRQKNDMADAEAICEAVARANMRFVPTKTPEQQSCLMLHRTRHLFIRQQTAVINSIRAHLAEFGIVAPVGRKGVTELLHIVADPSDKRVPEVARVCLAALGNQLLSLKEQIVEFDRMIMVWHRSNETSKRLHYIPGVGPMLATALVASVADPRTFRSGRNFSAWIGLVPKQHSSGGKDRLGSISKQGDRYLRSLFVAGALAVIRYAKIHGTKHRPWLTALLARRPTKVAAIALANKLARMAWAMMAKGDRYRQPVALAA

SEQ ID NO: 183664 - protein, 347 aa, unidentified
MRDDMYYIGLDVHKRTISYCVKDAAGHVHQEGKIGSTRRELDAWIKTLPQPRTIAMEATIFTGWIYDHLLPHAEKVKVAHPLMLRAIAAAKKKNDRIDAGKIADCLRCDFLPECYMTSTEIRDRRRTLRYRNLVLKQMVQMKNRISGLLMETGVSYNKQRLHKLGYFTELMSGNEEVDESIRPLLKLSRETIVRSQRLDYALVSSLERDPLLAERLKRLRTIPGVGPITALTWALEIGDVSRFQSVKQAISYCGLCSAERSSADKLIRMPISKQRNKHIQQTLVEAAKLAPRYNHELALVYEREQQRGNKNRATLSVARKMVAYMLAVERRKQNFVLKGEFSGTAAA

SEQ ID NO: 183665 - protein, 330 aa, unidentified
MKNYKEVVGIDVSKKTIDAFCYQAEVHKEFINDVVGYKSLLKWVSKYTNEIDVFYCFENTGYYSLKLALYFASQSIVYVEESPLKIKRSSGIVKEKTDKLDAALIARYAWLYREELEPSTVKSMSHLELGRLLALRDQLVRNNAGLKGTLKEMKILLSSPTTDSGCISLKRSIDYLSKQVKSVEDRIKEIISQDESMQKNYELLSSLKGVGLVVASQLIYHTGNFTRFASWRAFSSYCGTAPFEHRSGTSIYKRKQCHYLGDRKMKSLLSMASVSAIQHDSELRQYYKRKVAEGKDKMLAINNVRNKLIARAFAVVKRGTPYVVLQQHAA

SEQ ID NO: 183666 - protein, 343 aa, unidentified
MQVVTTVGLDIAKSVFQVHGVDAGGQVVIRRQLKRRYVLAFFEKLPPCLVGIEACASSHHWSRELSALGHTVRLMPPAYVKPYVKRQKNDATDAEAICEAVTRANMRFVATKTPEQQSGLTLHRTRHLFIRQQTAVINVIRAHLAEFGIVAPVGRKGVEELLNVVTNASDKRVPVFARMCLAALGAQLRRLKEQILEFDRMIMAWHRSHEASKRLDAIPGVGPVLATALVASIADPKAFRSGRNFSAWIGLVPKQHSSGGKDRLGNISKQGDRYLRSLFMAGALAVIRYAKIHGTKHRPWLTALLARRPTKIAAIALANKIARMVWAMMARGERYKEPVALAA

SEQ ID NO: 183667 - protein, 354 aa, unidentified
MTRTNKYVALDVHQATTLASVRAETGRVIARSILPTEAPALREFFRGMRGTVHVAFEEGTQAQWLHDLLVPLVHRVVVCDRHGEPRRGNKGDQVDADQLSARLWRGELRAVYHGSPERATLQELTRAYRTLVEDATRVMLRLKALFRARAIPTPGTRVYQPRDRASWLAKLPERGVRFRAEALYAELDLLRALRPKAKAAMLTEARRDPAWPVLRRIPFLGPVRVALLLATMQTPWRFRTKRHLWAYTGLAVLTRSSADHEIQDGRPVRRRRAPLTRGLNPNHNRVLKDVFKGAATAATARAGPLQAFYHGLLDRGMREELARVTLTRKLAALTLRLWKRGERYDPTQLTQQAH

SEQ ID NO: 183668 - protein, 342 aa, unidentified
MEHYAGIDVSLECSSVCVVDATGKIVREAKVSSEPEALIAWFGSLGFGLGRIGLEAGPLSQWLYAALKQTGLAMELLETRHVRDAFKAMPVKSDRNDARGIAQLMRLGWFRPVHCKSIGAQEVRAMLTARKLVQSKLFDVENSLRGILRGFGLKVGKATSRSFAGRIRELVAGHPSLQMIAEAMLAVHAVLLDQFKAFEKHVRSMARSDAKARLLMSTPAVGPIVALTYASAIDDPGRFKSSKQVGPHFGLTPKKYQSGQTDVSGRISKIGDASVRMVLYEAAHIMLTMPIKGCSQLKSWAMRIARRAGMKKAKVALARKLAVIMHRMLVNGTSFNAAAAAA

SEQ ID NO: 183669 - protein, 398 aa, unidentified
MTESSDYESVQVFIGVDVGKDTHHAVAINRSGKRLFDKALPNDENKLRSLISDLKQHGQILLVVDQPATIGALPVAVARSEGVLVGYLPGLAMRRIADLHAGEAKTDARDAAIIAEAARTLPHALRTLKLADEQIAELSMLCGFDDDLAAQTTQASNRIRGLLTQIHPALERVLGPRLDHPAVLDLLQRYPSPEKLASLGEKKLAAQLCKLAPRLGKRLAADIAQALAEQTVVVPGTNAAAVVLPRLALQLITLRKQRDEVALEVEQRVLAHPLYPVLTSMPGVGVRTAARLLTEVACRAFASAAHLAAYAGLAPVTRRSGSSIRGEYPSRRGNKALKRALFLSAFAALRDPLSRAYYTRKMSQGKRHNQALIALARRRCDVLFAMMRDGTFYTPQAS

SEQ ID NO: 183670 - protein, 343 aa, unidentified
MQIRSIGIDLGKTTFHLVALGDSGKVLIRKKFNQKQLIMFTANLQTSLIGMEACSGAHFLGRTLRSQGHNVKLIPAQFVKPFVKSNKNDFLDAEAIAEAVDRQNMRFVPIKTDDQLDLQALHRVRDRLIARRTSVINQLRAFLLERGMTFAKMPTKLKIAMPEILENADSNLTPRMRNLVGLLWSEWKELEQQITAMNTEVEQIASSDPACQRLRQIPGIGPLIATAVVASIGNGAAFRKGRDFASWLGLVPRQHSTGGKARLLGISKRGNPYLRKILIHGARAAVVRVKRERSPFGSWLDALQTRAPLNVVVTATANKLARIVWAVLSSGEEFRPGGRLLAS

SEQ ID NO: 183671 - protein, 326 aa, unidentified
MTLSHLTDNTFVGIDVGGAGLDVAWHRGDSAHYANRPDAIATLVERLRTGPEVTRIVLEPTGGYEKALVKALRQAQLPVEIIHTTRFNAYRALVGVKAKSDTSDAKLLASYAAAPDEVRGRKAGHVELPEDAVREELSELASRRDQLKHMIHAETCRLGTVRKNELRQMITTHLETLHAEDKQVHRMMLELVRQRDDLRRDQRLLKTIKGIGVKSALVLLASVPELGRIDNKAAAALIGVAPFVRKSGTMNAPARIHGGRAPVRSILYMAAVTASTHNPLLSPFYDRLIAKGKPPKVALIAVLRRLVVFANAVLRSGQPWKGASAT

SEQ ID NO: 183672 - protein, 409 aa, unidentified
MDRQLERCCGLDVHKETIAACVRIGGRRGPAEQHVQTFRTTAADLVVLRDWLAAHGVTHVAMESTGVYWKPVFYALESDFTCLLVNAAHIKQVPGRKTDIHDCVWIAQLLEHGLLRGSFVPPAPIREVRDLTRYRKALIQERTRVANRLHKALEDAGIKLATVASDILGVSGRAMLEALAQGTTDPTVLADLARGRLRGKLPALRAALAGRFRTHHAFVVGHLLTHLDYLDEAIGTLSTEIERHLAPFADQLTRLDSIPGINRRTAEVIIAEVGVDMSAFPTAAHLASWAALCPGNNESAGKHKSGKTRKGNHWLRTALIEASAGASRAKDSALQARFRRVLRHRGPKKAVVALAHTLLRIVYHVLAQGTTYHELGGDYYDRRHTQRLTRRAIRLLEGQGDRVTLEPAA

SEQ ID NO: 183673 - protein, 347 aa, unidentified
MRFYTNQHRYYCGIDLHARSMYVCVLDPQGEILVHRNMPCAPDSFLKAIAPYREDIAVAVECIFTWYWLADLCSQQNIPFVLGHALYMKAIHGGKAKNDKIDAHKIAVLLRGGMLPMAYVYPPEMRATRDLLRRRMYLMRKRSELLAHVQNTNSQYNLPEIGKKIAYKANREGVAERFTDPSTKRSIEVDLKLMDHYDQLLTEVELYIVRSAKQHDAQAFYRLRSVPGIGKILALVILYEIHDIERFPTVQDFVSYSRLVKCAKESAGKRHGTSGKKIGNVHLKWAFSEASVLFLRANPKGQRFVEKLSSKHGKAKALSILAHKLGRAVYYMLKRKQAFDVNKFFNS

SEQ ID NO: 183674 - protein, 357 aa, unidentified
MGKATGNLARVTRIGLDLAKTVFQVHGVDAKGEVVIARKLRRGTMLEFFGRLAPCMVAMEACGSAHHWGRQLVALGHAVNLIPPAHVKPYVRRNKTDAADAAAICEAAMRPGQRFVALRSIDNQAAVMRHRIREQLVGQRTALLNALRGHLSEIGVVTAQGAQHAYRLKRMLADGADENGEIVIPEHVRVALAPLAAQIDALDQAIAAIDDKLIETVKADEKARRLMTMPGVGPVIATAVVATVGEVASFASGREFAAFLGLTPRQRSSGGKERLGRITKMGDRYLRKLLVVGATTVLHHAIGHNDSLRCWARQTLERKGGRAGFKLTAVALANKLARIVFAVLRSGEVYDDRPVAA

SEQ ID NO: 183675 - protein, 342 aa, unidentified
MDHFAGLDVSVKETSVCIVDDTGKITREVKVASEPEALLSVLKSPAYRFKRIGLEAGPLSQWLFSALAEAELPVVCVETRHMQAVLKAQINKTDRNDARGIAQMMRVGLYRPVHVKTLRSQKLRMLLTHRKLLQSKAIAVDNDLRGTLRNFGLKVGMVGTVKFEARIKELVENLPDLAVLVEPLLVVRRVLREQFVILHRRLLAVVRDDEVCRRLMTTPGVGPVVALTYRATVDVPARFRKSKAVGAVFGLTCSKYQSGEIDRNGRISRCGDEMMRVMLYEAAQSMLRSKKWSWLKAWAMQIARRRGMKKAIVALARRLAVIMHRIWVDGTEFRWTREVVAA

SEQ ID NO: 183676 - protein, 358 aa, unidentified
MKKIVVGIDISKEKIDASAIDVTGSHPGVVRLDYRVFDNRPMGFRRMLVWVRHLKDGACLDEVLFCCETTGGYDRSLCDYLYAKGLSIWREGALQIKRSMGVRKCKDDKADSLMIAEYAMRHMDKAVIYETPSQSVRELKSLLLYRHKLVQEKTEKTVRMKELEATSFRSKSVSFILRDARKSIKSIEKSIKECERQILDLYKADGDLKKSYDHLTSVSGIGIVNATAFIAYSNNFTGITTANKLASYWGCASFRERSGTSLDRKAYVRCYSNSLLKAYLTQAAECTVKEHGIYHGYFLRLKSAGKPYRVIINNVRNKLIHLGFSLVTNDMDYESDHESLRAKRKREKGKSFMLDNIN

SEQ ID NO: 183677 - protein, 378 aa, unidentified
MKNDNRYVGLDVHAETIAVAVVETDGEVRFLGTIPNRAETVRRLVKRLGPANRLRFCYEAGPTGYVLYWQLTGLGAHCDVVAPTLVPVKPGDRVKTDRRDAEKLAALYRGGHLTPVWVPDQAHEALRDLVRAREAAKSDQLRARHRLQKFLLRHGRRPLQGIKAWTQKHLDWVRREVHFEAPAQEAVLVDHLAEVEHARERIRRLEGAIDTAVEAAPGRMRAVIEALQALRGIATVSAATIVSEVGSLSRFRKPRQLMGYSGGVPREDSSGERVRRGGITKTGNAHLRRIVVEAAWSYRHRPTVRGELVKRQAGLSEEVKAIAWKAQHRLYGRYRRLIGRGKAKQQVVTAVARELLGFIWAIGVHVEQQHGTAARHAA

SEQ ID NO: 183678 - protein, 413 aa, unidentified
MEVIYQRCAGLDVGKDEVVACTRVPAGASGGGRRQEVRTYKTFSSGLAALADWLQDQGVTQVVMEATGQYWKPIWYVLEERGVELLLVNARHVKILPGRKTDVGDAAWLCELLEHGLLRGSFVPPPAIRELRDLTRYRKRLIQAHTAEAQRIHKTLEDASIRLGSVASDVLGASGRAMLRALLAGERDPGVLAELARGRLRSKLPELREALAGRFDAHHALLVRLALDHVEQLERSITTLDQEVDRVIAPFARARDRLDTITGVGKRAAECIIAEIGIDMQVFPTAAHLASWAALCPGNNVTGGKRRSGKTRKGNVWLGEILVECAWAAARSRDTYLAAQFWRLARRIGKKKAAVAVGHSILVIAWHLLDGDCDYAELGGDFFVRRDADRARQRAIAQLQALGYHVTLQPTAA

SEQ ID NO: 183679 - protein, 318 aa, unidentified
MVSFVGIDVSSRTLDVAVRPQSLKINVTNDQAGFEVLEKGLRGLKVKRVLLEATGGYEREVLSFLQSAGYKVIRVNPRRARSFAESMNIKAKTDAIDAAVLAHFAEVIPDKPTLQVSPQRALLRELLPQRDRLIQQRDDDRRRLKQAQSEVVARFLKSNLQHFRSQIRQIEHEIKLHAEGLGDERIAQLVQVKGIGLVTAGKLVTLLPELGHVEAREIASLVGVAPFNHDSGTSVGKRSISGGRFGIRCALYMSCLVAVRQNPSLKAKYQALRERGKAAKVALVACMRVFIVRLNAMLRTGTPWQDVDLPQCKSATPA

SEQ ID NO: 183680 - protein, 411 aa, unidentified
MDKVYDKCCGIDLHKKLIVACFKQGNRQEIRDFGATTRELLEMADWLKEGGCEMVAMESTASYWKPLYNILETCELKAMVVNAQHMKAVPGRKTDVKDAEWIADLLQHGLLTASYIPDKDQRELRELVRYRKSLVGERARELNRLQKMLEGANIKISGTIRDINGKSARNILEHLLSGRQIDSAEYDILYEKKVIAHNLKATKEQIIDDLNGVMSALQKKMMRILLNHLDELNAHIRELDDDIDNFMKPEEKEAAKVIQDIPGIGNTSAQAIISVIGADMSRFPTDAHIASWAGLCPGNNKSANKRKSGKTRKGNGLLRDTLIVCAHSAVKNKSSYFHAQFARISAHRGSKRAYVAVAHSMLVAIYHILKEGVVFKDLGADYYNQFNRERKINAYLKKLKALGWEVPVVAA

SEQ ID NO: 183681 - protein, 367 aa, unidentified
MKKVSTAATKQSRNISQQRLTIGLDLGDRNSCYCVLDEAGRIQLEQRVRTTAKALQEVFGAMPRSRVALEIGTHSPWISRLLSELGHEVIVANARKVRLIGENRKKDDRLDAQTLARLARIDPQLLCPVKHRSAQAQADVMMIRARASLVRVRTGLANAARGLAKSYGERLLGCNVRNMNPENAEGLSPELQRALEPLLSAIEEVSEHICEYNERIEALAQTSYPQVALLKQIKGVGTLIALTFLLTLEDPHRFRKSRDVGCYLGLQPGRRQSGKSDPQMHITKEGDPYLRTLLVQGAQHILGPFGIDCDLRRWGLKLAERGGRNGKKRAIVATARKLAVLLHHLWVSGEVYEPLHNSNPRTIAAAA

SEQ ID NO: 183682 - protein, 316 aa, unidentified
MAEHSTPVAGIDTGKTWLDIALWPDGATWRVPNTAEGHRALRERLAGLGVRRAGIEASGGYERAVAAALRGAGVEVAVLQPGQVRAFAAYKLRRAKNDRIDAALIAGCAAGLAGVRAAPDPRMAPLAEHLLFIEQIEDDLRQTRCRLERFAARRLRAGLERDVQRLERRRDAELALLLKTVRAEADLARRLDLVASVDGVGIRTALTLVVLMPELGALSREQAAALAGLAPFDRDSGTLRGERHIAGGRGRVRKALFNAALPAAFRWNDNLVPVYKTLVAKGKPHKKALVACARKLVIFVNAVLARGTPWTKQIPV

SEQ ID NO: 183683 - protein, 343 aa, unidentified
MEHFAGLDVSVKQTSVCIVDGTGRLVREVRVASEPEALLPVLKNPLYRFKRIGLEAGPMSQWLFSALAEADLPVICVETRHMRAVLQAQINKTDRNDARGIAQMMRAGLYRPVHVKTLRSQKLRMLLTHRKLLQSKAIAIENDLRATLRNFGLKVGVVGTVKFEARIRELVETLPDLAELVEPLLIVRRTLREQIGILHGRLLAIVRHDDVCRRLMTVPGVGPVVALTYRATVDVPARFRNSKAVGAVFGLTPSRYQSGEVNRTGAISRCGDEMMRAMLYEAAHTMLLRLAKWSWLKAWAMKIARQRGIKKAIVALARRLAVIMHRIWVDGTEFRWTRETAAA

SEQ ID NO: 183684 - protein, 394 aa, unidentified
MKLVGIDVGKNSHHFCVMDKETGEFNVAPSSFSNNKEGFDFLINSLKPYSKKSILIGMEDTGHYHVALLKFLLSNGYTVALINPKTTDLTRKMEGGITKNDKLDTITICDVLDTPERKKQYRITKVDRFDLYEQRQLTRHHHNLKEELNVYCNRLQKSIDLVFPEFNTLFSSKYGIVYMNLLKTFGSAEAIASTDIRTIRKFFEIKGKGNRISLTPEKLKECAKNSIGISSEVETIQIKHLVSQITLIKEQIAEIDKKIEEFSIPNNSPILSIPGISHFSGTSILAELGDIGNYSKPSQIIKFAGVAPYHYESSQYNAQHTAITKKGSKYLRKTLYQIILPVINNNPVFKKYYLLKISQGKGHRCAQGHCIRKLLRIIYHLLETGQSFDSALLR

SEQ ID NO: 183685 - protein, 483 aa, unidentified
MKSQPRRIGKKARNQCTRLQPWNQMNRKQRREMQRKIQSEDLSLEVVHPNAAGIDVGNEVHYVAVPPKGSSEPVRRFGCTTTELKAMADWLKQCGIRTVAMQSTGVYWIALYDTLEAAGLEVYLVNARETKNLPGRKSDVQESQWLMKLHTYGLLRNSFRPPREIRALRTYWRQRNDLVRAAGRHIQRMQKVLTQMNIQLANVLSDISGVSGQAILKAILGGERNPTELAVLCNWRVQASQEEVARSLEGNWQDDLLFVLQQEQDGYEFCQKQMAECDRHLQQYFQHSADRSQGASLPEEKRKARLKKKKGNSPRFDLRAELFRMAGTDLTSIDSIDGMTAMTILSEAGWDMSKWKTESHFVSWLRLCPDNRISGDKVIGKARLPTNNRVTIALKMAASCLRTSQTYLGAQFRRLRTKLGAPVAIKAMAAKLARLVYRMLRYGMQFVDKGAEFYEAQHRKLQINHLKWKANELGFQLIEAPAA

SEQ ID NO: 183686 - protein, 347 aa, unidentified
MDHYTHYVGIDVSKHTLDVMLWHRHQGAMIKAACQTSNDAPGHQQLTQWLTEHRAPIETTVLCLEHTGRYDDALLEHLTLGGWICALEKTTVLQKVKPEHHRKDDSFDADLLAEYAYRYRDKLSLYQACDPVIEQIRLLYGERRRLVTHRAAVKQLQSEQGYNRAGRPSQAEAFAHQLWREQRAFYDGQIKALEQKIDALVASDQGIRHRYEQVKAIDGFGPKTALKWLCLFYGQQHLDARRISSRFGFAPHGEGSGTSRHRPERSTGHGSGEVRKLLTLCARSAGTHHAKYRRYKERKLAEGKASQLVTNNIINKLIRVVCAVWNEDAVFDPNHVSRFAQNAIATP

SEQ ID NO: 183687 - protein, 412 aa, unidentified
MEKRTIEYEQVIERGCGLDVHRDTVVATVMGKGIATETRTYHTTTGSLNELGEWLKSLQVEAVAMESTGIYWKPVLHVLRVYPLKILVVNARHIKNVPGRKTDRADSQWICKLLMSGLLKGSFIPPENIQVIRDLHRYKRKLVRMIASEKNRIIKVLEDANIKLSSVFSDTSGVTATQIINGLIAGRRDLEKLVSECYHNRLQATAKQIVEAINGRLTEHLSFILRTMQMHIEYLETQIAEIDTQIDKYIKEFEQEIDLLQTIPGVGKEGAISIIAEIGVDMDVFPSEHHLASHSGMCPGNNESAGKKKSTRTRQGNKHLKATLTELAWSATRTKNSFYKAKYESLVVRRGKKRALIAIGHKILCASYHIIKNKEPFKELGYEYLAERKKRNRLEYLKRELREHGYKIEKIA

SEQ ID NO: 183688 - protein, 424 aa, unidentified
MNCNQNFKISQVTEGTLVLGIDVGSNTHYARAFDWRGLELSKVFKFKNSFEGFQSFVLWVNDLCCKYNKSKVIAGLEPTGHYWFSLGELLKENNITIAIVNPYHVKQSKELDDNLQTKNDSKDPKIIAKLVIDGRYSFPYIPEGIYGELRVADKLKNDITQQIISIKNKIHRWLSIYFPEYENIYSSIDSKSGFLLLKETPLPKDIVELGSEGIVERWKQTKLRAVGLDKAKKLEEAAKKSIGCKNITSSARFEIKLLIEDYEYKQNQLNSITEELNKLCEKIPMIKEIAEIKGIGIATAISFVAEVGDIRRFKSAKQVQKYAGLALKENSSGKHKGLTRISKRGRKKLRTILFRATIPLIGFNKEFSSIYNYYIERKDNPLKKKQALTAICCKMIRIFFTILSKGIKYDETKMLHDIKRPVAA

SEQ ID NO: 183689 - protein, 348 aa, unidentified
MVHFVGLDVSVKETSVCVVDDAGKVIFEQKVLTEPADIIALLTSLGVTYGRIGIEAGPLSQWLVNALTAADLPVICVETRHMKALLTAQQINKTDRNDARGIAQMMRVGLFKPVHVKTLVAQEQRMLLTSRKLLQRKLLDVESDLRGTLRNFGLRVGVVSGSRYEARVRELVEGFPGLAAIAEPLLNVRRVMRQQFAVLHKMLLDTVRGDPVCRRLMTAPGVGAVVALTYRATVDQPQRFVHSRAVGAHVGLTPKRYQSGEIDYDGGVSKCGDALLRTMLYEAAHSLLTRSRKWSWLKAWGMRVAQRRGIRRAIVAVARRLAVVLHRMWVDGSEFRWSKDSAAVPMVA

SEQ ID NO: 183690 - protein, 353 aa, unidentified
MRILALDLGKYKTVVCVYDSETGAHRFITILTNAKAVHDLLVELEPDRVVIEICSIAGWVSDLVRTLEIELQVASTNDERWHWRRVKQKNDRRDALKLAQLSARHELDLVYVPQTEVRQWRALIAYRQHLVQRRTKIRNRVRELLLREGALLPRHRSAWTQAGMAALAAMSKPLEEVAMNELWRGELALELAQYEAVQTQMAELVAKLDALGAANHQVRLLQSTSGVGPRLAEAVVAMFDDPRRFRRASQVSAYIGMVPKQWDSSETERLGHITRHGNRLVRSLLVEVAWCALRHNPWARETYERISGGKKSRKKIAIVAVGRKLLVRCWAMLRDDTPWHWESHGAAATTPAP

SEQ ID NO: 183691 - protein, 412 aa, unidentified
MFKIFRNNCCGLDVHKTWIYACIGITDANGRTEYKQARFSSFSKGLRDLAAWLANYSCFEVCLESSGKYWIPVFNILEKTYLVTLAHPKYTKPQKGNKTDVKDAKWICDLFMCDMIKPSFIPSPEIRQLRDLIRYRIKLTNMLTGEKNRAQNCLTVSNLKLADVFSDVFGKSSRSITNHMLDHPGETFDVAPFVDARCQTPLDEIQAAVDGAISSEQAVKLRQCLAHIDELEAHRKEIEREILMIAEPFSAVLELLYTLPGLDKNPMTAIAILSEIGPDMSVFPSSKHLVSWAGCCPRNDQSNQKVKSRRISRAGCYLKPLLVQVANALIKSKKHPEFKERYRRIKSHRGHKKAIIAVCKMLLTAIWNMLSKLEPYNPDGFLGHRPVNEKRVLTKSQALELLRLRGYTITND

SEQ ID NO: 183692 - protein, 361 aa, unidentified
MRMIGVDLHTRQETLAMLDSTTGEVVEKTLMHEASNVRNFYSTLSRPVCVGIEATGSMQWFVNLMEELGIECQVGHPAEIRAAEPRKQKHDRRDADLILKLLLENRFPSIWLPSKELRDLRALLLHRHQWVRMRTRVQNALQAIALANGLRQGASLWSQAGQHTIASLPLAPHTAHRRTELQALYVKFEAEIEKLNQRVEEQAWERPGALLLMTHPGVGPVTALATDVFLGDPTRFADGKTLASYVGMIPSEYSSGGRQRLGGLSKQGHPLLRFLWCEAAMHAVRRDPQLQRFYRRKLIQKGLGKARVAAARKLGIRLWIMLRDQIDYNEFCRRGQMRHKNGGACAGMPDTAHGAKQSPTE

SEQ ID NO: 183693 - protein, 338 aa, unidentified
MQTYVGIDLHSSNNFIGVINDQDKVLYGKRHTNRLDEVLRALKPFKDNLQGVVVESTFNWYWLVDGLQEHGYPVHLANPSAIQQYEGLKHTDDKWDSFWLAHMYRLGILPEGYIYPKAHRAVRDLLRRRLLFVRQRTSHILSLQSMISRNLGFKMSNNEIKKLKPEDAQELFDCTNLAFMAHNSIAAKEFLKKIILDIENKVKSQVKVREEFLKLLTIPGIGNILGLTIMLEVGDIGRFPQVGDYSSYCRCVESKRVSNGKKKGENNKKNGNKYLAWAYVEAAQFCRRYCVKAQSFYQSKAAKTKPVVAVKALSNKLARASYYIMRDQVDFDENKLFS

SEQ ID NO: 183694 - protein, 350 aa, unidentified
MMVIVGIDAHKRTHTAVAIDEAGRKLGEKRTTSTTTEANLELLRWADAFGKERRFAVEDCRHLSRRLEADMLAAGEELVRVPPKLMAHARDAARTYGKSDPIDALAVARAAWREPSLPRACLDGPSRDLRLLVDHREDLVRERTSQVNRLRWHLHELDPSWDPAPRSLVRFKHLDALGARLDGLGGTVAWVARDLVARIRELTVAANELERRIVEQVSRLAPALLGLAGVGGLTAAKIVAEFADVRRFHPKDAFARHNGTAPLPVWSGNLVRHRLSRTGNRQLNAAIHRIAVTQMRIHDGAKLYLGRRIAMGNTKTEAIRALKRQLSDVVYRTLMTDAVSTQVARFGEAA

SEQ ID NO: 183695 - protein, 327 aa, unidentified
MEQQVAGIDVAKLTLDIVLSNGQKELHNQFENTPKGHELLARWLTRQGANSAHICMEATGQYGDGIAEYLYSLGFPVSVVNPARIKHYANSKLRRNKTDKADAQIIAEFCYREKPGLWTPPPASFKDLQALVRHLDGLQTTRQQEVNRLNSGVKTPAVIESLKQICSFLDDQINQAKEAIQEMIDRNSELKRRQNLLITIPGIGNLTAAKLLGEIRDIQEFQNARQLAAYAGLTPRNFLSGTSVHKKARLSKTGNSHLRKILYMPAISAKHWNSIVNTFCARLEIAGLRPMEIIGAAMRKLLHLVFGILKRETPFDPNYLSTSPTLP

SEQ ID NO: 183696 - protein, 426 aa, unidentified
MWDAKRRVLKIKSLKHGIIQDKRGNVMRAVLGMDVSKTSSEVAILVNGEKVHGYTILNDAIGFNRLLGDLKTVHNPEIIFEATGVYSRRLQAFLEECGYSYIRLNPLEAKKQLDSLRVRKTDKIDAEKLAKSQLVHNRKPTYVQEEVYQHLRDLSRFYQNMTEDLVRAKNRLHKVLQVTFPELENLLSTPTGEQYWNLVMAFPCKEFVLSLSQSDLYEIIRQSTSKRISEKRIAYLTDKLIKLAKQSFCAVKKTSPMLEEVRYYAQELLRLSERRQVVLNDMVALAQPLPEYDTLRSIPGIAETTATSIIGELGDIRRFQSTNQINAFIGIDLRHYESGNFLAKEHITKRGNPYARKILFKCIHNIASASHTNPCHIADFYEKRKRQSTIASTKPHTIASIHRLIRTMYYLITHNKLYDYSLTQNR

SEQ ID NO: 183697 - protein, 311 aa, unidentified
MNKDTIGIDISKDTLDTHRLSTGAATRFANSAAGLRALRRWIGAQMPDLVVYEATGAYHAALERSFAGVLPLVKVNPLQARRFAQARGTRAKTDAVDARVLAVLGSALDLAPDVPAGKNQHDLKELQIARMALIKERTRLLNRSKTQSLALLKRQSKARLEQIKRQLTELEAALLDLTRQCPKRARAFDILCSIPGLGPVTAVAILVECPEIGTLTRKQIASLAGLAPMTRQSGQWRGTAFIQGGRKFLRDALYMPALVAARYNPDLRQRYQTMIQAGKPAKVALTALMRKMIELANALVQQNRKWTPKTA

SEQ ID NO: 183698 - protein, 362 aa, unidentified
MTSMPTLAPPRRVIIGVDTHKHFHAAAVLDERGVLLDSAVFDADRAGYQALIDWSTQFGILGRFGIEGTGSYGRGLASAVRRSGHDVVEVARPNRADRHRRGKSDPIDAENAARAVLAGQANAVPKDAEGTVEMIRHIKVAKDAAVKARTVAMQTLKAILITAPDDLRQALQPLSDTMLLRRCAVLRPGELTSVTAAAKHSLKAIAQRWVMLNEEITAHERLLGTLVDQVAPGLTAGVGIGPDNASELLLTLGDNANRLRSQAAFVKLCGACPIPASSGKTTRYRLNRGGHRHANAALHRIIIVRMKYHEPTRAYVARRTTEGKTKPEIMRCLKRYVAREIWARTQALRLSNESHQTTSCDL

SEQ ID NO: 183699 - protein, 412 aa, unidentified
MEGETVIAGVDTHKDVHVLCLLDGLGRKIWSGSFGADPEGYDRLAEAIGDPGSCMVVGVEGTASYGAGLTRRLVELGYNVVEVLRPKRDKVRPGEGKSDPLDAERAARKAASGKGCSVPKSQDGWVEAVRQLYVARRLAVATSTSCVACAKSMLTTAPGALRERFRGRERPKDLMPLLARGRKAGDALEESVLASLRSVAAVWKEARSQVESLDERIRALLEANAPALLGVEGCGTTTAAALVVAAGDNPGRLKGEAAFSMMCGASPIPASSGKTDRHRLNRGGNRQANWALYEIAIKRMAYDEGTRRYVARRTSEGKSRREAVRCLKRYIAREVYRVLMDPNPDGAAPEGPELAKMRKAMRVTQKKAAAELGLSAATLGHLERGKRRSTKLERRYYELLCELERALPQTAS

SEQ ID NO: 183700 - protein, 336 aa, unidentified
MKQIIRIGMDTSKHIFQLHGVDAAEQVVLRKRLGRKQMVAFFAKLPPTVIGMEACGAAHYWSRVLVGFGHEVRLIAPQHVKPYVKRNKNDGRDAEGLCEAMSRPTMRFVPVKTAEQQAALMLAGQLGNMIRGYAAEFGVTEAKGLDKIEPLLARIAQDECVPALARDLFAVQGREYGQLQAELKAIEIKLRAWHRANADSRRLAQIPGVGPIGATGLVMKTPDPRAFSSGRHFAAWIGLTPKDHYTAGKTRLGKITRAGDERLRCVLVAGATAVIRQAKQGRGHPSPWLMALLRRKPAKLAAVALANKIARIAWKMMVSGENYDGARMLGASASAA

SEQ ID NO: 183701 - protein, 342 aa, unidentified
MEISTIGIDLSKTTFHLIGLSPRGDIVLRKKLSRKQLLTYRATRKPMLIGMEACAGAHYLARALRDQGHDARLMPAQYVKPYVKTNKNDYLDAEAIAEAVQRPTMRFVPTKNDEQLDLQALHRVRDRWVARRTAVMNQIRGFLLERGIAIRKGPSYLVTQLQVIFTEGDSSFSGRLLHLIRELKHEWDELEGKIEEASAEFARIAKKDDGCHRLMEVPGFGPIVSTALVAAIGNGISFRKGRDLAAWLGLVPRQHSTGGKTRLLGISKLGNEYLRRMMLHGARSVVMQMERKPSALGEWLTSLSARRHRNVTVVALANQMARIAWAILSKGTHYSAPAFVAA

SEQ ID NO: 183702 - protein, 407 aa, unidentified
MRIIGMDIHRVAAEVVSLLDGEIVKLGRVQMLRDKLEEFARKELTHDDHVVIEATGNAAVVAEVLTPYVDRVVIANPRQVHMIAHAKVKTDTIDATVLAKLYASGFLPEVWVPDPETLALRRQVTRRTQLVRQRSRLKNLTQSILHAHLIPPCPHGNLVSISGRKWLARQILPADERAAIERHLSLIGEINEALTVVEADIAAHALQDPTIRRLMTLPGLDVTVAASVAAAIGDIRRFSNPQRLVAYLGLNPSVRQSGEGPAHHGRITKQGRGHARGMLVEAAWAAARSPGPLRAFYQRIAARRGKHIAAVATARKLAMIIWHMLSKDADYIWARPALLARKFRSAELRAGLPTKHARRGVAYDYNIPARRAEERSRVEQAEAAYAAATSRWRMRPRKPEAVEKASS

SEQ ID NO: 183703 - protein, 355 aa, unidentified
MNGLRYIGLDVHQDTVSAAVLDGAGKLLMQSVFATRAVAILDFLHGIKGTLHVTFEEGVHSAWLYDLLQRRVARVVVCDPRKNKLLKSGNKGDLIDARKLAELLRNNSLSPVYHGGMSALEVQHRTRSYTMLTEDTTRVMNRLRAVFRSQAIRVHGRKLFRSDLRESHLAQLATPGLRQRAESLYRELDALHPLRLQAKREMLAECRKHPAMKWLRSVPFLGKVRTAVLIGRVQTPHRFRTKRQFWSYCGLALETHDSAEYRVLHGQVQRKSRPAQVRGLNWNHNHELKGLFKSAATMAAFRKGIFREFYSGLLAKGIRPEMARLTLARKIAAITLKIWKEGETFNAEHIKPQAA

SEQ ID NO: 183704 - protein, 382 aa, unidentified
MNRILKIGMDVHSTSYTLCAMEPVLDGEDRIFANIQVTSDYRNVIQFIDKLKEKLGSSDSYSIECGYEAGCLGYSLYHQLTKAGVKCMILAPTTMLTQQGKRVKTDKRDAVMIAQCLSYGGYHAVHVPADKDVSVKEYLRMRDDHKVALKKIKQQINAFCLRQGYFYAGNKWTIKHLNWLKKLVLSDLYRETLNEYLTSYEEQTAKIERFDKRIEELAEDSDYQENVKKLGCLLGIKTHTALSLIVETGDFKRFRKGNTYAAFLGLAPGESSSGEKISRTGITKAGNSHLRMLLIEAARGMCRGRIGYKSKVLRSRQDGNPTEVIAYADRGNTRMRSKYYRMIRHGKKDNVAVAAVARELACFIWGLMTNNITPKEEGTKVA

SEQ ID NO: 183705 - protein, 407 aa, unidentified
MGITCGIDWAKAHHDIAVIDEHGVVLACQRIASDAGGFGELMRILAEHSDDAAAAPVAIETDKNLLVVALQAAGNPVYAINPRAVARYRERHSQAGKKSDPGDALVLADILRTDLHRHRPLPQISENGLAIKALARQHQEAIWAMHQTISRLRSVLLEFYPQALQAFPQLKHKAALTVLAAVPTPEAAECLTARRLVALLHRCGRRNDPALVAQILGDLRTPALRQAPSVERALGRTVVGLIGIVASMQSAVEELEAALTEEFERHPLAAILCSAPGLGPVLAARVLAEVGDDPKRFASAQSLRAFAGTAPITRSSGRSRFVNARRVRNKRLGDACHWWAFSMLTKSPGARAHYDRRRAAGDYHNAALRNLANKSLGRLWWCLQHEQHWDEAAAWPSAPLVALEAVA

SEQ ID NO: 183706 - protein, 408 aa, unidentified
MRIIGLDIHRVFAEAVALEDGELKRLGRIGMTRGHLEAFAKTLDPRDHVVVEATGNATAVTEILAPYVARVAVANPLQVHLIAKAKIKTDAIDARVLAKLYAAGFLPEVWIPDAATLARRRQVTRRTQLVRQRVRLKSIVQSILHANLIPRCPHADLFGGKGRAWLRAQYLPDDEQEAVEQHIQEYDRLTEALKGVERDIARAALADPNVTRLMTIPGIDMVVAVGLMAAIGQIERFPHPDKLAAYIGLNPSVYRSGDGPAFHGRITKRGRSNARHLLVEAAWQTVRSPGPLRAFYERVRARRGNHIAAVAVARKLTVIIWHLLTKGEDYDWVRPALHAKKLRDLELRAGYPEQRGQRGRSYDYNLPHRRREERARAEHAEAAYIRMTKGWRKRGPRQPTGAANEERL

SEQ ID NO: 183707 - protein, 417 aa, unidentified
MPALKELTLKKKGVAMHYLGIDVSKASHQCVILDAEGEALGKSFAIQSSKDDFANLVKKLSDLNIPKSDITAGLEATGNLWENIYVYLKERGFNIILLNPFQTNKFHQAMLKKAKTDSIDALVIAGLLRSGCAAGSYIPDEEIQSLRDLIRLKDGYLKDTKNYKRKAYSLLNLVFPEFLTLIKDPFNISCTEILSKYQTAADFKKIKPKDLLKVARGHQGNNYDEAWAGKVIQAAKDSIYSGKASKARGIVVKSLVLNIKNLKEQMIELDTEIQNILKSDDDSSNNDIDNLLTIPGVGPKTIAVFIAEVGDITRFASCKDFIGFVGLYPKIEQSGSSLNRAKLTTKGSRLLKHALYMASVASLIHNPYLKSVYNDKISQGKCAKQALIVVSRKIACIMYSMLKNNTVYNPGRVAIAV

SEQ ID NO: 183708 - protein, 403 aa, unidentified
MWFIGLDWADEHHDICVITDVGKQIGSLRIAHSPQGFENLKEFLLSITGPNKEEVACIVETNHGLLISWLLEAGYPVYPVNPKTIDRHRRPSGAKTDKIDAYLLAKYGRSEIADLRRLEPDSAIVAELKALTRDQDSLVRSQTRLVNQLTACLKAYYPVALKLFSKLQQHSTLAFLQAYPTPQEAMAASVGQIAQVLKEAGHPTAAKVAPKILETLHQPQLTADAITIRTKARLMLVLLKQLQPLVEEIAHYDKVIQELFLTHADSKMFGSLPRAGKRLAPRLLAEIGDDPDRYAEAASLQALAGTSPVLFESGNYSKPHRRYACSKPLRNALQQFAWQSTQRAGWARDYYQRKRKEGKSHTVAVRALANVWVRILFAMRSSHSCYCAATFEEAQRKHAPRAA

SEQ ID NO: 183709 - protein, 359 aa, unidentified
MQRNKISFKGQKIFIGIDVHKTTWEVAVLTESGLLRRHPQEASAKVLFDFLRKHYPDGEYHAVYESGFSGFATYYALKEFGIECTVTHAADVPTTQYEELMKTDTIDAEKLARALRRGDIKRPVYIREKDNIDDRGVIRIRRIIRKQLSGYKSRVKHMLHCNGVELPERFSKSGSHWSRAFITWLKDDVRLLSSTRLSLDLLIRQVEVIRGTLLEATRELRKLSQTERYRHRCDLLMTVPGIGPQVAMCILTEVWDVNRFSNERKFAHYMGLVPTCHDSGPHKSSGEKTFRGNKHLGPMIIEACWVAIHRDLGLGACYACHKKRMNPQKAIVRVARKMSNIIYSVLKNDKEYEPYQWDN

SEQ ID NO: 183710 - protein, 316 aa, unidentified
MNTSSPFVGIDVAKDELVIALGPSRDLLAVPNDESGIRHVLEHLQAASPALIVLEATGGYETAAVAALAAAGLPVVVANPRQVRAFAKAMGILAKTDNIDAHVLALFAERVRPPIRPLPDEALRMLDALLTRRRQLIEMLVAERNRLAHALPPVEKSLKQHIRWLERRLADVDSDMDQAIQQSPVWRAKEDLLRSVPGVGPVVSRTLLADLPELGALNRKQIAALVGVAPLAKDSGTLRGKRMVWGGRAPVRAVLYMGALIASRHNPVIRDFYQRLVAAGKPKKVALTACMRKLLVILNTMVRNNTRWGERYALSA

SEQ ID NO: 183711 - protein, 367 aa, unidentified
MKKVSTAVAKQSRNISRQKLTVGLDLGDRNSWYCVMDDAGQIQLERRVRTHVKALQEVFGVMPRSRIALEIGTHSPWVSRLLSELGQEVIVANARKVRLIGESRKKDDRLDAQTLARLARIDPELLYPVKHRSAQAQADLSVIRARAGLVRARTGLVNTARGLAKSYGERLRGCNVRNMNPEKAESLSPELQHALEPLLAGIEAVSERIREYNERLEQLAQQSYPQTALLKQVKGVGTLIALTYLLTLEDPHRFGKSRDVGCYLGLQPGRRNSGRSEPQLHISKEGDPYLRTLLVQGAQHILGPFGIDCDLRRWGLKLAERGGRNGKKRAIVATARKLAVLLHHLWVSGEAYQPLHNSSRTTLAAAA

SEQ ID NO: 183712 - protein, 471 aa, unidentified
MPRRKSPSLPPDPATAALLQTLHPHAAGIDVGATELWVCVPPSAVAAPAAPSVLAVLPPYVRRFGAFTADLHAIAAWLRQCQVTTVAMESTGVYWIPLYDLLESAGFQVVLVDPRQVQRAPNRPKTDVHDCQWIQRLHSLGLLTAAFRPEEPIRVWRAYQRHRATLIEDAGRHLQRIEKALEQMNVKLPEVVSDITGVTGMGIVRAIVRGERDPQALAKLRDRRCKESAATIARALQGTWQPEHLFALQQSLALYDYYHEQIQACDRVIEEHLKGMALPEVPPLEPTRRVRRRRDNEVTFDARQRLHHMAGVDLTAIEGIEESTALVVLSEIGTDMSRWPSEKHFGSWLGLAPNPQKSGGKMRSSATRPGVNRAAQALRLAAKNLQRSQSALGAFFRRIAARRGLAKAITATAYKLARIIYALLKHGTVYVTQGLAAYETAYRERMVRQMKRKAAELGLVIVEQEAVTQQA

SEQ ID NO: 183713 - protein, 416 aa, unidentified
MIDQKEKNEMKHVIALDVSKGKSTVAIYDGHRQCEFEGMLHHTRCDFERLHERMEEITKQDGQAPAIVFEATGIYSKPVEAFFKDYGYAYCRMNPLEANLQMATMRRNKTDISDAHELAKTHFKMERETTYIQDDYYEQMRALTRYYDEIDEEIILLKSRMHAILQLSFPELEKLITPSSALFLNIVQLYPHPALLQAHSKTMIKNRLKVNTRKNLSLMRAEAKAITLLEAAENSYPAIKPTDIRCDQARDYAARIADLLEKKDALVKQMVELSEGRKEYLVFRSIPGIGDSTACRLIGEIGDIRRFQNAKQLNAYTGIDIMRYQSGNTQYRDRINKRGNKHLRKILYFMVCAMLMAKGKPNHFVDYYYKLKKQPQRKPHKVAIIACINKFLKVTFQLLTRGILYDYESALPAQKS

SEQ ID NO: 183714 - protein, 421 aa, unidentified
MKVTYQTCCGVDVHKSFLVATIIKTTGGIDPSYLKKRFSTFNNSILEFKQWLLDNDCHDVCMESTGKYWIPVLNLLEDEINVTIANPKWVKAVKGNKDDTKDSKWIGDLFRLGLVKGSYVPCKAIRILREYTRYRYKLVSCRSSEKNRYQNALTVCNVALDSVVSDIFGKSSTSIIDYLLEQSGTSINHEEIASKLLRSLKSKEDAVIESIEGYQMTDAQKYRMRLVRAHMDYITAEINDIDSSIEKMISSNPDYENAVRLLCTIPGVKRDSAVTIISEIGADMSVFPTAKHLVSWAGCCPRNDQSNKKIKSTRISRAGSYFKPILVQVANALIKSKKHPEFTNRYRRIKARRGHKKAIIAICRMILTAIWHILSDLNPYTPDGFLESRPVNESKTLTTSQALNLLKQRGYIIKDEPVTAS

SEQ ID NO: 183715 - protein, 365 aa, unidentified
MASIVSCEPRRVVGGVDTHKDVHVAAVIDAVGRSLASESFPTTRQGYRCLLRWLRSHGELVAVGVEGTGSWGAGLARYLTTRGVAVMEVNRPNRQNRRLRGKSDAVDAEAAARAVLNGQATVTPKSATGPVEAVRQLRIARSGAMKARTAAANQLHSLCDTAPDPVRAQLGSLSLTQKVAVAERWRPGSTTTVDTAAKRALTTVARRWRALDDEARELDRHIKAILDEIAAALLAVHGVGYATAGQLLVTAGDNPGRLGHEKSFAALCGSTPVQASSGRTNRHRLNRGGDRQANSALWTIVLTRMVSHPPTKAYVQRRTTEGLSKTEIMRCLKRYVARELYPLLQAITTPTTIEQRHPNPAESHP

SEQ ID NO: 183716 - protein, 356 aa, unidentified
MTSTIKYVGLDVHKQSISIAVRNAAGKIVMECVIETKASTILQFFDGLRGDVQVTFEEGTWAAWLYDLLKPHVTKLVVCDPRRNALLQDGNQNDRVDARKLSDLLFMNKLNPVYHGDHGLRTLKELGRSYLTITRDQSRVMSRIKAIYRSWAIPCSGKQVYGMRHRAEWLGKIQEPGVHRRAELYYQQLDALRILRQEVRRDLLTESKKHKVWKRLCAIPSMGPIRAAELLGILQTPHRFRTKRQLWTYCGLGVVTSSSADHEVANGQLRRRKKHMQIRGLNENCNHDLKNLFKGAAVVASIKPGPLAEFYAALVAKGMRPEMARLTLARKIATIVLIVWKRGVCFDAQYLKSQTA

SEQ ID NO: 183717 - protein, 344 aa, unidentified
MDHIGFDLGKVNSQLCIITAEGELIERRITTNRDSLTKLLGSRPPAHILIEAATESEWVARHLEGLGHQVVVADPNFAPMYATRSRRVKTDKRDARTLAEASRLGAYRPAHRTSDQQRHVRAQLAVREALVRTRAKYISLSRALLRRDGVRIASGTARCFSLRLAELSLPLELRAELTPLLTLLEGINQQIKQADEALSQLVKEDPVVKRLTTVPGVGPVTAVCFVATLDDVTRFPDAKQARAYLGLVPTEYSSGERQQRGRINKAGPNRARYLLVEAAWSILRRRSSATADLYQWATAIRERRGTKIAVVALARKLAGILYAMWRDETDFKSSSMRADPAVAA

SEQ ID NO: 183718 - protein, 343 aa, unidentified
MNEVITIGVDLAKNVFQVHGVDAAGGVIFRRQLRRGQVLPFFKKQRPCLVGMEACATSHHWGREIEALGHQVRLMPPRYVKPYVKRNKNDMADAEAICEAVTRPTMRFVEIKTIDQQSVLMLHRTRHLFVRQRTTLINALRAHLAELGIVAGVGRNGLDRLLKVIEDGDDDRVPSAARDCLLALRDQLEMVKHQILDADRRILAWHRMSEVSQRLDDIPGVGPLIATALVASIPDPHAFKSGRDLAAWIGLVPRQNSTGGKERLGHISKAGNRYLRMLLVVGALSVIRRAKQVGYTRRPWLTKLLERRSTKIAAIALANKNARTAWAMMAHGTCYQEPVSQAA

SEQ ID NO: 183719 - protein, 410 aa, unidentified
MNRLVERCAGLDVHKATVTATVRVPGEGEREQETETFPTTTRGLLVLLDWLQSYKVTLVGMESTGVYWKPVYYALEGHFECWLLNAQHLRNVPGRKTDVADSAWICQLVEHGLVRPSFVPPKPIRALRDLTRYRKSQIEDRTREVQRLDKVLQDAGIKLTSVASKTLGASARAMLDQLIAGNHDPKALADLAKGRLRVKLAELEDALEGHFITEHHGLMTREILSHIDYLDATIARLSARIEEVIAPFSAKVDLLKTIPGVDQRTAEVIVAEIGVDMGQFPSAAHLASWAGMCPGNNESAGKHKSGRTRNGSKWLRKGLTEAAQAAARTKDTYVRVRHARIRARRGPSKATGATRHHILVAAYHILSEEVPYQELGLDHFERRHSDEQRTKRLVRQLEQLGHNVVLEPAA

SEQ ID NO: 183720 - protein, 343 aa, unidentified
MNSTTIAVDVAKAVFEVAVSEHARQVRERHRFSRERFRRYLGEQPPATILMEACGSAHYWGREAQTRGHRVVLLPPHAVRPYVVRNKTDRTDAKALLEATRNDEVRPVPVKSATQQALAALHRLRSAWLATRTARINIVRGLLREFGVVIPIGARHVVPALGSLEDADVGVPSLLRPALAEAAREIRELEGRIRTVEHQLEAVAEQTPVVSRLCSIPGVGLLTATALVAAVGDVQRFPSGRHFASYLGLTPRERSTGQRRQLGAISKRGDAYLRMLLIHGARAVLCHAKTKTAPAPDRLRAWALHLERFRGHNKAAVALANKLARIAWAVWKYDTDFAAAPAA

SEQ ID NO: 183721 - protein, 343 aa, unidentified
MKIIRVGVDLAKNVFQVHGVDRNEKPVWRRKLKRDEWIKVLLENVEPGCVIGMEACGGAHHWARILEAKGYTVRLIAPQFVKPYVKSNKNDARDAEAICEAMSRPNMRFVSIKTVEQQDVQAVHRVRAGLMEQRIAKANQIRGLVSEYGLVAPMQISHLRAAIPEWLEDAENGLTSRFRRILNGLWVDMQTLDQRLKELDQEIAEIAAADPVARRLQQLRGVGPLTATALLATVGNASQFANGRQMAVSLGLTPRQNSSGGKEKLLGISKRGDPYVRSLLVHGARSMIRAAKNKDDRLSQWVMRITNAHHTNVAVVAMANKTARIAWAMIRYGSDYQPDLAAA

SEQ ID NO: 183722 - protein, 351 aa, unidentified
MKTQKSSIGIDVGKDTVVCCKGSLKTNGQFSFGRPQTFPNSPEGFGQLADWAGREEKETVFVMEATGVYYENLAYWLDGRGRKLSVLLPGKVKHYGRSLNVKTKTDGVDAQLLSRMGLERKLHTWHMPSEAMRTIKFLSRQYKEVKDKLVAAKNQMHAKTHSYGCPESVTDRLKKEIRLLEAQLLEIETELREAAETDKALYDRIAKVLTLPGAGFMTVISILAETNAFALVRNAKQLVSYAGLDIKLNQSGTKEGKTKISKQGNKFIRNALYMPALCAARHNKQLSRFYKRLIERKPAKKIGVTAVARKLLILIYILWKNNEEFRPEAEKKSRQAQSLPTQDKQPTAAFL

SEQ ID NO: 183723 - protein, 343 aa, unidentified
MYYIGLDVHKKTISYCVKDAAGHVHREGKIGSTRRELDAWIETLPQPRMIAMEATVFTGWIYDHLLPCAEAVKVAHPLMLRAIAAAKKKNDRIDANKIADCLRCDFLPECYMAPTEIRDRRRVMRYRNLVVKQMVQTKNRVSGLLMETGVSYNKQRLHRAGYFTELLTANQDISESIRLLLKLGREQIIRAQRLDDALISSLEKDPLLSERLKRLRSIPGVGPITALTWILEIGDYSRFRSIKQAISYCGLCSSEKSSADKVIRTPISKQRNKHLQQVLVEAAKLAPRYSYDLALIRDRELKKGHRNRATLAVARKMVAYMLAVERRKQDFLATEQMAGEAVA

SEQ ID NO: 183724 - protein, 345 aa, unidentified
MVHVGLDLSRPRLDVCALDDAGALVTRTTASPDAEGLRVLANRLAPLGEVSAVVESMTGARFVRDELVACGWEVLIADAVKVKGLAPLACKTDKIDALVLAELSRRDLVPQIWLPSPTVRQTRELSRFRIHLVKHATMLRNRIHSALITYGIPCRTSDLFGVGGRHQLAQLELPEPWAGNVLSMLAVNDHLATETAGLERQLRKLSAKDPAVPLLMTAPGIGPILGFTIAAEIGDITRFPSPRQLVSYTGLVPRVYQSGNTDRRGPLAKNGPRYLRWALIEAAMHAAAHPVYRDHYQRTKTRLGKQRGAKIARVEVARKLTEAIWHMLSTNTSFAPAGATSSLAA

SEQ ID NO: 183725 - protein, 370 aa, unidentified
MKESITSFVGLDVHKDSIAIAVAQAGRQAPRFVGTVVPSLPSLRRVLRGIGKASDTLVVYEAGPCGYGLARRLSAEGYSCEVVAPARIARSPIDQRIKTDRRDALLLARESRAGNLVSVVLPDERDEALRDLSRTREDVLAARLRAHQQMKALLLRHGRAFAGRSPWSQAHERTLSQIRLPHPAQDIAFVEYRNAIKEAHERLERITEALRLQSSLWRMRPLVQALMCLRGFDFVAAVTFVAEIGDPRRFAHPIALMSYLGLVPSEFSSGNSRRQGSITKSGNKHARRILVESAWTYCHGPRVSRCLEVRQQGQPKSVRDISWRAQLRLTKRFRHLRMGRKLPQNKVCVAIARELCGFIWDIARQVKPLQ

SEQ ID NO: 183726 - protein, 337 aa, unidentified
MLFCGIDLHSNNCLVVVSDEADKVVYSKRLVNDLRTICSALEPYRQELSGVVVESTYNWYWLVDGLIEAGYMLHLANTTAIKQYDGLKHRGDESDARHLALLLRLGLLPEGHIMPKPMRAVRDLARKRMQLVEMRTTNILSIETCLAQQTGSYITGREIKQLTELDIDAMPIGTTEAQGMKANLAVMQALQAQIDEIEKSLVSYCRVAPGYRLLNSVSGIGTILAAVILLETGDIARFSGPGNYASYCRCVSSAHVSKGKKKGEGNTKNGNRFLAWAYVEAANFAIRFCEPARKFYQRKKAKRNSVVAIKAVAHKLARACFHMLKTGEQFSVEPCFS

SEQ ID NO: 183727 - protein, 338 aa, unidentified
MIVIGVDVHKQSLTAVAVDEAGRMLAEKRVAAANQELLEWGSRLGRERLWAIEDCRQLTRALERELIAVDEQLVRVPPKLMAPERRAGRQRGKSDPIDALAVARAALREPRLSRPRSDEQPFRELKLLVDHRDDLVDERRRAQQRLRWHLHQLDPSLLVPAKALDRPVHLDRVGRWLARRPGDVQVRVARELVVRCRQLTRTILELDCELERRTTETAPALLELPGCGTITAAKLLAEIGPVDRFQTDAQLARHGGVAPLEASSGRVQRHRLDRGGNRQRNCALYRIAITQARYHPAARAYLERKQAEGKSRREAIRCLKRQLARVIFNTLKASPALT

SEQ ID NO: 183728 - protein, 334 aa, unidentified
MQNVTLIGIDLGKHSFHVHAQDKNGNALLRKKFSRNPLTAFLSTCAASTVVMESCAGAHFMARHISQFGHQVKLISPQFVRPFVKSNKNDFIDAGAICEAASRPSMRFVTPRTEDQQAMSALHRVRDAIVRDRVKTTNQMHAFLLEFGISMPRGTAVIRRLAAVLEEHELPPYLARLLMRLHQHYAYLTEQIEELEQELKTHMADDDTAQRLLTIPGVGLITASLLATKLGDGKSYASSRDFAASTGLVPRQYSTGGKSTLMGISKRGDKNLRRLLVQCARAFMQRLEHNQGRLADWVKAQLSRHHSNVVACGLANKLARIAWSVTTHRTAFIQ

SEQ ID NO: 183729 - protein, 356 aa, unidentified
MNQLTTVGLDLAKDVIAACVLDLHGAVVERRVLKREAFQRWAEQLPVCTVAMEACGSAHHWGRWFAARGHTVRLIAPQFVAAFRKGGKNDAADAEAVAIAARQPTMRFVPIKTIDQQTILAWHCAREGWKEERTALMNRVRGLLTEFGIVIARSSDRFLAELPRLTEDPRLPDAMQGLLLEAREQLASLHARLARCEAQITNHARSNTAAQRVSALLGIGPITSSALAATVPDTTTFKSGRQFGAWLGLTPKQHSSGGKTRLGRISLRGNVYLRTLLIQGARSTLQSALRADLSRASRLQRWIIEFYGRRGYHKTLVAIANKHARIVWAILAKDERYDASAWQRHPMAQALPAASS

SEQ ID NO: 183730 - protein, 349 aa, unidentified
MEHYVGIDVSLELSSVCLVDAKGKIVKEAKVASDPDALVSFLRELGVSIERIGLEAGPLSQWLHAGLTKAGFETVLLETRHVKAALSAMTVKTDRKDARGIAQLIRMGWFRPVHCKSPGSQEIRALLVARKLLLGKLLDVEFSIRGILRGFGLKMGLVTRKGFEARVRELSAGHVMLEQVCAAMLAARAGLQTEYTKLHKALLTIVRNDHVCRRLMTAPGVGPVVAITFKTAVDDPTRIAKSKAVGALFGLTPKKYQPGETDVTGGITRVGDAMVRTALYEAANILLSRVTRFSTLKRWGMDVLKRRGTKRAKVALARKIGVVLHRMWIDGTNFRWTKAERATEGAAAA

SEQ ID NO: 183731 - protein, 455 aa, unidentified
MEVSLCKMKYITSSVLFASRKAALRASALLCGTYCAGIDVHKKAITVCLRVGRKQETRSFGTLTHQLRDMVAWLKDNGCQMVAMESTGSYWKPLYNIFEQEDLPAMVCNAHHLKNVPGRKTDVNDAQWIAKCLSMGLLNPSFIPDREQRELRELTRFRQSQIQERARNINRLQKFLEGANIKIGSWLSDVEGKSATQLLELVIGRPDFTVEDVAACMHGNMKSTAEDLFLSLEGYMTPLQREFFAHVMGIIRQQTVQIEKTDAMIKSSLSDGYKAAIKALDSIPGIGVISAEQIIAEVGTDMDRFRTPQRLSKWAGVCPGNNESAGKRKSGKTPPGNKTLKSTLTQSAQSAKRKKDSFFHAQYNRLVTGRGKNKATMAVAHSLLIAIFFVLSGRTFKDLGADYYTNFNREKKINSHVKQLSKLGVTIPEDVLRNIKHEAMRKAPRSRASPDNKVA

SEQ ID NO: 183732 - protein, 367 aa, unidentified
MSEITRVGVDLAKRVIQVHAVDSAGRRIVARALRREQFMAWCAQLPAGCVVAMEACSGAHHWARKLRALGLDARLIAAHFVTPYRMEGKAGKNDMTDAAAICEAASRPHMRLVPIKTCEQQGVLSLHRVREGLKEERTACINRIRGVLAEFGLVFGKSPKVLRAVLTDVIEDAGNELSPAARRVLNRALEHWRELDEHLHWCDQQVGLHVRSSPAAQRATTIIGIGELGASALVAGVGDFSQFHSGHQFSAWLGLVPSQNSSGGKTSLGRITKRGDDYLRTLLIQGAKAAVMSAERRDDPISAWLAPLIKRIGWQKACVAMANKNARILWAVMTRERGFDPHHVSVKPSAKQPAPEAGAGIPAMAAS

SEQ ID NO: 183733 - protein, 363 aa, unidentified
MEEKIRYVGIDLSKRTYQCMILDEKTKNQQFNGKTDGIGLERLAKRLAKNDLVGLEAGNNAFNLARFLMTRVGCQIVILNPRKLKMIYQSLKKTDKEDAMHIARLLQRNPVEELPTVPLPTKKEEEERAVVSELTRYKGDRTRYINRLHSVFLDAGITTITKADLKTATNREKNVSSLLTGRYLNEATRLVGMVATCEEIVDRLEEETRKYLESEKNAEILLSVPGVGPATALAFIAFVGDGSRFENSDQVANYVGLTPRVDSSGETHRMGPISKRGCVYLRRAIVLAAWALVRSKNGGPFREAYQELITRKPKAVAIIAIARRLIKLLYTLVRNRTYYRYSELKERLAKLKYYKFELIGLGA

SEQ ID NO: 183734 - protein, 343 aa, unidentified
MEHFAGLDVSVNETSVCIVDDRGRIVREAKVASEPEALLPVLTTPTYHFKRIGLEAGPLSQWLFSALAEANLPVICVETRHMRAVLKAQINKTDRNDARGMAQMMRAGLYRPVHVKTLRSQKLRMLLTHRKLLQSKAIAVENDLRGTLRNFGLKVGIVGKQKFEARIQELVETLPDLAALVEPLLIVRRVLREQIAVLHRRLLSIVRDDEVCRRLMTVPGVGPVVALTFRATVDVPARFRNSRAVGAVFGLTPAKYQSGEINRTGAISKCGDEMMRVMLYEAAQIMLVRSTQWSWLKAWAMQIARRRGMKKAIVALARRLAVIMHRIWLDGTEFRWSKDAVAA

SEQ ID NO: 183735 - protein, 330 aa, unidentified
MKNYEEVVGIDVSKKSLDAYCYHTQAHKEFTNDISGYKSLLKWVLKVTKTSKVFYCFENTGYYSLKLALYLDSQSIVYVEESPLKIKRSSGIVKEKTDRIDSILIARYAWLYREELTPSSVKSMSHLELGRLLALRDQLVRNNAGLKGTLKEMKVLLSSSSTDVGCLSLKRSIDYLEKQVKAIETRIQDIISADASMRKNYELLTSLKGIGLVVACQLIYHTGNFTRFASWRAFSSYCGTAPFKHESGTSIHRRKQCHYLGDRKMKSLLSMASVSAIQHDSELRLYYKRKLAEGKDKMLAINNVRNKLIARAFAVVKRGTPYVVLQQHAA

SEQ ID NO: 183736 - protein, 339 aa, unidentified
MPLYAGCDLHSNNNYFALVDEQGKRVDHWKLRNDPKLILATLESQRSKIVGIVVESTYNWYWLVDTLMGAGYRVHLANPAAIQQYGGLKHTDDKHDAFWLAQMLRLGILPEGYIYPKEERPTRDLLRKRGHLVRLRTSLMLSLQNIIDRNYGLRISGNDMKRLREDRVSPFFARDGDLNLVGSVSKEAIDFLTRQIRKIEKVIEEKVELRAPYRYLLTLPGVGKILALTIMLETGPISRFVKVGNYASYCRKVSSQWLSNEKVKGKGNKKSGNKYLAWAFSEAAEFARRQEGAARAYYQRKRQRTNLMVAHSALAHKLARAAYYLMRDEVPFQPEKLFS

SEQ ID NO: 183737 - protein, 392 aa, unidentified
MYIVGIDIGKNHHEASIVSPEGKQIGRSLRFATTHKGADSLMNFIFKNIGNSPCVFGMEATGHYWYPIYSFLKARGYTIYVINPIQSDSLRKMYIRQTKNDSIDSFLIAEVIRFGQFTTTSMADENILAMRQLCRYRDSVISSRTEIKLRISTIIEQIFPEYEKQFSSLWLSTSMGILEKYLTPENIENAPIDELFEIIKDKSHNRLTKAKAISIKEAAADTFGIKIAQDAFSFQLKQLIDRMNFLDKQIEALDCQILEYYEKFDCYLHTIPGIGMIGAATILAEIGDISRFKNSSSLIAFAGIDPTVRQSGEFNSTHNHMSKRGSPYLRHAIFLAATTCSFHNSPLNAYYKKKRDQGKHHLTATGAVARKLTTVIYAVLRDSKPYEPKKFC

SEQ ID NO: 183738 - protein, 351 aa, unidentified
MQSQLAQPQDFWVGIDLAQDSFQAACAPLGLNTRTWHRLPQISLPNTAQGHRALAHWIGEQARALGGGHCRGIALEATGGHSRRFAEALATLKSPLPTPSILNPAFVKHFGKSLGQRSKNDKLDAAVLAVYGAVHTPAPAAPLSPAQQRLRELDRLRQGLVEQQTAWQNSRREAREALALAIIDQQLELVGKQIKMLEAEMDQVIKNDPDLWRQRELLRSVPGIGPRVAATILAELGDLSAYRRDELVGQVGLFAREHSSGKRRRRAGLVKGGGARVRRMLGMAAMAIGRGKSELKQFSERLVARGKAKMCAMGALMRKVLLIARAVIVSGQPYDAQQAMRREHKKMVASA

SEQ ID NO: 183739 - protein, 342 aa, unidentified
MEKVSIIGLDLAKRSFQAHGALADGGIGFRKKLSREKVLGFFAEQPRCIVALEACGSAHHWGRAIGDLGHEIRLIPPAYVKPFVKRQKNDATDAEAIAEAASRPTMRFVAVKTEGQQARAMLFRTRDLLVRQRTQLINALRGHLSEHGVVAAQGPANVKVLEEAVEDQTTSLPLLVVELAGVFLDQIEGLSKNISKLEKVTAQEATCGETTRRLQTMPGVGPIAALAVETFAPPMDVFKRGRDFAAWLGLVPRQHSTGGKQVLGKISKMGQRDIRRLLIIGAMAVVRSTLRKGAPEGSWLQRMLARKPKMLVAIALANKMARSVWAMLAKGEDFRVPAVAAI

SEQ ID NO: 183740 - protein, 495 aa, unidentified
MSDFRIPRRNVRTRPTPAPAPAANDLSRAARHAEKTRRHAEECAKLVSMPVQHAHAAGIDAGDISHWACVESTPDDTDAVREFPAHTAGLRQLVDWLRQCGVTTVALEATGVYAHVLFLTLLEAGFVVVMTAPQFARQIKGRPKTDKRDCQWIQRLHKHGLLPAVFQPDEATQTLRDYVRQRANLVRLSGQHIQRMQKALQLMNLKLTRVLADVTGVTGLMIIRAILAGQRDPQQLAKLRDRRCRHSVADIAQALDGRYRPEHVTELRCCLTLWEKYQEVIGELDEAIDAHLRTMRRQTELPPLPPKPRLRGHKPHDPRFDVRQALYFATGVDLTAIEGIEEMHALTLVSELGTDFTKWPTVKQFTCWLGLCPNWQKTGGKVKSSQTRRVKNRAAYALRLAAWSLLRSKSYLGAYLRRQRSRLGAPKAITALAHKLARIVYHLVRYGLAYVKQTEAAYAEQVRERLERQLRRRALELGFELKKIEPPVMPTVTEA

SEQ ID NO: 183741 - protein, 352 aa, unidentified
MHANTVAIDLAKEVFELAFADAQGRVIERKRLSRKNFARVMEQRPPLRILMEACGSAHYWGRRFQGQGHTVRLIPARDVRPYVRRNKTDRHDVAGMLEADRCADIAQVPVKTPEQQGIQSLHRLREHLKVERTATINLLRGTLREFGIVLPLGTTKLPSKVGEALEDGTNELPMALRHSLHQQLQRLNGLQADMAQIERQLEEFAARDVAVQRYRDVPGVGLLTATALRASAGDLSRFRNGRQFSAWLGLTPREHSSGQQRRLGRLTKRGDVYLRTLLIHGARAVLQGARMRQRRGQTLNPLQAWALSVQLRQGHNKAACALANKLTRRLWATHHHGQSFDPYHVSRRSAPV

SEQ ID NO: 183742 - protein, 334 aa, unidentified
MSLFMLAIDIGKLSFHVHGVDADGVIVSRKVSRAKLLCLVEELNPEIVAMEACASSHHWGRLFQSAGREVRLINAYFVRPFVRGSKNDAVDAEAIWDAASRPTMRFVPVKTADQQSLQSLHRVRDRLVHARTSLINHMRGLMAEYGIVLPKGAKRFTSGAEETIAAADLPPLARDLFGELGDELRDVDRRIARVDAKLAAICKENASCRRLMAMPGVGPVIATALVAAVDDARHFRSGRDLAAWIGLVPRQYTTGGKPKLGGIGRRANHYLRRQMVHGARAVASHQRHRAGGRGDWIRALEARRGFNKTVVAVANKMARAAWAMLVREEEYRAA

SEQ ID NO: 183743 - protein, 339 aa, unidentified
MFYVGVDYHKESLAVCIMKQGGSIEEFIELDATPEGMDKLIGMMNGRKYKVMGEAFTYAIDLHNYLIEKGVDSYLVDAKDFKIITRSHKKTDKNDSETIAWYLRLWSKGEIGLSIAYIVRNDEMKLRDLCRLREDLAKQKGQEMQRIGMHMRRNGEYIDEERYPDLTRKKALKHLQEQFADDFALMERIKTYLYISGRCDAIDGIFDKLTDDSPEVKLLTSFPGIGDLTAVQIMSMIVSIDRFETADEMRSFFGMAPNVRNSGETVCHGHITKAGDPMMRTILNRVIHSHMRWGGDDIAEYYESRKGSMGKMKAQTAACNKLLDRIFAVLKRGTPYRCR

SEQ ID NO: 183744 - protein, 345 aa, unidentified
MKITTIGIDLAKAVFQVHGVDGRGKTVLRKQLKRKDMLSFFANLQVCLIGMEACGSAHYWARELAKFGHTVRLMAPQFVKPYVKTNKSDRNDAEAICEAVGRKNMRFVPVKTAEQQAVLALHRARQGFVKARTAQANQIRGLLSEFGVVIPKGIGHIAKRLPEILENGENGLSGMTRELFSRLSENLQEMGKHAGELEQKIKLWHRENEQSRKLEDIAGIGPMTASAFVATVGDAKSFRSARQVPAWLGMVPRHDGTGGSVRMGKISKRGDVYLRTLLIHGARTVIRHVKREPGQTDGWLKKLLARRHKNIATVALAAKNARIAWALLAHERGYQRDYVSTRPAA

SEQ ID NO: 183745 - protein, 338 aa, unidentified
MKWTVAIGVDTHKHVHVAVALDRFGTQLGSREVATTESGYRSLLAWALELGLPAFAVEGCGSYGAGLVRFLELAGVAIWECERPRRQERRRGKSDLIDAALAAGRLLSGEGLCLPRGGGRREELRLLLLERRSAIQARTAALNQLSAIVVTAPEQLRQRLGRLSGERLARAAARLRPGDDVGTAVVHRLGRRAERLSQEVTEVDRRLLEILSEIAPALLAECGVGPVCAAQLLVSSGDPNRMASEASFAALAGTSPLDASSGQQRRHRLNRGGDRQLNRALHVIALARIHHHAETTAYYQRLLAAGKTAREARRCVKRALARYFYRRLHEIPPLALTT

SEQ ID NO: 183746 - protein, 343 aa, unidentified
MDHFAGLDVSVKETSVCIVDDTGRIVREVKVASEPEALLQVLGSPIYRFKRIGLEAGPLSQWLFSALAEAGLPVICVETRHMRAVLQAQINKTDRNDARGMAQMMRAGLYRPVHVKTLRSQKLRMLLTHRKLLQSKAIAIDNDLRGTLRNFGLKVGIVGTVKFEARIKELVENLPDLAVLVEPLLMVRRVLREQFAILHRRLLAIVRDDEVCRRLMTVPGVGPVVALTYRATVDVPARFRNSKAVGAVFGLTPSKYQSGEINRTGAISKCGDEMMRVMLYEAAQIMLVRLAKWSWLKAWAMKIARHRGMKKAIVALARRLAVIMHRIWVDGTEFRWTREAAVA

SEQ ID NO: 183747 - protein, 373 aa, unidentified
MSREIIYLGLDVHKDSITIAVLPSGAPAPTRVERLPNDLTKLRRFCERLAAHGEVRACYEASGAGYVVHRAMRAWGYHCDVIAPSLIPTKPGQQRKHDKYDAAQLARLYRAGELTLIRIPSEAEERVRDVVRCRETLQREVLASRHYILKFLTRRGFVYREGTNWSTAHYNWLRRLAAASSPLAPEDQMVFGEYLGLLEYKLSRRDELDRRIGELALTPALAPAVNRLQCFRGIQRHVAMVLATEIGDWQRFDSPRQLMAYLGLVPRERSSGDRERRGSLTKAGNSHCRHALVQAAWAYRYQPKVGLALKARQQGQSPVVIAHAWKAQHRLHTFYRRLAFRTKPQIAVVAVARELVGFLWAVMQDQDAPAVAA

SEQ ID NO: 183748 - protein, 342 aa, unidentified
MKAVYYIGLDLHKKIIAYCIKTDSGVTVSRGTVAATRSALLKWVESLPQPWMAAMEATLFTGWVYDFLKPYAKDLIVAHPQMLKAITAAKKKNDRADAEKICDLLRVDLIPQCYMAPEEMRELRRVLRYRSHIVHMATNVKNKMSGLLMEVGAEYSKKRLHGRSYFENLLDTVEDVPQSVKELLKLSRAGVEMFAAVQKKLLAALRDNELIRDRVQKLMTITGVGEVTALTWVLEIGDPNRFSARQAISYCGLCSAQKESAGKETRGPISKKRNKHLQTVLIEAAKIAPHWNPQLAKIHAKELTKGNRNRATLAVARKLVIYMLAVDKTGIEFVPVNEEVAA

SEQ ID NO: 183749 - protein, 364 aa, unidentified
MLVIHYIGLDVHKKTVSYCIKTAAGQIVRQGRLEASRPALRAWAEGLRVPWHGAMESTLFSAWIYDTLKPYAEKLVMGHPARMKAISAGKKKSDAIDASTIADLLRCNLLPTCYVLPPELRDLRRLLRYRNLVVQESVRMQNKMAGLLMESGTAFEKDKLHGKKYFTQLLKSLEEVPESVKDLLRMSRSSLEMFQSTQKQLVERLLSEPALEQRLERLLSIRAVGPITALTWALEIADPHRFASIADAVSYCGLTAAFRSSAGKQQRGPISKQRNAWLQSVLIEAAKLAPRWNPQLAALHAHELERGHANRATLQVARKLVAYLLAVDKSGQPFQVHTPAPPADTKAKNKTRRKSKKAAALAAA

SEQ ID NO: 183750 - protein, 348 aa, unidentified
MRSHFNPKEAHVKFSGIDLHSNNSVVVVSDEEDRIVYQKRLPNNLEQIRAALAPYRDELAGVVVESTYNWYFLVDGLIDAGYRVHLANTTAIKKYEGLKYSGDFADAAYLAQLLRLGLLPEGYIYPREERAGRDLGRKRMQLVRCQTMQILAIENILARQTGGRMSGERVKRLTAEQIEELGLVPDVALALEANRAVSETLQRQIAVLEKRLQQRVKLRPEYCLLKTVPGIGETLATTIMLETGTITRFARVGNFSSYCRCVDSRRESNGKKKGEGNAKNGNKYLAWAFVEAANFALRYCPEAKRFYERKKRKTNGIVAIKAIAHKLARACYHMLREQKPFDVQRCFV

SEQ ID NO: 183751 - protein, 482 aa, unidentified
MKKRNIYQNQSQELLSLFEQAANNAKVMCVPIDYAKKDHVVMFCNGYGDILRKPFSVKNSPAGVDFLTDQVMRSCRQRAISEKHVFFGGEDVGSFADNFVSTLRCQGWLVAGVNAHEAKTQRENLQASTDRLDLMGIAKTLLNRRANCSPAQSGIYLNMRTVVRHRRKLVDITTEVRNRIHAVVDRLFPGFLNETKSGITPFSKSSLWLMQDRFSAPQIRRRRRSTLIEALRRLSTRKPECTADTLQQYATQVLKPPHEYVQMLQLSLAQHVKHFCCLQESIGQLEKEIAVNLAQTQGAFLTSVRGIGIVLAAGVSAEIGNPYEQKPLNNLVSYSGIIPRVKQTGGPQGETKTGKVAKRCNRILKDYAVQSASHLGLHGPADLMSDYKRRDAAGQHADFGMTRRYLRMAMCLMRTSQIYLPSGLRKAQAQIEQRADYYLMNWPYLRDKWQKLGALETAFKADHPLGQWRKIVQQFYGIKLTL

SEQ ID NO: 183752 - protein, 460 aa, unidentified
MSNGSRLSRGDRRRNDRLARLRAVVTRETAVLAFDLAADKQVCALTDQDSRVLARRTVKAKAWQLREAVEWGLARAAAAGFSSVVVACEPTGHRWRVLDQIAEQAGVRLVCVQPLLVHRARESEDFTRNKSDETDAMIIARLVTELRCYLPERAEPAWARLRHLGARRAGLVTDATAARQQITDLLECAWPAALQASGEPFKSKSWLAAITVVLDRVGASGDLTVIRRWGWTRFATAVRRELPRHGTTRWYSKIVRAVFDAAADPARAAAGVADQRDGALERTRFALTDLARARAEISVVETRMVEVLDELGMTELVTSIPGLSAVGAAAILAETGDPTRFTSARALVKHAGLCPRDNASGSYQGKTGISGRGRPQLRLAAWRAVWPAVRNNPVLAARYAHLTGRADNKLTKTQARVAVAGSLLRQLHAVITTGTAWDPAIAGGLNPQAPASARGVAAAA

SEQ ID NO: 183753 - protein, 344 aa, unidentified
MTFVGCDLHTRTQQVAVLDIETGEVSEHHLAHEGTAVEDFYAALPGPVTIGIESTGYTVWFHALMQRLEHTLLVGDAAKIRAMVVRKTKTDRRDALHILDLLSHDRFPTIWVPDPVTRDLRTLLTHRMRLVRIRTMVKNGLHAIALNYRLARGPKLLRRAGLAHLQALVLPPHSARRRDQSLELLAGLNTQIRELDEAITIAALAHPDAPRLITHPGVGALTALATVVVLGPVARFHDSKHVVSYVGLAPAVNASADKRHLGHITKQGSTLLRFVLGQAASHAARMDADLKRTYFTLVQRRGRPKAKVAVARKLLVRLFIMLRDQIDYDEFRRRGRPASAIPSA

SEQ ID NO: 183754 - protein, 476 aa, unidentified
MNGKSKEAKNQVNQANIFEREELVKKADAIMQDLKAHTWHELETKGKFDKNAKLSFINDEMLIIGCDIGSEMHYARAIDTRGRELSRKAFAFSNTAEGFASAKAWMLELAAANDKKQIVLGLEPTGHYWFCLTAWLVANGISVVQVNPYAVKQTKELEDNSQLKDDRKDPKLIANLVKDGNYGMPYLPEKVYADMRRLSMFRDQLMEDRIRCLNRLHRELTICFPEYKDALGKVDGAFAMELLKAAPFPEDLKEIGAEGIREIWKGAKLRGRGYSRAGEILRYAEQSVGLKDGAGISKEAVKWFAEKILELDRKLSDVEAELSDRCRAVPAAENLLEIPGIGRNILSGILSEIGDISRFDDAKEIQKLSGLGLVACSSGKHKGETKISHRGRKRLRYWLFQAAKSAVVHAEEFRRLHEYYTTRRDSPLKKMQSLIVIACKLLRIIFTILRDGTKYDAARMLNDIRRIDKQAVPAVA

SEQ ID NO: 183755 - protein, 366 aa, unidentified
MQNTIVQNEGAASLEAARTKVKLSRSIIKIGLDMHARLYVAVAQYDQLLPKPARRLAPLEFVPWVRQLLRAGHTVHVVYEACGFGFNLHRELKALGAQCYVIAPRKLDEQCTRVKTDPRDGLTLCQRLSRYVEGNTRELAVIRVPSEEEEQARHVSRQREQLVHHRQKLEAQGRSLLINHSLPAPAHWWKQQTWSRLGKLLPAWITLRLEVARPALLCLQKQINALTSELEAAAPSDIPAGLGKLTTVVMTREICSWERFSNRRAISSYTGLCLGEHTSGTKRIPGSVTKRGNPRLRAALVECAWRMVRFQPNYPPVKKRLGILAKGARATGAQRKKAIVAVARRLAVDLWRVHTGRCIAAQLFNH

SEQ ID NO: 183756 - protein, 410 aa, unidentified
MKIAGIDVHKKVLMVVVMDAGVPEAKPVRRRFVTLPSELQRLRGWLQEQGVEEAVMESTAQYWRSVWLELEAHMRLHLAQAFSNRAPRGRKHDFKDAERLVRRLIADELILSFVPNGEQRIWRSLTRMKVQLTRDHVRLQNQMECLLEEMRIKLSVVVSDLLGASGLRILQALAAGETDPKKLAQLGDERLQCTEEQLVDALTGRVQPMHREMLALQLQRLELIDQQMAQLNRMIAQAMKSQQDAVIRLAEVPGLGVDSAQQIVAEVGAQASTFSSAAELTSWVGTCPGKQESAEQNHSSRSAKGNKYLRRVLNQAAHAAAAKKGSHFQIVFRRLLPRLGYRSAIWAVAHRLCRVVWKILHEGVRFIESGPSVTPREKKKRAQMLARALRKLGYQVTITPINQVAAEPAT

SEQ ID NO: 183757 - protein, 485 aa, unidentified
MAKVKLSAFDRLRLGARLNRKERRDVEQRLSATDPGLEIVNRDAAGIDVGNESHYVAVPRGRDAQPVREFGSWTAALVEMAQWLMGCGIRTVVMQSTGVYWIAVHDVLQKHGLEVNLVDARGTKNVPGRKSDVQECQWLMRLHTYGLLRSCFLPAPEIHGIRTMWRLRDQHVKDAARCIQHMQKSLIAMNVQLHNALSDISGRSGQAIIRALLAGQRDAKTLAALRDPRCMASEEEIVHSLQGDWKPDVLFELQQAVDAYDFYRQQLAKCDEQLKQYMALLPARKVETVVSSAEPAATTDRSKTSRSRKPRKPKGNQPAFDLEAELERILGVNATTIDGINVITVQTVLAEVGPDLSAWKTEAHWSSWLNLAPKRDVSGGRVIRHIREHRTNRAGNAFRMAAQTLLHAHSYLGARCRYLRAKLGGLKAVKAMARVLACLYYRLVTKGQRWVDQGIEEFNRRSEQRELALLQRKAHKHGMHLVPTS

SEQ ID NO: 183758 - protein, 405 aa, unidentified
MSKDVFVGLDWAVHTHAVCLIDAAGSVLDRFEVTHDRDGLAELMRRLARHGQCLRIAIERPSGLIVDALVEVGHQVFPIHPNAVKASRPRYRSHGAKSDSSDAYLLADLLRTDGHRWRALAPQSDDIRALRALVRSRDGLVAARVAAANQLTSTLQAFWPGAAVIFADVASPIALAFLRRYPSPRSARRLTEAQLQRFCKTQHYSGRRSAADLLARLRAAAAGHVGAHTEQAMAEVVRAQVAVLVPIVTQIAELTRRIEQFMHSLPDGLLMMSFPRAGQVCAAQILAELGDVRERFPSADQLAAEAGAVPVTYQSGKTRSVAFRWACNHRLRQAITCLADNSRHANAWAKSVYQAARARGCDHTHAIRILARAWLRVIWRAWTDRKPYDPALHGSALALASSQGG

SEQ ID NO: 183759 - protein, 373 aa, unidentified
MSSDSVVLVGLDVHKDSIMVAYSVGFGDVENLGKISPRATDIDRLCKRMQSKASQVMFVYEAGPCGYGLHRQLTGKGHQCMVCAPSLIPRKPGERVKTDRRDAARLVRSLRAGDLSPVHVPTIEDEACRDLVRAWGAAKQDLKQARQRLKAFLLVHDVRYTGRADWGPAHRRWISGYSFDLPWQQIAFEEHRRTIEDRLTQCARLETTLREAAPQWRFYPVVEALQALRGVQFTTAIGLMAELGDLSRFDHPRQLMAWLGVTPSEHSSGQHRQLGSITKAGNSYARRLLIEAAWSYRHPAKVSPAIQKRHDRLPKAVIDRAWDAQLRLCKRYRKLTARGKHRNVAVVAIARELAGFIWDIARMTPITAAVQAA

SEQ ID NO: 183760 - protein, 414 aa, unidentified
MKQSITFEQVIERGCGIDVHKKVIVATIRGTSIKETTKTYNSFTESIEQMRDWLKSEGVTHIAMESTGVYWKPLYNILEEDFEIILVNARHIKNVPGRKTDKKDSKWIAKLLLSGLLKGSFIPPKPIRELRDLTRYRRKIVGQVSSEKNRLQKILEDANIKLSSVVSNMSGATATKIINAMISGEEDIEKLARFRHGKMQVNREDLKAALKGKLTAHHKFMLTTIKESIEDKEKLIEKLDEKIAEHLKTNELELDFELLQTIPGVGKDAAAGILAEVGNDMEQFPNEQHLASWAGMSPGNNESAGKKKSSRTTHGDIFLKIFLTQCAWAATRTKNTYLRSKYDSLVVRRGKKRALIAVGHKILVAAYFILRDKVEYKELGNEFLQDRNKDKRINRHLKLLKELGVDVEIKKHVA

SEQ ID NO: 183761 - protein, 456 aa, unidentified
MNKRIIGIDLAVSAKHKAVILDPASNEFIGKQVTFRARPADLDKLLQQARTGAPEDVILIAILEATGMAWYPVTAYLQRQGVIVYRVNGQKTKDLRRVMWKHAGSDLIDSRVLARLYTIAAKRIDLSPLPNGDLLALQRACRAYARWRELDVAEQNRMQAIDQWAWDGLNKLVPAVAQEWMRQHWYNPWHVQAAGQTQLLAAWLATEPKNPLETDWIARWVGRAQQMTTLYGSQEQVGYPHLQKEMHHSLCLRKQYAQEQASLTENVIQPLYQALYPACPLPTIYGIGTQSAATYRAFIQDIDRFPSVEKFRLWCGIVPHSKQSGDGEAKGMAMTHAGPNLVKATLYVNAEVARQWDVQLADLYYRQMVQYGKHHIQAVGACASHLASRIYALLKEQRPYQLRDLAGNPISAEHSRQLCLQLRVPVEVRKRNNKRFRRAQAEQKTESQTQQRQQRG

SEQ ID NO: 183762 - protein, 343 aa, unidentified
MEVKRVGIDLAKNVFQLHGVDRHEKAVFKRRLKRDRWLRVLLDNTDPDCVIGMEACSGAHHWARVLQSRGYTVRLIPPQFVLPYVKSNKNDANDAEAICEAMSRPSMRFVSVKRVEQQDVQATHRVRSELMKQRTAKAQQIRGLVSEYGLVAPLRLTALRAAIPRWLEDAENGLTSRFRALLHGLWRDLAGLDDRVAELTGEIEAIAKADPVAQRLQQLRGVGPLVATALLASVGDGHQYKKGRQMAAALGLTPRQHSLRGKDRLLGISKRGDAYLRSILIHGARAVVSTAKHKEDRLSQWVTQIAQRRHPNVAAVALANKTVRMAWSMMTSGSDYDPEFVIS

SEQ ID NO: 183763 - protein, 399 aa, unidentified
MNKKVHYIGLDVHKETIAVAIAPEGGGEVRNYGIIGGTLDALDKVIKKLQQPGVELRLVYEAGPCGYVIYRHLKKKGLHCEVVAPSLIPKKASDRVKTDRRDAQQLARLYRAGELTAIYVPDQENEAVRDLVRARHAAVMDQRKARQRLKGFLLRLGFRYTGKSSWNDAHQRYLARLTMPRPEQQIVFQEYIEAISVQTQRLERLTQAMKNALPGWKQEPVVRALMSLRGVQEIVGMTLVAEAGDLCRFDDPRQLMSYFGLTPGEHTSGDKRYQGSITKCGNGACRRVLTEAAWQYRLAPKVSPQLRQRQEKQSKAVRDISWKAQLRLHQRYKVLTAHRKKSVVAVTALARELTGFVWAIACQINAPDKVRKREPVPPATKPGRQYLLNPHKTFQKKTK

SEQ ID NO: 183764 - protein, 349 aa, unidentified
MSVYVGMDVHRKRSQVAIVDHAGTVQRNRNLPNDPAELTAILGVLPPGTPVAFEAAYGWGWLADLLEDLKLEPHLVHPSRCKAIASARLKNDKVDAETLAHLLRADLLPEAWIAPQHVRDLRALLRHRVSLVRLTTSLKNRVHAVLADRGVHAPGSLWTQAGRAWLAALELPPVPRETVDDCCGLIDTLATPIGRLEREIGKLAKPDPRVEALMALPGIGRLTAMTLVAEIGDIGRFPSARKLCAWAGLTPAVRNSDRKVRHGHITKQGSPWARWVLQEAAQRARTSPPFVGVYAQIAHRRGKQIATVAVARRLLGRSFHILKQLQAAPQLQTTPESEKVKTGRARVYA

SEQ ID NO: 183765 - protein, 421 aa, unidentified
MLKIHRFNCAGLDVHKNLIVATIGITDKKTRVTEYIQKEFSSLNFDLYHLKNWLIEHDCFDVCMESTGKYWIPVFNVLETENKMNIVLVHPKYVKAIKGKKTDKKDSKWICDLFKHDLLKSSFIPPKDIRELRDLSRYRFKLICMRTGERNRYQNAMTVSNIGLASVVSDPFGKTAQSVMNEVLSTKVIDENKIKKLIHGRCKNKDKIVESLKNSKIELDQRFKMTEIQSHMNELDQHIEAVEVEIIKRASKYFDNFLHITKINGIQMMSAILIISEIGVDMTQFETDKQLCCWAGLSPANNESAGKKKSVRINKAGQYLKPVLVQCALASIKNKDSYFGQKYSRIKKRRGHKKAIIAIARMMLVSIYHMILTGETFNPSDYESFKNPKPQREKNIYTVETALDFLKSQGFDVSSIQDIPK

SEQ ID NO: 183766 - protein, 408 aa, unidentified
MEVLYPRCAGLDVHAKTVVACVRLASGTTVTYEHRTVSTSTRGLLELDEWLTAHGCTHVAMEATGVYWKPVWHVLEEHFTLVLANAMHIRNIPGRKSDKNDATWIADLLALGLIRSSFVPPAPIQELRDLTRTRKQLVREMTRHTQRIQKTLEDANIKLTEVVSDILGVSGRAMLTALVAGETDPEQLVDLTRGRLKASRVQLIEALHGRVTAHHRFMIKLHLSQVAALETAVADVEAHIGDALAPFRAAVHLLTTMPGLKATAAAVIIAEIGDDMAKFPSAGHLLSWAGLCPRLDESAGKRRSSRTRQGAPWLKTTLVQVAWPAARKKDSYFHAQFLRLKSRRGPKKAILAVAASMLTDVYYMLRDGVEFHDLGDQYFAQRDKHQLTKRLLQRLRDLGVDVEVKKAA

SEQ ID NO: 183767 - protein, 355 aa, unidentified
MTSEKYIGLDVHQATISVAVMDSEGKVVMESILETKASTLLEFFAGLRGSLFVTFEEGTWAAWLYDLLKPHVTEVLVCNPRKIPLLKQGNKSDKIDARKLAERLRLHDLKPVYHGETGIRMLRELARSYLTVVKDLSRVMNRLKALYRSWAIPCAGRDVYYRRHRSAWLDKIPEAGTRHRAEQLYQQLDLLQHLRQQARRELLSESRKHVITAKLRKIPSLGPIRSALAVALIQTPHRFRSKRQLWTYSGLGLETRDSGEYHFVKGQPRRRKKQATIRGLNKDYNHDLKGLFKGAATRASVKPGPFQEFYQRSLAKGIKPTMVRLTLARKIAAITLTLWKKGEDFDIHKLNSQAA

SEQ ID NO: 183768 - protein, 393 aa, unidentified
MNTVGIDIGKRQHVAAVCRADQLEADRKVLRFSADRSGLAELTAWMERQGGEVSRVVMESSGHYWMPLAQALHRGGLAVAIVNPLEAKYFGKSRLQRTKSDPADARTLAALGMRDRPATREPLAGAELREAARFAMTLVTEQAKVCQRILRLVDLGFPELAKAYEDPTCMSALAVLRAVPTAAEAARRRTTTIAEARTPGRRIGPAKAEQIRSLAQDTIAPPELAAQVGFEMRLLIAQHDFLDTQIKEAEARVAGLLDGELARRLRTIPGVGPAITATLLSEIGDIHRFSDFDKLVAYVGVHPAEKSSGRKGADPETSWHMAKTGNAFLRAALYRMAVVGLQHNPVIKAHYTRKRAQGKSKMNALGHCMKKALAIVWGVWRGDHDFVAEVADA

SEQ ID NO: 183769 - protein, 309 aa, unidentified
MDTTVVGIDVSKDRLDVHVHPDGTALSFSRDASGIEALIGKLAGLVLQSVAVEATGGFETVVVASLAAAGLPVVVVNPAYVRAYAKALGKRAKTDPIDAQVIAQFAAAAKPQVRPLPDAATQALADLVARRRQIIHMIVAEGQREERASPRARKSIARMLKTLRAELSEINADIDESVRGSPVWCEKEKLLDSVPGVGSVTVRSLLADLPELGSLDRRQIAALVGVAPFTRQSGKWRGKSFIGGGRASVRAVLFMAAMTAMRWNPPLRAFHQRLRAAGKPKMVALIAVARKLLTILNAIIRDNKPWQTA

SEQ ID NO: 183770 - protein, 344 aa, unidentified
MTYYAALDVSLRSVNVCIVNDAGDIEYEAKIVSEVEDIITCLRAFKGEINKVGFEAGVLTQYLTYGLQAAGYEVVCMEARQVKAALSAMRNKTDKKDARGIAQILRTGWYSRVHVKSLESHHIRALLSSRKAILTKCVDLENEIRGLCKVFGIKLPSTLGHGSFDERARGTIEQDPALCHALLPLLEARLVLYRTFLEMARRARKMAQDDEVCRRLMTAPGVGIITALTFKAAVDDPARFKRSRTVAAHFGLTPRRFQSGEMDNMGRISKVGDANVRATLYVAAHSMLTRTTTWSSPKAWGMALIKKKGRRRAVVAVARKLAVILHRMWIDRTDFRWATEEVSA

SEQ ID NO: 183771 - protein, 447 aa, unidentified
MDRPLFEPNAAGIDIGAREIFVAVPPERDTDPVRKCETFTGDLHQMAEWLLSCGITTAAMEATGVYWIPVYEVLEQHGIKPCLVNPRNMKNVPGKRTDFHECQWIQHLHSLGLLHSAFRPDGEVCAVRSLMRHRNDLVEMASQHIQHMKKALVQMNVQFQHVISDITGLTGLAILDAILAGERNSAVLAKLRDPRIQASEETIRKSLEGNWRAEHILALKQRLSLYRTYRDQISDCDQEIEKLVAAFEPRVDPDEKPMPEDRKQKQRKRKKKSGNPDFNMRAEAYKLFGVDLTQIPGLMTLVFMLFSEVGRDMSRWPTAAHFVSWLGLCPDNDISGGKVLWRGVRRTKNRAGTLFRLAAHSLHRDQTPMGDYLRRMKAKLGPAAATTATAHKIAIIFYTMVKQQVEYDASLWAQRDQMREKRLEARLHKQAAQRGYKLVPMEEKTAA

SEQ ID NO: 183772 - protein, 437 aa, unidentified
MSKSQNPTKEVIPIMKKRIYRRMPVNDFQPDSISLADLGGKLIFAIDVAKVDMVAALAAADGRVLQTISWKAPDENPHVLEILRSFRLAGIPVEPVMEPSGTYGDVLHHQLEQDGFPLFMVSGKRTFDAREIFDGVPSLHDAKSAAIIARLHADNLSTRLRDEGPDRRQLRAALAIMDLHQERYLQLVHRLESWLARHWPELPTLIELTSSSLMALLARVGGPADVAAAPDKATKLLLGISHRLLPDDRVAAIIASARASVGVPLVGLERDALMAIADDAYRAHRAFTTAKTQVDKLAATTPAAALAPAVGHTTAAAVFAEVGDARTYSCTRAFVKAMGLNLKEKSSGTIHGQLKITKRGPSRVRQYLWLAVFRWIQTDPIANAWYQRKKKRDGGRSSRAAVALMRKLAKALYHVGRGAVFDSSKLFDVHRLQLSEG

SEQ ID NO: 183773 - protein, 336 aa, unidentified
MSYQWFIGIDVSKQTLDITILNNNEKKMYEQIVNSDQSIKSFLKKLSEQKIALHDCLFCLEHTGIYNAHFLKVMEERKLAVCLESSVHIKQSGGLLRGKNDKIDSFRIALYAFKNKEFLTLWQPERIVIRHLRRLSGIRERLLNAKKQITNTIKEDKKFISKECSAQMIRCCKQSIKALQEDIKKTEDEIKKIIDSDGRLKELFSIIESVPGVGKVTATEIVINTNEFRKINNPRKYACYAGVAPFEHSSGTSVRGKTRTSKKANLKAKSLLHMTSLVAVRFSDDLREYYERKVAEGKNKMNVLNAVKNKIIHRVFACVNQKRLYDKNYKFCLVES

SEQ ID NO: 183774 - protein, 403 aa, unidentified
MPNTRPKPTLPSPRSRSCSTRRRLAFRVAGAPKTLPAAARNAVFRSLQEQPAHRDRRAAIPVTIGLDIAKNFFQVHAVDGAGQVVLRRKLSRGEVLRFFETQPTTLVGIEACGTGHYWAREITALGHEVKLLPPTYVKAYVKRGKTDAADAEAICEAVSRPNMHFVPIKTPEQQAALMMHRSRDLLVGQRTALANALRGHLAELGIVAAKGLHRVADLLAELVGLENTKIPPLARSSLRCLASQIEAVEKQIDELEALIIEWHKGNAASQRLVKIPGVGPITASAVVATIGDASNFASARHLAAALGLTPRQNSSGGKARQGGISKAGNTYLRRLLYIGATSVIRSKRAREADGWMAGLLERRPAKVVAIAMANKTARVIWAMLRRGEAYRAPKLPITATAMA

SEQ ID NO: 183775 - protein, 365 aa, unidentified
MTKKAIDTLMSIGIDIGKDTFHLVGFDSDGQLVLRKKIKRLGLLQTFDKLPRCVVGMEACLSAHFVSRCLRKLGFKPRIIPAIYVKPFIKGQKNDYNDAEAIAEAALRPNLPTVPEKSQDQLDLQALHRVRSRLVSRRTATINQIRAFLIEQGITVRKGLRALKNSFETILEQRKDEISPRMRSILFGLYGDWLWLDDRIEAVSKEIEEISQREENCINVMTIPGIGPVISTAMVAAVGTGEAFDRARDFAAWVGLVPRQHSTGGRTILGRISKRGSRYLRMLFVQAARVILMRSNRWPDFSFGEWLIRASERMNQNKLAIALANKLARMAWSILRHKTAFDAPKKCGRDWNLKPFSASKEFAID

SEQ ID NO: 183776 - protein, 345 aa, unidentified
MPIVGGLDIHRKQITFDYLDTVTGEVRRGQIAPADRAHLRAWLARFAGCGDAAFAVEGCAGWRYVAEELAAAGIAAHLGEPADTAALRGRKRHAKTDKTDARHLRSLLAEGRLPECWIPPAHILECRALLETYHDLRTAHTAWVQRIHAVFFHQGAPPLGEGALRTGPGLAGLRAAAAAHLSAVGQQQVATALDMLAATEAQLGPLRHQLRDAARHLTGAKVLAERLYGVGPLTALALTCWLAGKGRFSSSRKAVRFTGLDITVHSSDRKGPPGRLSRQGPPVLRWAVYEAGKTHARTSAPDHAYYAAVADRKNTKRAALSEARKIVRQACHILAELGDDALTAA

SEQ ID NO: 183777 - protein, 356 aa, unidentified
MEHVNKLDFSGQSIYVGLDVHKKSWTVSIFSEQCEHKTFTQPPQADKLVHYLKRNFPGAAYQAVYEAGFSGFWTHDQLREQGVNCIVANPADVPTTNKERTGKRDPIDSRKLTRSLRNGDLKGIYVPARSKLEDRSLVRTRQSMVRKQTRCKNQIKALLYFYGIDPPEEVVDRSWSQKFLRCLDELRMERGSGDLVLKAHLDELRHLRQIIASLNRAIILLSRETEYRERVRLLRTVPGISTLSAMIFLTELCELARFASLDKLASYVGLIPDVESTGETEHIKNLTHRRNPQLRALLIEAAWVAARKDPVLLLAFNEYCKRMKKTRAIIKIARKLLNRIRYVLKNQAQYVPAVVQ

SEQ ID NO: 183778 - protein, 381 aa, unidentified
MKIPASGTRTRSLLNLPVMNKNNTESIALKKSGNRELADRMLVAVDTHAAYHVVGRQIDSAAPQPTQRVLPQSFVAFALKQLTLAREVHVVYEAGPFGFTLARTLLAHGIKCLVVTPKKLDPYHKRVRTDKTDTRELLADLDRYVRGNTRALRVVRIPTVEEELLRARNRQRDALCRDSARVAARGRTLLLHFGYRVSNMWWKQQAWDRLSTTVPQDILHMLEQYRTVILELQKLIKPLEKTITADAPKALPVGMGKLTFALLLREVLTWDRFKTRRQVGGFTGLCGGVLQSGSTRQDLSITKAGHRRMRTLLIELAWRMLRYQPQCGLVKKWAPRLAACGKNKSRRKQIIVALARQLAVDIWKWQTGRTTPQALGWALGA

SEQ ID NO: 183779 - protein, 347 aa, unidentified
MDYYAGIDVSLEQSSVCVVDGSGKIVGEGQVASEPEALLGYFGSLGFALERIGLEAGPLSQWLYAAMRKAGLPVELLETRHVKAALSAMPVKTDRNDARGIAQLMRLGWFRPVHCKSAEAQEMRALLSARKLVQSKLYDVEMSLRGILRGFGLKVGPTTPKRFAGRIGELTAGQATLEAVAAALLAVHTVLLRELNGFEKQLREIARSDKRVRLLMSTPGVGAIVALTYVSAIDDPGRFKSSKTVGAHFGLTPSKYQSGETDVSGRITKIGDGAVRTMLYEAANVILTRPIKTGGLKSWAMKLAKRAGMKKAKVALARKLAVVLHRMLADMTEFVAEKASGCVRAAA

SEQ ID NO: 183780 - protein, 372 aa, unidentified
MDAPTRNGIEVPKWKCLQPLEPEGASAMKITTVGIDLAKNLFQVHAVDERGRAVLRKQLRRDQMARFFANLLPCLIGMEACASAHHWARTLQKFGHTVRLMAPQFVKPYVKTNKNDVADAEAICEAVSRPNMRFVPIKSVEQQAVLSLHRVRQGFVRARTAQGNQIRGLLGEAGLIIPKGIVNVAKRVPALLEDAGDEVPASFRQLIQRLTEHLKELDRQVDELETQIKAWHRGSKLSCKLEKIPGIGPLGASALVASIADAKSFDNGRQLSAWLGLVPRQDSSGGKPKLLGISKRGDVYLRTLLIHGARSAILAAQRKAVNTNVWLAGLLNRRHPNIAAVALANKNARTVWALLAHGREFRADYAPEASAA

SEQ ID NO: 183781 - protein, 344 aa, unidentified
MEHYAGLDVSIKETSVCVIDGTGRVVREVKVPTEPEAILAVLSDEDFNIKRIGLEAGPLSQWLYGELAEAGLPMICVETRHMRAALSAQVNKSDRNDARGIAHMMRVGLYRLVHVKTPASQKRRMLLTSRQLLQAKARDIENDLRGTLRNFGLKVGIVGAIKFEARIRELVANHPDLATIVDSLLVARRVLREQLSVLHRHLLAVVRDDEVCRRLMTMPGVGPVVALTFRATVDVPARFTNSKTVGAIFGLTPRRHQSGEIDRMGGISKCGDAMMRTVLFEAAQAMLTRTIKWSWLKAWGMKIARHRGMKRAVVAVARRMAVVMHRMWVDGTDFQWKREEVAAA

SEQ ID NO: 183782 - protein, 428 aa, unidentified
MDRCPSDTDLWGVAREGSATLEVALPSLRPGSSKQGEEAVAKVVIGVDPHKRLNAVVVINLKGKVLARRQFPNSAEGFRELRSFGRQWRPRTWAVEGCNGVGKYLAQRLVAAGERVVDVSTRRAALVRVFAGGNGRKNDDVDAHSVALVGLHTRDLPEVRKDDRSASLRLLANRRKELVDLRTQCVNRLHRDLVGLISGGAPQALTAVKAKALLASIRPRDEMGRLRRRLAADQLADLVALDKKLAAVEAEIRSMVKRTPTGLPDIYGIGPVITATVIGEVGDVARFQDRHHFASYNGTAPDDKGSAGRPVHCVNLKGNRRLNHAIHMAAITQIRNRRSPGRAYYERKLAETKTNKEALRCLKRRISDVVYRQLLADADRQTKAGPGGQTGTTLQSSVTSPTPTAGSSDKPQPGPATEATPTPLRAAG

SEQ ID NO: 183783 - protein, 342 aa, unidentified
MEDSIYDHYIAIDWSIKNMAIARMTKKSNKITVIDVDSDIEDLQAYLKNLRGSKILTIEETTTSQWLYTELREYVDRIIICDPNRNKLLNEGAKTDKIDASKLVQLLKAGLIKEVYHSTDKFLYLRRIVSGYEDLVKAGVRLKNQRYSLLRVCGKSGTEKIGSRLDAQGEQFVLECLDRQIEAYEENKEDYEMQFAKLAQSNPEIKHQKSLPGIGVINAVKIVARVVTPHRFPDKGHYLSYTGLIKLAKISGGRSYGKRNPRYSRQLKSVYKSGVLAAIGGNNPINDYYNSLIQDGYAQHNARQKACRRLAVLSIGVFKSGKRYQPYRRNHVKGGKEGTSSL

SEQ ID NO: 183784 - protein, 428 aa, unidentified
MSERDYNRQAARRQRVSKATLIVGVDVGKAFNAVGFMNKDGNVLGSCSKLYNSREGFEQFVKMIEGLKARHRLRDVLIGMEPTGHYWRKLAYFAIEHGYEVRFVRTTALKHHRELDESSSAKSDRRDALTIANITREGKYIDTVIEDGVLRQLRTLSKARERLLRYSVSAKNSLHAALDDYFPELHEIFRSMGARSLWVILEKCPFPEDVVLMKTSILQEMIARSSRKKAGSARKAKALYEAAQKSIGVKQIGTADRYRVRMCLEEVKRTVLTLKDMDRQLKSMAKDIPSASYLMSIPGIGPLSVAVFLGELGNPAHFHNARQIVKYAGYDPQESDSGSWIGRKFISKKGRWLLRKYLFFMSMRVVVLSKYFHEYYHRKLETKNRVGQLPRRKEILCAVAIKLIKVIFALLRDKRSFEDTASAAVVIA

SEQ ID NO: 183785 - protein, 476 aa, unidentified
MVEWERCCRHRGRVLHGAGSPYVSLTGGPTSTLDCRHGLDPSGLGSGARLVEFDDGGFTPAAAHGGDPMNVLHANCGGLDVHKEEVVACARLQQGAKVQRQQRRFDTTTKGLLELQAWLLELGCTHVAMEATGVYWKPVWHVLEGHVELVLANAAHIRNVPGRKTDMNDATWIADLLAHGLITASMVPPTPIQELRDLTRTRRQLVREIGQHTQRVQRVLEDANVKLSSVISDVLGMSGRRILEAIIAGEDDPEKLAALGSERLRCSHEQLCEALRGRVSAHHRFLLRQHLDTIDHLQAAVNRFEAEIARVLEPFRAQFERLLTIPGVREAAAASIIAEIGVDMSRFPSAAHLVSWAGLCPRMDESAGKRRSTRLRKGAPWLKPVLVQCAWGAARTKRTYTQAQFLRLKARRGPMKAAVAVAATILNAAYYILKDGVSYRELGPDHFVKRERPRVAQRLARRIRELGYEVTIRPAA

SEQ ID NO: 183786 - protein, 344 aa, unidentified
MTNIVKQVVGIDVAQNELVVSLGRMNHDTGTDIFAFKTFPNNAVGFKDLWAWVSKLSAKEISVRYVMEATGVYHEKLAYYLSDQGQEVSIVLPNKISNYFRTLEVKTITDKTASQAICQFGLERKLEAWKKPKKIFKDLKQLTRERDQLIAERTALKNQLHAEKAEAFPNDSSIKRVIKRIQLNDKQELEIKAEIAAIVKQDLELVEKINTITTIPGVGKLTAVIVLAETNGFELIKNKKQLVSYSGLDVRLKDSGTSVKSKPKISKKGNRHLRKAMYMPALAAMRFNDQHKALFVRLVSKHGIKMKAAVAVQRKILELIYTIYKTDKAFDKNYTITNIQTETA

SEQ ID NO: 183787 - protein, 419 aa, unidentified
MNEDSNPVERVIGFDCHPDSFTAAVLRGSTPARAITEKVFNQVPMARLQHWAQKHTTENDLLVLEASGNSFEVVRALGKIGRRAEVLESCQMGRLKEAHANNDKISAVRIAKAYLAGTAKRVWVPDALTQERRDWFHAHRKAVKRSTQMRNRILSYLSDNGVRLRKGTSLIQTHAVEEQLRKARAWSARQWQVIEGMLMELRHAEQQRNHWRSLIAQEVIADPLLLSLVRLCGVRDLVAFALGALIGDIHRFSEPRKLVKYIGLNPAFDDSGNSQWQGGIGGHGRKDLRALLIEAAQAILRSRDPLAQWGKKLLARKGSVSLAVAAIARKLTVAIWYLMMGRWTPLEELDARLNLKAGKILTAVGTGPLEKLGKTRKQLREQIEQSLKAGRIYVLKPGGKPLPHVPSESQSLAVEYGIG

SEQ ID NO: 183788 - protein, 380 aa, unidentified
MIDAKGVVLDRFEVGHNRAGLAALIARLQQHGAPGVLPVAIERPSGLLVDTLLEAGFVVTPIHPNVVKACRPRYRAVAAKSDPGDAFILADILRTDGHRLRPLAPQSDAIKALRGLVRGRDDLVGTKVALAHQLTALLESFWPGAARIFSALASPIALAFLERYPTPEAAARLGPKRLAGFLAQHRYCGRRSPEALLERLRSAPEGGAGEAKGELVRALARTLQALLAEIAKLSSRIEHAIAALPDGRIVMSFPRAGTICAAQILAELGDVRARFPSEHQLAAEAGVAPVTYQSGKSRGVGWRWACNKRLRAALTCMADNSRHHSPWAADVYGRARARGCDHPHAIRILARAWARVLWRAWTNRVPYDPGQHRGAQAFAA

SEQ ID NO: 183789 - protein, 471 aa, unidentified
MPRRKPALSRPDPAAAALLQTLHPHAAGIDIGATELWVCVPPSAVVAPSAPSAPTVLPPHVRRFGAFTADLHAIATWLRQCQVTTVAMESTGVYWLPLYDLLEAEGFAVLLVDPRQVQRAPNRPKTDVHDCQWIQRLHSLGLLTAAFRPEEPIRVWRSYQRHRASLIEDAGRHLQRIEKALEQMNVKLPAVVSDITGVTGMGIIRAIVRGERDPQALAKLRDRRCKESAATIARALQGTWQPEPLFALQQSLALYDYYHEQIRACDLVIEDHLQGMALPEVSPLEATRRVRRRKDNEVTFDARQRLHHMAGVDLTAIEGIEESTALVVLSEIGTDMSRWPSEKHFGSWLGLAPNPKKSGGKVKSSATRPGVNRAAQALRLAAKNLQRSQSALGAFFRRIAARRGLAKAITATAYKLARIIYALLKHGTVYVTQGLAAYEMAYRERMVRQIKRKAAELGLVIVEQEAVAQPA

SEQ ID NO: 183790 - protein, 343 aa, unidentified
MQIHSVGIDLGKTTFHLVALGVAGKVIVRKKFNRKQLLAYTANVPASLIGLEACSGAHFLGRALREQGHDVRLIPAQFVKPFVKSNKNDFIDAEAIAEAVERKNMRFVPIKTDDQLDLQGIHRVRDRLICRRTAVINQLRAFLLERGMVFAHRPANLKAAMADILENAEADLTPQMRSLINMLWDEWKLVEEQIKKLDLELERISAADAGCTRIRQIPGIGPVVATAIVAAIGNGAAFHKGRDFAAWLGIVPRQYSTGGKAKLLGISKRGNIYLRKILIHGAPAAVLRIKRDRAPIGPWLDALDARAPKNVVVVAMANKLARIAWAVLSSGEDYRPMGNTIAA

SEQ ID NO: 183791 - protein, 404 aa, unidentified
MSNVAGIDISKGKSTVSVLRPFGEVVAKPFSVGHTGSELKELADYLKSLDGETRVVMEHTGRYYEPVARFLHDQGIFVSAVNPKLIKDYGNNTLRKVKTDKADARKIARYGLDNWVELRQHTPMDTIRMQLKTLNRQQGLYSKTKTMMKNNLIALLDQTYPGVNALFDSPVREDGSQKWVDFATAFWHVDCVRNMSLTAFTERYRKWCKRHGYNFSQSRAVEIHAGAQDLIAMLPKDALTKTMIRQAIDALNAVSASLERLKAEMRTLAAQLPEYPVVMAMHGVGDSLGPQLMAELGDVTRFTHRNAITAFAGVDPGADQSGTHEAKSTRASKSGPPELRKALFLVMDCLLKTMPADDPVYCFMDKKRAEGKPYLVYMTAGANKFLRIYYGRVKEYLALRENAD

SEQ ID NO: 183792 - protein, 356 aa, unidentified
MDKYIGMDVDDKKIVACGMRQDGSEAYETLGPTVEAMRAYVRRQQEEGVRVHLAFEISGQAGYLHDALVDEVASVQVANPTQATWIYRTPKKNDRLDARKLALLMRFGELPRVHMPAKEGRQWRAMIGHRAKRVHQQTRAKNRIRAVLKEQGIRRPAYKGGWWNQANRAWMASLAQGGDWMEESWRFRLGQWLGELRMVEGQIAQVTRRLDAYLARHPGGALLQTAPGIGPRTAEALLAYTDDVERFRTAKQYCGYFGVTPKLDESGSTRRLGHISKQGPAVARWLLCESAWRAIRYSAGLRAFFDRVTAGQTGRRKIAIVAVARKLLCIVRAMLRSGEAFNEALVRKVVRQSEAA

SEQ ID NO: 183793 - protein, 391 aa, unidentified
MTILVGIDVAKDKHDCFIMNSEGEVLAKPFTIFNNKEGFDFLYEKIQSVSSSDNIKVGLEATGHYSYNIIGFLLNKGLATFILNPLHTNLYRKSLSLRKTKTDKIDSKTIAMMLLSDVSLKSYSDISYHNEDLKSLTRYRFSKVEERAKLKTSLSRLAQILFPELEKLVSTLHMTSIYQLLEEFPSASAIASVHLTRLTNLLSKASKGHYDRETAIKIRDAAKNSIGSNMPAKSLELKHTIKLIRALTIDIGEIEAEISKMMDKIASPITTIPGIGRNMGAMIISEIGDFSRFSSPDKILAYAGFSPSIYQSGKLDNCYAHMEKRGSRYLRYALFHASKLVCHWDKTFADYLAKKRAEGKHYYVAISHAVKKLVRVIFHIEKTKQAFLKAS

SEQ ID NO: 183794 - protein, 445 aa, unidentified
MKKEVKNEFQLVHPNAAGIDIAKNVHYVSVPADRDETPVKHFGSYTEDLHELAQWLKRCMIDTVAMESTGIYWVQLYLILEEYGFDVFLVNARHVKNVTGRKSDVLDCQWIQQLHSFGLLNKSFQPENEIRELRAYMRHRKNLTQSYASQIQLMQKAFEQMNIKLQNVLTDICGKSGQLIIKAILAGERNPKVLAELADHQVKASKEEIMKSLVGNWRAEHLFELRQAYDLYLFFKEKISECDVQIENVLRRLESGELNQDENKKAPRGVYTKNKFNFNATNYLKSVIGVDITKIFGISEVLALEIISETGIDMTKWPTKKHFTSWLNLVPNNRISGGKLLKPKKVKKKNKAGQAFLMAAYALQRSNHWLGSFYRRVKAKQGPGVANKATARKLALIFYDMIKFHKEFNPINNEKYNKQYEENKIKFIQSQAIKLGFQLVPDIVS

SEQ ID NO: 183795 - protein, 338 aa, unidentified
MKHYGGIDLHSNSSYLGIMDEDDRKVFQKKLPNELCEVLKVLKPYKKKMEGIVVESTFNWYWLVDGLMENGYKVHLANPSAIKQYEGLKHSDDSRDAFHLAHLLKLDILPEGYIYPKEGRPVRDLLRKRSQLVRQRTMNILSFKNLVSRNLGKQISSNEIKRLKEEDVDNLFQEEYLIIAGKANIATIRFLTERIKEIEKAVLNKAKLRDEYKNLLTAPGIGTILALTIMLETGDIKRFSEVGNYVSYCRCVRSSRISNGKIKGEGNRKNGNKYLSWAYVEAANKAVSDYAYVRRYYQRKSAKTNKVVAIKAVAHKIARACYYMIRNQEVFNPKKAFG

SEQ ID NO: 183796 - protein, 410 aa, unidentified
MEVLHPHCAGLDVHKDTVVACVRHMAQGTVRREVRTFKTTTKDLMALSEWLSAEGCSHIAMEATGVYWKPVWHVLGDGEFELVLANAAHVKNVPGRKTDVNDATWLADLMAHGLIRGSFVPDEQTQEMRNLLRARKQFVRERSSHIQRIQKTLEDANIKLDSALSDVMGLSGRAMIEALIAGQSDPDILAGLAHRRVKAPPQELREALRGRVHEHHRFMLRLHLSQIDALAGAIAEIDREVDAHVEPFRTAITLLTTIPGVSDLSARVIMAEIGNDMSRFPTDGHLISWAGLCPKNDESAGKRRSTRMRKGAPWLKTTLIQCAWAGARKKGSYLQAQFHRLRSRRGTKKAIGAVAASILTAVYHMLTNGTLYQDLGPDHFDRRAKASQTKRLVIRLQNLGYAVQITPLAA

SEQ ID NO: 183797 - protein, 418 aa, unidentified
MERIVKRCAGLDVHKASVTACVRLATTASEGEEPHQQTRKFSTTTGGLLELRDWLASFEVTLVGMEATGVYWKPIYYMLEDDFECWLLNARHLKNVPGRKTDVKDAEWICQLLEYGLVRPSFVPPKEIRELRNLTRYRKRQIQERAEEVQRLEKVLQEAGIKLSSVATRVLGASGRAMIEALLSGTTDPKVLAELAKGRLRKKILKLEEALEGNFSSHHAFMVGNILAHIDYLDESIARLSEEIERVMAPFCEEEVALLSTIPGVDRRTAETLIAEIGVDMSRFPSSAHLASWAGMCPGNDESAGKRRSGKTRKGSKWLRSALTESAHAAARTKGSYLSAQYGGIRGRRGSKKAAVAVGHSILVIAYHLLERKVPYEDLGEDYLHNRRCTREARTNRLIRKLERLGHKVVLEPLVQSA

SEQ ID NO: 183798 - protein, 452 aa, unidentified
MKTDTGNKPDLKMVNPGAAAVDIGSTMHMAAVNPDSDDMPVRAFGTFTQDLHDLAEWFQSCGVTSVAMESTGVYWIPAFEILEQHGFDVILVNARYAKNVPGRKTDVSDAGWLRQLHSYGLLRGSFRPAAEIATLRAYLRQRERLVEYAAAHIQHMQKALMEMNLQLHHVVSDITGATGMRIIRAIVEGERDPDVLASLRDVRCHSSIETIRASLVGNDRDEHVFALTQSLELYDFYQEKMLECDRKLEATLSDLTVRAEHQLPTLPKARTKTKQVNAPSFDVRAALYGVLGIDLTQIHGLGPSLALKLIGECGSDLQAWPSAKHFTSWLCLAPGNKVSGGKLLSSRTRRSSSRAAALLRLAAVTIGRSDTALGAFYRRLAGRIGKQKAVTATARKIAVLFYNSLRFGMSYRDPGATAYDERHRGRVLANLQRRARALGYSLAPTPGAECVS

SEQ ID NO: 183799 - protein, 375 aa, unidentified
MTADLQAKEYESAAVLYMAMELSNKTWRLAFGDGRRARQVCIDAGEIGRLREQVSKAKVKLGLGSAARVVSCYEAGRDGFWLHRQLEELGIANHVVDAASIEVSRRARRAKTDRLDAQALLDKLSRYERGERRVWRVVRVPPPEWEDLRQLHREREQLLGERTRHRNRLSSKLVAQGIRLRIDGKFLRRLGEAKLFDGRPVPEHLKAGLEREWERLELVQSQLKVLQERIRTLLKESEPLKAVRTLMLLTGVGWVGAWLLVMELLGWRAIANRRQLASLAGLVPAPFNSGTMVREQGVSKAGNRRVRALMIQLAWLWLRYQPDSKHSRWFQARFGGGSKRQRRIGIVALARRLLVELWRLLETGVVPEGARLKVA

SEQ ID NO: 183800 - protein, 401 aa, unidentified
MIYAGIDIAKDSARCVFLDNEGEKIKAFSISTNKEGFEKLHCFIKELKMNKDEFLFGIEATGILWENLFTFLTDTGFKTILLNPFQTKKYREALRFKAKTDDIDAYVIAGLLRSNDFSSSFIPEDMIQGLRDFTKLRYELVKDRTNYQRQALSLLTLVFPEHTKTALRNPFGIASLAVLKQFPTAKHIAAAKVKHIEAIVRSIKGNNFSVENIQNLINTAKTSVYSGRASDARALTLKILLTQIETLDSSISSLDAQIEALLTDNSQNNTPGSNLLDIPGVGPKTVAALLSAIGDGKTFSSGTNLIGFIGYYPVISDSGDTKLKRHIAKNGPKYLRWALYVAAVACIKHNDQFRRIYQIKRSQGKSAKQALICVAVKLAHTMLSMLKSGKPYDPTRVFACS

SEQ ID NO: 183801 - protein, 420 aa, unidentified
MDLIVERCAGIDIGKKEVVACVRTPASGGQGRHKEVRTFTAFTGDLEAMADWFAAEGVSEVVMEATGSYWKPVWYVLEDRGFELMLVNVRHVKILPGRKTDVLDAEWLAELLEHGLLRGSFVPPATIRELRDLTRYRKRLIQAHTSEAQRIEKNLEDAGIKLDVVASDILGVSGRLMLKALVAGERDVEVLADLAKARLRSKLPELQKALRGRFREHHALMIGMALEHVEYLEAAIDRLDKRIDELFAANTSEAGIPFVEARDRLATIPGVAQRAGEGIIAEIGVDMSRFPTAGHLASWAGMAPGNNITGGKRRSGKTTKGDKWLGEILNQCAWAASRKRDSYLSAQFWRLSRRIGKKKAAVAVGHSILVICWHLLTNNCDFEDLGGDYFTNRVNPDKQRDHHIQQLQSLGYRVILDKVA

SEQ ID NO: 183802 - protein, 406 aa, unidentified
MDVIYPRCAGLDVHKQTVVACARLSGDGAAKQEVRTFPTTTSGLLALADWLESLGVKHVAMEATGVYWKPVWHVLEGHFELVLANAAHVKNVPGRKTDVNDSMWLADLLAHGLIRASFVPPAQVQELRTLTRTRKQFVRERGSHAQRIEKILEDANLKLSSVISDILGKSGRAVLKAIIDGQTDPQTLVSHIGRVKATRAELLEALRGRITAHHRFMLKLHLDHIDTLDKAIEHIEKEVGLGLEPFRQAAKLLSTMPGLSSVSAHVVVAEIGIDMSRFATPGHLLSWACLCPRNDESAGKRRSTRLRRGGKWLKTTLVQAAWSAVKVKGSYLQAQFHRLRSRRGAKKAIIGVAASMLTAAWHMLRNGTEWHDLGAAHFDRADATKTANRLIRRLQQIGYKVEATPA

SEQ ID NO: 183803 - protein, 374 aa, unidentified
MSAGKKFIGLDVHQDTIVIAIADDGVDREVRYFGTIANRPEALHAALKKIGQDGAELRVCYESGPCGFVIYRFLAKIGVACIVISPSSMPRRPGDRIKTDRRDAQTLARLLRAGELVAVWVPDEAHEAVRDVVRARRQAKDELGSAKSALKSFLLRHGRRFTGKAIWGKAHWGWLSEQKFAFRHQQFVFEEYKRRIHDLMDRCSRLDDVLREAVSGWVLGPLVHALQALRGIKLTAAVTLVAEIGDLHRFDSPKQLMAWLGLVPAEHSSGKRIKRGEITRSGNAAARTMLIESAWHYRFPAREGRSLVNRNAEIPEHIRAIAWKAQVRLCAKFRRLAASGKQTVKVVTAVARELAGFIWDIARQTPAVAVEARR

SEQ ID NO: 183804 - protein, 336 aa, unidentified
MTYFALDVHQSTSTVAYLDPADGQVQTRRIYTRREELAQLLAALPRPWIVALEATRSAPAVCAWLRELAAEIHLVDPQKLAALAALRSAKTDAKDAELMLEALRHDYLPEAYLASPEVCEDRDLTRGHTALRRISTHLRNLVRALLARQGVELAATDLCGQAAQEALDELQQTLAALPARLCRLYRELLAEVEAALAVVRQEVQARVAVSPLAQHLLPQPGKGPLTTLGLLAEIGDPARFPSYKELVSYAGLAPRVAQSGDRCATGHLPARCSQRLRHWAVLAAQCAARSRRPSPARDAYRRVCVRHGPNAAKIAAAREIVRDVYFAAHRLRAAGA

SEQ ID NO: 183805 - protein, 350 aa, unidentified
MVTLGIDAHKRSHTVVAVDEVGRQLSTKTTTTTTTDAHLDLVRWAEGFGAERQWAVEDCRHLSRRLEADLLAAGERIVRVAPKLMAHCRDSARTYGKSDPIDALAVARAALREPDLPVAQLDGPARELRLLVDHREDLVRERTGYINRLRWHLHELDATWDPTIRSLVAYRNLDAIADRLCGIEGPVARIAADLVARVRDLTVDIKALQREITALVTDQAPNLLGVPGVGALTAAKIVGETADVRRFRSKDAYARHNGTAPLPVWSSNRVNHRLSRTGNRQLNAAIHRIAVTQVRYHPDAQTYMARRMELPNATKTRALRALKRRLSDVVYRALLADAAAPELTTHAHAA

SEQ ID NO: 183806 - protein, 346 aa, unidentified
MTAFAALDVSKKSTSIHIVDEKGVCLWRGKTLTNPDALAQALSPFSDDLALVGLETGCWTTWLWHELTDRGFPMVCMDARQAHAALSVTINKTDANDAQGLAHLLRTGFFREVRVKGWEDMRKRTLLRARSTMLRCVLDLANAIRGALRTFGISLPAGTGNGGAKTFERRVATCLTARADLAIIIGPLLEAWRAGRTQVARHERAIRAIVRSDPRCQLMMTVPGVGYLTAVGFVGAIGDPETFRSGRTTAAWIGLTPRRYQSGTINQQGRISRQGDKLLRAYLYEAAAHILTRSSKDSALRCWGLKLRDRIGFKRANVAVARKLAVVLHAMWRSGRPFDAGGCAMG

SEQ ID NO: 183807 - protein, 427 aa, unidentified
MKYNQNEKILQINDETLIIGVDVASETHYARAFNYRGIELGKVIRFDNNAVGFATLGIWIRELRVKHQKQHVMVGMEPTGHYWFNLAQYLKDHDLQGVLVNPYHVNRSKELDDNNPTKNDRKDPKTIAMLVKDGRYMTAYIPEGIFSDLRNTMDTRWIIVKQLNAIRNRMKRWISIYFPEFNTVFADWEGKAALAALKKFPLPTQVLEKGVDNIVACWKEDKIRTVGMKRAIKLTEVARTSVGVRSGVLAAENNLLTLIEDYEMRMLQYERTMAIVDKIVFQIPGVSEMLKIKGVGLVGIAGFIAEVGDIRRFEHPKQIQKLAGLNLIENSSGKHKGMTTISKRGRSRLRAILYQSIMPLVSKNPEFLELHKHYTTRLQNPLKKKQSLILLCCKLIRVFYAILTKGIKYDPQKMMNDIRRPSLQPAA

SEQ ID NO: 183808 - protein, 353 aa, unidentified
MEQFIGCDAHKKFSVFVAVNEKGHAGEAMRVAHDRQLYREFLGRLPPHSMIAVEASGHYSWLVDEMERLGHHPKLANPLEAKRRMALTKKTDKLDARGLAILLRNGTLPEVGIPPSELRDQRELLRLRIFLVRLRTRVKNRIHGTLARHNVQIPGADLFGVAARLKLGARLPELPIHSREAVEQELATLDFLEIQIESAEQRLEAIMNVSVEADLLKTLPCVGKILSMVLMLEIGRVDRFPTAAHLASYAGLVPRVHSSGGRTRMGQVCGNVNRNLKWAFVEIGNLIVINQTRLAGTHVVRLYQRIKCAKNHQKAVVAVARHLAEAAWWLLTKQEVYREPQGPRQRTLSSTLG

SEQ ID NO: 183809 - protein, 390 aa, unidentified
MIVIGTDTHKRTHALAAVDEGTGRVRGHREIKADDAGHLAAVKWARSLDDERVWAIEDCRHVSRRLEQALIAAGERVVRVAPHRMGASRRGEREPGKSDEIDSLAIARAVVKDGVECFPAAFLDEQAMEIRLIADHRSDLVAERTRVQNRLRWHLVELDPELEASLKRGSLADARQLDRIDRRLRRIAPCPRVRVAREQVAQIRQLTRNVNTLKDELLALIKAHRPQLLSETGCGPLTAAILIGRTAGAERFQTDASFALQTGTAPIKCSSGQRQQHRLNRGGDRQLNHALHIIAITRAQHDPATREYLARKQAEGKTTKGALRCLKRHLARRFHHLLAPPAEPAATEPSVRSRQHDRDDILPDIPAHPRRRDNIDTTITAAPTTMRCVR

SEQ ID NO: 183810 - protein, 492 aa, unidentified
MARRSPRRKQAPSASAPSRQAPTGATGSGKKRSQRRVGRALPAPGLPKSLQQVHLNAAGIDCGATAHFVAVPEDRDLQPVRAFSTFTAHLIALADWLEQCGIDTVAMESTGVYWIPLYELLEARGFAVKLVEPGKLKMIAGRKTDVLDCQWIQQLHTFGLLSGSFRPDDQICVLRSYMRQRDMLVRYAAQHIQHMQKALEQMNVKLVEVIDDITGVTGTRIIEAILAGERDPQKLARLRHERCQHDAETIALALQGNWREEHLFALQQALELYRFYHHKLDELDQRLEAYLLTFEDKSQDEVLEPRPRQRKLSNNEPRFDVRQYLFQMTGVDLMTIDGFRTGDLALDLLAEIGMDMAPWPTEKHFCSWLCLCPGNKKTGGRLISGRTRKNASRAARIFRLAAYALARSQTALGAFYRRLKARLGPAKALTATAHKLAQIVYSMLKYGKAYVDRGVEYYEQQYRARMIKNLTRRAKQLGFELVPVTVTPAPAQ

SEQ ID NO: 183811 - protein, 404 aa, unidentified
MELTPIFNSVGALDIHHAKITACALIADADGEVRVELKEFGGFKRDRRALAEWVASFAPEVVVMESTGIYWKSPYAALERVGIAALVVNARHVKQVPGRKTDIADAQWLAILARSGLLTGSFVPPQNLRELRLVSRQMQKFTGILAGEKNRLHKVLTDGGIRLSAVVSDLHGTSARAMIKGLLAGETPQQVLSYASKRLKATQEELLDALDGELSDTHRFVLREILTHIEELEARIEVFRHHLLSALQPHESLLHALQTIPGLDAPGAAMLLVEIGTDMDAFGSPEKLAAWAGVCPGNNESAGKRKSARARKGNPYVRRILCEAAHAASRTRCALAEKFKVLLVRRGRKRAIFALAHKILKIVFVLIHRGDYYRDATVNYEAISVERNAPRWIRMLRKYHYIPA

SEQ ID NO: 183812 - protein, 368 aa, unidentified
MNYNTVVGLDVHKKTIVAAVLPLGSDNVTETVSIENFPEAVEKLVNRVAARGPVEFVYEAGPCGYETHRQIAAMGHRCVVIAPALTPVRPGDRVKTDRRDAGKLARFHRAGELTEVIVPTRAREADRDLPRAREDALEDRLRARHRLSKFLLRQGRVHQETKSWGVTHRAWLKTQRFEWITLQQTFEANMRAVEEVEARLAILDQQMQDLAQREPYRAPVRYLRCLKGIDTICALTLLVETQDFARFKLAREFMSFTGLVSSEHSSGEKVRRGHITKAGNTHIRRILVESAWCNRHRDVISKQLGERRKGCPNEVLSIAKKAQTRLHRKFWRMTNRNKLHQVTVVAVARELAGFVWSIAQHFPKEAVV

SEQ ID NO: 183813 - protein, 374 aa, unidentified
MDQHSRAFVGIDTSKLRNAVAVAEEGRGGEVRYLGEIDTTEAATRKLVGKLAAKYRQLTFCYEAGPTGYGLHRLIGKLGHDCIVAAPSLIPKKPGDRVKTNRRDAVGLAKLLRSGELTAVWVPDERHEAMRDLSRAREAARKDLKGKRQQVSSFMLRLGRHYPGKKTWGPAHMNWLMLQKLEHREQRIVLEELLGAVRQESERVERLEQAIRDAVPEWSLAEVVTALQAMRGIDLVAAVTVLAEIGDLSRFQNPRELMGYLGLVPSESSTGDTVNRGGITKAGNGRARRILVEAAWSYRYPPRVSREKQMKVAAAPRAVREIAWKAQMRLCGRFRSLTRKGKRPTVVATAIARELAAFIWAINREVVGSHATAN

SEQ ID NO: 183814 - protein, 352 aa, unidentified
MRKYYVGLDVHKLSIVIAVLDAYGKLVSRTVIETTTEAVRDFFRNLRGEIHLTFEEGNHAAWLYDIVEPLVKRVVACNPKQNRIEGSRSDRVDAVKLAELLRLGGLKPVYHGEHGTRTLKHLMRSYECLVKDITRVKNRLKALYNSQAIKQRGRELYHGSKRQSWLEKLPNPGQRTRAELFFQQLDELKVIKRAAQKAMVAESKRHPAYQVLSTVAELGPVRIAQIIPTVETPWRFRSKRPFWNYSGLAVVTRSTADHEIENGRVRKRKKQVIQTRGLNPDYNRRLKAIFKSAATHASNCGAYREYYEGLLQTGMRAEMARLAVARKLSATVLAVWKSGENFDAGRILRKAV

SEQ ID NO: 183815 - protein, 426 aa, unidentified
MNEQGGSRQQRKRCWAGLDWGGSGHAVSVVDDRRRVLASFTVGASLEDLENLSRRLRACGAVAGVAVEATRHPVVGHLLSAGFTVYAVNPKQSKNWRGCASVSASKSDARDGLVLAVELAGRHESLRPMRREDPAVAELAGLCEKVRELVDERTALAQRLKATLGQYYPGALVFFSDWTSPVAWRFVKRFPRPKTLAQARKETLCAFLKSNRVGLRPLWLERIEARGDAARWPLPADSAALEAVALATVAQLLALQPHIDKMDRLIAEQSKEVPQTRLMKSLPGAGKRLAPALAAMAALTTTGKKQNLEALRCVSGVAPVEDKSGKRQRVRARRRCNRHWRDVLHLFAHCSMNCCGWARAFYDVHRGQGDSHAGALRKLADKWLKIIHRMVEADEPYDDLRHVQSLRNHASWFHCAPGGKPGGKLH

SEQ ID NO: 183816 - protein, 309 aa, unidentified
MKEELVYLGVDIAKSYLDGAIGSEKRRFSNDTVGHRQLIGWIKQTEGAVQVICESSGGYERKLVQALARARVKVSLVQANRVRQFARASGILAKTDRIDAEVLCEFGRVMRPQTVTAATLEQEHLRELESQRRHLTHLLVMEQNRSARVNDGSVLKLNRSLINQIKKQVERLDLLIKQHIEQSPRLSAKAEKLTSINGVGLRTAALLMAQLPELGQLNRREVAALVGVAPFNRDSGKMRGKRAIYGGRRFVRHGLYMAALVAARHNPILRVFYLRLRAAGKPAKLALTATMRKLLIVLNSSLKTDLSYA

SEQ ID NO: 183817 - protein, 309 aa, unidentified
MKQSVVYIGIDVAKAHLDVAWAQTVRRLPNQRSGHAALIRWIKQSTSPVQLICEASGGYEQALLESLEKSALKVTLVQAVRVRQYARATGILAKTDKIDAKVLAAFGSAIKPQPMSPRSVEQKRLRQYEAQRRHLSRILVAEENRLAQLSCAQLRTLSRSLMSKIKNQIETLDRRIGELIAQDQTLWEKAQKLTAISGVGARTAALLLAQMPELGQLNRRQAAALAGLAPFNHDSGSIRGKRAIFGGRRALRSGLYMAALSAARFNPILSRFYQRLRAKGKPHKLALTAVMRKLLLALNHSLKPEPILA

SEQ ID NO: 183818 - protein, 387 aa, unidentified
MYYIGIDISKFKHDCAVIDDSGEIVTPSWSFTNDAKGFSQLKLLLNSLDTETRIGLESTGHYGMNLKLFLESNNFSFMEFNPLLINRFVKSKSLRKTKSDSIDCMMIAHYLMTVEYKPYPSSFYHTEKLKSLTRFRDSLIRLRSRQLVELTNILDKVFPEFKPFFGSRFSVTALYILSNYSSPEKIANMNSKSYEALRKLSRGRFSTVDFAKLKQLAKNTIGTTEDYLLLQMQIVLDIYRQLDSKVDETEVSIKECVFDMNPPMLSVPGIGIESAAVILAEFGDFSKFKNASQMLSFAGLEPGYFQSGTSETTGKMVKHGSSYLRYALMNCAQTVVNYEPTFAMFYSKKRAEGKPHRVALSHVVKKLLRVIYTLQTKNIAYDADFVR

SEQ ID NO: 183819 - protein, 399 aa, unidentified
MFLGVFVLIYVGIDVAKDKHDCCIMDQEESELYPVFTFRNSQEGLQMLFDRVQSAASGQIKSSVLVGLEATGHYSYNLLNALSSHGYETCLINPLHTNLYRKGTSLRKTKTDRVDAAAIARMLIHDRSLKRYTGIADYTDELKALTRYRFDRVQDRVRLKISIARLVTILFPELEKHVPDLHMNSVYTLLEEFPGASYIAGASLKRLSELLAESSRGHYGPDKARAIRDAAKSSIAISMPSRSLELQYTIRLIRTMDEEIAAIEKSLKSLMDTLNPPILTIPGISYRMGAMILAEVGDFARFDNPDKLLAYAGLSPSTYQSGQLVSTYCHMEKRGSKYLRYALFNATRFVCQWDPTFSAYLAKKLSEGKHYNVAISHAAKKLLRVMYRMQLSGEPYRKS

SEQ ID NO: 183820 - protein, 328 aa, unidentified
MNIIGIDVSKSKLDCALIDNSTHRKLKFKVVSNSDEGFVTLIDWLAKHTKSSISAYHFIMEATGVYHEKCAYWLFDSGARVSVVNPARVKYYGQSLGVRSKNDKKDSVVLAHYGLTQTPMVWQPEALEIRILKALASRLDAIEKDILREKNRHEKSSINPSSQTILNSIETILFTLNEEKLHLEKLIHNHINQYEYLKNNNALLQTIPGVGPVLSRYMLIVLGGRTFQSASQCAAYLGLVPIQNESGSSLRGRSRISKAGSPVIRAKLYMATISALQHNPDIKIQNQRLLKNGKSKMSALCAAMRKLVQICFGVIKHQQPYHVQAKFL

SEQ ID NO: 183821 - protein, 403 aa, unidentified
MSERMRRVGIDWGSERHQVCRIDRGKEPEQRSFRHTGEELQKLLEFVTEGMPRDEIVVAIEMKHGAVVEMLLSEHLALYSINPNVSDRLRDRFSPAGAKDDRRDAFVLASCVESDPHCFRRIEIEPEDVVHLRSIVRIRSELQQTLRMVSNRLWTELRDYRPETLRLCSAADEPWFWDLVERAPTPKEAAKLQRSSIGAVLKRHRVRRVSPREIQEVFSKDVLSLGTGYIDARVSHVRILISQLKLAHAQLMEVERSIETAVESRVKSEEKSERRVATILLSLPGVGPLTTATALAESFGALQRGDYNALRGLYGVAPVTKQSGKSRMVMMRHSCVWRLRTVWHHAAMWARRKDPRLHALYLDGRLRGHSIGRLARHIGDRLLAIAVHLIRRNELYNPALRTM

SEQ ID NO: 183822 - protein, 421 aa, unidentified
MPNIEIGVDSMVKENFIYVGIDLHKETHTAVMIDCYNQKLGEITFPNRPADFPKLVTKVKKCNTDAKEVVYGLENAYGYGRPLAVWLIDKGYFVKDVNTAISHRQAKHRGAMYRKSDSDDAEAIALATLNMLDKLPDACPNDAYWSLGQLVHRRDNIMKQRTRLVNQLHEQLCIAYPSYKQFFNDISRPTALYFWEHYPSRKYLKGKSVEDLRAELVPVSHNKCSTKTCEKILDAVASDKVKNNAYQDARDMVTLSIVSDLQHYDSQLAEVDKMLEQMYKMLGCTLTTIPGVNVITAVKILAEIGDIKRFSNANKLAQFAGIAPLHLSSSGKGKDVATKQGNRRLQATIYFLAIQMVQVSSKGTPRNPVVRAYYEKRKAEGKTSQQALICISRRLISIIYGMLKYGTEYRMPVVENAGENR

SEQ ID NO: 183823 - protein, 366 aa, unidentified
MKKISTVQVFGNEILKEQKLTIGLDLGDRWSFYCVLDEAGKILLEQKVATTPEAMKQTFGKIPRSLIAMETGTHSPWVSRLLTELGHEVIVAHAQKVELITKSNRKDDRHDARTLARLARIDRELLGPVRHRSAKAQIHLTVIRARAELVSARTALVNAARGLVKSYGQRLPKRGTYQVSRELATGLSAELRDVLGPLLKEVESLNERIQEYDERMEKIAKEEYPEVSLLKQVKGVGTQISLTYVLTIEDPYRFPKSRAVGCFLGLRPGRRNSGESEPQKGISKEGDRYLRTMMVQGAHYILGPFGEDSDLRRWGLKLAERGGNNAKKRAVVAVARKLAVLLHRLWVSGEVYEPLRNSQKAMRAVA

SEQ ID NO: 183824 - protein, 452 aa, unidentified
MAKQKRQKSKNIIKPMHVLQPNSAGIDVGATEIYVAVPDDRSSKPVRRFDTFTDDLHEAAKWLKECGIESIAMESTGVYWIPIFQILDTYGFDVILVNARHVKNVPGRKTDVQDCQWLQYLHSVGLLRGSFRPDQDICAVRSLLRHRDNMVKDASSHVQHIHKSLTQMNLQIHNVISDITGVTGLAIIDAILAGERNPDILADLKNPRIKADRQTIVKSLTGDYRSEHIFTLKQTLQSYRNYRQMIQDCDAEIERHLKEFDSRIDLDDCPKPPEKKLKRKPRGNEPTFDLKSHMHRLLGTDLTRIDGISDLTAHVFFTEVGPDLSKFNNANHFCSWLGLCPNNKISGGKILSSHTRPGSNRVAQALRISANSLWNCKSYLGDYFRRMRARHGAPKAITATAHKLARIIYHLVKEQRAFDETIFSEQEKNHQIRLRKRVINQAKSLGLQLVPA

SEQ ID NO: 183825 - protein, 398 aa, unidentified
MTRKNTLKSLPTDTEFRVVGLDLAKSDVSVAAIPVDDNTPSLVDRMTYADLLDWAGKISPTLFAMEPCNGYSLLCLQLENLGHEIKVISGSTVSMWINTHLSGQKTDLNDAIALARLAVSDAELTPIRHKSITEIRIQTVQAVRQQLMSQRSKSIVSFKALAQQWGIPCAAGHRNLKKLRESIEAKVDLITRPVANAMLFLLDAVKSLDRQIGQLNQTLQELVMSDERGRLLQSVLGVGTQISARVITVVGNIERFNSPRSLVAYVGVAPRNFITGHKNLTKKKHGNCPDLSHKGQGKISRRGDKLLRSLFIQGAACLYMQFCKDQLPECQLKRWILQQLARQKTYGKLIVSLAAKLIRIVWAVLTYREKFNIQKAGMTRSMWSEMALETPLNKEVLA

SEQ ID NO: 183826 - protein, 343 aa, unidentified
MKQYIGFDVSLKDTAISIRQDGKRIWRGKCASDPQILAQIVRKHAPHAERVVFETGPLSTWFYHALTAAGVPAICIEARHAQKILNETLNKTDANDADGLAQLAEAGFYKAVRVKSFDAMLTRTLVGARNLLLTISTQLSNQIRGVMKTFGIVVPKGTGRVFDGNVRELLDGRDGLAQIILPLLEAWRDIRKRAAELDRQLLAAARQSQAIKLLMTIPGVGAVTAVSYAAAIEDPANFKTSRAVGAWLGLTTRRYQSGEVDYDGHISRRGDNHLRGLLYEAATVILTRTSASNQSGLRDWGLRLRERLGFKRAAVAVARKLAVIMHTMLKTGEAFNTSAGVTA

SEQ ID NO: 183827 - protein, 418 aa, unidentified
MLEVKVEQCAGIDVGKKIIEVCVLIGPANRKPAGEVRRFGSNVGDLEALRAWLKEKACTEVVMESTGSYWKPVFNILEGHLQVILANPEQVKALRGKKTDRTDCRWLAGLLRHGLVQPSFIPPRDIRELRDLTRRRRTLLQNGTQERNRVQKVLEDANVKIGNVLSDVFGMSGQAMLEALLENKLNAEQVADLARGSLRRKIPQIVEALEGHRMSDHHRLLIRQSLKHMQFIEEMIEELDKQIHEKLAPYQKQVELACTVPGIRSDAAAGILAEIGMDMSDNGPFTSCHHLASWAGVCPGNNSSAGKRKSGKIRKGNRWLKATLTQTAWAGANTKNSAFQFRYQRLKTRRGVKRATIAVAHAQLIALYWVLRSGVPYQQQRQDLEQQQRESLIRHHLHRPSSGHKPVRPSILKGFLSS

SEQ ID NO: 183828 - protein, 397 aa, unidentified
MNHQQDKIKLTIGLDCHPDSFTAAVLAGDRPTEAKVTVRTDAISLDRLEQWFTKHCQGNETVVLEASANSFEIYSRLSTLGFSTLVLCSDQVGRISKTNFNNDKVSAVRIARVYLSGLSDQVWVPDSGTRERREVFTSYLQAVKDHTRSVNRIKGMLNEHTLRLPRGLKLTSESGREAALNAKKWTSTQYTLLEELLLDLARANAKRNHLRKIMAREILSNSKMLQLVRIFGLRHITVYALMAMIGDINRFSSAKKLAAYFGLSPKYKQSGQMVKYGSISRSCRQDVRPMLVQAAHVIFQHKVKTNGLFKWAWHLGLRKGRKIAVIAVARRIVVAVFYLLNGKPFKPKELTNTLTEKIKGLAKVLGIKEIRQNGFQTYQKFVEQKLEILQERTGQPT

SEQ ID NO: 183829 - protein, 422 aa, unidentified
MLQETQDREEIIERVAALDIGKAELACCVRVPDEGGPGRRLQEVETYSTMTRSLLGMSDRLRCLGVTRVVMEATSCYWKPVFYVLEAAGFETWLVNARDVKHLPGRPKTDKLDCIWLCKVAERQMMRPSFVPPPEIRRLRDVSRYRADLVAARTAEKQRAEKLLEDACIKLSVVATDIFGVSGRAMMAALIAGQRDPKALAQLARARMRAKITALEEAFTGHFTDHHAFLLGKMLARVDGIGADIAELDAKIEEMIAPFVSAVQRLDEIPGIGAVAAAAIIAEVGVDMSRFPTPGHLASWAKFAPGVKESAGKKKGTGSTGHGDPYLARVLGEAAVSAAKTDSFLGERYRRIARRRGKKKAIVAVGRSILVIIWHLLSDPQAHYADLGPGFYDSRISNSRKMRNHIGQLEALGYKVTLEPAA

SEQ ID NO: 183830 - protein, 387 aa, unidentified
MQKPHDNSKASPAAFMQDNTLIAVIELGLSNWLVAGLIPGVSREPLKKLEPNPEDLLKLLHGWRDEAIKAARPITRIAVAYETGRDSFWLARWLRERGIDAHVIHATSVAVSREHRRAKTDRLDTAMLKRGFLGWLRGERGHCTVAIVPTMEEEDAKRPHREREGLVHEQTRVVNRMKSALIQFGVRNFNPKLCNARAKLETVRTPEGKSLPPNTIAALRRDMERLKIIKEQIKAIEQTRLQQFEQKPEALANRMVYLLVRIYGLGWETADLLVHELLSRTLRDRKAVARYAGLTGSPDESGSKRREKGLSRSGNARVRKIMIQLAWRMVKFQPDSALVQWFKQRTENAKGSRKPMIVALARKLIIALWRYANDGVIPEGFKLHSAV

SEQ ID NO: 183831 - protein, 364 aa, unidentified
MNSVIRNTELSSLEGTRCQFNSSRAVIKLGIDVHQAYYVVVKQEGGTNPKPAQRFRKEAFLLWVAKLKSQGSEVHAVYEACGFGFGLQRQLSALGITCQVVCPQKLDERNKRVKTDGLDAKALCLKLDRFLQGNRDALALVRIPTEEEEQKRAIHRQREQLVKARKRLEAQGRSLMVNHGMEGVSNWWKARTFAQLSVPEWMKELLSNMQPILLALQEKIQGLTQQLQAAAGAGQPRGFGALSSVVIDREVGNWNRFNNRRQVGSYTGLCPGEYSSGNTRVQSGVTKHGNPRLRAALVETAWRLVRFQPDYKAVRKWRRTLAKGALATKAARKKAIVAVARQMAVDLWRIRTGRVQADALGLRI

SEQ ID NO: 183832 - protein, 340 aa, unidentified
MEKRFIGIDLHRNRFTCCIRLENERTYVTEWALENLARFVKKLRATDEVAVEITSNTRLFHEAVAPHVARIVVVDTNQFRVISQSVKKTDPNDARLLSLYLSKGLLPEVRMKDKEHAQLASLTQTRDTLVKQRSALKNKVNNILSARGLNLAKEALSSEKKLTEVLELPFDEIVRVELRVIVEQIRSMNKSIAELEKTIGEEGSKLEGHQGLSSIKGIGKITGAILLSVIGDVNDFPDEGHLASYFGIVPRVSNSNETERSGRIHKRGTKLGRTALVQSALIAANYSPYLKRFYEQVKARKGAGKAIIALAHKFLGIIYRTLKNKWVFEDFPNFILAEES

SEQ ID NO: 183833 - protein, 362 aa, unidentified
MEPVLDGEDRIFTNIQVTPDYENVIQFIDNLKERLGSSDSYSIECGYEAGCLGYSLYHQLTKAGVKCTILAPTTMLTQQGKRVKTDKRDAVMIAQCLSYGGYHAVHVPTDQDASVKEYLRMRDDHKLALKKIKQQINAFCLRHGYIYGGHKWTIKHLEWLKKLDLSELNRETLNEYMTSYEEQTAKIERFDKRIEELAADSDYHENVRKLSCLLGIQTYTALSLIVETGDFKRFRKGNTYAAFLGLAPGESSSGEKISRTGITKAGNSRLRTLLIEAATGICKGKVGHKSKALCARQAGNPAEVIAYADRGNIRMRSKYKRMIRHEKKRNVAVAAIARELACYVWGIMTNHIEPREEGKKAA

SEQ ID NO: 183834 - protein, 478 aa, unidentified
MQDRRLVGIDLGITSAHTVRVLAGDGSLVCRRKTIPTVDSLEQVEQAALAGTPAGTRLEVVVEPTGPAWLPIAVFFSARGHTVYRVGSAKAHDLRRVLSRHAKSNGIDADTLARLPLVDPAGLHPLELPDAARAALDRRVRATDRLTRQAAGHKRRIKDLVHQLLPASPLTGELGQADLAVLERWADPHGLVAAGHARLQRVLASASAGQQGAQRAQQWLAAAHAALQLYGDHPAIAFQDLAAEVATEVRLLRATQAELAAHATKREACYRRVDPLALARSLPGLATVGGPALVATMGTASRFPTAATFRSFTGLAPKASETGNTDRKGQPISKAGNRLLRTTLVRAADHARRQDPQLARIYWTQMVQRGKDHLGALCVVAAHLGERAWVVMDRGLPYVLCDTDGTPVTPAQAKAIIADHWTVPEQVRRRRRSRKGKAPQQVLTGHVTGAQGATRRPSPSPASLGRRNALVKPTQPQP

SEQ ID NO: 183835 - protein, 343 aa, unidentified
MQALYPRPDEHAAVRTALNAIFVSLELSRSTWVITSLAPGGGEKMSKHAVPSGDIAALLARLSQLKEKARARTGQVFPIIVIQEAGLDGFWIHRVLQQEGIESHVVDPASIATSRRRRRAKTDKIDGEALVRALLAYKRGEPRVCAMVQAPTPQEEDRRRISREREVLTAERVQHVNRIKGLLFAQGIGDYEPLHRNRRERLEELITGDGRPLPERLKAQISRELDRLELLIEQVKAVEAERDAVLARAQASPGVPAPAALLLALRGIGPEAAATLWTEGLFRTFSNRKQVAAYAGLAPTPWQSGSVHRDQGVSKAGNPRLRTIMIQIAWLWLRHQPPSALAL

SEQ ID NO: 183836 - protein, 315 aa, unidentified
MAMLSFCGIDVSKDRLDVMVLPEQQSFAVRNDAAGWAELIARLRGFAIAAIGLEASGGYERGAMRDLLAPACQVNPFKLRQFAKASGILAKSDRLDARVIASFIAIMPTRRAQRHSPAIERLAEMLAVRRQLNAEKVATENGARLLEDAMLHRLSRRRVARLAADINMLDRHLIGIVETDAALAHRYRLLTSMPGVGPVLACTLIALLPELGTMSRKQVAALVGVAPYAFESGKFKGLRCIWGGRAPVRDALYMAAMSAGNWNPVLKAFRQRLKGAGKMAKVVIVAVMRKMITMLNAMVRDDVVWADLLHGQLPR

SEQ ID NO: 183837 - protein, 371 aa, unidentified
MRHHSEAFIGIDTSKSRNAVAIAEDGRGGEVRFLGEFAATEAAMHKLVAKLAAKYSLTFCYEAGPTGYGLYRLIKRLGHECIVAAPSLIPKKPGDRVKTNRRDAVSLSKLLRAGELTAVWVPDERHEAMRDLSRARLAANKDLQGKRQQISSLMLRLGRCYPGRTTWGPAYMKWLMSQKLEHREQRMALEELLEGVRQEGERVGRLEQAIREAVPEWSLAEVVTALQAMRGIDLIAAVGVLAEIGDLSRFQNPRELMGYLGLVPSESSTGDRVKRGGITKAGNGRARRILVEAAWAYRHPARVGREKQAKVAAAPRRVREIAWKAQTRLCGRFRSLLRKGKLPTVAATAIARELSAFIWAINREVMQARRT

SEQ ID NO: 183838 - protein, 412 aa, unidentified
MQAIIERCCGLDVHQETVVACVLIGAPGAQPKKEVRTFRTVTRELEALRDWLLEAGVTHVGMESTGIYWRPVYAVLEGHFELIVGNARHMRNVPGRKTDVKDSEWIADLVRHGLIAKSYVPPRPLRDLRDLLRYRRKLVESQAAERNRLLKLLETANIKLASVASDVFGVSGRAMLRALIAGEASPEAMADLAKGQLRRKRTDLILALDGRLEAHHRFLLAMQLRRLEAIEADIAALDLRIGERLEPYSAPHALLMQIPGVDWVVAAVLIAEIGVDMSVFLSVYHLAAWAGVCPGNHESAGKQKSGRARKGNIHLRTIPVGAAISASRTKGSYLKDKFHRLKARRGGLRAALAIAHKILVSAYHMLAKNLPYRDLGAAYLDQISQTRTVANLKRRLERLGYRVTLEPNAQAA

SEQ ID NO: 183839 - protein, 337 aa, unidentified
MTVAFLGIDLAKNVFQLHGEDPDGTVVLQRRVRRDRLLTEVSALAPCIIAIEACAGAFYWQRQFEGAGHQVRIIAPQYVKPFVKRQKNDRNDAAAICRALKQPDMKFVPGKSLEQQDIQALHRGRQGLVNHRTALVSQMRGLLLDRGIAFAQSIRRARREIGALLDEGAPELSELFRSMLAQLYAALLALDHQITWFDREIEKVFQANETCQRLAKIRGVGPKTATAVIAAVGDGAEFSNGRHLAAWMGLVPRQHSSGNRNRLFGISKRGDRHLRTLLIHGARAVVRTSARRDDAQSNWIRDLQARRGAAKTIVAVANKNARVIFAMLQKGTEFRVA

SEQ ID NO: 183840 - protein, 354 aa, unidentified
MNYTQNQKISQISYHTLIIGVDIAKFKHVARAQDFRGVDLGKPLTFENSKEGFYGFLQWCQQIMLNNGCSEFIVGMEPTGQYWLNLVHYLKDHDIPCGVVNPLHVKKSKELDDNSPTKNDVKDAKVIAQLVKDGRCAVPNIPQGVYAELREAMKIRGLLTTDLQAVQGRVHNWLDRYFPEFLTVFKDWEGKSALHILRLNLLPHELLEVSDEDLLTYLRLAAKRGVGLSRIRSLKEAASCSVGIRQGIDMAKLELVILLDQYEMIKNKFEELDSKIDALLQQVPSVSRMLAIRGIGKDTVAGFLAEVGDLNNYTHPKQIIKLAGLNLRENTSGKHKGQTKITKRGRKKLRALLF

SEQ ID NO: 183841 - protein, 367 aa, unidentified
MQSYYVGLDVHSRESVFVVENEAGAIVARGAVPTTVNGLRQLRDSCGLPATTGVALETGTSAFFVARELVRLELKPMVIDAHEVRRKAHRPEQKSDTRDALELCEGLRRGFYRSIVHVPSPAISELRTVLSRRRHFIRIQTAEVNAVKRLLRGNGQTSGPRGSLRTDAHWQCLLAGDLVPEHLKEHLCHHYAVWRQAAERVRALDLSLGEGARERRATVKRLETVPGVGPIVALTAIAADVSRFENAKHAASYVGLVPSTFQSGERDVHGHITKRGSAELRAMLCEAAHHARRSAHPYFARVCTRHGYKTAVVAVAHRLCRILFAMLRDGSTFSVSGAGVEQGDFKRTTTYKYRLRPKPAGRLPVTG

SEQ ID NO: 183842 - protein, 350 aa, unidentified
MELHTIGVDLGKTVFHLVGLNRLGEIVVRKKLSRPQLLRFTANLHVQLIGMEACGGAHFLGRALREQGHEVRLIPAQYVKPYVKTNKSDYIDAEAIAEAVGRPTMRFVPIKTDHQLDLQSLHRVRERWVMRRTAVINQTRSLLLERGITLRRGRCHLETALPEIIEDATAKLSGALRILLTQMKLELDQLVTRIEEADAGIKQVAQENEACQRLITIPGVGPVTATALIAAIGNGAAFRKGREFAAWIGVVPREYSTGGKQKLLGISKRGNPYLRRLFVQGARSVMMHRTKQSSGLSQWLEKLSLHKHHNTALIALANKLARMAWAVLTTGQVYQPPVLTDIGSAKLACR

SEQ ID NO: 183843 - protein, 348 aa, unidentified
MTHLATDQVATIGIDIGKNTFHLIGMDSTGAIVLRQKLSRGQVRERLSNLPRCLIGMEACVGAHHLCRQALEFGHEARLMPARYVKPYLKGQKNDFRDAEAIAEAVQRPTMRFVPTKSVEQLDLQSLHRVRARLVRHRTSVINQIRALLLDRGIAVRQGYQHLRVALPDILGRETERLSPRMVRIICDLSADWRHLDERLVDVTEEITAIAKADETCRRLMTVPGIGPIIASAIVAAIGDGMAFTKGRDFAAWLGLVPRQISTGDRTILGRISKRGNTYLRTLFIRGAKVILMRPKNWPKHSFGPWLEAASRRMHRNVLAVALANKLARIAWSVLARENDYEFRSLAA

SEQ ID NO: 183844 - protein, 314 aa, unidentified
MSTEYFVGIDVSKDTLDVCVDPTQDTYRVPNSPDGVDELIKRLKPIEPRLIVFEATGGYETLAVSSLAAAGLPVVVVNPRQIRDFAKSIGRLAKTDAIDAGVIARFASAVRPELRPVKDSPSQELTGLVTRRRQIVDMIVAETNRLQAATRRNRRDIQTHIRWLQKRQAQIDDEIKRDIQNGPLWRTTDQILQSTPGVGPATSAMLISCVPELGQLNRKKIACLIGVAPLNRDSGRYKGRRTIWGGRAQVRSVLYMSALSAIQFNPIIRQFYQRLREAGKCFKVAIVACMRKLLIILNAMVRNQTKWRHCEINR

SEQ ID NO: 183845 - protein, 421 aa, unidentified
MKAWNEVTHFAGFDWAKDHHDVLVLDGTGKITSEFRFDHNATGWTLCQEKLKQFPELAIAVEAGHSAAIERLVALGYRVYPVHPRSSKSYRTRKLPSGTKTDRRDCWALADALRLEGESWRVLTTPEPLVQQLRLLCRDEVTLIEQRTALINQLQQALYEYYPAALEAFEDWCAPSAWAFVECFPTPQTLVQAGKRKWQNFLHAHKLFHPELNQKRLEIFARADQFCGPAPAIAAKSALAVAVAKMLQTLEAQLARYRSLITECFKQHPDHALFTSLPGAGPKLAPRLLGELIALKPLADIPQALQCLAGMAPVSYQSGKVSVVYLRHQCNRFLRHTIHLWVDLSRHYCDWARIYYEAHRKKGQSHACALRCLGMRWLKIIAAMIRNQTPYDAAVHTRNQLQHGSWVMQLQPVQIIKKDAS

SEQ ID NO: 183846 - protein, 355 aa, unidentified
MTASYDYHIGVDYHKSYSHLVVQDSSGKTLRSGRVKNDRHSLGGFLERYRANSHAVIEATRNWMVMYDWLDDICDDVVLAHPLKVKAIADAKIKTDKIDATVLAHLLRADLVPEAWAASEKSRELRVALRERMFYVRLRTMTKNRIVTVFDRYPEQTAQLKKLGDLFGKAGRIQLAEVNVSDIDRVQIDRGLAFIGDINERIKQSETTIRAMTKANANVKLLKTIPGIGEFFARLIDAEIDDVSRFRNAIKFAAYSGLVPSTYSSGGKTYHGKIIKQGNKWLRWAFVEAVAPAIASDAQLRTQYEQLKIRGTNKARVAIARKLLTIAFQILRDQRAYEPRGTTTTEGASTISRLS

SEQ ID NO: 183847 - protein, 343 aa, unidentified
MSIVGGLDIHRKQITFDYVDTETGEVRRGQICPADRAHLAKWLARFAGQDAHFALEGCTGWRYVAEEIIAAGLTPHLADPAEAAHLRGPKRRAKTDRADARHQRVLLEQGRLPECWVPPSRVLECRALLETYLDLREQRTGWVQRIHAVLFHHGAPHIAGQQLGTAEGAAALRAAAAHCSPAGQLQLAIAAQMLLVYDERLHQVRRQLLDRARHTRGAAELTARLYGVGPVTGLALTCWLGGAGRFSSSRKAVRFAGLDITVYSSDGKRSPGRLSRQGPEVLRWCLYEAGKAHARAGAPDHAYYAQVKERIDGKRAALSEARKIIRQAAHILAELGDDALTAC

SEQ ID NO: 183848 - protein, 316 aa, unidentified
MAMPVQRPHVGIDVGKFRLDIATDDGGHQSIENTPTAIGEWLDSLGESVRIALEATSHYHLELALEAHRRGHEIFLINGYRLNRYRDSIGTRAKTDAGDARLLLRYLSREIDELRPWTPPGKAYRQLQTLLRRRATLVQVRVALQQSLAGIPTLKASLHRIVAQLKQTDQLIQKHIRQCLKEAGWEADAKRCQAIEGVGPVTAASLTTLFHRGSFRNSDAFIAFLGLDVRVRDSGIKSGKRRLTRQGDPEARRLLYLAAMQAKRQPAWEDFYQRHVARGLAPTQALVALARKLARVAFSLMQKQTDYVPRIPCGET

SEQ ID NO: 183849 - protein, 308 aa, unidentified
MNTKNHDLVAVDVAKDTLCVLSEGHLSKVANAPRGLDGFVQYLGKLHCPWVFCEATGGYERALVDRLHKIGILVTVINPALLRHFARSEGVKAKNDPIDTRMILRFAQQKNLAPTPPPQRPELTALMDRRTHLSDELTREKTRLQNSSIRIHDSIRRSIRFLERELTRIEQAIKKLVKLDECAHKAAVLMQQTSGVGPVTVWAILAYLPEITQLNRNRIVAMVGLAPFDRDSGRYKGTRHICGGRHKVRNILYMAAMTACVHNPIIKQYAQRCATRGKDNKWIYTAVMRKLIIHLQHVLKNNQICLVS

SEQ ID NO: 183850 - protein, 434 aa, unidentified
MSNLQKMHEDVAGIDVGACKFFVGTDDGQVQNFDTFTCGCHQVVEHLQQQNVKRVAMEATGVYWITLYDMLTAAGIQVYVVNGRHVKHVPGRKTDVKDCMWIKELHSHGLLRNSFIAPAEVRELRSYVRIREKHIECKVSAVQRMDKALVMMNIRLSTVLSDLQGASAMSIIKAILSGEKKPEVLVELCAPQVYKKKKEEVIKSLQGFYKSEQLFALQQAFDEYLFYTKKMEDCDKQINAVLKALTKDKEVPETMPTKKRIYHNRPKVDDLDKTMMQLFDGKDLTVLPGITSYSLLKLYAQTGNNWNAWKTEKEYTAWLGLAPSKYQSGKSRKYKKIKVNTTAGQILKECVQPLLRSKNNALGTFGKSIASRRGPSIAIKAMARKLACWIYRIMTKGLAFVENGIKQHQQKQEARTLKWLEAQAAKLNLKLSAA

SEQ ID NO: 183851 - protein, 331 aa, unidentified
MEEVKRFVGIDVAKLALDLFIGSAGVGFSVANDEVGIQQLLRQLTPADFVIVEATGGLETAVASALAAAGIAVAIVNPRQVRDFARATGRLAKTDRLDAEVLARFGEAVRPAARPLADQQAQALEALVTRRRQLVEMLTAEKNRRARAPKVLHRSIDEHIRWLEKRLSGLDHELGELIRNTPLWRERDELLRSVPGVGTVLSSTLLAQLPELGMLNRKQIAALAGLAPFNRDSGNMRGSRCIWGGRAQVRRVLYMATVAAVRSNPTIKTFYFRLRTNGKHAKPALTACMRKLLVILNAMLHNKTPWQTPALTSPTSPVSPLLGAVSEYGCC

SEQ ID NO: 183852 - protein, 336 aa, unidentified
MEFEFFIGIDVSKNELDFSVQQGRHLLFHREISNDAESIGGLLKELLKLPGFALSKAVFCMEHTGIYSNHLLASLYKKKACVCLEAASHQIRNSLGNIRGKNDKIDSIRIAEYAYKNREELRLWEPKRDVVQQLASLSATRSRLIKAKKMLKTPLKEHSAFMGKKIAKQDVLLCDKTLKGIETDLSRVEKAISEIIAADAELSRLFSLVTSVSGVGKVTAVQMLITTNEFKDIHNPKQYACYAGVAPFTKESGIFKGKGRVSHMANKKVKTLLHLAAIVAIQYNPDLKLFYERKVKVEKKNKMSVINAVRNKLILRIFACVNQNRPYEKNYYKLVA

SEQ ID NO: 183853 - protein, 316 aa, unidentified
MVGRVCIGIDVSKAELEVALGSAGVVRRIANHDRAVAELAAQLLELKPEVVAMEASGGYERMVAVMLWEAGLPVVIANPRHIRQFSRGMGQHAKTDRIDARMIALWAEHKGPQVRPLPDAEARELTELLSRRRQLMEMLGAEQNRLAQVVSVAIRKELKASIKSLARRIAQLNDEIGRRIEQSELWRRTRQLLESVPGVKRVTSFKLIVGLPELGTSDHRRLASLVGLAPFARDSGKWRGQRTISGGRGEVRSALYMAAVSAARFNPALHPFYQRLRQRGVPKKKALIAVARKLLTILNAIVRDATPWRAPCPAAI

SEQ ID NO: 183854 - protein, 364 aa, unidentified
MHSISNTELSSLEETRCQFNGSKADIKLGIDVHQEFYVVVMQEGGSNPKPPQRFAKGAFLYWAAKLKQKSGAEIYAVYEACGFGFSLQRQLSALAIQCYVVCPQKLDEANKRVKTDGLDAKALCLKLDRFVQGNRCALALVRVPTEEEEQKRAIHRQREQLVGARKRLEAQGRSLMVNHGFEPVQNWWKPRPFAALDVPQWMRELLSNSQPILVALQQKIAAQSVQLQCAAAPNQPRGLGKMTSVVLDREIGDWNRFHNRRQIASYTGLCPGEYSSGNTRLQRCVTKHGNPRLRAALVELAWRMVRFQPNYKAVRKWRAILAKGALATGAARKKAIVAVARQLAVDLWRVRTGRCKPQALGLVI

SEQ ID NO: 183855 - protein, 408 aa, unidentified
MGATGKQGKIVASTLWMERLMPQPDDLSRSPTSFVQGNTLVAVIELSLSSWLMTGMLPGVARQPLKKLEPDEAGLLRLLHRWQDEAVRNGSKIDRIVVAYEAGRDGFWLARWLQAHDIETYVIHSTSVAVSREHRRAKTDRLDTAMLMRVFIGWLRGERGHCNMVAIPTIDQEDAKRPHRERENLVGEKTRIINRMKAALIRLGIRGFKPELRRAPQKLDALRTPEGLPIPPNTLDEIRRDMARLAMVREQIDLIEQARLTRIEQAPETGPHAMVRLLASIIGVGVETADMLVQEVLSRQLRDRRAVARYAGLTGSPDESGSKRREKGLAKSGNARVRRGLIQLAWRFLRFQKDSALAQWYRTRTEGPNGVRKTTMIVALARKLLIAMWRLVTTGEIPDGVRMRSLVA

SEQ ID NO: 183856 - protein, 342 aa, unidentified
MTTMHYIGFDIHKKTIAFCEKKIDGTIVMQDTIPSTRNALRIWASQRTCPWIGAMEATMFTGWIYDFLKPYADELKVAHPAMLKALAAAKNKNDRSDAERIADLLRCNLLPECYMAPEGVRELRRILRFRNLMVREATKMKNKTSGILMEVGAEYNKKKLHGQRYFEELLDNLDYVPESVTNLLRLCRTNTTHFVQMQKQLVKGLIAHPDISKRTKLLMTIPGIGEITALTWVLEIGEVERFTRISRAISYCGLCSAQSESAGKNKRGPISKKRNKHLQSVLVEAAKLAPRWSPQLAAVHDKEFAEGNHNSATLAVARKMVAYMLAVDKRQVAFQVREVKIA

SEQ ID NO: 183857 - protein, 356 aa, unidentified
MQLQDTLSIPKIFIGLDNHKKSWTVSIQTDLFFHKTYSMPSNAEDLYQYVERTFPNYAVDLVYEAGCCGFSAARYFLNLGWNVLVVNPADVKTGDKERYQKTDALDSKNLSNQLKSGVLKGIYIPTEEHEQFMTLARHRTQITKKLRQTKSHIKSMLLFHGIKVPEEFDNPNWSKAFIDWLEQLKFSTSCGDLALQGKIRMFKFIKSEYLEIANQMRAYCRKTNKKDYNLLRSIPGIGGYLASVILAECGDLRRFNNEGQFSSYIGLVPGIYNSGDSEKCLGITPRSRSQLRSYLVEASWIAIRKDVEMQNYYRKHQGRNVKSVIIKVAHKMSRRILSVIKTETPYQINHNLEVEQ

SEQ ID NO: 183858 - protein, 334 aa, unidentified
MLPHKPLDIRVSIDVGCYQHSVAVGLSTGELIDEFEIDHNQQGFDRFFDKIHDIESRYLAPVSVAMEGYNGWARPLDQHILSHGYTLFNINNLKLARFKEVFPSAAKTDAIDARKGLELFTLSDHLPLAKNCLQRIEKPDQINIKLKRYSRRRRRLVDEKVRIKGAMHSDLQSISPELLSLTKNIDQSWFLNLLTSVTELSQLAKKQQRSLAKIKGVGTRYLARIKEWQQVASFSEDISWVSPMLIEDAYKMLELRALIKALDDTMEALCEASEIGRLLKTIPGFGKTSCAELAGEVDDIRRFESEASLAMYLGMAPLDNASGVYRESNLHILR

SEQ ID NO: 183859 - protein, 380 aa, unidentified
MSNKADHDRLVEILTAYGCPVLIGFEATGDYHRGLAYRLLSAGFELRLVSSVALARTREALHNGWDKNDPKDAQVILHMLRIGATQRYVDPLAAGINDLQELSNTHEAISKAKTETWHRILTHYLPLYFPEIERFAGNSRSDWFLALLERFPTPSSIMALDRESFVAEAWPLVGRKVSKARLLYDIYETASASTALPVTEDSAAITMFRMVLAEARSLIRQRDQIEELAHAMLADHADYRRLRTVPGIGPIHALTILAEAGDLRRFGHHRQFLKFCGLDLATLKSGTFRGRTKLSKYGNARLRRALWIAAQVAARQRDNSFRDKLGRYTARDRHDADLRRKAVTALTAKMARVVHAVIKGGAEYRPFFERPVPGGRTSLC

SEQ ID NO: 183860 - protein, 343 aa, unidentified
MSIVILGVDLGKNACSVVGVDSAGAVVVRRSMRRQTLIDYVAKLPACVVAMEACCGAHHLGRLFAAHGHEIRLMSPEYVRPYVKAQKNDDRDAEGIAEAASRPTMRFVELKSQEQLDIQTLHRVRSRLVAERRSLINQLRAILLERGTIFPVGRRKLELGIDGMLADDDTTLSARLRQLVGELRTEWRDLDARIEALNGEFIELAHHDAAARRLTSIPGVGVLNATALIAAVGDASSFAKARDLGAWLGLVPRQHTTGGKPRLLGISKRGNTYLRTLLIHGARAALPSLSQSDTPLGRWLKAMIDRGVHRNAVVVALANKLARIAWAALRKEATFERGYPVAV

SEQ ID NO: 183861 - protein, 321 aa, unidentified
MYKYSEIFGVDISKDVFDVVNSKGDYYQFSNDLKGFKAFTKKLTKETLVVMEATGYYHYCLAQYLYEQGYLVSVVNPLSVKRFIQMKLSKIKTDKSDAKAICEYGSFNEIPLYTAKDESQAECLQLIRLMDIYLKQRTMMKNKIHGEKTLGIPSKSVYRSLNRSLKSIKKEIGLLEDRLNLLVKDHQQKQLTLLKSIPGMGVKTALMLIIMTDGFNRFENSKQLCSYAGITPTIRHSGSSVRGKSRISKMGNQKMRNLLFLCSFSACKYNKGCKAIYERIVSKGKSKKLALIAVSNKLLKQAFAIAKSGLPYDENFVSVLK

SEQ ID NO: 183862 - protein, 353 aa, unidentified
MTSVKYIGMDVHKESISIAVRNAAGKLVMECVIETRANSLLDFLHGLRGELQVTFEEGTWATWLYDLMKPHVEKLVVCNPRKNNRQGDKNDRIDARELSDLLYMNKLSSVYHGGAGVRTLRELARSYLTISKDLGRVMSRVKAIYRSWGIPCAGKQVYAPRHRAEWLGKITEVGVLRRAEFYYQQLDALRPLRHEVRRELLAESKKHPEAKLLCQIPAIGPIRAALLIALIQTPQRFRTKRPLWKYSGFAIEMHSSADYRSVKGQLQKSRKRITVRGLNRDCNHDLKNLFKSAATIASVKPGPFQEFYAALLAKGMRPEMARLTLARKIAAIVLIVWKKGVSFDAKYLKSQTA

SEQ ID NO: 183863 - protein, 307 aa, unidentified
MALDDQSKTQCIANSGTEIGALVNRLKPLAERMGVILLEATGGFERPAAAALCAAGLPVMVVNPRQARDFAKSMGYLSKTDAMDARVLSHFGRTLHQSAQRERLLMKLPDANQEALEALLVRHNQLVAMRVAEANRLATSHPSQHKSIKLVLKMLDRQIAVIDKNIDGMLKGHFAEKLALFKDFKGVGPCMQAALMGALPELGQLTHAQIGKLVGVAPLNADSGRHKGKRITWGGRATVRTTLYMAALSAIRYNPVIKTFYERLLANGKLKKVALVACMHKMLTIMNAIVKSGIPWNPEHQNVSKNT

SEQ ID NO: 183864 - protein, 389 aa, unidentified
MKIFVGIDIAKLNHFAAAISSDGEILLEPFKFTNDADGFQLLVSKLESFDKNSIIIGLESTAHYGDNLVRYLVAEFYQVCVLNPIKTCQMRKNNVRKTKTDKVDTFVIAKTLMMQDDLRFITFFDLDMMDLKALGRFRQKTIKQRTRLKIQLTTYVDQVFPEIQYFFKSGLHQNAVYALLKEAPSPKEIASMHMTHLANLLKVNSHGHFTKELAKELRVLAQKSVGANDSAISIQITQTIQQIELLDSQLEKIEVEMTDIMKFNDSVIMTIPGIGYINGGMILGEIGDIHRFSNPNKLLAFAGLDPSVYQSGNFQAKTTRMSKRGSRVLRYALVNAAWNVVRNNATFKAYYDAKRAEGRSHYNALGHCAGKLVRVIWKMLTDEVEFNLE

SEQ ID NO: 183865 - protein, 349 aa, unidentified
MKILAIDLGKYKSVACNYVTATGTARFATVVTHVIEVDRLLQRESPDLVVIETCSIAGWVHDLCCQRGVKCQVANPSSEAWKWKNVKRKTDRDDALKLAQLAALEQLPTVHVPAPETRQRRALLKYRQSLITRRVAIQNHLRAIAQREGILLDRGGRAWTVVGLEAIQQLAKPLEECSAEELWRGEAALELQALRAVCKLLREVERKLEVFAASNERVKLLRSIPGVGRCTAEVVVAYLDNPQRFENGRQVSAYAGLVPKQFQSGETDRQGHISRRGPSLLRKMLVEAGWVLLRYNSWAQRLMQRLSRGQKTRRKQAIVALARKLLVRCWAMLRDSTAWREPPPATATA

SEQ ID NO: 183866 - protein, 399 aa, unidentified
MDQGFDVYCGLDVGKSEHHATALNRAGERLFDKPLPQDEARLRELFTTLQQHGKVLMVVDQPNTIGALPVAVARDCGCEVAYLPGLAMRKAADLHPGKSKTDARDAFIIAETARAMPHTLRAVDRDSEVLSALKVLAGFDADLTHECTRAINRLRSLLLQIFPALERAFPGTVLTRPLVLELLIKYAGPTGLRAAGRSNVLRWARNHSRKDPVQLVDAIFTALGEQTVTVAGTEAVELVIPRVAAQIQELKHQRTIVAAEVEKLLDDFPLSTVLMSMPGVGIKTAAMILLTIGDASSFRTSGHLAAYAGIAPVTRRSGTSIRGEFPARAGNKQLKNALFRSAWIASCHDPLSKAYYDRKRADGKKHNAAVICLARRRCDVLYAMLKNGTLYQAKTPQAA

SEQ ID NO: 183867 - protein, 353 aa, unidentified
MIISISNYDLLFPMDVDKKRIHLAVMNKERLIRKVTVPYDPVNLLNYVRNSFPGQKGIFVYEAGPTGYGLYDFLIEKGEDCVMAVPSMIPKAPGQRVKTNRLDAYNLGVQLRTNDLKLVQVPEKKYRDLRHLTRLRLKYGKRIVATKNGLKGLYLFEGIEFPNGKWSRRVISDLQQIRYRSAVEFKVQQLLIDLEFFRTQELKTKAEIRRFCREDQEMNGCIAHLMSLPGVGWTVSTYVLGALGGFKHLISVKKTSGFLGLGPRENSTGDKVKKGEITAVGDPNARKMIIQASWVGIIKDPELRSVYNKIQSKNPEHYGKQKAIVAVGRKMVCRIHALLRDQRRFENRLKQVA

SEQ ID NO: 183868 - protein, 395 aa, unidentified
MFIVGIDVAKRSHEVCMITSDGQTVQRPFSIRNNCTGYNLMLEKIRKHTNIKSQIVFAMESTAHYWLALFTRLRKDGYHVILLNPIQTSAMRDMFIRKIKTDAKDSFIIAELIRFGRYAESNVAQDRLLALKELCRNRFYLVDMAGDLKRKLIALIDRVFPEYEAQFDTIFCKSSVALLKKYPTPQKLSNAHLDKLTELLWNSSNGHFGEWKARELRELARNSFGVEDCDGAYSTLILLMLDQIQSLSGKADALEKEISRLFQSFDTTVTTIPGVGPIIGAVILSEVGDISRFSSADKLAAYIGVDPSVNQSGEFQAVHAHMSKRGSPYLRRCIWMASQVAVQRDPMFRAYYEKKTAEGLKYMTIIGHVTRKMTAVIFAILRDHKVYEPVLPTAA

SEQ ID NO: 183869 - protein, 446 aa, unidentified
MAARKRKSQELTVKHSNAAGIDIGSASHYVAVRPDRGEDAVREFGCFTEDLEAMAHWLLECGVDVVAMESTGVYWIAPYEVLESHGLKVYLVNARHVKNVSGRKSDVLDCQWLQQLMTFGLLSGAFRPEGDVCALRAISRQRDALLREQARQVQRMQKALTQMNVQLTNVITDIVGKTGQDIIRAIVGGERDPEKLAKLRNYRIHASEAEIAKSLKGNWREEHVFCLGQALALFDTYQKLIAETDAKLEELIKPMRHHQRTLPPNKKKGRGKNAPSFDALNMLYQWVGVDLTRIGGIDVTTALKIAVEIGTDLSKFKSSKHFASWLGLCPGTKITGGKKLSGASKRLPNRVAQALRLAAQGLHHSQCALGAYYRRMAARCGAGKAITATAHKLARLIYAMMTKGEEYVQRSQQHYEESMRKRTLTYLKRKAKALGYRIEPIEAEAV

SEQ ID NO: 183870 - protein, 387 aa, unidentified
MGEIITASKQGKLTVGLDMGDRYTHICVLDEDGGVLEEGRVATSPRAFRQRFAAMPPTRLVLEAGSHSLWAHRLLKEVGHEVIVANPRMLRFIYGNDSKNDRADAAYLARVGKLDPGLLHPVTHRSEESQAHLVLLRSREVLVRSRTRLISHARGLVKPFGVKLPHCGAQVFASKVREHVPEMLLPALGPVIDIIAVLTEQIRDLNDKVETLARDTYKETALLAQVPGVGTLTSLAYVLTIEDPSRFSRARAVGSYLGLRPRQDESGTLKPQLRITKAGDTFLRHLLVECAHYILSSNSQDTDLKRWGLKLAERGGKAAKKRAAVAVARKLSIGSFSRDQGALPIDSRRSQSTSTTIFRKGGRPAKSDDGLSSAEGHWGECLIGQSA

SEQ ID NO: 183871 - protein, 361 aa, unidentified
MSFKTTSPDFKGQIFHVGLDTHKTNWKVTIRTKDMHLKTLSINPSPEELNSYMNRHYPNGIYKSVYEAGFCGYWIHRKLTEYNFKNIIVNPSDVHSTNKERDRKSDPIDSGKLSRELANGSLKGIYVPDTHHEAMRCLHRLYKQNTRRMTQIKNRIKGFMHFIGIKLPDEFDRVCWSNNFIKFLENIRFSEPHNRIVMDTHVADLNHARKTRNSVLRHIRKTSKGIPIIQLLKTVPGVGPLTAFTLYSELVDINRFKNFDNLASFVGLVPSTHASDTTVITGGISHRHCKHIRSALIESSWVAIRNDEALLSAFNQLVKHMPKSDAIIRIAKKLLNRIRFVWKNKIPYVTGIVEIQMCQKT

SEQ ID NO: 183872 - protein, 343 aa, unidentified
MEYYVGLDVSLKQTSICVVDQTGTVVREGVVNSDPEAISVYVRSKATDAVRIGLETGPTSTWLWTELRRLGLPVICIDARHAKAVLKMQINKSDRNDAIGIARIMQTGWFKEVHVKDIDSHSVRALLASRALLVKIKRDLENHVRGLLKNLGLVIGRAKFNVFAVRAEELIEDRPELIAAIRPLLEARNAVGQQVSELDRKVMKLARHDAQVRRFMTVPGVGPITALAFKATIDDPARFARSRSVGAYIGLTSRRHASGEVDWSGRISKCGDAMLRSYLFEAAGVLLTRVPKWSAVKAWGVRLAKRNGLRKAKVAVARKLAVILHRMWIDGTEFNWSKEEIAA

SEQ ID NO: 183873 - protein, 339 aa, unidentified
MGLYTGFDLHSSNTYVGIIDEDGKRIWKKKLRNDPSLISSMLRPFKEDIVGIVVESTYNWYWLVDHMMEESYRVHLANPSRIQQYSGLKHGDDEDDAFWLAEMLRLKILPEGYIYPKEQRPLRDLLRKRGHLVRLRTSLIQSLQNILARNIGTKMNTNRMKALRTDHVAPLLTGNDDLSLAGKVSKDAIDALTRQIQAIEVVVEKKMDIRRPYDLLLSMPGVGRVLALTIMMETGPIERFPKVGNYVSYCRKVPSARFSNEKKKGTGNRKNGNKYLSWAYGEAAELARRFDPEARAYFDRKRRHTNQPIAYNALANKLSRAAYYIMRDRVLFMPERMFA

SEQ ID NO: 183874 - protein, 388 aa, unidentified
MIYVGIDIAKLNHFASAISSDGEELIKPFKFTNDNDGFQLLISKLNPLDKDSLIIGLESTAHYGDNLVRYLVAKRITKCVLNPIKTSTMRKNNIRKTKTDKVDTYIICKTLMMQESLRFVTFYDLDLMDLKALGRFRQKTIKQRTRLKIQLTSYVDEIFPELQYFFKSGLHQKSVYALLKEAPTPEAIASMHMTHLAHLLKVNSHGRFDKEMAQQLRVLAQKSVGASDSSLSIQVTHTIQQIELLDSQLERVEAEMTEIMKFNDSVIMTIPGIGYINGGMILGEIGDIRRFSSPNKLLAYAGLDPSVYQSGNFQAKKTRMSKRGSKVLSYTLVNAAHNVVKNNATFKAYYDAKMAEGRTHYNALGHCAGKLVRIIWKMMTDNLEFNLD

SEQ ID NO: 183875 - protein, 319 aa, unidentified
MAPGAAPSRPLTVDQTPQGFATLQERLLATGHGAATILVVMEATGSYWVGLATTLAQAGFKVSVVNAAQAHHFAKALLKRAKTDAIDAQTLTQLAARLEPTPWTPPPAIYTDLQQRLTQRDSLVTLRQQVRNQRHALQHLPVVIASVQERMEALIATFDAQIEAVEQEIEQVLAHDSSWATTATLLLSITGIGLLTAAWLLVTTLNFTICATAEEATAYAGLAPHPYESGTSVRGRAAIGHGGNGRLRTALYLATLSAAQHNPHIKPFYARLRAAGKPKKVARCAAARKLLHLAWAVATKGVAFDPLYQTHHACSGSST

SEQ ID NO: 183876 - protein, 420 aa, unidentified
MSMEVLRERCAALDISKRDVKACVRVPNPNRKGARSQEVRTFASMTNALLQLKEWLVSEQVSVVTMEATGDYWKPVYYLLEDAGFELMLVNARDAKGLPGRKTDVSDSAWLCQLTECGLLRASLVPPEPIRRLRDLTRYRTTTVRERSREAQRLEKVLEDACVKLSVVATDILGVSGRAMMQALIDGERDPEILADLAKQKLRLKHDALVEALTGRFNEHHAFLCAIILRRIDELSAVIEEVTSRIDTELAPFADAIEHLVTVPGIDRKGAAVIIAETGGDMGRFRTAAHLASWAGVCPGSHESGGVRKSGTRRNGNKALGAALGNAAMGAARTKNSYLRERYYRLAARRGKQRAIVAIEHSLLTAIWHMLVNDVDYHELGPDHFTRREPAHVMRRITKQANALGFTVRFEPVPETAGAA

SEQ ID NO: 183877 - protein, 399 aa, unidentified
MAASPRVVIGADTHLDTIHLAVITDAGKPLADSEFPTSPAGYGEALRWARSFGIIVIAGVEGTSSYGAGLTRVLQAAGVEVAEVSRPDRAARRRQGKSDPLDAYSAGRAALAGHGLAVPKDANTGALRALLTARRSAVKAHTAATNQIHALLVTAPAELRERYRRHTATALVKALARCRPAAHSDPTTMAVLTAAKALAQRAELLEHQKQDLSAHLDVLVRQLNPALRAAYGVGADTAAQLLVTAGANPHRLPNEASFAALCGAAPVPASSGKITRHRLSRGGDRAANNALYRIALVRMSAHPQTRDYVQRQDTNGRTKKEILRLLKRAIAREVFRLLTRPGPIDDYSDLRPARQAKNLTLATVAHHFGVPLITVSRLERGHQRNDTLASNYRQWLDAA

SEQ ID NO: 183878 - protein, 410 aa, unidentified
MELLHRRCCGLDVHKETVVACLRLVSDGKVTTEVRTFQTTTADLLRLSEWLTANECTHVAMEATGVYWKPVWHILDDGEFALVLANAAHVKNVPGRKTDVNDAMWLAELLAHGLIRASFVPDAQTQEMRNLLRTRKQLVREQSSHVLRVQKTLEDANIKLDSVLTDLMGKSGRAIIEALIAGETNPVKLAGLADRRVKASPEEFREALRGRVTKHHRFLLRLHLNQIDALDAAMATLDAQVEANLGPFRIAVELIRSIPGIKNLGAHVIVSEIGIDMSRFPSAAHLISWACICPRNDESAGKRRSNRVRKGGTWLKTTLVQCAWAAVKKKDSYLQAQFYRIKARRGPKKAIMAVAASILTAIYHMLKDGTMYQDLGRKHFDRRSTDQQKNSLVKRLADLGYAVEIKPLAA

SEQ ID NO: 183879 - protein, 348 aa, unidentified
MRFYTKTHKHYCGIDLHARKMYICILDAEGTIVVHRNINCNPAEFLKTIAPYRENLVVGVECMFSWYWLNDICLKEKIEFTLGHALYMKAIHGGKAKTDKIDSHKIAVLLRGGTFPIAYSYPPEMRATRDLMRRRNHFVRTRAELMAHIQNTITQYNLPAINFTLAYESNRNLALELFLDPEVRKIVQLDITMIDSYDDLIRKLELDIEKTANKHDKHALLLLRSIQGVGPILSLVLLYEINDIKRFETVQQFASYCRLVKCSHESAGKKKGTGGGKIGNAHLKWAFSEAALLFMRYNSPAKTLVENLAKIHGKGKAISILAHKLARAIYYMLKNNKPFERDKFFATA

SEQ ID NO: 183880 - protein, 339 aa, unidentified
MEKISTIGLDIAKHVFQVHGSDASGSVVLRRRLRRGEVMGFFTALPRCVVALEACSTSHYWARQLAGLGHDVRLLPPSYVQPYVKRGKKNDAVDAEAICEAVQRPSMRTVPIKTETQQAVLMLHRSREQLVRQRTMLLNALRAQLAEYGLIAPQGAAALRHLATSAEALALPPMARLSHGVLREQIVAAERQIAALERAIIAAHKADEQSVRVATIPGIGPITASAMTASVGDATRFRSGRHFAAWLGLVPRQHSSGGKQRLAGISKRGDRYLRKNLIVGTTSLIRRAPTATTPDAAWLRGLLGRKPKRVVSVARANKAARIAWAIMVNGGVYDPAIGR

SEQ ID NO: 183881 - protein, 339 aa, unidentified
MFYCGIDLASRTSALCIVDANDCVLREAQIPTDEVAFRGILQNYPDCLCVVEAAPLAESIKRMVESLGHRCVIVDTRAAQGLFAARKKTDRNDARTLAKMARTGWYNEVCAKTTDQRLLRTRLTARVALVHTQVRLQNAVLGLLKAQGLRLRAANNRQFASVIRNKVTALAEGSALLPIIEPLLLIWEQVDQEVSALDKQLHALAKSQQLTRLLMTVPGVGALTALAFVATIGDPERFRRPEQIGDYVGLAPGVYQSGDVDRRGRITKAGDAMLRSLLVNAATVVLYQYRKHWSLKAWALRLKERKGAGKARVALARKLAILLWKILKTQTPFILPAAA

SEQ ID NO: 183882 - protein, 414 aa, unidentified
MIDERRWYAGVDWASESHHVFLTDENGRRIGEKIFRHSGEGLAEMAVWLSSTSGGVPAQIHIAIEVPHGPVVETLIERGFKVHAINPKQMDRFRDRFMLAGAKDDSRDAEVMASALRTDLRCFRPLAVADPVVIELREWSRIADDLGAERNRLTNRMREQLWRYFPAMLDLESDLGAEWLLDLWEIAPTPHKAIRVREATVAKVLKRNRIRRFDAAHVLDVLRKPPVQVAAGTTEAAAAHIKTLTARIRLVNHQLGEAHRQLDALTARLIPSEENGPGQRKQHDVEILASLPGVGRIVLATLLAEAFDALQRRDYAALRSLTGVAPVTKRSGKSCIVVRRQACHDRLANAMYHWARVAVQRDPRSRSKYAALRSRGHSHGRALRSIADRLLNVACAMLKTGTTFNPSLAAEKTP

SEQ ID NO: 183883 - protein, 336 aa, unidentified
MRYIGVDLHTTQITVCYLKAEAEFEIRKYQLVEMDKFVNTLEAGDEIAVEATCNTRWFAEQVAEKVSRVVLVNPRQFEVVKNSVKKTDKNDALNLARFLKADLLPEVRAKREEAERVQSLVNTRTKLVRLKTSLINKIHALHVSNGRKLKKTSLSSEKGLEKVLLCEWSAIERIELEIIIEQIRSLKVSIRKLDKAIEAESEKLQGYESLVSMSGIGSLSAGILLSVIGEIKDFGSADKLASYFGIVPRVSNSNETVNHGRITKRGNKTGRTTLVQCSLSAIKKSEYLKKYYEQVKARRGHGKAKIALARKYLGIIYNTLTNNWVFADFNNFELAE

SEQ ID NO: 183884 - protein, 308 aa, unidentified
MTQISIATAGIDTAKDKLDIAIHGDAARWQVENSVRGFKRLTTLLTKAGVERVGIEATGGYERRAVKHLRAAGFTVLVLQPIQVKAYGRVHLRRAKNDALDAALVAACTAAIDRPRIEPDARLQDLADHLTFVEQIEEDIARLKTRLEHIDDPRLRRLVMADIARLKARRGAEMLRIVAVLRSHTDLARRFELVQSVPGIGERTALALVIRMPELGRVTREEAAALAGLAPFDHDSGKYKGQRHIAGGRGRLRRSLYAAALPASFRWNKALVDLYGRLTARGKAHNAALIACARALSTCHEAYPAFRK

SEQ ID NO: 183885 - protein, 443 aa, unidentified
MTRKNQKRFEVVHPDCAAVDVGGSEHLAAVDPEKCADPVQRFSAFTDDLHAMADWFSSMGVKVVAMEATGVYWIPLFEILDRRGFEVYLVNSRATRQITGRKSDVLDCQWILQLMTHGLLRGAFRPSDEVCSLRSLVRQRANKVRDQAKSLNRMQKALVQMNIQLAQVISNIAGVTGMSILRAIVEGERSPDVLARLRDKRVKADEATVARSLRGNWRAEHLHALSQELAAYDFLEKQIGECDQAIADALDRLPVLQSDVTTPTKTLRSAHRSNEQQLALHQALNKVMGVDLTAIPTIGIDTALVLASELGADLSRFPTSQHFCSWLGLAPPTRISGGKPLPGKSAKVINRSAQALKQAASIARNDKSFIGASHRARLTRMDTCCAIKATAHQLARLIYAMLTKGQPYVEKGIEEFEERSRDRQLRALERKARKLGLQLVKAA

SEQ ID NO: 183886 - protein, 375 aa, unidentified
MEVTTIGIDVAKDAFGLHGVDAQGRVKVRKRLVRKHLLEFLSKLPACLVGLEACASAHYWAREIERLGHRVKLMSPRFVKPYRKNDKNDANDAEAICEAVSRPSMRFVPIKSEAQQDLQAAHRAREQLLKSRTALVNQARALLAEHGIIAPRGIARARRLLAETLAPPERYPLSGLLRETLLEIAERLRFFDQRIEAYDLRIEQVFRHDERCQRLAKIAGVGPLVATAVVAALGNAQEFKSGRQLSTWLGLVPRQYSSGSRNLLLGISKRGDRYLRTILIHGARAALCRTVRQRDQRSVWASRLRLRRGTNVAAVALASKNARIIWALLTRGENYRPQLLELRHSVRPAAFHPSPPASVRRVGAESSWPSELRRN

SEQ ID NO: 183887 - protein, 338 aa, unidentified
MTPFKYFVGVDMASATFTACVGTTPWAILVKPETFENDEEGFASFLGRLQAHNLPPAQTVVCMEATGVYGEGLAYYLSASDYPVAVEPPLNIQRKFPVNGSKNDWQDSQNITEYACRYTDKLSLWKPRDEVLEQIKLLLTTRQQFSVQLTAHKNACQALQRKKVSSELAKKVHTDMIEQIVKSIKAIDIEIRRLLDSNPTFKAALLLLLSIPGIGLQLAAHLIILMQYSLDPRVLSAFVGICPYEHESGSSVYRNPTSRHYGPPAIRKLLYLAACSVRTHRKDFRQYFLRKKAEGKPGKLVLNNIQNKLLKIACAVIRTQKPYIPTYVSVNPLALKNA

SEQ ID NO: 183888 - protein, 359 aa, unidentified
MKIVGCDFHPSWQQVAVFDVETGEITERKLMNGDGEAERFYQALEAPALIGMEACGNSQWLIELLQRLGHEVWVGDAAQIRASYVRKQKTDRRDAGHILRLLMEDRFPRLWTPTAEQRDLRQLLMHRHKLVEIRTRVKNGLQHLALNRGVQKKGRLWSVRGRAELEKLPLEGWTARRREDLLQLLAELDRHLAELDEAVSRAAEEHPQARLLMTQPGVGPITALAFVLTIGDVSRFKHSGQVASYVGLIPREHSSGGKQRLGSISKQGNRFLRQLLVEAAQTVNRLDEGFRRQYQARCHHKPKGVAKVAAARKLAVRLYWMLKQNVGYPEIVHIESSSRVPLTGRCQVATLNERSRIQQ

SEQ ID NO: 183889 - protein, 340 aa, unidentified
MGDITTIGLDLAKNVFRVHAVDEAGNVVVRKRLRRGQVLGFFAGIPSCLVGLEACATAHHWARELIALGHEARLMPPNYVKAYVKRNKHDVADAEAICEAVRRPSMRFVPLKTAEQQSALMMHRARDLLIRQRTMLVNALRGHLAEFGLIEAQGLHKVARLITIVMDEMDGRVPDIARQVLKVIVNQIKDIQTGIAELETQILAWHKNNPVSQRLATIPGIGPIIATAIAATVADPNTFRSGREFAAWLGLVPRQNSTGGKARLGGISKRGDSYLRRLLVNSAHTVLLCSKAAKTDPWLTSLLSRKPRLVAAVALANKTSRMAWAIMSRQDTYRHAATPA

SEQ ID NO: 183890 - protein, 354 aa, unidentified
MLIIGCDYHPGFQQIAYVETGTGELQERRLEHRQEAEQFYRALKAQQLEVRVGMEASGQARWFEHLLAELDFELWVGDAAKIRTKRVRKQKTDRQDAQLLLGLMLENRFPQVWVASWENRDLRQLLWHRHRMVQMRTRLMNQLQALALNEGIRRKKGLWREAGRKQLESVALAPWASQRRHDLLELLDRLSPRIAELSERVEEEAHKIPAAQQLMTHPGVGPLTALAFLLIVGQAQRFRCGNQVASYLGLVPEEDSSGEHRRLGHISKQGNSLLRFLLVEAAQVTVRSDPEWRRKYFHLALRRGRKIAKVAMARRLAVRLYWMWRKQWDYERWKKFGPHAGQPGTGVGVQSNTE

SEQ ID NO: 183891 - protein, 351 aa, unidentified
MLIIGVDYHPSFQTIAFLTEETGECGEQELNHSDGEAERFYQELKQRGVSVRVGLEATGYSRWFERLLAELGFEVWIGDAAEISRQRVRKQKTDREDARLLLKLLLENRFPRIWVPSPENRDLRQLLWHRHRLVQMRTRIMNQLQAVAMNEGYRWKKKLFSEQGRALLEKLSLAPWASRRRKELLELLDQLDPKIGELTAAVVQEAKQRPEVLRLMTHPGVGPVTGLAYVQVLGTPERFPGGKQIGSYLGLIPCEDSSAGKQRLGHLSKQGNALLRYLLGEAAQAAVRCNPHWRRRYMHLAMRRHKNIAKAAMARKLAVRLYWMWRNGWDYSQLVSFGSHAGKLVTGHGVK

SEQ ID NO: 183892 - protein, 425 aa, unidentified
MLAVGIDWSEEFHLVALGRPGEGVFDVGRVEHSPKAVDALCARIAALEPDPAEVRVVLESRHGLLVERLVDAGYVVVPVNPDLVARRRGPAKKKDDAEDARIACLLALDRFERLRPLIPHGELAGELRAIARDDERAARDERRLLNRLRQDLIATFPAALAIAGPDLGAPSFLRALERWPTAEALAQAPRAELVAFAREARHGWPERFAGKVAQALAAEHFQPRPYLVRAKADTIRLTAGQLLAIGGQRRAWERRMGELLLGAPRRGRAKQPREAERGQSFPGGEVYLSFPGLGDRLAARVAGEIGDHPEQFESPNALQCYGGRAPVTRRSGKSEFVVSCRLAYNRHLGDALQQWAFCSLRYSTWARAFYDEKRAKGKGHHAALRALGNRWLEVLWHCLHKGVPYNEAVHEANRNRALGRLPKAA

SEQ ID NO: 183893 - protein, 405 aa, unidentified
MKVYIGIDWSTQKHDIVYLNEEGGIILYQTIPHSPAGFEAFDEQRMELGVSVEDCLVGIETEHNLLIDFLTSHQYQQIYVIPPSMIRDSRGRFGASKAKTDRSDAHLIADMLRTDRARLHAWHSDSLLTQQIASLVSLERFLTRTIIQTTNRLRNVLWRYYPNAAGVFSSLDQQIALEFICAYPTPEAATGLTIEQFKSFAKLHHYPRPSKLSACYARLQKPQPDAKQQTVLAYQSEAVRLAHLALQVVQDKAATLKETQELFVDHPDYPIFSSLPGAGRILAPALLAKFGDDRQRYPTPQVLQCVAGTCPVTKASGKHKYVSFRYACDHEFRLIVQQWAKSSIDYSVWANTYFQTIRPHCDSLSHAYRRLAHRWLEIAWRLWQDRVPYDEGRHLRQHALRVKPK

SEQ ID NO: 183894 - protein, 346 aa, unidentified
MLYAGLDLSRKRLDFCLLDQAGEMVETGAAPPDADGLRGLAARLARFAEPVQAAIESMNGARFVHDQLELAGWRVEIADAVKVKGLAPLACKTDRIDAWVLAELARRDLVPAIWLPDPAVRAERERARFRLHLVRHRTSLKQRVHAVLLAHGKPCPVSDLFGVAGRDLLERLALPEPWLATVAASLQLIDELDQQIGDCERDLHRLGAEHRYVPLLVTVPGIGWVLAYTIAAEIGEISRFATPTKLTGYTGLCPRVYQSGQSDRRGALAKNGPRYLRWALIEATMHASRHPLYRDRYQQTKQRLGRQRGAKVAQIDLARRLAEAIWHMLTRDQPFAPASATSPLAA

SEQ ID NO: 183895 - protein, 344 aa, unidentified
MGQYVGLDVSLDETKVHVLDEQGKRVWRGACVSHPAAIEATIRKQAPDAVRIGLETGPLTTWLWQALTDAGLPMVCLDARQAKAALNMRINKTDDNDAEGLAQLVRSGWYREVRVKSREAMLVRALIGARTQLLGIVTELSNQIRGLMKTFGLVVPKGAGKVFEANVRRLLEGETAVAAIVVPLLDSWRAVRAQAADLDRQLLSVVRENAACRRLMTIPGVGAIVAASFVAAVETPENFTTSRAVGAWIGLTPRRYQSGEVDYDGHISRRGDARLRALLYEAATTMLTRVQGESDLRRWGLALKKRLGFKRAAVALARKMAVVMHAMWKKGMDFNPKAATSAAT

SEQ ID NO: 183896 - protein, 425 aa, unidentified
MPYRIAGIDVHKKMLAVVVADVEVDGDFHFERQKAGTTPSDLRGLAAWLVAQEVEEVVMESTAQYWRPVWEALEQHWRPQRRERADASRPSGTLHLAQAQSNRGPGGRKKDFPDAERLVKRLVAQELTLSFVPDTEQRLWRTVMRRKYQITRNRVQLHNRLEALLEEAHIKVSSIVSDLLGISARRMLQALADGETDPTALAGLAAPRLRATPAQLCDAFQACPTLHPVYRRLLKLTLEELRVIEDHLGQLDQQMADLLAAHHDAVQRLAEIPGLGVDSAQQIIAEVGATAATFPSPKHLASWMGACPGNEESAGVNYSHRCPKGNRQMRRVLNQAAKAAVKAKGTIFAVVYRRVVPRLGHAQVIGAITHRLCRLIWKILHERVRYEERGPAVSVEAKKVRARKMIRELRGLGYRVELVAPSSMV

SEQ ID NO: 183897 - protein, 371 aa, unidentified
MIRSWTDSRRDWKPVAASVVGPRMSLVLRSFLPHPNSCLGTSPYQQGRDTKMAQRSFCGIDVAKDRLDVMVLPEELCWSVANDAAGWAELVAKLRGLRIAASGIEASGGYERGVVRALLAAGMSVRQINPFKLRQFAKACGVLAKNDRLDARMIALFVATLPTRSAQRYAPVERLAELVTARRQLSDDKVAAENASRLFEDAALRRLYGGRIARLAADIALLDKRLAEILAGDAMLARRYALLVSMPGVGPVLAVTLLALLPELGQMNRKQVAALVGVAPYDFDSGRLRGMRCIWGGRAPVRRVLYMAALIGCRCNPQLRAFHDRLAAAGKKAKVVLVAVMRKIITILNAMLRDNAPWVDHSIGRHILPAA

SEQ ID NO: 183898 - protein, 373 aa, unidentified
MLADHVDYVVGVDPHRDSHALAIVDVLSGAVVFETTIAASSQGYAEALQLVDAHAPGRRAFAVEGSGSFGAGLTRFLTGRGERVLEVSRLRRERRSGGKTDALDAVRAARSVLGQERPATPRAGGERQALQALVAAREGAVNAKCAGLAQIRDLLITTPEPLRSELRPLTQAPLLRRLAATRPEGRRDPELRGSMLALRSVARRVLQLQAEERELGRQIDALTRKLAPQLLDQPGVGPHAAAQLVLSWSHHGRIRSEAAFARLAGAAPIPASSGQTVRYRLDRSGDRKLNHALHLILVKRKRTHPPTRAYIERRIQEGKTRREANRCLKRYLARSLYRLLEPGRLSRLDRHRSITRPGEATEFVNNSGPTKRC

SEQ ID NO: 183899 - protein, 387 aa, unidentified
MIYYVGIDISKYKHDFCIISNTGEIIVENSSFENNKKGFQFLLDQLKPYNKSNVHIAFEATGHYSLNLELFLIDQGYSFIKMNPLVIHQFLKARSLRRTKTDKADSITIANYLMSVPYKPNSDLLYHTYTLKSLCRSREQLIKERSKFEVLLTNELDKTFPELKPFFKDKISTTLLYIVDKYKNINHISLMKDYDSLRKISHGKFSYANFAKLKELAKNSIGHFDENTDLLISTYVSLINDFNNKIDPINKQISTIIKELKPRMLTIPGLGEISAATILSEYGDINNFSSPSKMLAFAGLEPSIIQSGTLASNGKMVKHGSGHLRYSIMNIAMTILRYSPTFYDYYLKKRSEGKCHRVALSHVCKKLIRVIYTLEKNNIDFDSSLLK

SEQ ID NO: 183900 - protein, 401 aa, unidentified
MLYIGIDIGKRNHEATILDESGKELCESVKFPNSIAGAEKLLSKIPSLKDTMFVLEATGHYWLSVYCYLTSKELAVQVINPIQSDSLRNLYIRRSKTDKKDSFIIADIARINRMPKTKLADENTLKLQTLTRLRFELIDQVTALKARIIGVLDRIFPEYESIFSNIFIKSSRELLKNTASPEEILEFDLSELAESLNKASRGRFGTIKAKELQSKAANSFGITLGLDAFRLEIKLLLSQIEFLEAQIETIDSSVKELLQEFKACFITTIPGIGDVLAASILAEIGDINRFNHVKKLVAYAGLDATVHQSGQLTGTRAKISKRGSPYLRRSLWSAANSARRFNPVLRDFYQLKIKQGKHPQVALGAVARKLTHLVYYILKEQKPFDPNYQWSSSTKIYVDSL

SEQ ID NO: 183901 - protein, 336 aa, unidentified
MENFYFIGVDVSKKKLDICVICDSKVVTEEQVSNHPQAIVKMINGLKQNLNMANEDFLICAEHTGQYTYPLICACKSTDCKLWIENPTQIKYSSGMTRGKNDKVDAKRIAMYASRFYDKATYYKRPSEELTRLKQLEAERTLYLVDLSKYKAQMTDQKDYLPKAIYKSKSGRLRILMQSLEEVLKRIEEEMNKIIESTKVLSRQMDLLMFIDGIGRVVAMNMIIVTEAFTRFESPRQFCCYAGVAPFAYTSGSSQHSKNRVSQRACKYIKTLLHMSAVAVIHRKSGELKAYYERKVDEGKNKMTIINALRAKLVARMFAVIKRNEFYSPILPEFIC

SEQ ID NO: 183902 - protein, 506 aa, unidentified
MKVQASKPTFTIGYYPIGQYGSNICRQDIGRKRPYRSLLRQRYWAWSFTSKLITMAKVAKRKQTSKGLRLEVVNPNAAGIDISPKEMQVCVPSDRDGECNRTFGVYTEDLHYIAEWLKACCIDTVAMESTGIYWLPVFRILKESGFEVILVNASDVKNFSGRKTDASDAEWLMMLHSYGLLKPCFQPENIARTMRNLVRHRDNLIRSASREVLHLQKAMEQMNLKLDNVFSDILGKSGQSVIKAILNGERDPKVLADLADPRCRTSKEEIEKSLQATWDEEHLFEMRQSDSLYQFYQQLIAECDAKINEIAMQYSATVDAPKTELLRSEKYNAKKNRIGFDIEKVAFELWGVNVMRIPGMSRGSLLRLVGELGADFTTKFVDVKHFVSWANLVPNNKISGGALLSSKVPKKKNPVGMIFRQVANTLKAAKNPLGDYFRHMRAKGGHLQAMVATGKKLASIFYCMVQRKVEYNEKVYCNHRKQELQNKVAYLNKRLQRMESELANCG

SEQ ID NO: 183903 - protein, 425 aa, unidentified
MYRIAGIDVHKKVLAVVGVEFEGTQQAIQRRKVPYSPEQLRKLAEWFVAWEVEEVVMESTAQYWQALWHTLEVEWQPQRRQRPGAPPKAGTLHLAQAQSNRAPHGRKNDFADAERLVRRLVAEELILSFVPGPEQRLWRTLMRRRTQLMEARSTLQSQVEGFLEQAHVKLATLASDLFGVSMLRILEALGQGERDSQVLLGMVGSNMKTPAEQWMDVLRPCCEWDRHYRLVIGQMVAELRLIDAQVKELENSAAELMAPYQDAVQRLAEIPGMGLVSALLVIAEIGPLAESFPSAGDLSSWVGVIPGENITAGHNYSTHSPHGNRHLRRLLNQVAHAAVKTKGSIFELKFQKFRARMPYKPAIWCVAHFICELLWMILHKGARYEERGPGLIAQNQRKRMNRMRRHLKAHGYVVLPPNTPQPSVI

SEQ ID NO: 183904 - protein, 401 aa, unidentified
MIYAGIDIAKDSARCVFLDNEGEKIKAFSISTNKEGFEKLHCFIKELKMNKDEFLFGIEATGILWENLFTFLTDTGFKTILLNPFQTKKYREALRFKAKTDDIDAYVIAGLLRSNDFSSSFIPEDMIQGLRDFTKLRYELVKDRTNYQRQALSLLTLVFPEHTKTALRNPFGIASLAVLKQFPTAKHIAAAKVKHIEAIVRSIKGNNFSVENIQNLINTAKTSVYSGRASDARALTLKILLTQIETLDSSISSLDAQIEALLTDNSQNNTPGSNLLDIPGVGPKTVAALLSAIGDGKTFSSGTNLIGFIGYYPVISDSGDTKLKRHIAKNGPKYLRWALYVAAVACIKHNDQFRRIYQIKRSQGKSAKQALICVVVKLAHTMLSMLKSGKPYDPTRVFACS

SEQ ID NO: 183905 - protein, 368 aa, unidentified
MEKGTTYVALDDSKRKIVAGILRPGAPAPELRELPNDPPYIRRLFERLKREGPVAACYEAGVSGYDLYRQITGLGVSCQVMAPALTPRRPGQRIKTDRRDAGKLVHLFRAGELTPIHVPDEAEEAGRDLVRCRDDVRRDVLRWRHRLLKLLDRHGRVYRAGKNWSRGHWTWIRDQRFDLPALQRAFEASLFALEQALARRAELDNEVEALAETAPYRDPVGWLRCFRGIDTLSAMILLVEVVDFQRFERPRQLMAYLGLVPSEYSSGDTQRRGALTKAGNTHVRRALIEAAWHYRHRPTVGHALAARSQGQPREVVGEAWRAQQRLHRRYRHLVGHGKRPPVAVAAVARELVGFLWAAMTQRESQAAA

SEQ ID NO: 183906 - protein, 463 aa, unidentified
MSMKERGKTPAKGAKPKIDWKALEIVHPDAAGIDIGGSEHWVAISPERDEQPVRCFDCFTADLEQMADWLIERGVRSVAMQSTGVYWIPVLEILQERGLEVYLVNARHTKNLPGRKSDIAECQWLLKLHTFGLLNNSFQPSDQIRVTRTLWRHRGGLVAQASSTIQRMQKALTEMNIQLCNVLSDLSGASGMAIVQAILNGERDPQALAAWADPQVKASRRVIAKSLKGNWREELLFVLKQEVEMYRMYQERIAACDQKLQGHLRVLAPKVDLQAQPLGPRPKGKRARGNAPKFDLRTELYRITGVDWTQVDGIDVQVAQSVIAEVGVDLHAFPSEKHFSNWLGLCPTNETSGGKVLKRQTPKVVNRAKVAFRQAASTLLRSQSYLGAQYRRLRTRLGAPKAITAMARKLACLFYRLPKHGQQYVDKGAEFYESRYREQQIRSVIKRAHQLGLQLLQSADKSA

SEQ ID NO: 183907 - protein, 430 aa, unidentified
MNESVSEQPLNPKVVAFVGIDWADQKHDVVLRSADDPAKPEHQVIKSEINALNDWIAQMQERFGAKGKVLVCLEHSRGALIYQLMAYELFELYPINPSQLANYRKTFFSSGAKDDRPDADLLSELLLCHRDRLRAWKPDDQLTRELASLNEGRRNAVDRRSELANEIKSQLKLYFPVALQILQNDITTALAADLLVQWPTLAELQKVSPGKLRKFFYGHNSRQEKKILERLTLIKEAKPLTADLAIIRPMALRVKLLAQQLKSLLPFIAEYERRIAELFGSHPDRFLFDNLPGAGPALAPRLLTAYGTDRDRFEVAGDLSNLSGIAPVRIASGKKTGKNASVHCRRACPKFLRQSFHEFGECSIRYCPWAQACYQAQRNRGKGHHAAVRAVAFKWIRILFACWKQRIPYDPDRYLKALQNRGSQYAQTAA

SEQ ID NO: 183908 - protein, 347 aa, unidentified
MTLTIVDEARPVTGGVDTHADTHMAAALDRTGGLLGVQEFAASPDGYARLLAWLSGFGTVGLVGVEGTGSYGAGLARHLAAAGIGVVEVDRSDRQDRRRRGKSDPLDAVSAARAAQSGRARGASKGRDGQVEAIRALMVAKRTARAQRTQTINQARALILTGPDDIRTRFTRHGPANLVADLAALRPRPGSMVRSHTLLALRELGRRAQFPDAQLERLDELIVPLVTARAPGLLRLYGVGPDTAAMLLIAAGDHPERLRSEAAWAHLCAAAPIPASSGRVARHRLNRGGDRQANHALWRIVITRMSSHPATRAYVARRSKEGLSKPEIIRCLKRYAARETYRYLRPS

SEQ ID NO: 183909 - protein, 369 aa, unidentified
MTIAFMGIDLAKNVFQLHGVDAEGNAVFKKRLRREALLAELADVPTCMIGIEACTGAFWWQRQFEALGHRVKVIAPQYVKPFLKHQKNDRNDAEAICTALMQPNMKFVPPKNEEQQDIQALHRARRRLVNHRTALACQMRGLLLDRGVTIPLTLGRARQRIPEILEDQSNGLTEMTREIIADLFEFMLQLDTRIKAFDRRIDQVFRANPDCQRIAQICGVGSKTATAVIAAVGDGKEFKNGRHMAAWMGLVPRQHSSGDKRLLMGISKRGDKHLRTLLIHGARSVVRVSQGRTDAFSRWVNSIRERRGMNRAICRRRQQERTHHLGDVAQKRRVPRSCLSVRQGLQDDQGNEPTGKLRCVRNLAFIMAY

SEQ ID NO: 183910 - protein, 343 aa, unidentified
MGVYAALDVSQELTAICLIDDGGALLAEGKVATCPDAIATWLGRWTGALEKVGMETGPLAVWLWNTLTAKGLPVVCLDARHASAALKMMPNKTDRHDARGLAQIVRTGWFKTVRIKSHEAYVVRALLTARDALVAIRVRLENEVRGLLKTFGVLFGKRVGGFMRRAEEIIAGELAVAPELRPIFEALVAARCAILQRIRALDAQVRASARRSRTVQLFMSAPGVGPITALAVAAAFDDAGRFRSSASAGAYLGLTPRRYESGEVSRNGRISKRGDRMARTHLYEAANAIMTRKLGASRLRDWALAIAERTGPRKAKVALARKLAVILHAMWRTDTPFRDAATA

SEQ ID NO: 183911 - protein, 356 aa, unidentified
MSYEVKYIGMDVHKEATVIAVLNESGKLVMESVIETKASSILQFIHGLRGELHVTWEEGTWAAWLYDLLQPQVQHIVVCNPRRNALLKEGSKSDKVDARKLAELLRTGMLRAVYHGENGLRTLRELGRSYQTISKDLTRVMNRLKALYRGWGIPCAGTQVYAARAREEWLSKIAQAGVRRRAELLYQQLDGLQALRREVRPELLAESRKHKAAKLLRQIPCIGPIRAARLIALMQTPHRFRSKRQLWTYSGLGIATHDSAQFRFVSGQLQRSKKPQQIRGLNRNHNHEMKEIFKSAATRASCGMGPFHDFYAGLLTNGMKPEMARLTLARKIAAITLTLWKKEERFDAKQLKTQAA

SEQ ID NO: 183912 - protein, 352 aa, unidentified
MKKLFIGIDFSKKKFDATVILAAGLHELEERKWETFTNDPKGFRHFIKWVKQNAWKTTQEEWLFCGEDTGACSISLSRWLYGRGYDMWVANAYAIKHSSGIQRVKSDKADSAVIAEYAWRHQDKAQLYEPIDENLQELREIFLYRHKLVEQRVRLQVRSKEKDTVKGKSKALSFVERKTKHLIEELSKAIKQCDDKMKEIIAADEALHENYDIITSMRGVALQNAACLMIYTNNFKKFDYDSRKIACYYGVAPFGKQSGTSINTAPRTSHFANKLIKSLLGQAAHVAKEFEPEIRAYYERMIQKGKKRQVAINNVKNKILHILVAMVRKKEKYNPSSNKKENVKDFSLCVNF

SEQ ID NO: 183913 - protein, 323 aa, unidentified
MDNATRWIGIDLHRRRSQIAVIDEHGELSLSRRIVNDREMFLELLGDPGSAHVALEATYGWEWLAELLEEAGYDLHLAHPLRTRAIAAARVKTDAIDAKTLAHLLRAGLLPEAYVAPRELRDLRELLRHRATLTRMRSAVKNRVHAILAKHGIPREHSDLFGKGGREFLAELKLRDAPRRRLDSLIALICDFDREIETTTQEIEERAKADDRVDVLTQIRGVGRYTAMLIIAEVGDITRFPTARHLCSWAGLAPSVRSSDGKARLGHITRQGSPALRWALVEAAQKIITGSGPLREAGYPLRSPTSSRAREAALAATAVRMWR

SEQ ID NO: 183914 - protein, 407 aa, unidentified
MSNEPHNVVGIDVSKGKSTIAVMRPFGEIVISPFEVKHTSSDLKTLADTLKDLDGETRVVMEYTGKYYQPVARYLNKSGLYVSVVHAKIIHDFANNSIRRIKTDKADAVKIANYGLSNWEVLPHYSKEDDIRLILKTLNRQYNHLTNQYVVARNVLISIADQACPGLNEVFTNPRKADGRIKWAEVFQRFWHCEYITSFSRNKFISTYNEWCTKNGFRGSDEKATEIYLLAKDCVPTLPKTEYTKKLVQQATAEVITLSAAMASVHREMLSIAQTLPEYPAVLSINGIGETLGPQLMAELGDVRRFSKRSNITAFAGVDAPPFQSGKFDSKSRRISKRGSCELRKQLFQVVRIIVQLNLYDDPVYQFVMRKKAEGKPYYVYMVAGCNKLLRIYYARVKEYLATENIV

SEQ ID NO: 183915 - protein, 348 aa, unidentified
MVAPSALPRARTVAWASQARIVQGRAREKEERMTSEHPYIGIDVAQATLDVAVSSASEVWHLAHDEAGIEQIVARLRALRPALVVLEATGGLDGPLAAALASAGLPVAVVNPRQVRDFARATGKLAKTDRLDAQMLALFAERVRPAPRRLPDATARELEALMARRRQLVEMRTMEANRLRTALPRVRPPIQEHLAWLEQQIANVDRDTGALVRTSPIWRVRDDLLRSVPGVGPILSSTMLAALPELGILDRRQIAALVGVAPFNRDSGTLRGKRTVWGGRAPVRAALYMATLVATRFNPVIRAFYQRLLALGKPKKLALTACMRKLLTILNAMVKHRTPWNSDYVLIH

SEQ ID NO: 183916 - protein, 355 aa, unidentified
MRNSSTAKRGVGITKKDCVYVGLDVHKRSVYATVRINGEEHGSKSLPADAEIVKNFLEKYRLGLRKVVYEAGPTGYGLARRLRENGIPAEVVAPGKIPRSAVEGSKSDRLDCRMLAEYAEKGLLKSVVIPTIEEEAFRQVLRLRSSLVEKRRRVKQQTKSFLLQYGLEEPEGLNHWSRKAVKALGEMELHSALRFTLDHLLEELFHLEEQLKKVGGQIKEQYSSKAYEKKAKILKSHPGVGEVTAAQMLAEVYQPERFENARQVAAYVGLAPRVRQSGESRKEGPLMKAGKGQLRASLVESAWSWIRVDRQAAKLYGRLVRNTGSPNKAIVAMARKILVHLWTMLVRQEAYRPMA

SEQ ID NO: 183917 - protein, 346 aa, unidentified
MNSMNYIGLDIHKKSISCCVRQADRTIIQESTIAATRHALDEWMRQLPQPWMAGMEATLFTGWIYDHLVSGGAMVKVAHPAMLQAIAAGKKKNDRVDARKIADLLRCDYFPECHMAPREIRDRRRVLRYRNLLVRQAVQMKNKVSGLLMEAGVPYNQQKVHQKKYFAELLQTQKKEMPPSMPELLRLSRSTVEALTGMQRQLIRALERDALLAARVERLASIPGVGRVVALTWALEMGDISRFASVKKAVSYCGLCGAEKSSGGKTERTPISKQRNKHLQTILVEAAKLAPRWSTELALVYEREKQRGNRNRATLAVARKLVAYLMAVDREQRPFDTQLRVAGNAA

SEQ ID NO: 183918 - protein, 341 aa, unidentified
MRKFIRIGIDLGKNYFQVHALESEDRKATTRKLSRLAMRKFFSEIDPCLVGMEACASSHYWARELLAMGHDVRLIPPIYVKPYVKRGKNDVADAAAVCEAMSRPGMRFVPVKSEENQATLMLHRARQLLIKQQTMSVNALRGHLAEFGIVASKGIGRVDELVEKAENDATLPSAATAALKLFVQHLAAIGASIADLDRRISSAHAQNGTSQLLAGIPGIGKMTASAIVASVPDPNVFKSGRDFSAWLGSTPRQNSSGGKEKLGSITKQGNAYIRRLLVLGATSLLNQVGKRKGALHDWVVALLARRPARLVTVALANKLARITWAIMTTGESFRIEAFAKA

SEQ ID NO: 183919 - protein, 352 aa, unidentified
MNTTTFAIDIAKSVFQLHWVEPQSGQICRRQLTRAKVLNFFAQRQPARVAMEACGSAHHWGRQLAALGHQVLLIPPQKVRAFVTGNKDDASDARGIWLASTHGDIRCVSVKSVEQQAQLSVHRVRAHWVKQRTASVNVLRGLLYEFGVVIPKGRAHLMPWIGEHSAALEQQLPPAMWQLVLMQMQALRVLDQQIEAAQLQLEQAMKASDAAIRLLKMPGIGPLGATALAATLGDGSAWKGAREFACSLGLTPSHTGTGGKIRMGGISKRGDAYLRTLLVNGARNLARVPNPRPWIAQMLERRPFNVVVVAVAHKLARMAWAMIAHQSHYEERWRSVDDTSTSEAAAVGAAAV

SEQ ID NO: 183920 - protein, 420 aa, unidentified
MPNIEIGVDSMVKENFIYVGIDLHKETHTAVMIDCYNQKLGEITFPNRPAAFPKLVTKVKKCNTDGKEVVYGLENAYGYGRALAVWLIDKGYLVKDVNTAISHRQAKHRGAMYRKSDSDDAKAIALATLNMLDKLPDACPNDAYWSLGQLVHRRDNIMKQRTRLVNQLHEQLCIAYPSYKQFFNDISRPTALYFWEHYPSRKYLKGKSVEDLRAELVPVSHNKCSTKTCEKILDAVASDKVKNNAYQDARDMVTLSIVSDLQHYDSQLTEVDKMLEQMYKMLGCTLTTIPGVNVITAVKILAEIGDIKRFSNANKLAQFAGIAPLHLSSSGKGKDVATKQGNRRLQATIYFLAIQMVQLSSKGTPRNPVVRAYYEKRKAEGKTSQQALICISRRLISIIYGMLKHGTEYRMPVVESAGEK

SEQ ID NO: 183921 - protein, 407 aa, unidentified
MDLLKTVFGIDVSSRKSNVCIMVNGQKVNDYAISNDMVGFNQLLGDLKQVTNPQIIFEATGVYSRRLQAFLNIHELRYVMMNPLEAKRKTKDDLHQNKTDKLDALYLAKLQSEHPQRLAYVQSEEYQELMANNRIYEQASHDLITNRNRLHKAIQLTFPEIEHLMVNPRGKNYWSIVLRFPHPDIVLETKEADIIDFLKGLTGIGKKRANDIAQSLIRLAKVACPAVKKNSAHIRGLKMAINNILSAEEECQTALQEMAKLAPKRDLEILTSIPGIGENTALRIISELGDIRRFNNPSQLNAFVGVDPQVYESGNLTAHLSISNLGTAIGRKVLYLAINQIQSAKKVGNPCHIADYYEKRKRSSETASHKKAAIASIHKLLRTIFALIKNDQLYSYDVAKHNQRLLS

SEQ ID NO: 183922 - protein, 407 aa, unidentified
MIFIGVDWAEAHHDVHVQDEAGKRLGGGRLPEGVDGIARFHELAAAHAQDPGEVAIGIETDRGLFVAALVAAGYQVFAVNPMSASRYRDRHSTSGAKSDPGDAKVLADMVRTDRHNHRQVAGDSDIAGAVKVLARAHQSMIWARRRQASQLRSGLREFYPAALAAFDDLTSSDALQVLRLAPTPAAGAALSRTQIAAALRRGGRQRRIDERAAAIQAALRTPQLRGPAVIAAAMGASVSASAAVIAEMTAQVTALAAALEADFEQHPDAEVVRSLPGLGTILGARVLGEFGDEPDRYATAKSRKNYAGTSPITRASGTKRVVLARYARNQRLADAIYLWAFASLACSPGARACYDARRAAGDTHHAALRALGNRLVGILHGCLAHHTTYSAATAWGHRTTPELTRAD

SEQ ID NO: 183923 - protein, 373 aa, unidentified
MSEFNKFVGLDVHKSTIAISIASDDGAEVRYFGEIKNTKEALINFANKISQGSLKLSFCYEAGGCGYEVYRHLRNIGHDCMVVAPSLIPKKAGQRVKTDRRDSLNLARLHRARELTGVWVPDAMNEALRDLTRAREDMKHLQRQAKQRLLAFLLRHGWTYSGKSNWTKDHFNWLETVKFQHAAQQIVFQEYVDTVKYCGKRVESVTQQIEICSRESACWPVIESLMALKGIDLISAATIMAEIGDLTRFDSAPQLMSYLGLVPSEHSSGSSVRRGGITKTGNSHVRRVLVEAAWTYRFPARKTAHTQKRAKVTTEAVQEISWNAQKRLCQRYKELNANGKIKVQTCTAVARELAGFVWAIGQTVPLKPTANVQ

SEQ ID NO: 183924 - protein, 333 aa, unidentified
MSKFKHFLGIDVSKEYFDAVLILDGNKENTIHNQFVNDSKGIKSLYQWLKKQGATAQNALICLEHTGMYGKLIIRHLLSFDFSIWVEMSLKIIRSMGLQRGKNDKIDAQRIAFYAMKNKEEAVIYKAPSKTLDKIRNLMSLRDKLTITKASLLRNVKELKSFDAEVAKLSEKLQKQTIKGITLDLKKIEKQLDDFIKEDENLNKIYTQATSVPGIGKVTALFLICFTNEFTMYATPRQLACYAGIVPFEYTSGKSVRAKPKVHHMANKKLKKQLHMCALSAVAHDPEMKEYFARKVEEGKSKILVINNVRNKLIHRVCACIRNNKLFEVRKTA

SEQ ID NO: 183925 - protein, 299 aa, unidentified
MTTGLAAGTYELFVGIDIAATTAEVSTQRPGAKAGRSFKIDQTPEGFHRLVHTLQATDNEPSHVLVVMEATGSYWMSLATRLVHEGFRVSVINPSQAHHFAKALLKRAKTDAIDAQTLAQLAMVLQPEPWMPPPQIYYELQQRLAQRDDLLNLRQQVRNQLHALDQHPEVIASVRTRMERLLVLFQSQIDEVEGEIAAALNQDSAWAAAAERLQSIKGVGWVTAAWTLVTTLNFTTCDTVDALTAYAGLAPMPRQSGSSVWHRPSIGHSGNGRLRTAFYMATLTAARFNLSLTVDGTWE

SEQ ID NO: 183926 - protein, 451 aa, unidentified
MEILYTNCAGLDVHKKTVKVCLLTRTSDGQLHKEFRTYFTTTEELLQLGDWLKERGCTHVAFEATGVYWKPVFNLLEGSFEMLVVNAQHIKAVPGRKTDVKDAEWIADLLAHGLLKASFIPSSPQRELRDLTRYRVRLTEEKAREVNRVQKTLEDTNLKWGDVVSDMMGKASRMILHAIADGETDPGQLAALAVGRVRAPQEQLEAALRGHVTDHHRFLLQEHLTQIHHLEQAIERVTAEITRRFTPPSPPEETTISQKEEEATQEISSDSAPPQEASSSSQAALSWAAAVVLLCSIPGIGERAAMGILAEIGITMQQFPTAAHLASWAGVCPGNHESAGKRLSGKTRKGNPWLRCLLVQAAHSASHQKQCYLAEQYRRLAKRRGAKRAAIAVAHSILVMIYHLLRNQTTYQEKGETFLEEQERQGAEKRLVRQLARLGYHVELQPIALAG

SEQ ID NO: 183927 - protein, 419 aa, unidentified
MSFKILKFKCCGLDVHKTWIYACIGITDSNNRTEYKQARFSSFTKGLNELCDWLAKYNCTDVCMESTGKYWIPVFNILEQHNLWVTLSHPKYTKPMKGNKTDRKDAKWICDLYMCGMVKPSFIPPADIRELRDLVRYRYKLTCMITGEKNRAQNCLTVSNLKLDDVFSDVFGKSSRSITEQILQHPGEKFDVAPFVHGLCKTPIEEIQAAVDGAISKEQAIKLRQCLDHIDELNKHISEVEQEILCLSDKYEAALNLIRTVPGFNKNPMTAIQVLSEIGCDMSVFPTDKHLVSWAGCCPRNDKSDRKIKSTRISCAGSYFKPVLVQVANALIKSKKHPEFITRYKRIKARRGHKKAIIAICRMILTAIWHILSDLKPYTPEGFLESRPVKEEKILTTSQALNLLKLRGYVIKDDPLPTS

SEQ ID NO: 183928 - protein, 424 aa, unidentified
MKPHPDVEFAAFAGIDWADAKHDICLQAANSEDREFVVLAHRSAAIEAWAGALRQRFGGQPVAVCLELAKGPLVYALQKYDFLVLFPIHPATLAKYREAFAPSHAKADPTDAQLALELLLRYRAKLKALTPQSVPMRMLLRLVEQRRRLVGDQTRISNRLTDALKQYFPDVLAWFPDKDTLLFCDFLSRWSTLKQLKNARRATLLSFFHEHHVRSQARIEERLRAIKAATTLTDDLAVISPNQLLVLTLVEQLRVTLQAIERFDAEIATVSESLPDYSLFRALPGAGASLAPRLLAAFGEQRERYQSAAEIQRYTGIAPVTESSGKKRWVHWRLQCPTFVRQTFVEWAGATIPRSFWAAAYYRQQRDKGCSHQAAVRALAFKWIRILYRCWQSRTPYDEATYLNALSRRGSPLLASIAEVAKNT

SEQ ID NO: 183929 - protein, 316 aa, unidentified
MTTNPVVVGVDVAKDRLDVAVRPSGETWSATNDEAGITALVARLRPLGPALLVCEATGGFERAAIAALAAAGLPVVVANPRQVRDFARATGQLAKTDQLDAAILALFAERVRPTPRPLADAAAQLLDAVLTRRRQLLEMLVAEKNRLGFAPKPVHRGIQAHIRWLERQLDDVTKELAALIEASPAWRAKDDLLQSVPGVGPIVSYTLLGELPELGTLSHKQIAALVGVAPLARDSGTLRGKRLVWGGRASVRTALFMAALCGRRWNPTLKVFYERLKAAGKPTKVALIACARKLLTILNAMMRDQSRWTSNVQYSC

SEQ ID NO: 183930 - protein, 328 aa, unidentified
MRYVCILDQEGNTLVHREISADPNKLNNILKPYIGNIVVGVECMHCWYWVSDFCEDLGVDFILGHALYMKAIHGGKAKNDRIDSYKIAKLIRGGNFPVAYVYPKVMRATRDLLRRRTKIVRHGAGLKAHIVNTTSQYNLPAYKPNLKDKEACIDFKSTFPDISAQRNIDLDMVILECYREQLAKVEWFIEQQARQHNPMHLPILRSINGVGRILSLTIIYEIGNIKRFESVQQFASYSRLVKCRAESAGKSYGTQGNKIGNAHLKWAFSEVAVLYLRGNDKAKNHLLKLQKRMSKAKALSALAHKMGRCIYFMLKNETVFDEERFFKR

SEQ ID NO: 183931 - protein, 410 aa, unidentified
MTYFVGLDWAAREHAVCVLDERGTVTMRFTAAHTDAGMTELVTRLAKFGTPAELRIAIERPTGLVVDTLVEGGFAVVPIHPNVVKAARPRYSAAQGKTDLGDAYLLSDLLRTDGHRFRTLTPLSDETKALRGLVRTRDDLVERRVAIGNQLRCLVDEFWPGAGAIFADVDSPIALDFLDRYPTPQSAAGLGEKRLAAFLARHAYCGRRSVVDLLERLRTAPRSLAGELEADAKGDCVRALVAVLRPLIAQIATLTAAIEHAVDAHPDGKLVTPLFRSGRVCAAQILAEIGDDRGRFVSADHLAAEGGVAPVTRESGKHRAVTFRWACNMRLRSALTTLADTTRHTMPWARALYQRARDRGKEHAHAIRILARAWCRVLWHCWQQRVAYDPAKHRAARQFNLHLVDGKEAA

SEQ ID NO: 183932 - protein, 462 aa, unidentified
MTIDKKLWRNRKERKELARRLRSEDPGLAIVHPHAAGIDVGNGAHYVAVPPDCDLQPVRRFECFTADLHRLADWLKNCGVKTVALQSTGVYWIPLYDILEERGLEVYLVNARHTKNLPGRKSDVQESQWLLKLHTYGLLNNSFQPTSEIRVLRTYWRQRAEHVRGVTMCIQRMQKAFTQMNVQLANVISDLSGVTGQMIVRAIVAGERDPWKLAELSHPRIRASKEEIAKSLEGNWRQELLFVLQQELQMFDTYQQRIAECDHELQKHLARLANSVPPPAKNEAKKSKPNKHHPQFHLADELQRISGVDLTRIDGIDVMVAQTLLSEIGLNMDRWKTEAHFASWLGLCPDNRVSGDKVLGRGTRHVVNRAATALRMAATTLLKSQTYLGAQYRRLRSKLGAPKAITAMAHRLARLVYRMLKYGQQYVDKGAAYYEQRNRQQQIEFLRKKAAQLGLQVTTTHS

SEQ ID NO: 183933 - protein, 415 aa, unidentified
MKVVFPTCCGVDVHKTFVVATIITTPADSLQPHYQKKRFSTFNSDLNRFADWLLEHNCLDVCMESTGKYWVPVFNILEKRGIQVVIANPKWVKAVKGNKDDTKDSKWIGDLFRIGLVKSSFIPDRNIRILREFTRYRYKLVSMKSSEKNRFQNAFTVCNVALDCVVSDMFGKSATAITDYLTSDGSFDPEHCVSLLQCSLKKKAEQVLESIEGFSIADEQKARIKIVREHYDFIEKLIAKIDTCVNEMVAKYEGEINLLCTIPGIDRKSAITVISEIGTDMNQFGSSKRLCCWAGLTPGNNESAGKKKSVRISRAGVYLKPVLVQVAHAAVKNNSNPYYKLKYERIAKRRGKKRAIIAIARMILTAIYSMFCTGEVWNPVDLFKIDMPEHLKEQQLAKAIKQATRFLEKHGLSVA

SEQ ID NO: 183934 - protein, 401 aa, unidentified
MEGPIISIDVSNGCSHFRCFIDRNKAFGKVHKIKHDVDGFQYLLDCMERLNEKTNEEVCVVYEATGVYTKPLTRFLNKHKVRHYMVNPLQAAKMRKTDLHSKKTDKNDPNSIAKVYYDKDLYEYADEEPIYHTLRVMNRNYEDQLDHLRKYKVTFQNILCIVFPGYGSLFKNPYCDIALAILKKYPHPDMIRNKKPETVANYIEKHTCHHKDSCLKWAVKVIEYANKTYPGCDKDEIEVIELLRIIKELEVCIASCNTQLNEMDQLAEQLPNYFLVLSIDGIGPNLACRILAEIGDIKRFSSTKQLISYAGIDPHISQSGDVDGLHLSISKKGNKRLRCLLYLAVTCNLRLKKENDPIQQFYKKKKQQSAPLKPKAARVACTNKLLRIIYGMCNNGCSYQK

SEQ ID NO: 183935 - protein, 403 aa, unidentified
MTSPRRQSRFCGIDVGKNKHVACVIDHEGNRVVHSQSFTNDAEGYQCILDRLKEVGGPARVAIAMEATGHYWYSLHDFLVDHRYDVAVLNPLQTARQVTKGIRKSQTDRIDAHHIAVLLKNGEHRPAVIPGELGLTCRRLTRLHHNMVRQESRIKQWLWAQIHPAWPEYEPVFANPFCKTGRKLLETAPVPQDVLALPPKDLLDLVCETSRSMFGPAQVEKIRLAANDSVGTSRGIAATRLGIRLLLAQLAALEPVREQLEGELETLAKRLPDYLMSLPGASPISIVSLFGETDPIEAFPSPTQLIAFAGLDLVVSESGEYKAPRRHISKRGSPHLRHTLWNMAHRACYQEGDLREYFLRRKAKGLKHKQAVIAATIKLCPVVWRIMTDCRPYLPQRPVNTKP

SEQ ID NO: 183936 - protein, 341 aa, unidentified
METNIIIGVDLAKSVFQVHGADRTGAVLFRKKLSRPQFLKFMTAQPICLVAMEACSTSYYWARTLSDAGHDVRLIPPIYVKPFVKRHKNDAADAEAIVEAALRPNMSFVEPKSAEKQALSMLMRTRDQLIDHRTATVNALRGHMAEFGLIVPVGIKNIVRLKELVEADSTLPVLATEMAAIHFEQIVELTRQIDILTEKIKAYGASSPKLKRLRTMPGIGPIGAMIIETFAPDMATFKTGRDFAAWLGLIPLQNSTGGKSRLGKITKMGQKDIRRALVIGAMSRIAGYARQKTRAEPWLQDKLDRKPKMVAAIALANKMARQIWAIITKSETYKLQEVAAT

SEQ ID NO: 183937 - protein, 318 aa, unidentified
MPESIVIGIDIAKQTFDAALGVSGSIKTFANDDAGFDTLLANLAEQAVDLIVMEATGGLESNLACALQAAGFAVAVINPRQARDFAKAMGYLAKTDRIDAKALAELAQVLACSPERDRFVTVLPTPEQQALQALVARRRQLVAMQVAERQRLSVSHAAARKSIEGMIMAIRTQLDEVETELAKHIETHHADLALRLSSVRGIGPTTVATLIAEVPELGQLSRREISALIGLAPFNRDSGQMRGKRVIFGGRGQVRRGLYMAALAAIRFNAVIKQFYDRLVAAGKPKKVAIVACMRKLLTILNAMVRTGKAWDDSLHTA

SEQ ID NO: 183938 - protein, 335 aa, unidentified
MQIYGIDLAKEKFDVSFFDLTSKKVSNQPSHKVVTNNLKGIGKFFKGLPSDAVLVAEHTGVYGDTLLKCCMDCNVKIAFVGGYVIHRYRATPDRAKTDVLDSALLRDFGERYPDKLKYKTFPEEALYELRQLARHREMLVEQRKQLITADKSEDCRPIRSLAVKRSMDRIKEMLDTEIAEAEKEMLKVIDGHESIHHNYELVKSVDGVGLITAVELLVKTENFTKITTARQYAAYAGTAPYEKSSGKMDKGAHISKIGNRRSKTLLYICAESARLHNKEIKLYYERRTLIDKKPRHYVLNAIANKLLRIIFTLVEKGEYYDANFIRQDPRVVKYN

SEQ ID NO: 183939 - protein, 466 aa, unidentified
MEGNMPHFAGEFLAIGIDPSKQAHQFVAVRYPDQVIWSKRVSNHPDAIHQADLHLQALAKELGVPAVYATEDAEHYGQALAQLLVAAGREVRTVNPLQVRRQKDFYGEDKSDAVDARAVAAVLIRQRSRLPEVEPGESMRHALRALSRYHGNLTQQHRRACQQLHDCLTAGYLSAYRDFFSQLDGPLAVGFFKRFPLPHDLVEQTPETLASFLLKTSGGRMGPGNPKDLACRKAEKILKVSIPLARQPVTAALQVAAFMAQQLCSDLMRLRSQLSAAEKELDVLLDQIGDPLRSLAGVGTIIAATVHGEVLSILRFDKKSAFAKYNGTAPAERQSGNRRRHVARRRCNRRLKRALWLAALSAVRCNPKARAYFDRRVAEGMKPKEAIKRVARHVSDVIYGILNQWEGQIANTEIKTTTVTLNNQMGEGARPGLPGRPVPRGEGGASPRPHPNLSYTTPCGVEETAS

SEQ ID NO: 183940 - protein, 316 aa, unidentified
MSKKKTFIGIDVSKAVLEVAVHQRHTHFAVANKESAFPELVAELIALRPKLIVLEATGGLEIPVVSALFAAGLPVVVVNPRQIRDFAKATGQLAKTDRLDATILAYFAAAIQPELRHVKNAAELELDALVTRRRQLVEMLAAEKTRLSSTATATMRTEVGEHIEWLKQRLDDIDEQVRKRITDSSVWRVKDDLLRSVPGIGPVTALALVADVPELGQLNRHQVAKLVGVAPLNRDSGNLRGQRHIFGGRQAVRNTLYMAIQSAVRHNPVIKEFYQRLLASHKPKKVALVACMRKLLTIVNVMIKTNTTWRLAQKSA

SEQ ID NO: 183941 - protein, 320 aa, unidentified
MDIVHPRVAGIDVHKKVIWVAVRLPGEAPGERTVVTRSFTTFWRQLQKMAAWLAELGVTDAAMESTGVFWWPVYHALAQAGIEVCVCNAAHMRNVPGRKRDISDCRWIAELHEHGLLRPSFIPAAEVAALRQRTRYRKKLIEQRTSEGQRLSKVLEDAGIKIDSVASKLLIKSGRKMIRALIAGERNPGVLADLAEGVLRRKTDELQMACDGRFTQSHGQMCALHLDACDHLTAKIAELDQLVAEAAAPFQRLIARLVTIPGIGQRTAEVIVAETGGDMTRFTTSSRLAAWPALPLVTTSRPASARRPPPAKATSTSRRP

SEQ ID NO: 183942 - protein, 345 aa, unidentified
METMYYIGLDVHKKTISYCVKDGSGRIYGEGSIPATRLTLDLWMKTLPQPWTVAMEATIFTAWIYDHLRPHAAAVKVAHPLMLRAIAVAKKKNDRIDAKKIADCLRCDFLPECYMASTEIRERRRTLRYRNLLVRQAVQMKNKIAVLLMEAGVSYNKQKLHKVGYFRELLATNPDIDEGLKPLLRLCRETVVRLGKTESALVRSLERDSLLVERVERLMTIPAVGPITALTWALEVGDVQRFSSIKKAISYCGLCGAESSSANITLRTPLSKQRNKHLQTVLIEAAKMAPRNSPELAMVYEQAKQKGNANRATLAVARKMVAYLVAVDRRQKGFLVVENKNRTAA

SEQ ID NO: 183943 - protein, 335 aa, unidentified
MEISSVCVVDAEGRIVREARVPSEPKALIAWFAAHGAPLARIGLEAGPPSHWLHAAMTEAGSAMELLETRHVRAAFKTMPVKTDKKGARGIAQLMRMGWVRSVHCKSPAAQEVRAMLTACKLLQGKLHDVEMSLRGILRGFGLKVGPTTLRTYAARVRALVEGHSTLEAIAAALLKARDVLADELRGFERRVRKMARDNEQARRLMTTPGVGAIVSLTYVSAIDEANRFRSSRMVGAHFGLTPKKYQLARRTIPAGSPRSATPVSGPRSMSAAHVILTPPVKGSDLKTWALGVAKHAGLRKAAVTLARKLAVVLHRMLRDQTDFAAHQAKPMMAA

SEQ ID NO: 183944 - protein, 443 aa, unidentified
MQFSKFQTKRHFISGKLVIGIDPSKEKYDAAVIDPLGLLQGKTFSFKNTHDGLDKQLWNCLNSRVPDLSKENTVFAIEAACNLWQKLSEYLISKGFHVVIINPFSTKKARSLINHSFSKTDAKDALVIANLAHEGYFDFYHIHSDSTKALHDLAVTYDKLKKSMNQARLRLRALVELTFPEFPKIVRMNTNTALYLLERFITPQEFLYADVFATVQGMEAVSRKQKGFATLKEIRLAAKTSIGLSLDVEQIQAAQVARDSWVAMTQLLLRQIDLVLSQIIAMAKQRSYFSILTSIKGISDISASLFIAEVRELEHFHHYKQLEAFAGLSIRVCDSGKYKGYRHINHIGNGRLRSILYGMTVETKNHIPEVRIRFLKRQMKNGRFRRDIVACSSNLLKLIMAMVKENRPYEFRDEKVKELEKLEKQFEALKNKKNNKRSYKKAS

SEQ ID NO: 183945 - protein, 414 aa, unidentified
MRCFGLDVHRDFCEVALADEDGVRSAGRIATRVPQLELFAQSLARGDAVALEATTGADRIVAVLERAGIRVVVANTRKLKSITEAKAKTDRLDARLLARMLRSGLLDEVWTPDERTRALRRLTNRRERLVRARTRAKNEAHGVLARTLCERPPVTDAFGAGGRRWLAGLELPTDERLTLDGCLRQVDFLDAEVAALDGEIATRALAWPEVLRLMSVPGVNVQTAATFMASIGDIHRFSSPRKLVSYLGLDPRVRQSGSAAARHGHISKAGASEARHMLGEVAWKVMLTPGPLRAFFERVRVRRGPQIAATATARKLVVLFWHLLTSEQDYAFARPAMTRGKIRKLELLAGAPPQKGRKGIAGGKSKTVFDAERGLSRQAEAAYRRLVSDWQASGPHRAGAGTTPGRASSGPSKA

SEQ ID NO: 183946 - protein, 309 aa, unidentified
MHYVNNTELSSHEETRSQFNGGRGAIKLGIDVHQDFYVVVEQVGGSNPKPPQRFQKEAFLHWAGRLKRKSGAEVHAVYEACGFGFSLQRKLSALSIQCHVICPQRLDEHNRRVKTDGLDAKALCLRLDRFVQGNRAALAIVRVPTEEEEQLRAIHRQREQLVKARKQLEAQGRSLLVNHGLEPVQNWWKPRTFAALPAPQWMKELLANSQPILVALQQKIAALSVQLQSAASPEQPRGLGKMTSVIIDREIGDWKRFNNRRQIASYTGLCPGEYSSGNTRLQSCVTKHGNPRLRAALVELAWRLVRFPA

SEQ ID NO: 183947 - protein, 348 aa, unidentified
MNSTQVCEKRKIAVTIGIDLAKDHCDVVAYNADNKICFTKANMEWLANREPAVVLMEACKGSMVHARNIADLGHDVRLVKGADVKALRNVAQKNDIRDADYIARLYYVPGTKYVFVKNQRQQSLQFQQNEYKSLQEMRIQLGNQIHAGLEEFGCPARKSSTFIQTRMMAHLEKNAELIPEAVMASFQRRREMWLTLFEQEEEAKKRMEQIADTDNDAKRIMTVPGVGAQTAVRLLVHIGGDIGRFKNSGQFAASIGLVPKQNSTGGNTTLNGITKCGPKRLRSNLVQCGQVILMHGDKLKGNLGDWVRKLRDSGKKRGVIACAIASKIARIVYRLMKDKVDYTPVPSR

SEQ ID NO: 183948 - protein, 411 aa, unidentified
MEKVYNKCCGIDVHKKLIVACFKKGNQQEIREFGATTRELLEMADWLKDGGCEMAAMESTASYWKPLYNILESSDLKAMVVNARHMKAVPGRKTDVKDAEWIADLLMHGLLQASYIPDKDQRELRELVRYRKSLVGERNRELNRLQMMLEGANIKISGTITDINGKSARNILEHILSGKQIDSAEYDILYEKKVIAHNLKASKEQIIDDLNGIMSDIQRKMLRLLLKHLDELNAIIKELDEDIDNFMNPHEKQAAKMIQDIPGIGNTSAQAIISVLGTDMERFPSDGHLASWAGLCPGNNESAKKRKSGKTRKGNALLRETLVVSAHSAVKNKKSYFYAQFMRISAHRGKKRAYVAVAHSMLIAIYHILKNGVTFKDLGADYYNQFNKERKIHAYLKKLKALGWEAPVVAA

SEQ ID NO: 183949 - protein, 355 aa, unidentified
MSKQYIGMDVHKAITVIAILDSTGKMRGEAKVETKAATLVQFLRGLEGRLYVALEESTYSAWLYDVLSPHAAKVIVCDPRKNAAYFKSGNKSDQVDARKLADLLRTNMLSPVYHGNSSVKSLKELARSYLCLVEDATRVMSRIKAIYRSRGIPCSGTRVYAGKHRGEWLEQLSGPGVRQRTELLYQQLDLLLPLRRQAKQSLLTESRRHGVQKLLRTVPGIGPLRAALLIALIQTPHRFRTNRQLWAYAGMAVVTHDSAEYCLRDGRIERSPKRALVRGLNRNYNRALKQVFKGAAATAAARCAVLQQFYSQRLAQGMKPELALLTLARKIATIVLQLWKKGERFDPRHLNAAAA

SEQ ID NO: 183950 - protein, 421 aa, unidentified
MPNIEIGVDSMVKENFIYVGIDLHKETHTAVMIDCYNQKLGEITFPNRPADFPKLVTKVKKCNTDAKEVVYGLENAYGYGRPLAVWLIDKGYFVKDVNTAISHRQAKHRGAMYRKSDSDDAKAIALATLNMLDKLPDACPNDAYWSLGQLVHRRDNIMKQRTRLVNQLHEQLCIAYPSYKQFFNDISRPTALYFWEHYPSRKYLKGKSVEDLRAELVPVSHNKCSTKTCEKILDVVASDKVKNNAYQDARDMVTLSIVSDLQHYDIQLAEVDKMLEQMYKMLGCTLTTIPGVNVITAVKILAEIGDIKRFSNANKLAQFAGIAPLHLSSSGKGKDVATKQGNRRLQATIYFLAIQMVQVSSKGTPRNSVVRAYYEKRKTEGKTSQQALICISRRLISVIYGMLKNGTEYRMPVVENAGEKL

SEQ ID NO: 183951 - protein, 351 aa, unidentified
MMIVGVDYHPSDQHIAFADAETGECGERRLSHSDEEAERFYRDLQLRAVSVRVGMETTGYSRWFERLLAELGIEVWIGDAAKIKTKRVRKQKTDRQDAQLLLKLLLEDNFPRIWVPSPENRDVRQLLWHRHRLVQMRTRLMNQLQALALNEGQRRKKKLWSEQGRAQLEKLPLATWASRRRQDLLELLDRMNPTIEELTAAVEQEARKRHEVLRLMTHPGVGPVTALAFVMIIGTPERFPCGKQIGSYVGLIPSEDSSAGRQRLGHISKQGNALLRFLLVEAAQAAVRCDSDWRRRYLYLAMRRERRIAKVVMARRLAVRLYWMWRNGWEYAQSVEFGSHRGQLVTGLGVN

SEQ ID NO: 183952 - protein, 309 aa, unidentified
MEIVVGIDVSKDRLDVHVLPSGEAFSVGNDHAGVEELARRLAAFSPTAIGLEATGGYEQLAVATLASAGLSVVVVNPAQIRAYANALGKRAKTDPIDAAVIAAFIAATKPELRPLRDAETRTLADLVTRRRQIVQMIVAEENRARTVNARQAQKSIKRLLAALRRELESLDADLDDHIRKSPLWRVREKLLSSVPGIGPTVARTMIAEMPELGSLDRRQIAALAGLAPWTRQSGTWRGKSFIGGGRSRVRAVLFMAALVAIRHNPVLKAFRDRLVEVGKPKIVAVVAVMRKLLTILNAIIRDQKPWQTA

SEQ ID NO: 183953 - protein, 337 aa, unidentified
MGNITMGLDVGDRFSQLCVVDQDGVVIQEDRIPTTRVALCERLAGPPARVVLEAGTHAGWMSRELTALGHEVLVANSRKLRWLYHNEHKTDRVDATYLARVGRWDPTLLAPIRVRSAGADGALRLVRARASLVRARTRLINHVRGAVKSVGGQLPPCDATSFARRVAAHLPAELHAALEPLLAQIAGLTQTIARYDRLVEHLAAQVYPETARLRQVAGVGALTALAFVLTVDDPRRFGDGRAVGAYFGLCPRRADSGAHRPQLGITKCGDGLVRQLLVQAAHYILGPFGPDCRLRRWGLELARRGGKNAKKRAIIAVARKLAALLYSLWVHDTRYAP

SEQ ID NO: 183954 - protein, 370 aa, unidentified
MRSIALDVHKDYSLVAELVGQEVKTSRFPHTPSGVQSFVRKLDADCQVVMEATGNAFWLHDQITPVAGRVVIANPLQLKAISQDRIKTDKVDASVMVRLLDADFISEVHVPSPEVRRQRSLVRSRLRLRKMETQAKNRIHATLMRNHARVTHPFTKSGRAALTRADLPWDDRVDVEMDLRLLAHLEEEMSHLEDILAKQAMEGPRSQEIQLAMTVPGLDVLSASLLVLLIDDVRRFPTKKKLASYFGLVPTLHQSRKTQRYGHITKRGSREARRILNQAAWTIVRLYPGTPLRAFFQRIAQKRGQKVAITALSHKLATLLWEVLTRKEPCRYGRAKTISTKLANARRRADKARLPVRFQVTEATTLSETG

SEQ ID NO: 183955 - protein, 351 aa, unidentified
MPRTSTVHAVTAIGIDMGKNTLHMIGLDTRGAIVLREKVSRGRIALRLANLPPCLIGIEAGMATHYVARELAALGHDVKQVPPTYAKPFRQGQKNDFRDAHAVGEAVQRPTTRFVPAKTDEQLDLQALHRVRSRLVSERTAVINQIRGFLLERGIIVRQGLRFLRQVLPDILAKRTDVLSPRMVRILADLASDWRQLDGRIEPVTDEIKTLAKSDDSCRRVMTVPGIGPIISSAMVAAIGSGAAFAKGRDFSAWLGLVPKQMSTGDRTILGRISKRGNGYLRMLFMQAARVILLRPANWPKHGFGVWLARAAVRLHPNVLAAALANKLARIAWTVLAQQRSYEARLTKAAA

SEQ ID NO: 183956 - protein, 416 aa, unidentified
MKLFVGLDVSSDKLDACFLTDTLTILHQGSYANDIEGATQIKETIVNMFEQFAFDKVVIGMESTSMYSAHPLIFFHEDEDLKNMHCVVTIEDPFKIHNYAKVFNADKTDTNDAFFIADFLRSERYSHSPLKEEQFLSLQRLTRSRMQLVNMLVETKQHFIENLYYKCNTLSRELRDEESLSTTVFSTSIIELITSDMGLDEIAQLPLNKLAETLQTLGRGRFKYPEKLAKTIQKAIRSSYRLSPTFETSIDIVLATLVGQMRSLEASIKQLEKGIERIVKAMPEYQCLTSIPGVGLVYAAGIIAEVGQIERFENQAKLAKYAGLHWKKSESGNYKSENTPLTKRGNRYLRYYLIEAANSVRRHLPEYNEFYRKKYQETPKHQHKRAIVLTARKFVRLVDTLLRNHQLYTSPRSVES

SEQ ID NO: 183957 - protein, 435 aa, unidentified
MLKIRENAAGIDIGAKKVFVSVEGQEVRSFYTFTEDFELLAQYLLENKVQTVAMEATGVYWAILYDILEESGIDVWLVDGRQTKQVPGRKTDVKDCQWIQELHSHGLLNRCFVAKDLVKELRSYYRLREDHLNSAAMHINHMQKALTEMNIRLKEVLSQIHGVSGLKIIEAILQGERNSTVLLKMCDVRIINNKKAEILKALNGRYTKSGLFALQQAWDGYHFYQGQISQCDKEIERIIHLMGNGSSDKDLPAKRKPIRHNKPEVDDLGANLIDIFEGKDATRISGITDYTWMQLLAETGKDLSSWPTEKHFTSWLGLAPGQHRSGKMNRTKRKHGKPIAGQIFRQIAQSLLTSKTIALGSFGRRIRSKKGPAIAIKAMARKLAELYWKTMVKGTEYAEQGVRKYEMQLLAQKKKSVERLAKELNLQLVNMQPII

SEQ ID NO: 183958 - protein, 387 aa, unidentified
MYFVGIDISKYKHDCFICTETGEVIESNFSFPNTSDGFEQLLNLLKSIDNFKEIRIGFEATGHYGMNLKLFLEKNNYSFMEFNPKLVKEFISGQTLRKTKTDKKDAYQITKYLISADYKPHPKQFYHKYSLKSLSRMREKLVKQRSYYEVALTNVLDHIFPEYKPFFNNTFSASSIFILSKYKSPDKIKNMKDYDSIRKISRGKFTSAQFFLLKDLAKNTIGTSNEIFELELETLLILRSQIEFEIKKFESNIEEIIKELNPPILSIKGIGYILGAGIVSEYGDVSRFKSADAMVAFAGIEPSICQSGTESHTGHMVKHGSGHLRYYLLNAADCIFLHEPIFTEFYYKKRNEGKSHRVALNHVAKKLIRIIYKLETENITFDSSKVK

SEQ ID NO: 183959 - protein, 340 aa, unidentified
MKITTIGLDLARNVFQVHGVDEHGKAVLRKTLKRNQVLTFFANLPACLIGMEAGAGAHYWARELIQLGHTVKLIAPQFVKPYVKGNKNDANDAQAIGEAVGRPTMRFVPVKSVEQQDLQALHRVRSNLVKGRTAKVNQARGLLGEYGIVIGQGVAHGRRRLPEILEEAENGLTSQAREMFADLGEQIMKLDEQVRAYQAKIEQICQASAACRKLTQVNGIGPLTATALVAALADGSAFDQARQVPAWLGLTPKQDSSGGKAKLLGISKRGDSYLRTLLIHGGRAVVKAAQGKDDAQSRWINELVRRRNKNIAAVAVANKNARIAGALLTRAEAYREPATA

SEQ ID NO: 183960 - protein, 397 aa, unidentified
MYIVGIDIAKRKHEAAVIDGEGTIIIKPFSFTNNCSGYNRLLAMLAKAKLPLDEVSFAMEATGHYWLALFTRLQKEGFRVQVINPVQTNSIRSFYIRQAKTDPRDALLIAEVIRFGHFSESTLHPENIYELRELCRGRHAIVSMQADVKRKVVALLDQVFPEYETAFTNLFGDTSMAILQTCPTPKELSEMPLEELCHLIEVSSHKRFRMAKAQELQELARNSFGFAMAGDVFSTMIRLYAKHLDFLKQQVREMDRKIAEIMDTLDTPITTITGIGPTLGAYILSEIGDISRFSSAAKLAAYAGIDPTMRQSGEYNGVRNRMSKRGSPYLRHAIWLAASSAVLHDPALKLYFQKKRDEGKPYMASVGHACRKMVSIIYAVMRDNKTYTPHIPNEISA

SEQ ID NO: 183961 - protein, 384 aa, unidentified
MNKHSILFIGLDTHKEFNEVAYIEDHRGAQPVHFGRTPSSKIAVKKLVRHFESKYPDATLHFVYEAGPCGYWIYRLITSLGHCCYVVAPSLIPKKPGERVKTDKRDAMKLAKLLKTEDLTPIYVPEPEDEAVRDLSRAREVAMKDLKDAKYQLKALLLRNNINYAGTANWSLKHLRWLTELVLPHPAQQLVLQEFIQTISERMARLERLDNELTHHVHQWRYYPVVKAIQAMRGVRLLVAAGVIAELGDLSRFDHPRKLMSYLGLVPSEHSSGGKRHIGAITKCGNGRARRLLIEGAHTYRYAANISTDMQKRQEGLPKQIVDIAWKAQLRLCKRYKKLISKGKHYNLVVTAIAREMIAYIWAIAKEVVLTPVDPKLRLARVPA

SEQ ID NO: 183962 - protein, 296 aa, unidentified
MEYYVGLDVHSKQSTFVIQDAEGTVVAQGEIPTTPAGFQRLAGEQRLAPGTPVALETGTVAFFVARELTVLGLVPSVIDAHEVRLKAYRPRQKSDRRDAHELCEGLRRGIYRTLVHVPPLPVARLRETLARRRHFVRVRTAEINAVKRLLRGTGRGLLSRSLGTEVGWAKLLAALAGDGELRAYVEHHRALWRSAGEQVGTLEQSLAEQRAASAVALDRLETIPGVGPIVAATIVAVFSDVTRFPDAKHAASYAGLVPATHHSGDREAYGPITKRGSGELRAMLCEAAHHASRPHL

SEQ ID NO: 183963 - protein, 309 aa, unidentified
MEIIVGIDVSKDRLDVHVVPSGEAFRLGNDHAGVEDLVRRLAALSPSVVGLEATGSFERLAVAALAGAGLAVVVLNPAQVRAYANALGKRAKTDPIDAAVIAAFVAATKPELRPLRDTETRALAELVARRRQIVQMIVAEENRARTLTARQAQNSIKRLLTALRRELASLDADTDDHIRKSPIWRVNEKLLSSVPGVGPVVARSLIAEMPELGSLDRRQIAALAGLAPWTRQSGKWRGKSFIGGGRSRVRAVLFMAALVAIRHNPVLKAFRDRLVAAGKPKIVAVVATMRKLLTILNAIIRDQKPWQTT

SEQ ID NO: 183964 - protein, 439 aa, unidentified
MTFAVWSTLYRIPYRSIPRRRRCWEEYMEVMYPRCAGLDVHKETVVACVRIVAGGEVSRSVRTFATTTANLIELGEWLEVNGCTHVAMEATGVYWKPVWQVLADGAFELILANAAQVKSVPGRKTDVNDATWLSELLAHGLVRASFVPEPAIQELRGLLRTRKQLVREKASHVQRLQKTLEEANIKIESVLSDVMGRSGRAMIQALIDGETDPAKLAALAHWKVRASAATLREALHGRIKRHHRFLLRLHLQQVDALDAAIAEIDREADAGLACFRDAVKQLSTIPGVSELSAQVILSEIGTDMGRFATAAHLRSWAGLCPRNDESAGKRRSTRLRRGAPWLKAMLVQCAWAAARTKATYLHAQFVRLRGRRGPKKAICAVAASILTAVYHMLKDGTFYEDLGAAHFDRRRPEMQARRLVKRLSELGFSVELKPVAAIT

SEQ ID NO: 183965 - protein, 420 aa, unidentified
MDTNHRKLYVGIDVHRESHKVAVMPIALLERPGAVWKKVKPLNIKNDIDDFERLNTAIKSHISSTEEVAIAVDHTGGHYSEPLVYFLQRKGYSVYHLETKAVKAARERFLDQEIKSDTIDSTCAAYILYLRDVHGLSFRVSAVTPQLGSKAMVLNSLVLQREQLKKLVNQATNRLHQLLVAVFPEGEAKYFKKLLKIAPYYPTPQDIIASNGLKGIVNMSLGHKEDLQQLAARSVGVPGYLYRELIRDLSIQRREAEAKRDAITLIIRREVAELPYGEILLSFPCLGEIAAATIFSVVKDIKNWENKKKLKKALGVYGSLSQSGTGGGRSRQGKEGSRHGRRVLFQVCLGCIRTNVSDNDFKDYYLRQLARGKPKLKALFCTMGKLAEIIYHCLSAGEKYQYQGEYKTVTNSGEKPPSTE

SEQ ID NO: 183966 - protein, 391 aa, unidentified
MVCVGIDVAKDKHDCCILDSDGMVRADCFTIPNNMDGFKQLLQTIRNCTKKSDKIKVGLEATGHYSYNILGFLLDNGLPTYVINPLHTNLYRKSLSLRKTKTDRVDARTIATMLLSDVDLKSYTDIAYHNEELKSLTRYRFEKVRERAKLKQSVSRLVTILFPELEKLVPSLHGASVYALLSEYPGAKQISEVHLTKLTNLLVTASKGHYGKEKAILIREAARASIGSVMPAKSLELKHTIKLIQELASEINEIEDSIQKIIDELNPPILSIPGMGVNSAAVILAEIGDFSNFSSPDKILAYAGCSPSTYQSGKLTNCYAHMEKRGSRYLRHALYNATKYVCYWNPVFAEYLAKKRAEGKHYNVALSHAMKKLVRLIYALQKSGKAYLAAA

SEQ ID NO: 183967 - protein, 368 aa, unidentified
MSDVITYVGMDAHKKDLFIAMLVGNQTAPVTWQLANEPNAVRRLVRKLERDAPGPVRVCYEAGPCGYALQRQMTTPQVRCQVIAPALIPRKPGEPIKTNRRDARKLAELLRAGLLTEVRPPTPEEEAVRDLCRARDDAREDFQRCRHRLGKLLLRRGLHYSGRNWTRAHRRWIDSLEWTQPAERMVVDDYLLAVDQLEARLIELDARLAEMAETDPYRERVGWLRCFRGIDTLTAILILAELHDFRRFQSARALMAYVGLVPGEDSSGEKHRRGRITRTGNALVRRLLVEMAWHYQHRPSIGVALTRRRKGQPGRVIAIADKAQQRLCRRFRRLAEQHKPAPKVAVAIARELAGFLWAALQPAPMSVS

SEQ ID NO: 183968 - protein, 388 aa, unidentified
MSQSFDASRSLTALEQDNTIVAVIEMSKAKWLIAALVPGFKRQPLKKIDADAPSLLKLLQRWRNEAGQAGHTIKRIAVAYEAAGDGFWLARWLRARDIEAYAIHPASVAVSREHRRAKTDRLDTELLMRAFLGWLRGEKRHCSMAAIPTLEEEDARRPNRERQTLVGEQTRLINRIKAILTRFGIRNFRLSLRNAADRLMAIRIAEGTPLPDNTRAELHRLLERLDLLRAQIRTIEGDRLRRLAAAPAAPEGPHAMVRLIARVIGVGVETADMLVHEILSRGLRDRRAVARYAGLTGSPDESGKRRREKGLARAGSARVRHGMIQLAWRFLLFQKDSELARWFQARTADGRKATRKTMIVALARKLLIALWRLVTTGEAPQGVSLRVA

SEQ ID NO: 183969 - protein, 355 aa, unidentified
MSQEKYIGMDVHQATISVAVMDGSGKLIMECLLETKAATIVEFIQGLHGTLSLTFEEGTAAAWLHDLLKPHVSRLVVCDPRKAALLKEGNKSDRIDARKLAEMLRSNQLHPVYHGEHGMRTLKELGRSYLTVTQDVTRVMNRIKALYRSWGIPCSGTTVYASRHRAEWLAKLLEPGVRVRAVHLYQQLDSLQPLRLEARRELLQESQKHAAVKRLRQIPSIGPIRAALLVALLQTPHRFRTKRQLWAYSGFAVETHDSGEYRYVRGKPQRNRERITVRGLNDNYNKDLKNLFKGAAISASTRPGPLHDFYVARVEKGMRPTMARLTVARKIAAVSLTIWKKGVSFDPKRLQQQAV

SEQ ID NO: 183970 - protein, 341 aa, unidentified
MEHYAGIDVSLECSSVCVVDGNGKIVREAKVASEPQALIAWFGSLGFGLERIGLEAGPLSQWLFAAMKAAGLAVELLETRHVRKAFEAMPVKSDRNDARGIAQLMRLGWFRPVHCKSMSAQETRSLLTARKLVQSKLHDVENSLRGILRGFGLKVGKTTGQKFAGRIEELVAGHPHLQMIAKALLAVRAVLRTEFAAFEKQTRRMVRSDMQARLLTSVPAVGPIVALTYASAIDDPARFKSSKQAGAHFGLTPKKHQSGETNYTGRISKIGDASVRTALYEAANVMLTKPVKGCSQLKSWAMRIKRRAGMSKAKVALARRLAVIMHRMLADGTPFNAAAAA

SEQ ID NO: 183971 - protein, 337 aa, unidentified
MKYTGIDLHSNNSVVTVTDDSDREVAEKRLPNELTTILAFLSAWQEEIVGVVVESTCNWYWLVDGLQAAGYKVHLAHCSAIKKYDGLKHSGDEADARHLAHLLRWGILPTGTILPQDQRAARDLARKRMQLVRSRTAHILAVENITAREHGARISSNQVKRLTVETIDQMPVAEDVALAIKANAAVIDALSTQIEALEKRLQKIVKARVEFDLVSSIPGNGRVLATTILLETGPIDRFAGPGNFASYARCVDSQHTSNGKKKGEGNVKNGNKYLSWAFIEGAHFAIRSCAEAKRFYKRKKAKTNNIVAIKALAHKLARACFHILKERKPFDVTRCFA

SEQ ID NO: 183972 - protein, 372 aa, unidentified
MRKRTTLTPPPPVPPKTAPPARVLGIDLGDRTSDVCVLSEVGGEVLERFKVEMSPGTIEATFSSYRGSKVAIEAGAQSPWVSRSLAKVGLSVVVANANQLALITQSKRKTDRVDAELLARLLRSDVSLLRPIEHRSEQHQAHLELLRARDAAVRSRTLQINHVRGALKAAGVRVPSCDAGAFHRIATDYLPTLLVPALRPMVRSIKALTTMIRRYDRDVDRLGKDVYPETNLLREVVGVGPVTSLAYVLVIANPKRFRKSRLVGAYLGLVPGLSQSGESNPQKRITKAGNAYLRRLLVQAAQYITGPFGPDCTLRRLGARLTVNGGSRAKKRAVVAAARHLAVTLHRIWSTGEAYDPMRGIPQPEPAEPPAC

SEQ ID NO: 183973 - protein, 369 aa, unidentified
MQTVRSFVGMDVHKETISISVAEDGRNGPVRFIGVIPNQPDEIAKMAKRLAKHGELDFCYEASCCGYNIHRQLTALGHRCTVVATSLIPTKPGERIKTDRRDSQKLAVLHRSGDLTAVWVPDATHEALRDLVRARVDATMHLMRARQQLLAFLLRHGRSYPTGKHWTMRHRAWLAMQTFSEPVHQIVFQDYIEAVWTAQQRRDALVQRITSTVESWSLGPLVEALRGLRGIDLISAATLVATTGDLSRFESPRRLMGYLGLVPSEHSSGASIRRGGITKTGNREARRMLVEAAWSYRYPARVAKEKAEILVRLPKGVRDIAWKAQTRLCVRYRKMIARGKKPTVVIAAIARELAGFVWAIGQEMRVGTT

SEQ ID NO: 183974 - protein, 461 aa, unidentified
MPDGGGENSSTKRKKQIEGLPVVLRDVAGIDLGSERHWVCAPVAGGISREVADFGATTPELIRMAKWLQACGVESVAMESTGVYWIAPHEVLEAAGLEVLLVDTRQLARVPGRDKKTDPTDCEWIQRLHSCGLLRSSFRPREEVCMLRTLVRDKANLVAECGDWLRRMQKSLDQMNVRVHRAVSNIDGVTGMAILRAIAEGERDARKLAKLRDTRCHKSEEEIAEQLSGHWREDHLFSLRQSLKMYDAIQQRLTDYDREILHRLAAMQREEFRQQPAPPVKNPQKAKNMKKRGQEPMREALFRMSGVDLTGIDAIGVETVQVVLSEYGPDLSRFPTEKQFVSHVTLVPHKPMSGGKPVRKKRRNSASTRVAAALRMAAVTLRNSATALGAYYRKMARRLGGDVAVFATARKLATLIYRLLRWGQPYVDEGAEAFERRYQETRLKNLKAKVKELGFELVASN

SEQ ID NO: 183975 - protein, 312 aa, unidentified
MEGTAAVVGIDVSKDRLDVHVRPSGETLTLERTAAGLDVLCRRLREIAPRIVALEATGGLETIATAALAAAGLPVVVVNPAQVRSFARALGRRAKTDPIDAAVIAHFAAATEVEVRPLKDEATRLLGELVGRRRQITEMIRAEHNRARRTTEPRLRESIARLAEALERELAVLDADIDTAVRGSTLWRATEDLLTSVPGVGPVIARTLIAELPELGALDRRKLASLVGLAPYTRQSGRWKGLSRIGAGRSPVRTALFMGAMVAKRFNPTLKAFYERLLAAGKPKMVATIAVARKLLTILNAIMRDQRPWQSA

SEQ ID NO: 183976 - protein, 326 aa, unidentified
MTLPKLGIDISKKTFDVAFIRDPETMKRKQRQFPNAPAGFQALPAWLAKQGVTQVHAVMEATGAYGDALAEFLYAAGHLVSIVNPAQIKAFGQSELQRNKTDRADAVLIARFGWRYNPAPWAPLPPAQKELQSLVRHLDDLIEQRTQVTNRLTDGRLAAAVRESWEKVVQTLNQQIAEVKQLINQHFNDHPTLKQNRDLLDSIPGIGPETAARLLAEMPKLAEFNSARSAAAYTGLTPMRHQSGTSINAPGRLSKIGNPRVRYALYLPAMAALRSSKEFKELSARLTARGKKKMQIIAAAMHKLVRIAYGVLKNQQAYDPNYAAAA

SEQ ID NO: 183977 - protein, 341 aa, unidentified
MDEVSTIGLDIAKSVFQVHGVDAAGAVVIRKRVSRAKVLEYFGELPPCLVGIEACPSAHHWGRELQRLGHTVRLIPPSYVKAYLKRGKNDANDAAAICEAVTRPSMRFVPIKTKEQQTALMLHRARQLLVRQRTMLSNALRGHLAELGIVSAKGRNGTAELLRIIADGRVSPAVCGILKVLARQYGAIGTEIASIDKSIMALHRGCEASRRLAEIPGIGPIGATALVAEIGDWKTFSSGRSVAAWIGLVPKQHTTGGKDRLGSITKQGNRYLRWLLVVGAMAVIRYARRHGTQKRPWLGRLMERRPTKVAAVALANKIARMAWAIMVRGERYKEPKLLLAA

SEQ ID NO: 183978 - protein, 337 aa, unidentified
MKRYLGVDLHRTQFVVCTRLENGEQEVRQWRIGELPKFVEHLQSEDQMAVEAMGTTARFHDAVVGRVARVVVVNPHQFRVISESVKKTDRNDAQALALYLAKDLLPEVRMKPKQNRELMHLAETRDLLVKQRSALKGKINNLLAMQGIELKREALSSKIALERVLASPVSGMVQLELRVLVEQIRSLSESIAELDERLEEEGQQLPGYANLTSIKGIGSLSATVLLTVIGKISDFADENKLAAYLGLVPRIENSNESERSGRITKQGNKLARTALVQCGLVAKRYSPYLNQFYERIKQRRGGGKAKIALARKLVKIVYDTLKNQWVFEDFPSFTLAA

SEQ ID NO: 183979 - protein, 357 aa, unidentified
MLIIGCDYHPSMQQIAFVDTETGERGERRLMHRDGEAERFYRELKQRRVEVRVGMEATGYARWFERLLAELSFELWIGDPARIRARRVRKQKTDRQDAQLLLRLLLEEDGFPRIWVPSPENRDLRQLLWHRHRLVQMRTRIMNQLQAVAMNEGLRRKRALWSEAGRKQLESFLLAPWATRRRKDLLELMDRLNPTIRELTGAVEKEAENKPEVQLLMSHPGVGPLTALAFVLIIGTPQRFHCGKQMGSYLGLIPCEDSSADRQRLGHISKQGSSLLRFLLVEAAQVAARVDAEWRRRFLHLAMRRGRKIAKVAMARRVAVGLYWMWRKEWDYQQVVKFGSQGRKLSSHNVVTTGSTR

SEQ ID NO: 183980 - protein, 411 aa, unidentified
MDVIVERAAGLDVHQASIVACVLIGRPGQKPRKEIRHFGTMTADLEALRDWLRELGVTHVGMESTGVYWKPVHTILEGHFTLIVANAHHIKAVPGRKTDVKDAEWIADLVRHGLVRPSFVPPLEIRELRDPVRHRRTLAETLASERNRTLKLLETANIKLSSVATDVFGVSGTAMLRALAEGDMAPEAMAELAKGRLRTKLEPLVKALQGRVSEHHRFLLRLHLRRLDEIERDLAELETRIAERMRPYRRQVGLLKRIPGVDEIGAAEILAETGIDMTVFGNARRLAAWAGVCPGNHESAGRSRKTSTRKGNPHLKAALFRAATCAAKAKGTYYKEKYYRLKARLGAKRAAMAIAHKILLAVFHVLAGDTEFRELGAAHLDQQNKHRVTKGLVRRLDALGYEVILRPKLAA

SEQ ID NO: 183981 - protein, 411 aa, unidentified
MEVLYDRVAGLDVHRDSVAACVRLPGPRGGAVTEKERFKTTTAGLGRLAGWLTERQVALVAMEATGVYWKGPYYALERDFAVWLCNAHHVKNVPGRKTDMSDAEWLADVAAHGMVRPSFVPPPPIRELRELTRYRKTQIDARAAEIQRLEKVLQDAGIKLTSVASKVLTQSGRAMVEALIAGERDPARLAALAKGKLRPKIAELTEALAGHFGSHHAVAARRILDHLDFLEGSITALTEQIDARSRPYAAVFELLGPVPGLDRLTIDVVIAETGADMGRFPSPAQLASWAGLCPGNHQSAGKRRRVGTPPGNQWLRRALVEAARAAARTKGTYFAAQYRQIARRRGPNKAAVAVAHGLLDLIWHLLRTGECFQDLGDDFFDRRRDPERETRRLVHQLEQLGYSVTLATAAS

SEQ ID NO: 183982 - protein, 339 aa, unidentified
MNITTIGIDLAKTSFSLVGTNKHGKVVLRKTLSRKKLLPFIAQCPPCLIGLEACSGAHYWAREFEKLGHKPRIIAVKFIEPYRKGSKNDNNDAEAICEAVRRPNIWYVPVKTADQQALLCVHRVRQGVVRERTRWVNRSRGLLSEFGIVIPKGRYALQGALPVILTDLDNGLPELTRQMIHDLWLSIQQANEQILGYDRALAQLAREDETAKRLLTIPGVGEQTATGVVASVPDPRLFKNSRQFAAWLGLVPRQYTTGGHVRLGRITKRGDKYLRMCLVHGARAVVAKLGDKQDHVSCWVRELIQRRGYLRAVVALAARNARLIWTLMVKRENYRAIDV

SEQ ID NO: 183983 - protein, 403 aa, unidentified
MNAVGIDVSKGKSMVAIMRPFGEIVSTPFEIKHTASDIRSLIELINSIEGESRIVMEHTGRYYEVLAHQLSKANFFVSAINPKLIKDFDNDSLRKVKSDKADAVKIARYALDKWQNLKQYSAMDELRNQLKTMNRQFGFYMKHKTAMKNNLIGILDQTYPGINTYFDSPARSDGSQKWVDFASTYWHVDCVRKMSLNAFIDHYHKWCKRKKYNFSQTKAEEIYGKAKELVPVLPKDEITKLIIKQAVEQLNNASTTVEELRTLMNDTASKLPEYPIVMEMKGVGPSLGPQLMAELGDVTRFTHKGAITAFAGVDPGVNESGSYEQKSVPTSKRGSADLRKTLFQVMDVLIKTMPQDDPVYQFLDKKRAQGKPYYVYMTAGANKFLRIYYGRVKEYLSSLPDSE

SEQ ID NO: 183984 - protein, 308 aa, unidentified
MTTIYTGLDIAKQNLQLHLAGRFHDLPNTAAGHRRLLKLLAGQPGTQLVCEATGGYERDVVAALHAAKIPVSVANPARVRHFARALGQRAKTDPIDAALLSDYGRKLQPKPAAARTAAEQALTELVRRRGQISEILVSQKLQSEHLTLAGLRRQTQSLIRQLEKQIAQIEDELKALRAKVAALDERAQKLEAITGVGAITALGVLAELPELGTLNRRQAAALAGLAPHPRDSGQWQGRRTIGGGRPAARRALYRAALVAARSNHILKVFYQRLRANGKPAKVALTAVMRKLIVLMNLILKNPNFVLQN

SEQ ID NO: 183985 - protein, 407 aa, unidentified
MDNEIIIDKGCGLDVHKETVVACVMGSGIKKDIRTFSTRTNDLLRLKTWLSGLGITHVAMESTGPYWKPVFNVLEDGFTLILANARHIKNVPGRKTDVKDSEWICRLLRSGLLSASFVPPQGIRELRDLTRYRRKLTQSLSAEKNRIQKVLEDANVKISSVLSDTFGASGSQMIEAIMEGKLTEAEMADLAKGRLKSKKEEIREALVGYFQEHHRFMIKASLEHIKYLEKLIADLDQETKKKLSHYQKEYELLQTIPGVKEQGATAIIAEIGADMGIFPSEGHLSTWAGMSPGNNESAGKKKSGKTAHGNKNLKAALTQCAWAASRTKNTYLSAKYHSLVGRRGKKRALIAVGHKILVMAYHMIKNGVPYKELGKDYLLHRRADRIVKNHIKRLRDLGYEVELKKAA

SEQ ID NO: 183986 - protein, 439 aa, unidentified
MAKETTFETVHQNVAGIDIGAEQIFVSPDGKEVVSFETFTSSYYACAVYLKERGVKKVAMEATGVYWIALYFLLEELGILVCLVNPKETKQVKGRKTDVRDCQWIQKLFSAGILRHSFIPQGKFMELRHLVRERLDIISMGSTYVNKMQKCLELMNIKLPEVLSQIHGTSGINMIKAILSGNRDSNYLLSLCDERIQKYKGEKVLKALEGRYNDTYLFMLEQNMQLWDIHQNQIKKIDGEISRLLDELSVDKEEVVTGKAKAVRHHAPKIPGLHATMARLYGVDLTSIPGINDYTALRLIGETGVDMSRFPTVKSFVNWLTLSPKSHRSGKMKKNVRGMPCNVAGQIFKQCAQSLLNSKNNAIGSFMRKLRGRKDSRIAIKAGARKLAIAYYNTLTKGTAYVEEGTKRYEDQLQRREMALLKKMAKKYNMQLSENQIAA

SEQ ID NO: 183987 - protein, 412 aa, unidentified
MNQDKLYVGIDVSSKNNVCYLMYSDGSKHSSFSVPNNRNGAKIIVDRVTSVLLLQDIPKVVIGMEATSVYGDNLMRFLRESGSLGRFERSLHMLNPKQVKKFRDAYSDLPKNDYVDSFVIADHLRFGRINKEVYMDDYKYQALKMYTRARHQLVQELTREKQRLLNTVFISFSGLTQEKIFSDKFGATSMALIEEFSSLDELAYMNTDELADFIRKHGKNHFENPEEIAEAVQRAAKNSYRPPQVIADAAKQMIVISMNTIRLLQKQIKEYDKAIEKMLEIIPQTLTSIKGIGNVYAAGIIAEIGDINRFPSQASVAKYAGLVWTQHQSSDFEAEDKRMIQGGNHHLKYYLCEAANALRRCDPEFKRFYSLKYKEANKHNHKRAFALTARKLVRLVYTLLKTNRLYIPPEEY

SEQ ID NO: 183988 - protein, 331 aa, unidentified
MEEVKRFVGIDVAKVALDVFIGPAGAAFSVTNDEVGIRELLRHLAPGDFVILEATGGLEMPAASALAAAGIAVAIVNPRQVRDFARATGRLAKTDRLDAEVLARFGEAVRPEARPLADEQAQALEALVTRRRQLVEMLTAEKNRRARASKILHHSIDEHIRWLEKRLTGFDDELGELIRDTPLWRERDELLRSVPGVGKVLSITLLAQLPELGMLNRKQIAALAGLAPFNRDSGTLRGSRCIWGGRAQVRRVLYMATVAGVRCNPIIKTFYLRLRTNGKHAKPALIACMRKFLVILNAMLHNKTHWQTPALASSTIALSPLPGAVSEHGCC

SEQ ID NO: 183989 - protein, 415 aa, unidentified
MQFIILGGTNMYNAVGIDVSKGKSTVAVLQPGGIVVKKPYDVSHTTSNLKDLTDYIRSLDGETKVVMESTGRYHEPILHTLSGAGLFVSAVNPHLIKNYGNNTLRNNKSDPIDSRKIARYTLDNWTELREYSSMDTTREQLKTLNTQMSFFTNQKVAAKSNLISLLDMTYPGVNDLFDSPTRDDGSEKWVDYAASFWHVDCVRKISLNAFTERYRAFCKRHGYCFQPSKPEELYNASKELVPVFPKEKEYKEMILMCIKQLNVISANVERTRQKMNQLASTLPEYSTVMGMCGVGPTFGPQLIAEIGDISRFTHREALTAFAGVDPGVNESGKFKSKSNKASKCGSARLRKTLFLIMSCLLQTQPVDDPVYCFLAKKRSEGKPYHVYMTAGSNKFLRIYYGKVKECLRAQAEADN

SEQ ID NO: 183990 - protein, 348 aa, unidentified
MKELMAGIDLHSNNIMVGIVDGEGKRLAHQKLPCELKRILEFLAPFKKRLRRLAVESTYNWYWLVDGLQGAGYPVVLANPAKITQYSGLKHADDKSDAFFLAELLRLEILPTGYVYDAQRRPVRDLLRRRMSLVHQRTALMLSFKSLFTRTTGEQMSLSRLKTLAVAQAQALYEHPANQLIAGLQIHHIEQLDASIGRLEKAVLNVARELPYYPQLKTLPGVGIILGLTITMEIGDIQRFAGPGQFASYCRTVAAQCTSNGKPKGENNGKCGNKYLSWAFVEAANFAKRYDEPCRQWYDRKAAKAGTVVATKALACKLAKAAWHLVAEQTDYEPGRMFPQLAGAAMSK

SEQ ID NO: 183991 - protein, 384 aa, unidentified
MKKFSKYVGLDTHKDTIAVSVADASGGKARYFGEVSTRPAAIKKLLKHLSPQGELVSYCYEAGPCGYTLYRQITQLGHECIVVAPSLIPRRPGDRVKTDRRDSEALARLHRAGELTAVWVPDEEQEAMRDLTRAREDMKLLERQSKQRLNAFLLRHGRHYEPGKSRWTLAHWRWLERIKFTQPVQQIVLQEYIDSIRHLQSRVLELEEEMARAVQAWRWAPVVEGLMALRGCRLITAMTVVAELGDISRFDSPRQLMAFLGLVPSESSSGPNRRRGGITKTGNGHVRRLLIESAWSYRFPARKTALLQRRAEHTSDAVQAIAWKAQKRLCARFRYLNDRGLRRVKISTAIARELSGFMWAIACEVMSQQPNPVASASIAATNSN

SEQ ID NO: 183992 - protein, 531 aa, unidentified
MASRTNKRASRRRGSVAGLGKSRGVIGPRVARVGGDRFGIVAVDCAKARSKWLLADFYGQVLIGPTPVEHTRGGLDDAIGQVRGAIQEHRLADQIVAVEQTGRYHKPLARAFSAASLEVRLVHPLASRRYREAADPGIKTDDKDLGGIWAAATHGLALVEPKVDAFWASFQLLTRHRRDWVRKSSALCCQIKEHLEAAMPGYAGWFPTLWEHPAALSLALDWPVAASAVPAEAIQRAGASALAEHLRRKKIGFQQRTVQRVIEWSAGAATPDVGHRWHRRIAAELEADRAAKARQIERLERQIAAHLAATEYVLLLSIPGINVVSAGEYAAELGPIEHYAHGRRITGRAGLYPSRYQSDQVDRADGPLVRSGHRRLRYALLQIAGNLMKCNLHFGALAAHWKRQGKDPRDNHIRVASRFARISFQMVAGRQVLRHPAIQGRDCVLEKLLRFHVKHQTASEAMRTDLRAAVGQLPTGERTAEAAPLAEQLAQLHRRRRRRGVRPLAEVLPLVLAELGWGQVESSGSGASGPA

SEQ ID NO: 183993 - protein, 317 aa, unidentified
MKTVPFEQVILRGCGIDVHKDMVVATISGEGLKTETRSYKTFSSSLTELKEWLLSSGITHVAMESTGVYCKPVYKILECPDMKVWIVNARHIKYVPGHKTDKKDSAWICKLLLAGLLKPSYIPEREQRELRDLTRYRNKLIQHVSSEKNRIVRILEDCNIKLSSVVCSLDGVVANKLIDMLIDKGHVTMDDITCIYHKKLEASPELLYQACEGFIEPHHIYMLQTIRKDMEQTKAIIADLTCRIKEVLSPYENVMELLQKIPGLSRKTVEDLIAEIGVDMEAFPTEKHLASWAGVCPGNNESAGKKKVVEPPMATNS

SEQ ID NO: 183994 - protein, 350 aa, unidentified
MNNVKYVGMDVHKAITVIVVLNALGQIESRMQVKTKAENLCDFFRGMSGKVEVVFEEGTHSAWLHKLLKPLVASVIVCDPRHNKLIGDGSKSDDDDAEKLAYLLRLGSVKSIYKGDDQQQQLKELSRTYDNLVEDATRAKNRLKAIYRGRGIDCPGHAVYRADQRAEWLAKLSDEGARFRAQSLLDQLEAIQQLRKQAKSRLIAQARKHADYPILLKLPGFGPVRVAQMIAIVGTPHRFRTKRQFWPYCGYAVVRQTSADYGIVEGKIVKQQKKASTRGLNRNHNPQLKQVFKGAALTALRHEAFKAYYQRLIDKGTSPELARVSVARKLAAITLAIWQSREEFDASRVA

SEQ ID NO: 183995 - protein, 350 aa, unidentified
MLYIGLDVHKEFCQACVIDESGRALSNERFSSTNEELDRFLNRFQDAKFVLESTGIWEFIYERIEKRGFEVVLAHPLKVRAIAEAKVKTDKVDAHTLAQLLRADLIPRSWIPPKDMRDLRQLVRQRAYLVREASRFKNRIHAEILRRGIRRPENLKTPFAQRSIRWMHSLGVPTVTSCLNCLENIQAQIEDINIQLLDEYNRRPDAQLISTVPGIGFYGALLILAEIDDVRRFRHSENLCAYAGLVPTVSQSAASVKYGAISKDGSAYLRWILAESVHVHTRYAPGSQLSSFHARVARRRGRHIATVATARKLLRIIYFMLMRHEPYSSHGSDPGKRVHSECDLWIGANP

SEQ ID NO: 183996 - protein, 354 aa, unidentified
MSSQSSVTVGIDLGDRHSHLCLLDTGCGEIVEESRIPTTPKGFERRFSGREPMRIAIEAGTHSPWISRLLEGCGHEVLVANARKLRLIYGEGKKNDRLDAENLARLARLDPRLLSPLKHRGEASQAHLALVRSREALVGARTKLVNHVRGAVKSFGARLPGCSAKSFHVKAREGLPEALVPALGPILETIGSLTDRIREYDRELETVSRESYPETALLRQVPGVGPLTALVFVLTLEDPARFGTSRSVGAYVGLAPGIHQSGEHNPQKRISRRGDEMLRRLLVSCAHHVLGPFGKDSDLRRHGEKLAVRGGKNAKKRAVVAVARKLSVLLHRLWITGEVYEPLHNARKAETGTA

SEQ ID NO: 183997 - protein, 250 aa, unidentified
MVYIGIDISKSSFIAAYPSTNGYRTKTYPNTIAGIRKFIATLSVAEHHCIMEATGNYCFLLLYLLHQSGIVVSLVNPKQIKHFARMMMAVTKTDEKDACMIAMNGEKMNPPVYKMPSQAIILLRQKKTVIRQLRKQLVASKNLRESLVVLPYRDKACVRALDKTIDFLTRQIEQLEAELADIASAEFDKQLKALTSTKGIGITLATALILTTGGFTYFDNAKQLSRFIGICPTYQQSGTSVNIKVHINLN

SEQ ID NO: 183998 - protein, 340 aa, unidentified
MNYMGIDQHNQYCYMTIMDKEGNVLKSDAVWNDRDEIKRFLDGVGGETKAVVEAGRASYRMVDLLEEMDVELMMADPAQVKAIAYAKIKTDKRDSKVLADLLRTNLIPEVYMRSKDNREAQRLLHQRAHFVRMRTQVKNRIRWLLAQQDEQVSQQIKEGNKPFSRKGINFLTQIPLSELDRKLLDELLVLYENLDERVRKSDKLVEMLHRGMKEAQFIGTVPGFGPFFSVLVAIEIGDINRFANAEKLHAYAGVIPSTHSSGGKIYHGKIIKSGNRWLRWAAVEAVWPAIKSDFQLRAFYEKHARRKGNNVAKVITARKLLSIIYRVLKENRPYELYRRK

SEQ ID NO: 183999 - protein, 407 aa, unidentified
MIKTEKTCGIDVHRDLLVATILNGENQQTKRFINDANDINNLKTWLKTNECNQAVMESTSIYWVPLYLGLEESKFDVTLANAHQVKAIPGRKTDQSSSEWLAHLLRGGLIKPSYIPERRIRELRELTRLRVKLVENRTAFKNRCQKVLNRVNIRLGSRLTDVFGKAGTEILNGLMAGKTVEAILKHTENKWLKNKREEIEAVAKGGLSDSDIFLLKEFTEMIDALNEKIRRVDARIEMLVDDKDVAVVSSVPGVGKRSAAAIVAEIGDAGQSSDGSHLVSWAGLAPSVYQSAGVFVTGHITKKGSKWLRHVMVEVAHVAVRVRNSRLRAFYLRLRAKKGEKIAVVAVARKMLCIIWHLLVKGEKYVEETFEKRAGGFKAMYRGNVPLEEMAVVLRSAGYVVLNGPYG

SEQ ID NO: 184000 - protein, 415 aa, unidentified
MERLYSCCCGLDVHKQTVVACLLRPADGGQRRKEIRTFGTTTEALRHLADWLRVAGCTHVAMESSGVYWKPVYNILEGQCTVLLVNAQHIKNVAGRKTDVADSAWIADLLQHGLLRPSFVPDRAQRELRDLTRTRTTLIDERSAAVNRLQAVLEDANLKLAGVATDIMGVSGRDMLAALLGGESDPAVLAALARGKLRRKRAALEQALAGRMNDHHRRLIALHLEHIAFLDESIAQLSADIAERVRPFEEAIALLDSIPGVDRRTAEVLLAEIGVDMGRFPSAGHLAAWAGMCPGQHESAGKRRKAPAREGNRALRRALTEAARAAARTKTAGRTRLAAQYRRLVVRCGKKKAAVAVGHTILRLVYHLLTHNEPYREPDLSYLDERRRAHTQQRAINQLRALGYEVTITPKEPAA

SEQ ID NO: 184001 - protein, 365 aa, unidentified
MARLTNIEKFFKKVNLSIDDELFVGVDVHKRTYHVALFLNDMPVLDFGMSASPEKLSEKLLPMKRSVKNIVYEAGPTGYGLARHLAKNGLPAMVTAASAIPSVNGANKTDRIDSKKLARYLAKGLLRPIAIPTEKEEANRQLSRMRQRRAKQRAKVKVQIKSFLLMHGIAEPSGLKNWTVSSVNSLRRIRLSKKLRLSLDDLLYDYDYLTSRLKNNNEMLVENLGKGVLGHGIDLLMTHPGIGIVVASQFATELCNYKDFNTTRQLYRYLGLSPRIHQSGEKSNGGPISKIANIRLRQNLIESAWTWVNRDIEARKCFYRILNNCGGIKQKAIVAMARKLSGHLLMMLQNNEPYDRAKSGSRIKK

SEQ ID NO: 184002 - protein, 331 aa, unidentified
MEEVKRFVGIDVAKVALDVFIGSAGGAFSVANDEVGIRELLRQMKPADFVIVEATGGLETPVASALAAAGIAVAIVNPRQVRDFARATGKLAKTDRLDAEVLARFGEAIRPEARPLADEQAQALEALVTRRRQLVEMLTAEKNRRARAPKILHRSIDEHIRWLEKRLSEFDDELGELIRHTPLWRERDELLRSVPGVGKVLSSTLLAQLPELGMLNRKQIAALAGLAPFNRDSGNMRGSRSIWGGRAQVRRVLYMATVAGVRSNPTIRTFYLRLRTNGKQAKPALTACMRKFLVILNAMLHNKTRWQTPAPTFLTSSLSPLLGAVSEHGCC

SEQ ID NO: 184003 - protein, 318 aa, unidentified
MSSAAPTFVGIDVAKAELVITIRPSGEHWTIANDVAGIHTLVQRVRGHAPTLIVLEATGGYERAAVAALAAAQLPVVVANPRQVRDFARATGQLAKTDRIDADILALFAERVRPAPRALPDDAAQALDALLTRRRQVLEMLIAERNRLEHAVPTVRRGITQHIRWLERQLADVDRDLDATIQASPVWRAKENLLRSTPGVGPVLSRTLIGELPELGTLPRKQIAALVGVAPLARDSGTLKHKRLVWGGRAPVRAALFMAALVGTRCNPVLRTFYRRLLEAGKPKKVALTACMRKLLTILNAMMRTNTAWRHIDLSPTT

SEQ ID NO: 184004 - protein, 347 aa, unidentified
MNYIGADCHISSLDFAVVNEKGNITQKAKVETSALEFMKFVKSIPKPRKIYIEEGELADWLLETSLKFGEKLIITDPKINKWIGKAGKKDDKIDAEKLAQLARGKYIKEIYHPVNKRRRFKELVFAYHDTVKSQTRIKNKIKASFRREGIRCSGDTVYSDKYRKEWQKKLPTNMVVRLIVKQLWTQLDQIRAAKETLKRHIRIQGKQFSEIKKFIKVPGIGLIHASTISAIIETPHRFANKKKLWMYAGIGIAERKSGEKVYSKKLTREYNRLLKNAVKQATEAAISARDNQFRRQYLKLTIEKGIATHKAKLTVARSLLAAIYGMWKKGEAYDPQIDNKRFKENNK

SEQ ID NO: 184005 - protein, 340 aa, unidentified
MGDITTIGLDLAKNVFQVHAVDVAGSVVLRKQLRRGQVLAFFAELPPCLIGLEACATAHHWARELIALGHETRLMPPSYVKAYVKRNKHDVADAEAICEAVRRPSMRFVPLKTAEQQSALMMHRARDLLIRQRTMLVNALRGHLAEFGLVEAQGLHKVARLIAIVMDEMDARVPDIARQVLKVIVSQIEDIQTRIAGLETQVLAWHKSNPVSQRLATIPGIGLIIATAIAATVADPSTFRSGREFAAWLGLVPRQNSTGGKARLGGISKRGGSYLRRLLVNSAHTVLLCSKVAKTDPWLTSLLSRKPRLVVAVALANKTARMAWAIMSRPDLYRHAAVTA

SEQ ID NO: 184006 - protein, 313 aa, unidentified
MIIPLRCVGIDVSKHFLDIFDEAIGASERIANATQAITQLVARWRCDALVVFEATGVYDLELREALRQAGIRFARINPARARDFARASGQLAKTDPIDARMLAAFGRAMQPATEQAATPARNALARLAKRRDQLVLMRAKEKNRRSEADDRAMAERIGRLIEVLDGEVEEIEADIRALIKAEQEISDDAHLMRSLPGVGPVACMQLIAQMPELGHVGPKQIAALAGLAPFNVDSGAYRGKRKIGGGRKRVRDALYMAALNAVRRADPFKAFYTRLRQAGKPAKLALIAVARKLLTVLNAMMRDRKPYKLAPAR

SEQ ID NO: 184007 - protein, 352 aa, unidentified
MRRPKHQVSIGEDLFVGIDLHKNRWYVTIRTVDLEVFSASIPGTWEALQRVLARYAGHQLQAVYEAGYFGFRLHDRLVAHGIPCLVTPPSLVPQEYGNRVKTDRRDSSKLAHLLAKGMLKRVWVPSEEELYHRQVIRRRRQLVRDRVRTRSRIKAELRFYGIQLEEPRGRWTQIYFETLRRFRFGNRWMQESFNCLLEQYEFLSGQIDKQTQLLRELSETALYRERVEILQSIPGIGLISAMELLLELQDVSRFRRAEQLAAYVGLTPSQYSSAEKVRMGRITGIGKNTLRSLLVEASWTLIRKDQAMREKYGRIKIRSGGKRAIVAIARTLFLRMRRMLLDKQAYTLQLAA

SEQ ID NO: 184008 - protein, 386 aa, unidentified
MQKLNDLSRSLTALEPDGTLIAVIEMSLSSWLVAGMVPGVERQPLKKLAVDESALLKLLHRWREEAEKAGRRIERIAVAFEAGRDGFWLARWLKARGIEAYVIHASSVAVSREHRRAKTDRLDTELLKRSFLGWLRGERDHCKMVEIPTMKDEDAKRPNREHDSLIGERSRIVNRMKAALVRLGIRGFNPKLKRATTRLDGLRTPEGEPIPPNALAELRRDMERRRLVNNQIAQIEEERLERIEQAPSDGPHVMVRLLARVMGVGIETADMLVHEVLSRNMRDRRAVARYAGLTGSPDESGRKRREKGLARSGNARVRRGMIQLAWRFLLHQKNSALTKWFRSRTENARGTRKPMIVALARKLLIALWRLVREGIVPDGVVLRPAQ

SEQ ID NO: 184009 - protein, 316 aa, unidentified
MTNPLAKIHTALGLDVSQDSVTLYDSLTRQTLTIANQREALTEALAPFTDRDLALCEATGGHEDALLTVLQAFGIPAHRADAAKVKAFIRSFGKRAKTDPIDARWLARYGIERSAKLALWQPPEACQRQIEALVARRLDLVAMRRQEQCRLKAPRALLASDIADHIVELDTRIRAIESRIQTLIAQHEQFALRDKALRSVPGISHVLAPLLIATMPELGSINRRQAASLAGCAPHPRDSGKSNPYRHSSGGRRQLRPPLFIAALAAARGDNPLGNFYQNLLNAGKPKRLALAAVMRKIIIIANARVRDALYPPQLT

SEQ ID NO: 184010 - protein, 350 aa, unidentified
MQIIGVDLHARQQTISMLDTSTGEIVERTLEHAGDAVQEFYAGLEGPILAGIEATGSMQWFLQLMEELEIECQVGHPAKIRAAEPRKQKHDRRDAALIRTLLTEGRFPAIWMPSAEQRDVRSLLLHRHQWVRIRTRAQSALQAIALNHGLRLGRSLWSKAGRALAALPLGEFSSQRRAALQLLYVRLQEQIEELDKVVSKLAGERPQACLLMTHPGVGPITALGTEVFLGDVGRFRDGKSVASYMGMIPSEHSSGGRQRCGALSKQGNPFIRFLWCEATRHAVRKDADLRRFYRRKLLQKGLGKAKVAAARKLGIRLYIMLRDQIDYAEFCRRGSMRQKQGSAHAGMPER

SEQ ID NO: 184011 - protein, 335 aa, unidentified
MKYYAGLDLSMETTHVCVVDVEGRKVAMQSVDSTPDAIATILARYGPIERAVIETGRMSPAVALGLRELGIAIVCIDARQAHQSLKAMKANKTDPHDAAGLAQLARTGFYKEVHVKSPAAHGVRSVITARGHLVEARVRLDNTIRGLCATFGIRLGVGQGERFIARMRVAASIPGLGEAVASLLRARERLVEEIVQMDRQLKVISMASPVCQALMSIPGVGVQTSAAFAAAVDDASRFKRSRTAGAYFGLVPRRHQSGELDWTGRITKQGDGTVRKLLYEAANSILTRTRQSFALKSWALKIAKRRGLRKARVALARRLAVIMHAMLRDGTLFEA

SEQ ID NO: 184012 - protein, 375 aa, unidentified
MREKIRFLGLDVHAETIAVAIAEPEGEVRSLGTIPNREDSLRKMIKKLGPTDKLRVCYEAGPTGYVIYWQLAELGVKCEVIAPTLVPVKAGDRVKTDRRDAEKLARCYRAGDLTAVWVPDEGSEALRDLVRAREAAKQDQLRARHRLSKFLLRSGQRPPSGVRSWTRPYLIWVAQLRFTQMAQEATRLDYLHEVEHMRERVERLEQAINEAVKLASPALQQVINDLQALRGIADISAVTIAAELGQVSRFDSARQLMGYCGAVPSESSSGKRTRRGSITKTGNAHLRRIVVEAAWSYHRPPGIWYGLRKRQESISEEAKEIAWKAQHRLHKRYMRLAAAGKDKRKITTAVARELLGFIWAIGTRAETVVRQRMAA

SEQ ID NO: 184013 - protein, 343 aa, unidentified
MQTITTIGFDIAKSVFQVHGVDASGEVVIRRQLKRRYVLAFFQKLPPCLIGIEACASSHYWSRELQALGHTVRLMPPAYVKPYVKRQKNDAADAEAICEAVTRATMRFVPTKTPEQQSCLMLHRTRHLFIRQQTAVINSIRGHLAEFGIVAPVGRKGVTELLHVVADPSDKRVPEVARACLAALGTQLFRLKQQIVEFDRMIMAWHRSNQTSKRLHYIPGVGPMLATALVASVADPRTFRSGRNFSAWIGLVPKQHSSGGRDRLGSISKQGDRYLRSLFVAGALAVIRYAKIHGTKHRPWLTALLGRRPRKVAAIALANKIARMAWAMMAKGERYKQPVALAA

SEQ ID NO: 184014 - protein, 322 aa, unidentified
MDTTTRLATVATICVGIDGSNATLDVALRPSGEPWRRTHDEAGIAEVIGRLPPLAPHVLVLEATGGWERLAVAALALAGLPGVVVHPPQVRACATATGRLAKTAALEAAALAHCAAALRPPRRPLPDAQSQALAALVERRPQVVGRLTAEKHRWQQALPAVRATVAAHLAWLEQALAEVAGARDQLRRASPVWHARDERRRRVPGVGPTVARTLLAHLPALGPGSVKHLATLGGLAPLNRDRGAWRGSRTSWGGRRHVRAALSRAALVGVRHHAVLRAFSAQLLARGTPQKVALTACRHTLLTILHAVLRDCTTWQPTLLAT

SEQ ID NO: 184015 - protein, 402 aa, unidentified
MNAVGIDVSKGKSMVAIMRPFGEIVSTPFEIKHTTSDIHSLVELINSVEGESRIVMEHTGRYYEVLAHQLSEANLFVSTINPKLIKDFDNDSLRKVKSDKADAVKIARYALDKWQNLKQYSVMDELRNQLKTMNRQFGFYMKHKTAMKNNLISILDQTYPGVNTYFDSPARSDGSQKWVDFASTYWHVDCVRKMSLNSFIDHYQNWCKRKKYNFSQSKAEEIYGKAKELVPVLSKDAITKLIIKQAVDQLNSASTTVESLRTLMNETASKLPEYPVVMAMKGVGTSLGPQLMAEIGDVSRFTHKSAITAFAGVDPGVNESGTYEQKSVPTSKRGSADLRKTLFQVMDVLIKTHPQDDPVYQFLDKKRAQGKPYYVYMTAGANKFLRIYYGRVKEYLSSLPES

SEQ ID NO: 184016 - protein, 400 aa, unidentified
MLSIGIDVSKGKSTVCGMKPGGEIVYAPFEVQHTREGMSELVSLLRSSGEEVRVVLESTGSYHCPVVAALLENGIFVSVVNSLRMKRFCSQSIRKVKTDRIDAMQIALYGLAYWQELQPTRLPEDTYRELQLLARQYYQMTSMLIKAKVDFNALCDQVLPGMQELMNDHAGRHKLSDFVLRYHHTTHILEMGETRFRKDYCKWAEKKGYRNCERMGALIFATAQNGIPVLPNAPSTQIVITEAIRVLHTVEASRDAILTQMQALAKTLPEYSLVREMPCIGDTLAPRLIAEIRDVRRFHSKRALIAYAGIDAPPYQSGKFCANNRHISKRGNRYLRKTGYEVMQSYVMHKPANDPIFMFIEKKRSEGKCGKLAMVAGLNKFLRVYYGKVTELYRSLPAIE

SEQ ID NO: 184017 - protein, 446 aa, unidentified
MSRGDRNRNARLARLRELVPLSNAIVGIDLADDTQAAVVTDHDSRVIARRRVSARAWELGEVLDWALTRAAGAGFASVTVACEPTGHRWRVLDQLAAARGLALVCVQPLLVYRARESEDLTRDKSDPKDAVLIARLASELRCYEPERASAVWARLRHLGARRSQLTTGATAAVNQIRDLLECAWPAVLAASGSPFRSVTWCASLAVVLDRCAGDLSRVRRGGLDRFTAAVRRELPRWGGIRPCLRIIRAVFAALSDPAGVTAHRPGALERAHLALGDWRDTLARLADTETRMCTVMDELGLADLVTTIAGLTVIGAAAILAETGDPARFATPRALVKHAGLCPRDNSSGAAQGKTSISGRGRPGLRVAAWRAVWAAMPNNPVMAARFGYLTTRQDNRLARQQARTACAAALLRWIHVVVTRHVTWDPAIAAGGQPGAPDQALSTNS

SEQ ID NO: 184018 - protein, 359 aa, unidentified
MIAVGVDVHKRQCTVAIEREDGELRCFRGMENTREGWRKLLEQLPAEAEIALEVSTSGYFAMSVLEEAGRRERAHWVHSAGMESLRKQKYDRLDARRLARKLAVRERDPLPEAWFPPVEIRALRLRARQRCWLAVMRTQVRNRVQSVLQMHGLRSPVTDLFGAAGRGWLKGQAMPTATGESLEQLLRVHDDLSQEIEQAESNLRAAGRAFPEVARLRTIPGIGEILAPLIWSEIGRWERFRSARALVNYTGLTPSLYESGEVTIRGGITHQGSAWLRWALVAAANSAGQGVNPFARRYRQLRRKKPPNVAKTAVARALAHCVYGVLRSGANYQAARWEGRRAGVGRSLGAGQPEVAMGH

SEQ ID NO: 184019 - protein, 434 aa, unidentified
MEIVHPRVAGIDVHKKVIWIAARLPGGAPGERKVTVRSFKTFWRSLQKMAAWLAELGVTDAAMESTGVYWWPVYHALAGAGIEVCVCNAAHMRNVPGRKTDLKDCQWIAELHEYGLLRPSFIPAAEVAALRQRTRYRKRLIEARTAEGQRLTKVLEDAGIKIDSVASELLGVSGRAMIEALIGGERNPGRLANLAKGRLRAKIDDLQMACDGRFTATHAQMCRLHLDAYDHLTGQIATLDVLVAEAATPFESIIARLMTIPGIGRRIAEVIVAETGGDMARFASSSRLAAWAGLAPGDNESAGKRKKAAARKGNRHLRSAMVEAAWAVSRTASRPGARFRRLAYRFGRPNVKKAAVAVAHTLLCVAWAVMKRDQDYAEAGADYYQQRDQRNHEHLARHHQEALARLGYQVTLIPPDDSRPPPGTDTTPAQHTAA

SEQ ID NO: 184020 - protein, 413 aa, unidentified
MFNHPKMRFVYCGIDSHKDTHTAVILNCFCERLAEITFKNIPCEFEAFLNKANRHKSNDLSIIFGLEDVSAYGRNLAVFLHSKGFSVKHVNSSLVAHERNSMNTLNKSDDYDAECAARVLINRFDALPEFNPYDKFWTLSKLVRRRNSLVKTGMSLKNHLHDYIMQHYPSYKKWFPTIESKSSLAFFGKYPSPAKLEGVTETDIVGLFQKESKHSFYKDKKAKLILECVRKDGYTKTDHQEFIDEMIISTVKELKSVIAETKEVEKLIREFLPKFGYKLQSMRGIDDIAAANLINEIGDIERFPTAAKLSKYAGISPVSYSSGKTDLQFANERGNRKLHGILFKISVTLCNTGGRHKRITNPIFYDYYQKKISEGKTSKQALKCVQRRLVNIIFSMMKNKTEYQNPPTRKLED

SEQ ID NO: 184021 - protein, 396 aa, unidentified
MASVGIDIGGRAHVAAHCRAGEPKADRKVLRIAQSRAGFDALDAWLAAGPEPVDQVVMESSGHYWIPLASHLGRRRVPVSVVNPLAAKYFAKSRLGRTKSDPADARSLAEMGMREPLPTRDPLAGLELRQAARFAMTLVAEQARVCQRLYRLVELGFPELRELFDDPTCRTARAVLRLAPTARAATRRRTATLADANRGPGRRRLGEARAERLQAAAADSIAVPELEAEVTFEVALLLDQFDLLERQIEAADRHVAALLDGETARRLQTIPGVGPATTATLIAEIGDIFRFTDFDQLLAYAGVHPAERSSGTKGARPDTSWHMSKAGNSHLRAAAYRVAVVGIQHNPVIAAHYARKRAAGKSPMNALGHCMRKALGLVWGVWRNGVDFDPNWAARA

SEQ ID NO: 184022 - protein, 406 aa, unidentified
MLVYLGIDWSEQKHDLSFQNELGAEILHLRIPHSENGFLTLNQSVANLGASPAECMVGLETAHNLLIDFLWAHGYTQIYVLPPNLVKSNQGRHRQSGAKDDRCDAALIAELVRTDRSHLFPWRPGSLLLQQMRAKVSYLYFLTRDIVQHTNRLRSILLRYYPAATQVFSALDTKICLDFIQAFPTPQQAAQLDFETFSAFARSHHYPQPKRLLLNYARLQQPQPIPAAETVQAFQDEAVQLCQLVKMLVQRKEETLQELDRLYQQHPDHVIFASLPGLGARLAPAMLVKFGEDRQRFPQPELVQALAGTCPITVQSGKSKYVRFRQSCDHEFRHYVQQWAWHSLQHSSWAEAYYLRVRPNCRSDSHALRCLGNRWLAIAWKLWVSETPYDETYHLRQHALRLRPRA

SEQ ID NO: 184023 - protein, 408 aa, unidentified
MKTLHRRCAGVDVHSANVVACIRVMTKGKVRHEVRRFATSTRDLVALRDWFEAEKITHVAMEATGVYWKPVWHILEEKFTLILANAAHVRNLPGRKSDVNDATWIADLLAHGLIRPSFVPPAPVQELRDLTRTRTQLMREAARHIQRIQKALEDANIKLTEVISDIAGVSGRRILKAIIAGETNAQKLAALGSKRLKCSRPALIAALEGHVTDNHRFLIGQHFGMLEDLERRIAAFDKRIADVVAPFCHLVALLMTIPGVSRVSAEIILAEIGFDMTPFPTAGHLLSWAGMVPRLDESAGKHRSTRVRHGAPWLKPVLTQCGWAASRSRRSYLEAQFFRLKARRGPKKAVIAVAASILTAIYHMLTNHVPYHDLGPDHFVKRDVAATAAKLAQRIKDLGYDVQYSAAA

SEQ ID NO: 184024 - protein, 323 aa, unidentified
MQRIIIGVDVSQDFLDGHIRPTSVRQRFANTSGGIAELVAWIRPLAAERILFESTGPYQIAAVGALLAEGFPVVVVNARQVRDFAKAMNYLAKTDTIDAAVIAHFGEVATTKVRPLESEEIRTLRDLYDRRGQLVHMRAMEKNQRHSASVARASANVLHSIDKHIEYLEKQIHDLEQRMDRLIEKSAAFQARNEILQTITGIGPHVSRTLLVHLPELGQYTRQKIAALVGLAPFNDDSGEHVGHRHIRGGRNKVRVGMYQAAIAAIRHCPRMKAFYATLKARGKASRVAIIAIARKILILANALVRDMKPYEDRTNSICLKTT

SEQ ID NO: 184025 - protein, 325 aa, unidentified
MKKIFIGIDISSNTLDICLKIDGTVQYFSIQNELKAISAFFKKHAPKGTVVAMENTGRYNWTLFEVLAKLDLMVYVLSPLHLKKSLGLSRGKNDKVDSLRICSYIEKNQQESALWKPSSLSIRKVKILLTERESRVKMKGQLARQQHDYKLMKSLELDKELLKLNKKLIEAINAQLKKIESDIENCIMEDCELKKKAELIRSVPGVGKVVCWMMIAKTEGFTTITDPRKMACYCGVVPFEHQSGTSIRYKPRVSVFADKGLKTLLHLAAMSAIRLNNELRVYYRRKVEDGKNKMSVLNAVRNKIIHRIFAVIKNQTMYKNDLLLS

SEQ ID NO: 184026 - protein, 397 aa, unidentified
MYIVGIDIAKRKHEAAVIDGEGAVIIKPFSFTNNCSGYNRLLAMLAKAKLPLDEVSFAMEATGHYWLALFTRLQKEGFRVQVINPVQTNSIRSFYIRQAKTDPRDALLIAEVIRFGHFSESTLHPENIYELRELCRGRHAIVSMQADVKRKVVALLDQVFPEYETAFTNMFGDTSMAILQTCPTPKELSEMRLEELCHLIEVSSHKRFRMAKAQELQELARNSFGFAMAGDVFSTMIRLYAKHLDFLKQQVREMDRKIAEIMDTLDTPITTITGIGPTLGAYILSEIGDISRFSSAAKLAAYAGIDPTMRQSGEYNGVRNRMSKRGSPYLRHAIWLAASSAVLHDPALKLYFQKKRDEGKPYMASVGHACRKMVSIIYAVMRDNKEYVPCIPGEISA

SEQ ID NO: 184027 - protein, 401 aa, unidentified
MNAVGIDVSKGKSKIAIIRPFGEVVAKPFDIEHFPDKLAELCEYIHSLDGETRVVIEHTGKYSDPIANFLCRAGIFVCMVNAKLVHDYGGDTIRRVKTDKVDALKIAGYCLDKWAKLLRYEPAPENRKMLKTYNRQLSEYNKIKSMLKNNLISLLDQTFPGINELFSSPAREKDGHEKWIDFVLKFPHCECVGRLPRQAFTVKYEKWCRKNGYNFCPHKAEQIYAAALNCLPTLPDNDFSKTLIIQTVNQLNNLCETVAAVKTEMSKIASALPEYDTVLAMHGVGKTLAPQLIAEIGDIRRYPKRSSLARFAGIEPPENQSGAYNQHSRRISKQGSPHLRKTLFQVMCCVLQLSHEHEPTFQFIDRKRSEGKPYKVYMIAGANKFLRIYYARVTECLESAA

SEQ ID NO: 184028 - protein, 365 aa, unidentified
MIRCPESLWMIEREAKTMVDVGVDLHKNYSQVAVLDAWGEIRQEHIEHQGRDMEEFVRKLEPGSRLAVEATGNWWWFVDLVESQGHQVVMSNPKETKAIAHARLKNDRVDAEKLAILLRSGFLPQVWIAPAPIRYAKEVLRYRSLLVGMRTKLRNHLGAMLRKRNRQAPGQKLWGRKGRAYVESVALNPEADQMRGEALEQIKALDRLIGGWDQALGRRAKGDPLTRRLMSVPGVGVQTALAFQTFVGEVERFASAKKVASYFGLAPRERSSGNRRQLGHITKEGDSLMRHLLVEAALIATRRPGPLREFYRRLLRHKGKAKARVAVARKLTEILYQLWKQGCDYHGYLLRGLRTVGEPVIRTGL

SEQ ID NO: 184029 - protein, 330 aa, unidentified
MERNYIGVDLHKAFFQACAIDGTGGRLWEGRFPRTADGIAAFASRGIRGARVAVEAMGPTWAFVDALQALEVDVCVVDPRRTKLKAGFAAKTDTLDARRLADAVRRDSVAAIYIPSPAIRDLRERCRGRHHLVRVRAKLVQVIRALLLRQDAADPPVTCLYSPRGQQWLRTVGLPGAAGESLQRLGAALAAIDALARAAQAQVVAHATADPIADALTRLVGIGPVLALTLRAEIGILTRFATWPQLASYAGLVPRVEASAGRAWHGRITREGSPWLRWALVEAAIHAMRRQDATGRWARQLAVRKSVGRARVALARVLCRDVWRTWQTIG

SEQ ID NO: 184030 - protein, 373 aa, unidentified
MNYNTVYVGMDVHKESFTLRYYTFDMDEPSAAVKTQADYKQVLKYLDSIRRILGEECRFLCGYEAGCLGYTLYHQLQSHDIECVILAPTTIPETRGKKKVKNDKRDAGNIATCLANRSYRPVHIPSEQDEEIKEYIRMRSDHKTALKKVKQQILSFCLRHGYRYTDTKKTWTQAHIKWLKNLPAEGVYKEVMEEYMGTFTYLTDKIERLDRQIEEYAQKEEYQEPVKKLCCFMGIKTMTALTTLVEVGDFKRFPSPANFASYLGLMPGEDSSGPSEKRLGITKAGNAHVRRLLVEAAQSYGRGTAGYKSQALKKRQQGNPPAVIAYADRANERMRRKYYHMVLGNRKKPNVAKTAIARELSCFIWGMMTEHTD

SEQ ID NO: 184031 - protein, 343 aa, unidentified
MDKIATIGLDIAKQVFQVHGADAQGATLFNRKLRRSEVRPFFEKLSPCIVAMEACGSAHHWAREIGALGHEARILPAQYVAPFVTRGKTDAGDAIAITQAMKRPDIRSVPMKTAAQQAATMVLHTRTFFVRQRVNAVNALRGYMAEFGLVANRGIAHFGKLVAALPERGDARIPPAARLMLDEILAEIETLTTRIQRIDDQIAAHAKQDQDIRRLTAIPGIGTLTASAIQAHVPDPGCFKSARHFSAWLGLTPKQNSSGEKLRSGSISRMGNAELRSLLYIGAMGVLTAARRFGTRSGWLRRLMVRRPLRVAAVALAHKTARVVWALLTKGGSYHAPAELVES

SEQ ID NO: 184032 - protein, 347 aa, unidentified
MRFYTKQHQFYCGIDLHARTMYLCILNQDGEILVHRNMPAGPEPFLKAVAPYRTDLVVCVECIFTWYWLADLCAHEGIPFVLGHALYMKAIHGGKAKNDKIDAQKIAVLLRGGMLPQAYVYPAEMRATRDLLRRRIHLMRKRAELLTHVQQTNSQYNLPEIGKKLAYKANRPGVAERFADPAVQKSVEVDLALLDYYDQLLRDLELAIVKTAKQHDANTLYLLQTVPGIGKILSLVLLYEMHDIARFPRVQDFVSYCRLVKCAKESAGKRYGTSGTKIGNAYLKWAFSEAAVLFLRNNPAGQKYLARLEKKHGKGKALTVLAHKLARAVYYMLKRRVVFDLDTFLQS

SEQ ID NO: 184033 - protein, 364 aa, unidentified
MLYVGIDQHRKQLTVSVRDESGDAVLRRQVSTHWEKVRGFFREMGERTAAQGGYLVIVEICGFNHWLLKLLPECGCRETIVVQPEEQSRHKTDRRDASQLSEVLWVNRARLQEGLPARGLRRIQVPGPEEQADRRLTSLRYNAGRELTRTTNRVKAVLRRHNLEQECPTKGIHTKAALKWLRTLPLGAVERIELDQQLTRAHLLREQVRHLQLEIEARYAKNPPAQLISTMPGAAAYSALGLASRVGDVRRFPHPRSLANYWGLTPGSRNSGEVTDRLGSITKQGSALARFLLGQLVLHVLRDDPWMRSWFKAIKRRRGSKIARVAVMRRLATIVWHMLTRNEAYVCGGSPRARLKRQSAGARS

SEQ ID NO: 184034 - protein, 387 aa, unidentified
MLPNIHHASTEQTASDRPDLTLYASLELSRATWLVTCLLPERDRMSKYSTPGGDGGALLGLLERMRARAQQLTGRPVKIVVIQEAGLDGFWVHRLLEANGIESHVVDAASIAVPRRRRRAKTDAIDGETLLRTLLAWTRGEPRVCAMVVPPTPEEEDRRRVCRERAILLRERIRHTNRIKGLLAGQGIRDFNPLHKDRRQLLDAARTGDGRPLPHQLKAEILREIELIELLLRQIADVEAARELLAGPKAAKAPSPVVLLQQLKGIGPEIASVLYFEGLFRSFGNRRQLAAYAGLAPTPWRSGTIDQEQGISKAGNPRLRSTMIELAWLWQRHQPASTLSRWFHTRVGNERGRIRRISIVALARKLLIAVWRYVTQGEVPEGAVLKA

SEQ ID NO: 184035 - protein, 426 aa, unidentified
MGMGKFTKTLCISERKEYSIMEGPIITVDVSKGSCHYQPFIENGHPMRKPKQLSATIDGFQKLGQTIKDLEAKTEREDIPVIFEATGVYHRPLQKYLEDHKIRYYIISPLLSATYRKTDLHSNKTDALDCAHIAKAYYCEKELRQYQAQPQEYKRLYQLSRIYESELVHLRKRKVSLRSMLDIIYPRIDKTFKGNQNLYDPIPMEILKRYPHPSLLLSHREDTIVKTVGHRTGHLKGYTERIVHKIYEKAKECYSGCDINDIEVLKLPSLIENVQEQKKKCDSLLKEMIEIARTCPYFASVVSIVGIGENLAARIIAELGDVSRFDNRAAIVAYAGLNPKIQQSGDIDGLHLKISKKGNKHLRCLLYLGAQCNYRLRKEDPLYEFTKKKRQQTQCPLSSKAAYTASAHKLLVIIYSLCKNGTLYHS

SEQ ID NO: 184036 - protein, 338 aa, unidentified
MHITTLGIDVAKQVFQLHGVDGRGRVVLSRRVKREQLLHTVASLPPCVIGMEACGSAQHWGRAFEQLGHTVKLMHPKYVKPYVKTNKNDRRDAEAICEAVSRPTMRGVSIKTVEQTDLQAVHRTRSLFVKHRTAVINQIRGLLAEYGVVMGRSPAKVRPALVRLLDDAASGLTALARETFAELYAQLTELDARIERVTHRVEGLFQAHPVCQKLAAVPGIGPMTATALVATVGRPHAFQNGRHLAAWLGLVPRQYSSGGKERLGGISKRGSRYVRTLLIHGARAVVQRAERRTDTQGRWLCALKHRKGTNVAAVALANKNARVIWALLAHEAAYRSPA

SEQ ID NO: 184037 - protein, 378 aa, unidentified
MGNFITHIGMDTDKKGYDIAIAEGFGSDNQEVRSWGRIPANPESLRKLVRQLRAKGHTRLRFVYEAGPCGYTPYRQLKAEGVECAVIAPSMIPVKPGERVKTNRRDAIKLARLDRSGELTEVNVPEEGDEAMRDLVRGRGASVEAATRIKLQIKGLLLRHGLTYTGTGERWSWQYRIWLKTIKFEHPAQNFVLQEWLVALSEAETRVERLTEQIKELLPKWRMYEVVKALQALRGVALLSAVGVVAEVGDMTRFKNPRELMAYLGLVPSEHSTGEKRRLGSITKTGNIRARQTLVESAWAYSKRPQLTRALQARQKGLSGEVIQISWKAQVRLCSRYKKLTSRGKSTRKAVVAVARELCAFMWAIAKAVETNKPQQAV

SEQ ID NO: 184038 - protein, 351 aa, unidentified
MRVVEDDGLIIGVDTHLDTHTAAICDARGRVVAQLQIPATTAGYVQVLAWARQAAGTRAVAWAVEGTRHYGLGLARHLTAQGEQVAEIDCSRHIGKRRAGKSDPIDAVRAARELLARPAPAQMRADGDREALRLLMIDRDNAVQSAKTARTALAAVLVTAPAPLRERIRPLPRERRARECAALTCPAGADRQTRVLHQALARLGQRIAALAEVAAELEAQIGEIVEEMTPGLVAAEYGLGYLSAAQILLSWSHAGRIRSEQAFAMLSGTAPVPVSSGRTDRHRLNRLGDRQLNRAIHTIAVTRLRCHQPTQAYAQRRRAEGKTDREIRRCIKRYLARHLYRTLTNGSLSGP

SEQ ID NO: 184039 - protein, 340 aa, unidentified
MDITTLGIDIAKSVFQLHGIDADGAVVVQKKLRRGAVLNFLGNVGPCLIGMEACATSHYWAREIAALGHEVRLIPPVYVKPYVKRQKNDAADAEAICEAVTRPNMRFVPIKTEEQQSVLVLHRARDLLMRQRTMILNAIRGHLAEFGIIAAQGPRQVMGMIARLRDDGDASLPEIARSALLALGAHLEALAGEIRTLERQLMVWHRADPTSQRLETIPGVGLITATALAASVSDPSVFKSGREFAAFLGLVPRQNSSGGKDRLGRISKMGDRYLRKLLVVGATSVIRRAGSNSTKTGAWVRSLMERKPARVVTVAMANKTARIAWAVMTRGEAYRASPIA

SEQ ID NO: 184040 - protein, 341 aa, unidentified
MKKFIRIGVDLAKNYFQIHALVSEGGPAVTRKLRRSKMHEFFSQIEPCLIGMEACGSAHYWARELKAMGHEVLLMPPAYTKPYVKRGKNDAVDADACCEAMSRFGMRFVPIKSAEQQATLMLHKTRELLVKQRTMSVNALRSHLSEFGIIAAKGIGRVDELLELAESDATLPNAARAGVKVLSQALEGLDKAIDDLEDEITSAHAQNEMTRLLYKVPGIGKIISSVIAASVPDPSVFKSGRDFAAWLGLTPRQNSSGGKQTLGAITKQGNRYIRKLLVLGATSLLNVMGKRKGALRDWIVGLLAKKPARLVTVALANKLARILWAMMKTGESFRTEMFAKA

SEQ ID NO: 184041 - protein, 385 aa, unidentified
MTIRVQVSKFIPRDYDVFAGLDVDKKSMSVVFTDHADWQRALRMANSATPLLNYVRKHFAGQRVAFAYEAGPTGFGLHDELVRQAYTCVVVAPSKVPRAPGERVKTNRLDSRKLAENLRGGQLQSIHVPTPVYRDLRHLVQLRDTHVRQLTASKLRIKSLLLFEGLPFPDPQEKWTARAMRELQTLPCSETVRFKLNDLLDTLHFHFQAAARTTKQIRQHCLDDPELQQSIELLLSLPGIGWIVASHLAARLGDPQQIKNGKQIAGFLGIVSSEHSTGEKDNRGEITRSGDSRLRNKLIQSAWTAIKKDPELRDFYRRIYQRHPKKVAARKAIVAVARKLTTRIYVVLKEQRPYVVRPDSSIAPLTAAETVGPRDRLDSAQNDQP

SEQ ID NO: 184042 - protein, 463 aa, unidentified
MKHNPKREREGKKERVSISLLERIQPDAAGIDCGQNSHFVAIPPDRDPQPVREFRTYTGELERLADWLAECRIKTVAMESTGVYWIPLYEILEQRGLAVVLVNARDVHNVPGRKSDVKDCEWLRELHSVGLLRSSFRPSAAMVPLRAFMRQRQTLVEEAATRIQRMQKALTEMNLKLHTVLSDITGQTGLKIVRSILKGERDPERLAGYRDPRCHASHAEIVAALTGNYRAEHLFALKQNFAAYEFLLQQIAECDSEIEALLTALADQQPPPAAPLPEARSTQISKHAPGFDIRNPLHRLTGGADLSQIDSIGPHAALQIVAEIGTDMRRWPSEKHFTSWLALAPSNKVSGGRLLSSGTVPSANRAAAILRRCAMSLTRTSTALGAFYRRLAARTGKVKAITATARKLAVLVYRVLSGNLVYNDPGATAYHQLHRARELKSLRKRARLLGFHLVDHTTGEVTL

SEQ ID NO: 184043 - protein, 338 aa, unidentified
MRLYCGIDLHSNNSYIVILDEKDQVVFKKRLANDLLVILQHMSPYKSSIVGVAVESTFNWYWLVDGLMNAGYKAHLVNTAAVQQYEGLKFSDDEHDARWLAHLLRLEILPEGYIYPAETRGVRDLLRKRGQLVRQRTSQILSIQNLMSRNTGQMIKGDIIQKWTAEDINLRLPDPLLATAVKSNWIVLRTLNGQIEELEKIVLQQARLKPQFKPLLTVHGIGPILGLTIMLETGDIRRFRKVGHYASYCRCVGSQQWTNYKKKGEGNRKNGNKYLAWAFVEAAHFATLKEGPIKRFFQRKAAKKNKIVAIKAVAHKLARACYHILRDQVPFDMNKAFA

SEQ ID NO: 184044 - protein, 343 aa, unidentified
MVEYVGFDVSKEETSFCVKDADGRVLARGKAATDPDALFAVVKEHCLCPELIVMETGTLCHWLVRALSTHGLRVVLIDARQAHAVMKLQHNKTDANDADLLAEIARTGFFRAVAVKSEDAQGDRMVLKARLHLVRQRRDTENAIRGLMASFGHRFPRGVGKFSRRVRAILEAHPELGAAIDPLLGARAALAACLQALDKVVMARAKASPACRLLMTAPGVGPVTAMAFASTIDDPGRFASSRAVGAYAGLTARRNQSGEMDYSGRISKHGDAMLRSLLYEAANSLLTVVRKAHPLKDWARRVKKRSSHKKACVALARKLAVILHRMLANGEAFRWPAKASVAT

SEQ ID NO: 184045 - protein, 423 aa, unidentified
MDHYDDSRLREFRQLKANIRGSKDHMVVGIDVAKDRHNAFFGMPAGRSLLRRLAFDNNRDGFEKLLFHADVIQRQNTLKKAVFGMEPTADYHKPLGEYLISKGHTVVLVAGSAVRNNRELLDGRWDKNDTKDAANIADLICQGKCLFYDHPSVHIRELRLLLSLKRKLKKQEHSYTVRIRNHLIAQYFPELDPYFSYSEGPAIVKWCLDPGKLHTLSFEEFSRMVLTRNGGERQRRRLDEIHRKASSSIGCAVMPSVSHEAGVLVNAVRQVREMIGQTDEKIALVCKEVPGYANLLSIPGFGPEISAKVIGALGDPRRFANHRQVLKLAGLDLSGDRSGKRDDVPVVISKRGKADLRYGLYQAALVASTKDRSFIRYFTDRMTGRERERGIGTKIRVKMAAKMLVIAWTIMKRKEMFDSRHIN

SEQ ID NO: 184046 - protein, 345 aa, unidentified
MTYFVGLDVSKDETAICARDEMGQVVLKAKSPTEPDAIAACLATLDQPPQCVILETGRTSNWLHGALVGLGLRAVCVDARQAHAILNQMANKTDANDAAMLAELARTGFYRQVAVKSRAAQEKRTLLQARALMIRQRQDVDNTVRGLLASLGLKLPKLRQRFPDRAAAAVEDRPELQAIIQPLLRAREGMVLALARLDRQLVQEVRSDPHSRRLMTVPGVGAVTAFAFVATIDDPSRFRSSRAVGAYLGLTPRRYQSGERDVSGRISKRGDATMRTLLYEAAMSLITRVRPSAGGPLQAWAHALRDRVGHKKACVALARRIGVLLHRMWMDGSTFEHRPGQPLPN

SEQ ID NO: 184047 - protein, 457 aa, unidentified
MMETKRRCEQRSMLPVHPDAAAIDIGATVHVAAVGPARDPEPVRSFGTFTGDLHRLADWFAQCGIKTVVMESTGVYWIPIYEILEQRGFEVRVVNARDAKHVPGRKTDVSDAAWLQRLHEFGLLRGSFRPQGAIAALRAYLRQRERLLDYAAAHIQHMQKALTQMNLQIHHVISDITGATGMRIIRAIVAGERDPDTLASYRDIRCHSSAETVRQALIGNYREEHLFALAQAVELYEVYQAKVATCDEKIEGVLERLKQPGRAPAKPLRAARHKTRQPNAPAFDARGALYAVLGVDLTQIHGLGPYLALKLISECGTDLSAWPSAKHFTSWLSLAPGNKISGGKILSSRTRPSGNRAAALLRLAATTVGRTETALGAFYRRLSARIGKAKAVTATARKIAVLFYNAVRHGMDYADPGASYYEERYRRRVLTNLQRRAKAFGYVLQPTEIKVVSMAVS

SEQ ID NO: 184048 - protein, 329 aa, unidentified
MGKAQTARQPEVGEDASRVVIGIDVAKATLDVWVAPEGVGSTVANDAAGIAELVQQVRERGAGLVVLEATGGYEYAVVVALSAADLAVAVVNPRQVRDFARATGRLAKTDRIDAQILARFGTAIRPDARPLPSEEIRDLDALVTRRRQLGEMLQAERNRLGLARGAVAKQLRQHIIWLARQIKAVEDDLQRRIEASPVWRAKEDLLRSVPGVGPTTAFTLLAELPELGTLSGREIAALVGVAPFARDSGTHRGKRVIWGGRASVRTCLYMAALSASQHNPHLKVFYQRLLTAGKPKKLALTACIRKLVVILNAMVAQSTPWDPHITPNP

SEQ ID NO: 184049 - protein, 412 aa, unidentified
MEGETVIAGVDTHKDVHVLCLLDGLGRKIWSGSFGADPEGYDRLAEAIGDPGSCMVVGVEGTASYGAGLTRRLAELGYNVVEVLRPKRDKARPGEGKSDPLDAERAARKAASGRGCSVPKSQDGWVEAVRQLYVARRLAVATSTSCVACAKSMLTTAPSALRERFRGRERPKDLMPLLARGRKAGDALEESVLASLRSVAAVWKEARSQVESLDERIRALLEANAPALLGVEGCGTTTAAALVVAAGDNPGRLKGEAAFSMMCGASPIPASSGKTDRHRLNRGGNRQANWALYEIAIKRMAYDERTRRYVARRTSEGKSRREAIRCLKRYIAREVYRVLMDPNPDGAAPEGPELAKMRKAMRVTQKQAAAGLGMSAASLGHLEHGRRRSTKLERRYYELLCELKGALPQTAY

SEQ ID NO: 184050 - protein, 349 aa, unidentified
MNAPHYIGFDVHKKTISFCVKTAAGEIVEEGSTPAQRAALREWASVRPHPWRGAMEATLFSGWIYDTLKPYGEQLEMAHPARMKAICAGKKKSDTIDARTIADLVRCNLLPSCYVAAPRIRELRRLLRYRSLVVSEAVRMKNKMAGLLMETGALYVKEKLHRKKYFASLLEELEEVPESVIDLLRLSRRALEMFESTQKRLVRELLADSELAQRVQRLMSIPAVGEITALTWALEVGDPQRFRSCSEAMSYCGLTAALKSSAGKQQRGPISKQRNRWLQTTLIEAAKLAPRWNPQLAALHARELERGHRNRATLAVARKLVAYLLAVDKTRQPFQVRGLSSEDLLQKAG

SEQ ID NO: 184051 - protein, 351 aa, unidentified
MKLEPTAQPKLYIGIDIHKRSWKVHCATDLFGGKSFAMPPKPEVLYEYVAKHFPDHQVTTAYEAGCCGYYAHRSFEAYGWHSLVVNPADIHRKGKERFTKTDKIDAQLISRELKDGRLESIHVPHVEREQLRSLFRRRNDLVKDYRRIKSLIKMQLLYFGIAIPEEFDNDHWSHKFRGWVDEVVFAYPSARETLDSRMRSFRFIDQELRDVSTKMRAYCRKHYKKDYYLLKSIPGIGGIVACGIICELGDLRRFNSIKHLAGYVGLAPGIHQSGDNQKSTGITMRAHRLMRSYFIEASWQAIRTDPIMQTYYRKHLGKNVKSIIIKVARKLLSRTLAVIKTETPYAIGVIE

SEQ ID NO: 184052 - protein, 338 aa, unidentified
MAIIATGIDLAKNVFAVHGVNVGGTVLLRQPKVSRAKLGALIAALPPSVIGMEACSGAHYWARLFQTHGHTVRLMAPKLVTPYRMTGKRGKNDAADAAAICEAMQRPNMRFVPVKTEEQQSRLMVHRVRQGFVTERTACINRIRGLLSEFGIVLPLKAEVVRQEARNHLEDLPGYANLVIGDLLSEVAHLDERVKQYDKHIHAMAHDCTAAQQLMQLMGVGETTATAIVAMVGNANEFSCGRQFAAWIGLVPGQYSSGGKARLGRITKAGDPYLRSLLVMGARSVLNAAKGKTDSLSRWAVAVEARRGYWKAVVAIAAKNARMCWAVLSRGESFRLPA

SEQ ID NO: 184053 - protein, 373 aa, unidentified
MREPTTFVGMDVHKRDIAVAMLVEGQPGPVEWRVANEPTAVKRLARKLQHEGGGTVRCVYEAGPCGYALQRQLEGQRLACDVVAPSMIPIRPGEKIKTDRRDARKLAELARAGLLTVVRPPSEDEEAVRDLCRGRDDARLDLVRSRHRLGKFLLRRGRVFGTGSRAWSQAHRWWLGTQTFERTAERVMFEDYLLAVEQTEVRKRSLEQHLEDLAREPLYAERAGWLRCFRGIDTVTAITLIAELHDFRRFRSPSQLMAYLGLVPSEYSSGPHQQRGGITHTGNRHVRRLLIEAAWHYRHKPRVGEKLAARRHGQPPAIIALADRAQLRLCRRHRRMARQGKHPNKIVVAIARELVGYLWATLTPAAQSAFGTR

SEQ ID NO: 184054 - protein, 349 aa, unidentified
MREHLRGIKYVVGVDTHKASYTAAVVSRAGAELETLTVPADAFGHRKLLAFAHRVGNGPRLWAIEGTGSFGRGLTTFLLESGETVGEIDRPARPARRNGAKADDLDAVRAAREAIARPHLSQPRRRGLREALRVLVRTRTTAVRAKSVAICHLKSLIVTAPTGLRDQLRNLSDIQLAPKCARLRTTVKQSPEHRATIAAIRATARRILWLEAEAEDHASAIELLVQEIAPQLLKEVGVGPLTAAELIIAWSHPGRVRSEAAFAQMAGVAPIPASSGQVTRHRLNRCGDRHLNCALHQIVLSRLFHHGETKAYYERRRAEGRSPKEIKRCLKRYLARRIFRLLEASSMAT

SEQ ID NO: 184055 - protein, 337 aa, unidentified
MRHFGIDVHLRASEICEVDGGGGVVGRDRISTTEASLGRFFGGRGRWRVVLESSGMSAWVARLLEEVGHEVVVVNPRRMRLIAESTLKCDRVDAEVLARFSRLDPTLVAPVYQRSQEAQELRTRLRVRQSLVRTRTGLINAVRGTLRAHGYRMGSATARRFVGHFVELKLSAELRSALDPLIETLAGVTARIEQLDRELEALSRSDELLERLQTVPGVGPLVGVSFVAWVDRAERFTRSRDVGACLGLRPRLRASGGQEQRGRITREGDSEMRRLLVQAAHAALRSRQDSALKHWAEQLAMRVGKKKALVALARKIGVLLHHLWVTGESFEPFPQAA

SEQ ID NO: 184056 - protein, 346 aa, unidentified
MRYSTTVGVDLAKNVIQVSVVSSRGKELLNRSFTRRKFAEFLANQKASLVAFESCASAHYWARTAQRHGHEPRIIPAKAVSPFRQGHKTDSNDALAVAEAARRPNIKDAPMKTLEQQGLQSIQRSRELLIQECTALSNHLRGILLEFGVTIPLGFASLLKALPEILEDGENEISDLYRPTLHRLHHRMLELRRDIETMTKEIDMLVKQHPVCSRLTAIEGIGPIGALSLYAVLGSGDAFTKSREFSAYLGLTPRQFSSGGKTNIIGISKKVGNRRLRSILINGARAYVFRMKEPKSSKDRWLKELIERAGVNRAAVALANKNVRTAWAMVSQGTEYQRRLNLEVAA

SEQ ID NO: 184057 - protein, 334 aa, unidentified
MQESCKVAICATVGIDVSKDQLDVVLRREEREQPRVYANRATGFRDLHRWLQGQDVQPQQTQVALEATGSYSDAVALFLYEQNYRVSVLNPAVLVDYRNSVNVRSKTDALDARLLARYAQERRPRLWKPLPPEMQTLRFLLARREDVQHMLQQERNRLHAGRMDDWIRTRVQQHVTQLDKEMGAIWKRIMGHLKAHPSLKSQWRRLQTIRGIGPIGAAALLAEVGEIERFDDPRALVSLAGLAVKRHDSGRSVHGTPKIDRHGRTGLRRILYLCAVSALRWDAHMQRFAARLQARGKPLKVVRVAAMRKLLHIVYGVWKHEADYDPTLAFPEVA

SEQ ID NO: 184058 - protein, 797 aa, unidentified
MPPLRRVLSVYLQPNDSAELRVGDQLRVKVLLQPPPFPALPGARDRQFEAWFANQAGSGRALGHVQRVTIAQTGQGYKLQLWFESLRERINARIHTVLPGPEGGVAATVLVGASETVEKQVREDFAASGLAHLLAVAGLHLGIVMGLVMAASRLLLATTEYTALRWPCKALAALCAWGVGLVYVLLTGAHLPAQRSLLMAAVAVLGIAAGRRVVSMRGLAVAACVLVLCMPQVVVGVAFQMSMAAVMALVAGYEVLQPKLTRWRASKPGFGHWLAWHSAVLALTSVLAGCATLPVAMAHFGVIQPFFVVANMVAVPLMAVWIMPFGLLAVGFMPLHMDTPFLWLMGAGVRPVIWLAHIVAHWPAARMAVPHMPGWGVLAVMLGLCWICLWRQRWRWVGCAGLVLGMASPWLVAQPDVVISPDGGLVGVRWGGCRPPRTASQCARMVVGRNDCAKGRQMKDTVIGVDLAKNIFQVHGASRAGEVMFRKKLRRQQFMQFMATQPPALVVLEACGSAHYWARELAGAGHEVRLIAPQYVKPFVKRQKNDAADAEAIVIAARQPEMRFVEPRTEAQQARGVLFRARQRLVHQRTELVNALRAVLYEFGLVVPQGIAHIRHIEAMLDEAVLPEAVKQECLDPLRQISEQSVRIDVRTKKIRMLAQESENTCRLQSMPGVGPLTALAIEAFAPDLQSFRRGRDFAAWLGLVPRQFSSGGKERLGKISKAGQADIRRLLIMGAMTQVNWASRKAPAPGSWLARMLARKPRMLVAIALANRMARAIWAMATKQEDYRDPALSVAA

SEQ ID NO: 184059 - protein, 346 aa, unidentified
MKKVSTVRAAQSRNISQQKLTIGLDPGDRNSWYCVVDEAGQIQLEQRVRTSAKALQEVFGAMPRSRIALEIGTHSPWISRLLREWGHEVIVANARKVRLIGESRKKDDRLDAQTLARLARIDPQLLSPVKHRSAQAQADLTVIRARAGLVRARTALVNTARGLAKSYGERLLGCNVCNMNPEKAEGLSPELQRALEPLLSAIESLSERICEYNERIESLAQQSYPQVVLLKQIKGVGTLIALTFLLTLEDPHRFGKSRDVGCYLGLQPERRNSGQSEPQMHISKEGDPYLRTLLVQGAQHILGPFGIDRDVRRWGLKLAERGEETERSAPSWRLREGWRCCCITYG

SEQ ID NO: 184060 - protein, 341 aa, unidentified
MEKNTYFIGLDIACDDFVASVYESPGKPVITKEAIENNPDGFSMLVSWLKEQGINSSNSVICMEATGVYSEACAHYLSANGFKVSVEPPLKVKRAFDPIGHKTDAVDSRQIAEYAYRYNDELRFWQPKQEIVEKIKQLLTAREQFTKQSTAIQNSIKAYEKHVIKVPLIINAHQETLKELKKHIKAIDKELDRLIRQNPTISQITGQLKSIPGVGLLLASDLIAITGAFNDISGHKTLAAFLGICPYQHQSGKSVYRQPHMRNFGPNYARKLLMLAARSCATHNIEFRKYYMRKLAEGKAKQLVLNNISNKIIKIACALIKNNAQYNETYRSVNPLCFNLA

SEQ ID NO: 184061 - protein, 342 aa, unidentified
MKVTTVGLDLAKNVFQIHAVDGRGKVVVRKQLKRDQVAPFFAKLEPCLVGMEACASAHHWARKLQGFGHNVRLIAPQFVKPYVKANKNDAADAEAICEAVSRPSMRFVAVKNVAQQALLAMHRVRQGFIKARTAQGNQIRGLFGEYGLIIPQGIGHIAKRVPSLIEDASNELPGTFRVLIDRLLEHLKALDQQVAELEAQITAWHRESEASRRLEQIPGIGPITATALVATMGEARNFSNGRQVAAWLGLVPRQHSTGGKATLLGMSKRGDAYLRTLLIHGARSMILALRRKANPAGWLHSLVKRRNANVAAVALANKNARIAWALLAHDRNYRADYVGAAA

SEQ ID NO: 184062 - protein, 441 aa, unidentified
MAMRKRDDEAAFPNAAGIDVGASSHWVAVPKHLADEPVREFGAMTDDLNALADWLLACGVDTVALESTGVYWIPIHEVLEQRGLKVWPVDARQMKYVPGRKSDVQDCQWLQRLMSLGLLRAAWRPGDEVCVVRAVVRQRDVLLTEQGTWVQRMQKALVQMNIQLTEVLSDVMGMTGQAIIRDIVAGERDPLVLARHHNRRIKASKDEVTKALTGNWRDEHLFLLMQSLAIFDDLAKRVQECDSKIEALLAPLQRHTVKLKASLKGKGKNNPSFDVRQAMANWAGVDLTRIDGLGVSIVMKLLSEIGADLSRFANVKHFCSWLGLCPGTKISGGKVLAAGTKRSANRARQALKMAAMSLSRSDSALGAFYRRLCSRMDKPRANTAVAHKLSRMVYFMLTRGEEYVDQGRERYEEQQRQRSIAALRRRAAALGFQVAPVDAAA

SEQ ID NO: 184063 - protein, 356 aa, unidentified
MDNSNKLDFRGQPIFIGLDVHKKSWSVSIQSAVCEHKTFTQPPEVDTLVNYLRRNFPGASYRSVYEAGYSGFWVHDQLTEKGVVCTVANPADVPTKDKERRGKRDRVDCRKLARSLRAGEIEGIYVPCREKLEDRSLVRTRQSMVRKQTRCKNQIKSILLFYGIAIPEDWAERRWSGPFVKWLESLPMERASGEVALRIHVEELKHLRQILARLDREIRVLAQTGEYRVQVWLLRTIPGISTLTAMILLTELQEISRFRSLDELASYVGLIPDTHSSGETEHTGDITQRRHAQLRASLVEAAWVAVRKDPALLMAFQESCQRMRKTRAMVKIARKLLNRVRFVLKNQTPYRMGVVQ

SEQ ID NO: 184064 - protein, 410 aa, unidentified
MELLHRRCCGLDVHKETVVACLRLVSDGKVTTEVRTFQTTTADLLRLSEWLAANECTHVAMEATGVYWKPVWHILDDGEFALVLANAAHVKNVPGRKTDVNDAMWLAELLAHGLIRASFVPDTQTQEMRNLLRTRKQLVREQSSHVQRVQKTLEDANIKLDSVLSDLMGKSGRAMLEALIAGETNPTKLASLAHPRAKASPEEFREALRGRVTKHHRFLLRLHLNQIDALNAAMATVDAQVEANLGPFRTAVELMMSIPGIKNLGANVIVSEIGIDMSRFPSHAHLISWAGICPRNDESAGKRRSTRLRKGAPWLKTTLVQCAWAAVKKKGSYLQAQFYRIKARRGPKKAIMAVAASILTAIYHMLKDGTMYKDLGSNHFDRRSTDQQKNRLIKRLADLGYVVEITPIAA

SEQ ID NO: 184065 - protein, 341 aa, unidentified
MGEITTIGLDIAKSVFQVHGADASGSVVLRKKLSRGRLLAFFASQPPCLVAMEACSGSHHWGRELARLGHTVRLIPPAYVKPFVKRQKNDETDAEAICEAAQRPTMRFVAVKSAEQQASGVVFRARDLLVRQRTQIFNAIRGHLAEYGHVAPKGVCYVERLIAEIGSPESELPEAARASLQALVDLLPKLEEQIAGLDREIARRAKEDATARRLTTIPGVGPISATALVALAPPAEAFRCGRDFSAWLGLTPVQRSSGGKQKLGQVSKMGERTLRRLLVIGASAVIKQALIRGAPAGSWLAQMLARKPRMLVAVALANKMARVVWALLVRGGVYRTPALAA

SEQ ID NO: 184066 - protein, 368 aa, unidentified
MACMSEAFVAFDTSKMRNAVAIAESGREGEVRYFGEFDNTGAATRKLVARLEGKYQPLTFCYEAGPTGYGLYRLIKSLGHDCMVIAPSMIPVKPGERVKTNRRDAVNLAKLLRAGDLTAVWVPDDQHEAMRDLTRARDAAAKDYRGKRQQVSSFLLRLGRHYPGKKTWGKTHLNWLTSQKLEHREQRIALEEHLFAVRQAKERIERLEQAMRESIADWSLAPVVEAVQAMRGIDLITAASFLAEIGDLQRFENPRQLMAFLGLTPSERSTGDTVKRGSITKAGNARARRLLIESAWSYRFPPRVSKEKQAKVEAAPRAVREIAWKAQTRLCGRFRTLTRKGKRSTVIVTAIARELSAFIWAINREVAG

SEQ ID NO: 184067 - protein, 446 aa, unidentified
MPFIGLDVHKDFCEVAVVEGGACWSGPRVRSTPEDLEVFGQSLGPKDHVVLEATGGALAIVRILERYVGRVVMANPMAVGAIASAKAKTDRLDARTLAKLLAAGFLPAVWLGDERTRLLRRLVSRHAQLVRQRTRAKNQIHAVLQRTLRGRPPASDLFGKRGRAWLDDQDLPADERETVQASLRHVDFLDGELRLVDRTIAEQVLAWPEVRRIMTIPGMGATAAAGVMAAIGDIGRFPTPRHLVGYLGLDARVRQSGSAPARHWRHLQAGLSEASHLLVEAAWAAVRTPGPLRAFGERIRARRGANIAIVAVARKLAVLCWHLLSREEDYAFARPSLVREKVRRLELSAGVPRRPGQRNPIFATPAQRRLEREIGVQAERAYRRFVKDFKATGKKGAVAATGAHISSARKGQAARHQGQAPNPALCSGSPAPPTSCRGRAQMSTPT

SEQ ID NO: 184068 - protein, 310 aa, unidentified
MSTLPSSVLSIDISKDVLDTDAWPKPWRRRVGNDSAGIGAILVEAKRREAFVVFEATSVYDRSLMAGLDAAGIAYHRANPRKARDFARSSGFLAKTDRMDAAMLAQYGRSIALRPSEPVAPERQTLRALIDRRDQLVTMRKQERTRRHQIADKTIGEEVNENIAHLTRQIAGYETRIRTHLKAHPELLKSVQLLSSAPGVALITAASLVAFLPELGRRSAKAIAALVGVAPLARDSGRFRGQRRIWGGRRSVRSLLFLAARHAEKNAAFEPFAQRLKDKGKPIKKIRIAVARKLLIVLNLMIANGRPFYT

SEQ ID NO: 184069 - protein, 350 aa, unidentified
MAVITMTDTAPRITGGVDTHRDVHVVAALDKRGGQLGVESFPATLAGYRRALCWLRSLGAVERVGVEGTGTYGAGLARYLHNNDITVVEVTCPNRQRRRSHGKSDPVDALSAARAAQGGEATAQPKTRTGNVEAVRALRVARRSAVKARNEALNQMRALLITGPEQLRAAFAGTTVWRMVTTAARLRPADPTTPAGATKYALRVLARRVQQLEADMKDLDAILVPLIVKTASGLVARHGVGPDTAGDLLVSAGDNPQRLRSEAAFAHLCGSSPIDASSGLVVRKRLNRGGDRRANQALWRIVMVRMVSDPRTRDYVERRTKEGLSKREIIRCLKRYVAREIYPDLLAATT

SEQ ID NO: 184070 - protein, 353 aa, unidentified
MKNQAIQYLALDVHQATTSATLRDAFGAIRQRATVRTTARDLVSLTRGAGARVHVALEEGTQAQWVHDLLEPHAERVVVWRARDLGGNKNDRLDVDRLSELLRMGSLTPVFHRVANVRTLRELTRSYVTLVEDATRLMLRIKAIFRARAIPAKGIRIYSSAHRQEWLRLLDERGVRMRAAALYRQLDLTMELRHRAKAAMLAEARRQSAWKILTSIPFFGPIRSALLLAIVITPHRFRTKRALWPYAGLAVVSRSSGDHEVDGARLRRRRRRPLTRGLNPNHNPILKAVFKGAANAAALKAGPLRERFEASVRRGVSPDLAKVTLARTIASVMLTLWKKGELWDPSKLTMQPT

SEQ ID NO: 184071 - protein, 337 aa, unidentified
MKTTTNTTAPPGFFLGIDVGKKDLFCHITGPGQPCSERFDNSPGGVGLLLKWLRKEADPALLSACLEQTGHYGDAIAEALHESPIHSLHLVNPQRIKAFGMRKLRRNKSDTADAKLIARFLKSEHLELRPWQPRSLVQQKITALGRCADALTQDAARLKTSLEGTTDKTVTATLRRLIATHEKEIKKLRLKIKDLIATSPELTTRNGLLRTIPGIGEVAAQILMAELPDPAGFEDARQLAAWAGLTPKHHASGTSGRTKTPITKIGSVRLRRGLFMPAMTARVYNPLLKTFADRLIANGKKPKQVIIAVMRKLIHQIYGILKSGLPYNPEKRGFAGT

SEQ ID NO: 184072 - protein, 327 aa, unidentified
MSNTTMRILGLDIAKATFEAALLNSRNTVHRESFANTPKGFGQLRTWLKRHGRGPVHACMEATGRYGEALALFLRDQGHTVSVVNPARIKAYGQSQLKRNKTDRQDALLIADFCRTQQPAPWTPPAPEWRELQELERQLDDLQVELQQHKNRLGAGYASETARHNEEQIVTFLKAQIAALKKQIQDLTDTHEHLKRDRELLRSIPGIGDLTACKLLGEIGDFRRFKNADQVAAFIGLTPSQSSSGRTIYRPPRLSKTGSRLARKHLFMPCLVAIQHNPAIRALSERLRAAAKPPMVINGAAMHKLIRQCFGVLKSGEPFALQLAMPH

SEQ ID NO: 184073 - protein, 315 aa, unidentified
MKYHIGIDISKRDFHVCFDEGEIIEKFGTTETGIDSFLSALRKKNMTTGRTLIGMEATGSYHLPVAYQCTQAGYTVNVINPLITKRQNQTTLRRVKTDSADAKLVRQCVKNGAGYPFCETAETIKVKTLVRQRARFSMLRHRSRLKDEEVVNRERYLNVKITALDKDLYDFLDERIKTLDAELRTYESSTQKLLQSIPGVGPQTAVTCLSEVGDIRRFPDGQKLTAWVGLDPRVHQSGTSINGKGYITKRGNKLLRTRLFNAASVAVLHENMFQKFFLQKRSEGKAYRVALCAVMRKMVHVIHAVWTRGTPFINS

SEQ ID NO: 184074 - protein, 353 aa, unidentified
MTSTLASHLVGTEFVIGVDTHKASYSAAVVTTSGAEVDTLTVPSDAFGHKKLLAFAQRVGAGRRLWAIEGTGSFGRVLTTFLLEQGEAVAEIDRPARPARRNGAKTDLLDATRAAREALARQHVAQPRRRGLREALRVHARTRTTAVRAKSIAICHLKSLIVTAPGPLREQLRRLSDAKLAPTCGRLRTTLTQTPEHRATVHALRATARRILMLEAEAEDHASAIELIVRELAPALLDEPGVGPLTAAELLIAWSHPGRLRSEAAFAQLAGVAPIPASSGQVTRHRLNRCGDRHVNCALHQIVLARSIHHEETRTYLARRTEEGCSPREIKRCLKRFLARRLFRLLERSVMPS

SEQ ID NO: 184075 - protein, 410 aa, unidentified
MDVVYPRCCGIDIHKKTAVACVIVSETKGPPHKEIRTFGTMTDELLALADWLAAEGVTHVAMESTGVYWKAPFNLLEGQFEVLLANAQHIKAVPGRKTDVKDAEWIADLLRHGLLKASFVPDRPQRELRELTRYRTALVRERAAEANRLQKTLEGANIKLGDVATNVLGRSAREMLEGLVAGTADPSTLAQFARGRMREKIPQLVRALAGHFAAHQRFMVAQQLAHIDYLDEAIERVSTEVAERLAPFDTTIDRLDVIPGVGRRTAEILLAEIGTDMTRFPSAGHLASWAGMCPGHHESAGKQHDGKTRKGSPWLREALIEAAAAAGKTKDTYLAAQYHRLVRRRGRNKAAVAVGHSLLVIVWHLLQHDCPYVDLGSTYFDERDRTATQRRLVHRLEQLGYSVRLDRSAA

SEQ ID NO: 184076 - protein, 392 aa, unidentified
MVCVGIDVAKDKHDCFILSSEGAVLTDVFTIANNRDGFETLLQRIHSCTRPSDIIKVGLEATGHYSYNILGFLLEKGLHPYLINPLHTNLYRRSLSLRKTKTDRIDARTIASMLMSGVDLKSYTDTAYHNEELKSLTRYRFDKVRERAKLKTSISRLVNILFPELETLVPSLHMASVYTILSEFPGAKQIAETHLTHFKTVLSDASKGRYDREKAVEIREAARRSIGSAMPAKSLELRHTIRLIRELDKEIAEIEAAIKAIIDETAPPILTIPGISYRMGAMILAEIGDFSRFDSPDKLLAYAGLSPSTYQSGKRNASGAYAHMEKRGSRYLRYALFNAARYVCVWEPSFAAYLAKKRAEGKHYNVALSHAAKKLVRLIFALQTSGRAFQPA

SEQ ID NO: 184077 - protein, 411 aa, unidentified
MEVIVRNGCGVDVHKRTVVACLRWIDPGGQLHKETRTFGTVTQELLALSDWLSEHEVSHVAMESTGVYWRPVYNILEGQFELLVVNAAHIKNVPGRKTDVADAEWIADLLAVGLLRGSCIPERDTRELRELVRYRKSLVRDRTAEVNRVQKVLEGANIKLSDVATDIMGKSGRAILEGLIEGEDAAEALAELSKGRLRNKREELAQALQGRMGAHQRFMLRELLGHIDYVNQTIERLESEIEERQRPFEEEIERLKGVPGLQERQARVVAAELPDVSRFPTAKHLASWAGLAPGNNESAGKRKSGKITQGNPTLREALIEAAWAAVRSKNTYLSSMYRRLAPRRGAKKAIVAVAHSMLISIYYMLTRGTDYIELGSTYFDERHHLHTKNRLVHRLEALGYQVTLEAAPAAA

SEQ ID NO: 184078 - protein, 359 aa, unidentified
MRIIGCDLHARQQALAMLDTETGEIVNLTLMHEGNEVREFYSQLPRPVLVGIEATGSMHWFLNLMEELGIECRVGHPATIRAAAPRKQKTDRRDAELILQMLVEKRFPAIWLPTKELLDLRALVLHRHQWVRIRTRIQNALQAIALANGLRRGPSLWSYDGQAKIAFLALLPHASYRRSMLQEMYRKMKEEIENLTQQVAEQAGQRCGARLLMTHPGVGPVTALATEVFLGDARRFVDGKALASYVGLIPREYSSGARQRLGGVTKQGSPLLRFLWCEAGAHAVRRDPELKRFYRRKLVQKGLGKARVAVARKLGIRLWIMLRDEIDYQEFCRRGQKQQSGAACAGKPEVANGAKSPAD

SEQ ID NO: 184079 - protein, 414 aa, unidentified
MPIVGGLDLHRKQVTFDVVDTATGVCERGRIAPADRESFRFWLAGFEGQPVDLAVEGCTGWRFVVEECQAAGVHAHLAEPADVAGLKGRRQHAKTDRFDARHLRELLEAGNLPECWIPPQHVLEVRAKVRLYKDLLEERGGWQQRIHATLFHLGAPAQPDLLGPDPDRLVRLAALSPATRQTTVVALRMIDCLDRELITLRAEIVAFGRRQPGCLALQNEYGIGALTSVVIWSEMGDARRFANSRNAVRHTGLDISVYSSDGKRSRGHLTPARAADVALGGCLKLVASPRGGPRPITPTTSRSPAGWASNAPRCRSPANSPDAVTTDYAPSATTPSRRSRNNMPWPSTRPARRSLMPCGPLQERHRRQHHMLDGLERLSVCTPRPAGHPIDHHVAERPDRSCTEISLGARGHGH

SEQ ID NO: 184080 - protein, 421 aa, unidentified
MSSIENEITKTRNHSRQRGNMMRTVFGIDVSKASSEVAIVINGEKIHGYTMPNDTIGFTRLLDDLKTVQKPEIIFEARGVYSRRLQAFLEENGYAYTQLNPLEAKKQLDSLRVRKTDKIDAETLAISQFVLNRKPTYIQEEVYQELRDLSRFYQNLTEDIVRTKNRLHKVLQVTFPEMENILSTPTREQYWNLVMTFPYKDFVLELSKDELLEGIRQSTSKRISDKRVAYLAQKLAALANQSYCAVKKNSPILEEVRYYAKELLRLSEQRQAVLEQMVELAQPLPEYEILLSIPGIAETTATSMIGELGDIRRFQSANQINAFIGIDLRHYESGNFLAKEHITKRGNPYARKILFKCIHNIAAASHTNHCHIEDFYEKRKRQSQTTSTKPHTIASIHRLIRTMYYLITHNKLYDYTSTQNR

SEQ ID NO: 184081 - protein, 392 aa, unidentified
MHISVGIDIAKDVHWVTAIDAHGVIQLDRSLHNSPAAIAQLIDELSGLNGNVRIGLDVVGGIAGLAQAMFAQAGMALLHVPGLAVNRARQGSVGGENKSDARDARIIAEQVRTRTDLRAIEPAVEIDLEIRLLVGRRQDLVMAQTQRLARLHDLLVSIFPDLERALDLSTKGPLFLLTRFVTPAELRSAGKQRIVRHLQAASGVPHREDLANRALAAAREQTLTTPGERMSARLIKELALEALATRERLCRLDRELRDLLDSHPDAALIRSLPGMGAVLTAEFIAEAGSLARFRSADALAAAAGIAPVLKQSGKTRFLRRALGGNKALKRVFYQSAFCSLSHPLSRAFYDRKRREGKRHHQAVIALARRRVNVLWAMLANRQSFQPPLENAA

SEQ ID NO: 184082 - protein, 430 aa, unidentified
MKGGFVLAVGIDWAEEFHLVALGRPGDGVFDVRRVEHSPKAVDALVEQIAALEPDPAEVRVVLESRHGLLVERLLDAGYVVVPVNPDLVARRRGPAKKKDDAEDARIACLLALDRFERLRPLIPHGELAGELRAIARDDERAARDERRLLNRLRQDLLSTFPAALEIAGADLGAPVFLRLLERWPSVQALTGATREQLVEHARAGHHGWPERFADRVEAALAADHFQPRAYLVRAKADTIRLTAQQLLAIGSQRRAWERRMGELLLGAPRRGRAKQPREDERGQSFPGGEVYLSFPGLGDRLAARVAGEIGDHPEQFESPSSLQCYAGKAPVTRRSGKSEFVISCRLAYNRHLGNAVQQWAFCSLRSSGWAREFYDAKRATGKGHNAALRALANRWLELLWHCLRKGVLYDEAVHVANRNRALGRVPLAA

SEQ ID NO: 184083 - protein, 314 aa, unidentified
MEVFYPNCAGLDVHKDTVVACSRQVVGRKASREVRTFKTTTSDLLALSEWLSSLGCTHIAMEATGVYWKPVWHILGDGDFALTLANAAHVKNVPGRKTDVNDATWLADLLAHGLIRGSFVPDEQTLEQRGLLRTRKQLIRERTSHVQRLQKTLEEANIKLNSVISDIVGTSGRAMIEALVAGETDPAQLACLANRRIRASATTLQEALRGRVRNHHRFLLRLHLEQIDALDRAIAEIDREVEANLDPFRALIPVLTSIPGIGDLAARVMLAEIGTDMSRFPTAGHLVSWAGLCPKNDESAGKRHSTRMRKGAPG

SEQ ID NO: 184084 - protein, 356 aa, unidentified
MVNIAHIDAVRVVVGVDTHKDEHVAVAIDKLGAYLGEYRLPTTPAGYASVERWAIGLGDVAAFGVEGTGSFGAGLTRFLSGRGRTVVEVIRPDRSTRRRLGKSDSIDAEAAARSVLAGTSHGSPKSGTHSVEMIRMLKVVKDSAMKARTQATNQVKSLVLTAPAELRLELDGLSASGLIRRCAGFRPGDVATPTAAARLALRSLARRHRQLTAELKVVNAELARITAEVAPALLQAFCVGPDSAAALLITAGDNPERLKSESAFAALCGVSPIPASSGKTNRHRLNRGGDRRANSALHRVVIVRLRHDERTRMYMARRTAEGMTKTQVIRCLKRYLARVVYTILRSLAHRHPARAA

SEQ ID NO: 184085 - protein, 310 aa, unidentified
MDHLFVGLDVAKDRLDLHVRPGGETFSVSHDEPGLMALVDRLRSLTPTLIALEATGGYEATVAATLASAGLAVAVVNPRQIRDFARATGLLAKTDTLDARVIAHFAEAIRPAARPLPDAQLQHLGELVTRRRQLVEMLGAETNRRHMTRIRAVQRRLDAHITWLERALRELERDLHDTIRSSPIWRETENLLTSVPGVGPITALTLMAELPELGRLDRRQIAALVGLAPFNRDSGTLRGRRMIRGGRASVRRVLYMATVTATRHNPVIAGFYHRLRVTGHPGKVALTAAMRKLLTILNAILRDHRPWQPA

SEQ ID NO: 184086 - protein, 341 aa, unidentified
MNHYVGIDVSLEASSVCVVDSNGKIVYESKVRSEPHALIAWLSGLNIDLTRIGLEAGPLSQWLHAAIQQAGFAVELLETRHVRNALKTMPVKTDRNDARGIAQLMRLGWFRPVHCKSMAAQETRALLAARKLVQVKLHDVEMSLRGILRGFGLKVGPIAAVGFDGRIRELVAGHPSLEAIAQGLLAVRVALRCELGRFEKQLRAMARNDTRAQLLMSVPGVGPIVSLTFAAAIDDPARFKSSKQVGAYLGLTPSKYQSGETDIDGRITKIGDASVRAALYESANLILTKPLKGCTALKSWGMKLAKRCGMKKAKVAVARKLAVIMHRMLADGASFRPVATA

SEQ ID NO: 184087 - protein, 397 aa, unidentified
MYIVGIDIAKRKHEAAVIDGEGTVIIKPFSFTNNCSGYNRLLAMLTKAKLPLDEVSFAMEATGHYWLALFTRLQKEGFRVQVINPVQTNSIRSFYIRQAKTDPRDALLIAEVIRFGHFSESTLHPENIYELRELCRGRHAIVSMQADVKRKVVALLDQVFPEYETAFTNLFSDTSMAILQTCPTPKELSEMPLEELCHLIEVSSHKRFRMAKAQELQALARNSFGFAMAGDVFSTMIRLYAKHLVFLKQQVQEMDRKIAEIMDTLDTPITTITGIGPTLGAYILSEIGDISRFSSAAKLAAYAGIDPTMRQSGEYNGVRNRMSKRGSPYLRHAIWLAASSAVLHDPALKLYFQKKRDEGKPYMASVGHACRKMVSIIYAVMRDNKAYTPYIPNEISA

SEQ ID NO: 184088 - protein, 417 aa, unidentified
MAEEIEWFVGIDWASQSHQVCLVDARGECLGERAVAHGGLGIEELCDWLIARTGATPEVIGVAIEMTHGPVVEALLERGFCVYGINPKQLDRFRDRFTVAGAKDDRRDAHVLADSLRTDRHAFRRLSNDEPVIVKLREWSRMADDLQQERARLASRMREQLWRYYPQMLELADDLAADWFLDLWSQAPTPAKAVRLRETTIERFVKAHRLRRWQAPEVLRILKQKPLSVAPGVVEAASDHIRTLTVRIRLVNQQLKAAHHKLDELCAQLVPSEENEPGQQCEQRDVVILRSMPGLGRIILAVLLAEVWQPLRRRDYHALRSLSGVAPVTRRSGKTCVVVRRYACNKRLANALYHWARLATQHDALSRRRYAALRQRGHSHGRALRTVADRLLSVACTLLEQQTLFDPSYEVRDAAGA

SEQ ID NO: 184089 - protein, 394 aa, unidentified
MIYAGVDIAKTDHVIGAVDERGAEMCRPMPFKNTEAGLERAVAWLEGLAGSPSDVVVGMEATGHYWMACYSFLVARGYSVAVINPMQVKAVRKLKKLDKVKNDRIDAWLIAETLRIGQYDETRLATDEVASLRSLSRYLQSLRGMAAELKTQCVCLMDAHFPEYAGIFSDMFGAGSRAVLSKSPLPFELARRRADSLARDVAEASRRGGKSAGYAARIKAAARSSIGVRLGQEAASFQVKSLIRQIEFADSECAKVEARVRALLDEVEPLVLTIPGVSYATGAQIVSEIGDVSRFRNASALVSYAGLNSSVSQSGQFDSGGGPITKHGSPYLRRALWLAANRARQYDPGLRAFYDKKRAEGKPHRVAVTAVARKLCHIVFAVMRDQVPYDPGRE

SEQ ID NO: 184090 - protein, 370 aa, unidentified
MTIQQTNVTVIGGVDTHKHTHHASAVDIHGRFLGHNEFPATDVGYQQLLDWMHSHGDVASIGVESTGSFGATLTRFLTSAGVEVIEVNRPNRQARRMDGKSDRLDSEHIARAVLGRTSTAIPKAKSGIVEVIRTLRVTRASAVKARTQAFNTLWGIMIGAPSPLRDELVVLTKRTLVNRCLGLRPETGDLLSLADTPERMLTAGVKTSLRDLARRWKSLDNEIKALNTNIAALVQRAAPELLELKGVGVEIAGQFLVTVGDNPSRIHSEAAFAKLCGVAPQPASSGRTTGRHRLSRSGDRAANSALYIITIVRMRHHEPTRNYVDRRTAEGLTKREIIRCLKRYIAREIYKNLPAKTQRPPGETPIPQAA

SEQ ID NO: 184091 - protein, 378 aa, unidentified
MRKPTRFVGLDVHVDTIAVAVAEPDGEVRSLGAIPNEPEPIRKLMKKLGPAQTLRVCYEAGPCGYGLYWQLTALGVACEVIAPTLVPVKTGDRVKTDRRDALKLARCYRSGDLTPVWVPDAAHEALRDLVRAREAAKKDHLRARHRLQKYLLRQGRRPPVKMKSWTLQHLAWVRQQRWELAAAQTTFDDYLAEVDHVQARVARLERAISEQVAAAPPHLQAVVAALQALRGVAELTAVTIALEVGEVSRFERPTQLMAYAGLVSREDSSGERSRRGAITKTGNAHLRRVVVEAAWAYGQQPSLRGRLRRSNEGQSASIRETAWKAQLRLHKRYRHLSAKGKIRQKVITAVARELLGFIWAVGVAAEREVSAQRQLRAA

SEQ ID NO: 184092 - protein, 377 aa, unidentified
MLSARPAGACRPPSDQQKELAITTIAQLQRPRVTVGVDTHLDVYVAHAKDALGRRLATVSIPTTPAGYRDLLAWARGLGEVDAWGVEGTGCYGAALARFLVAHGQVVLEVNRPDRQARRRRGKSDPVDAEAAARAVQAGEVTAVPKASSGYVEMLRSLRVARATAVKARTQAINALKALVVTAPQNLREQLRGRSATMLVREAAALRPGPLDDPTAAAKLALRTLARRHQALSAEITTLDTELDRLTAKAAPRLVALFGIGPDSAGALLVAAGDNPDRLRSDAAFSMLCGSSPIQASSGKTIRHRLNRGGDRQANAALHRIVVVRLRWHQPTKDYMARRLTQGKSKQEIIRCLKRYVAREVFAVLNQMDQDALTPAA

SEQ ID NO: 184093 - protein, 339 aa, unidentified
MLIIGCDYHPSVQQIAWVDTETGECGERRLRHRAEAEEFYRELKGKQVRVGIEATGHSRWFERLISELRFEIWIGDPAQIRAKQVRKQKTDRRDAEHILKRMMKDDFPRIWAVTPENRDLRQLVWHRQRLVGMRTRVMNQLQAVAMNEGIRRKKGLWTEKGRKQLESLSLMPWTTRRRQELLELLDRLDPNIDKLSQAIEQEAEQMAEVKLLMTHPGVGLITALAFVLVIGTPERFRCGKQVASYLGLIPCENSSADHWRFGHITKQGNKLLRFLLGQSAHSVARGEEAWQRRYAHLAMRRNTPIAKVAMARKLAVRLFWMWRRGWDYQQLKKFGSHVG

SEQ ID NO: 184094 - protein, 356 aa, unidentified
MDSTKYIGMDVHKEATTIAVMSGAGKLVMESIVETKAATMVQFFEGLRGELYVTFEEGTWSAWLYDLLKPHVTKVVVCNPRKNALLKTGNKSDRIDARKLAELLRGGLLSPVYHGETGLRTLKELCRSYLAISKDLARTMNRIKALYRSWSIPCGGASVYAPRHRAEWLSKITEPGVCRRAELFYQQLDGLQKLRQEARRDLLAESRKHGATNLLQRIPYIGPIRAALLIALLQTPHRFRTKRQLWAYSGLALETRSSAEYHYVQGQLQRSKRPVALRGLNQNHNHDLKSIFKGAATKAGSAKGPFHDFYTALVGQGMKPTMARLTLARKIATITLLVWKKGVCFDAQQLKRQVSV

SEQ ID NO: 184095 - protein, 348 aa, unidentified
MNFYTQQHRYYCGIDLHARSMYVCILDAAGTIVVHKDLRAEPDSFLRVIAPYRDDLAVAVECIFTWYWLADLCATERVPFVLGHALYMKAIHGGKAKNDKIDSHKIAVLLRGGMLPTAYVYPAAMRATRDLLRRRCHLMRKRAELLTHIQNTTSQYNLPALGKKIAYKANRAGVAEHFPDPAVRASIEMDLALIDHYDALLTAVELTIVRSAKQHDASVFHRLRSVPGIGKILALVILYEIHDIARFSRVQDFVSYCRLVKCAKESAGKRLGSSGRKIGNAHLKWAFSEAAALFLRQNLAGQRYFARLERKHGKGKALSVLAHKLARAVYHMLTRQQAFDLQRFLSAP

SEQ ID NO: 184096 - protein, 478 aa, unidentified
MTRHNRSRGQATRAEPAPRPRPPRDTAPALTVLHPHAAGIDVHADMHMVCVPPGTAPPRSGDGGLPPNVRRFGANSCDLHAIADWLTQCGVTTVAMESTGVYWIPLFELLESRGFEVWLVEPGQLSRCGARPKTDVLDAQWIQRLHSYGLLRPSFRPADSVLALRGYHRQRQMLVRYAAGHTLHMQKALEQMNVKLAEVVSDITGATGQRIIAAILGGERDPRALAALRDPKCKNDATKIAKALEGTWRPEHLFALKQAHELYQFLHQQIAACDAAIRAELGKLPDRAGGKTVATKPRRCGRKPNDLSFDACGPLFRALGVDLTEVEGIDVGTALVILAEIGADVSRFPTEKHFASWLGVCPRQHQSNRTTKKRGPRKGKNRVAIALRMAAQAVGRTQSPLGLFYRRIKGRIGGQGAVTATAHKLAVLVYRMLKFGSEYVKQSMAEYEAKLRAQVERQLRAKATKLGFELVPRATAGP

SEQ ID NO: 184097 - protein, 410 aa, unidentified
MNAVGIDVSKGTSTVCVMRSYGVVVASPFEVTHTVSELDKLAHLLKSLNGETKVVMECTGSYHLPITRALHAAGFFVSAVNPVLIHGFGNNTIRKRHNDKADSIKIANYALTNWLALPKYVPEEDLRQSLKSFSRQYTKYNKVKTMLTNNLISLIDQTFPGLKELFTSPARESDGHEKWLDFAARFWHCECVGGVSLNAFTDAYRKWCKRSGYHCVRADEIHALSRQCAAVMPKNDNTKSLITLAVAQINTVAETLAAVAREMKRIAGLLPEYPAVLGFFGVGEVLGPQLIAEIGDVRRFSKKSSLVCFAGLEPTDNQSGKFDGDKKISKKGSPHLRKTLFQVMSCLLQHSPVDDPVYQLLDRKRAENKHYYSYMNAGAAKFLRIYYARVNAYLDENCLEQEALDMGCTP

SEQ ID NO: 184098 - protein, 343 aa, unidentified
MDHFAGLDVSVKETCVCIVDDTGKIVREVKVASEPEALLAVLKNPAYRFKRIGLEAGPLSQWLYSALAEAELPVVCVETRHMQAVLKAQVNKTDRNDARGIGQMMRVGLYRPVHVKTLRSQKLRMLLTYRKLLVSKAIAIENDLRGTLRNFGLKVGMVGKVNFEARIRELVENLPDPAVLVEPLLVVRRVLREQIGILHRRLLAIVRDDDVCRRLMTVPGVGPVVALTYRATVDVPARFRNSKAVGASFGLTPSKYQSVEINRTGSISRCGDEMMRVMLYEAAQVMLTRTNKWSWLKAWAMKIARHRGMKKAIVALARRLAVILHRIWVDGTEFRWTREVLAA

SEQ ID NO: 184099 - protein, 409 aa, unidentified
MELVHPHCAGIGIGKRSLTVCVISSDPSGEPVKETRTFRTLTRDLLALADWLDEHGVTAVAMEATGSYWKPIWNLLEDRFELLLANAAHLKAVPGRKTDVRDAEWIAELFRHGLLRASFIPPRPERELRELVRYRTSLIRERASEINRLAKVLEGANIKLGSVSTNLGGVSGRAILTALTEGTDDPEALAGLAKGRLRNKHEVLVEALAGSVGPHQRFLLAAQLRHLADLDALIESLDAEIKERLQPAAELIELVSTIPGVGGRTAEVILVEIGQDMTRFGSARQLASWAGMCPGNRESAGVQRSGRTRRGSPWLRTALIGAARSASRTKTYLGAQYRRLAARRGAKRAFVAVGHTILGIVHAVLISGRPFDDLGVTYFDRRDADHVRRRLTKRLEAMGYVVTVAPRAA

SEQ ID NO: 184100 - protein, 346 aa, unidentified
MEQISRIFVDTSKQVFQLHGVDASERVVVRRKLRRAQFLAFFARLEPTVVGLEACAASHHWARELAALGYEVRLIAPQHIKPYVKRNKNDARDAEAGCEAMSRPHMGFVPAKTVEQQAGLMLLKHRERLVAERTRTSNAIRGHAAEFGWVVPTGLDKIPALVAQATEAPEVPETVRGIFRKLGSRFAQLQAEIAELDREIRAWRKQSEISLRLGELPGIGELGSLMLPLKTPDPRGFRSGRDFAAWIGLTARDHSTAGKLRLGVITKAGDEALRSVLVAGAMSVIRQVLLGKGPQWPWLVELLKRNKPRKLVAVALANKLARIAWKMMVSGQAFDPTRLSQPRPTA

SEQ ID NO: 184101 - protein, 424 aa, unidentified
MKVTYQTCCGVDVHKSFLVATIVKTTGGIEPSYQKKRFSTLNNSILEFKQWLLDNHCHDVCMESTGKYWVPVFNLLEDKINVVIANPKWVKAVKGNKDDTKDSKWIGDLFRLGLVKGSYIPCKKVRILREYTRYRYKLVSCRSSEKNRYQNALTVCNVALDSIVSDIFGKSSTSIIDYLLEQSGTSINHEEIASKLLRSLKSKEDAVIESVEGYQMTDAQKYRMRLVRAHMDYITAEINDVDKMIENMISSNPDFENAVQFLCTIPGVKRDSAITIISETGTDMSQFSSSKRLCCWAGLTPGSNESAGKKKSVRITRAGVYLKPALVQCAHAAVKSDKSPYYKKKYESLVKRRGKKRAIIAIARMILTAIYQMLSTGEQWNPSDLYKIDMPVALVEKQKAKAIKQAKKLLQREGLLPPDEPLAS

SEQ ID NO: 184102 - protein, 346 aa, unidentified
MMLIGCDYHPSWQQISWVDTVTGETQEKKLEHASGEAERFYRQLPAPALIGMESTGNCQWFVELAATLGHDLWIGDAAKIRACEVRAQKHDRRDAALILKLLLEGRFPRIWTPSGEEKDLRQLLIHRYKLVRIRAQVKNELQHLAMNQGVTKKRKLWSKAGEKVLRELPLAPWAGRRREDLFKVREMLNGQIDLLDQAVVEAAEKNEKARLLMTQPGVGPITSMAFVLTMGDVHRFQRGKQVASYLGLIPREYSSGEHQRYGSISKQGNRFMRMLLVEAAQCAVRYDPQMRSEYLHRCHRKAKGVAKVAAARKLAIRLYWMLRTNTGYPEVVRVESSSRVPLVSAS

SEQ ID NO: 184103 - protein, 329 aa, unidentified
MQSCVPTNWGIVSQEGLVDKPTMIGVDVSKDWLDFAVAGGGPIERIANTPEAVARLLDDHGPALVAFEPTGGYERVLQNALRDRGIVFVRVHPNDVIAFRKSRGIRAKTDRIDAGLIAAFAADELVRRGLRPNIAGDQRLRELVARRRQLVDMLQAERCRLELATAAAVRQSLSLVVDAITNSLEALEQEFLAHVAANPDLAQLKGLLQSVKGIGPITATTLIADLPELGLLNAKEIAALVGLAPNTRQSGKMRYRERTGHGRPAVRRVLFNAARSAIRHPSPLRTFYLRLVEQNQRPGKVALTAVMRKLLVTANAIARDRQPWKLNTA

SEQ ID NO: 184104 - protein, 387 aa, unidentified
MIFVGIDIAKLNHFASAISSDGEVLIKPFKFTNDNDGFLLLLSKLSSFEKNNIIIGLESTAHYANNLIAFLVPKGFNVCLINPLQTSTMRKNNIRKTKTDKVDTFIICKTLMMQPHRFVTLYDIALMQLKNLGRFRQKTVKQRTRLKIQLTSYVDQAFPELQYFFKSGIHHKGCYSLLKEAPSPGAVASMHLTHLTHLLKSASHGHFKKETAVELRVLAQKSVGNSDKSLSIQITQSIEQIELLDSQLNKIESEIEDTVKSLDSVILSIPGIGYINGGMILGEIGEITRFSTPSKLLAFAGLDPSVYQSGNFHAKNSRMSKRGSRVLRYALINAAHNIVKNNNTFKTYYEQKKAEGRSHYNALGHCAGKLVRVIHKMLTNNLEFNLA

SEQ ID NO: 184105 - protein, 340 aa, unidentified
MGEVTMIGLDLAKHVFQVHGVDAEGATVLRKQLRRAQVLAFFSRLPRCMVGMEACGTAHYWARELRALGHEVRLMPAQYVKAYVKRNKNDAADAAAICEAVVRPTMRFVAVKTVEQQAAVLLHRGRERLVRQRTGLVNALRAHLAEFGIIAPQGLRHVGRLTAIVRDEGDARLPDLARQVLQVLAAQIEQLEAAVAAIEKQLMAWHKSNPVSQRLATIPGIGPIIATAIAATVTEPSGFRSGREFAAWLGLVPRQNSTGGKVRLGGISKRGNRYLRRLLINGASANLLRSKATKADPWVIGLRRRRPSLVVAVALANKTARMAWAVMQRKENYQRMAAAA

SEQ ID NO: 184106 - protein, 404 aa, unidentified
MWYAGIDWADQHHDIVVLNEQAKMVKSIRVQHNAQGLEQLDTFLQQISGPANKEQIACIIETNQGLLISMLLEKGWPVYPVNPRTVDRHRSPSGAKTDHIDAYLLARTGRADFVDLHRLVPDSQTIAELKQLTRDQDSLVQTQTRLVNQLTACLKAYYPIALDLFCKLQQRSSLLFLQSYPTLQAVQAASCEQIADCLQQARHPNPKATANRIVQQVHQPQLVADAVTTHTKTRLMLALVAQLLPLLEHIATYDKEITALFLTHPDHEIFASLPRAGKRLAPRLLAEIGDDRQRYKDAASLQALAGTAPVQFASGNYAKVHRRVGCIKPLRNALQQFAWQSTHSEAWALDYYQRKRAEGKSHTVAVRALANLWVRIIFAIWIKHQCYDPAVFERARLLHAKRAA

SEQ ID NO: 184107 - protein, 437 aa, unidentified
MSAGSQENLKKNMGAENPEPQYAAFLAIDWADQKHAWSLQEANSAQRERGEVEHTPEAIEAWVVEMGQRFAGRAIAVAVEQSRGALVFLLSKYEQLHIFPVPPATTANLRKAFYSSGAKDDPKDADLLLDIVQKHREKLRRLSPDTAATRRIQNLVEERRKLVDEKTAVSNRLKAHLKIYFPQIPRWFEDVDSPLVCALLERWPTLEELQRVRPAALRSFFHKHHCRSEELIESRIKAIGEAMPALKDRAVVDTKVAVVKVLVQLLQVLHPGIEEFNRQIQEAAEAHPDFFIFDSLPGAGAVMAPRLLAAFGSQRERYENAGEVQTWSGIAPVRASSGTSNWVHFRFACPKFVRQSFHEFALYSIRQSQWARAYYEEQCRRGKKHHAAVRALAFKWIRILFRCWKERVAYDEAIYLAALGKHNSPLAAATKVAAPAL

SEQ ID NO: 184108 - protein, 372 aa, unidentified
MKKIRFIGLDVHAETIAIAVAEPDGEVRSLGIIPNREESVRKLVKKLGPAEQLQACYEAGPTGYVLYWQLTALGVKCEVVAPSLVPVKAGDRVKTDRRDATKLARSYRAGDLTAVWVPNEEHEALRDLVRAREAAKQDQLRARHRLSKFLLRHGRRAPAGIKVWTQKHQQWIKEQVHFEQPAQEYTLLDYLHEVEHMADRIRRLEQAIEEAVKLAPPRMQEVIQALQALRGVAQISAVTIVAELGEISRFDGARQLMGYSGAVPSEHSSGKRIQRGPITKTGSTHLRRIAIEAAWAYRHRPTVGPALRKRQEGLSEEVKGIAWKAQHRLHKRYRNLVAAGKEKQKVVTAVGRELLGFIWAIGVQVERNSRVA

SEQ ID NO: 184109 - protein, 337 aa, unidentified
MEREYVGIDFHRRRSVVVRVSAAGERLSVVRVDNDPVAIAAAVTEAGPSPEVVIEATYGWYWVVDLLQELGATVHLANPKALNWGDRRVKNDVVDATDLADMLRLGRLPEAWIAPPAVRQLRELVRYRAKLVQLRTGLKAQVHAVMAKEGVLPAVGDMFGRAGSAQLDGMPLGRNYLVRVESLRDLIEVYDREVVMLERDVHAHLLHHPGYQAVQAINGVGRTIAAILVAEIGDVNRFPTPAHLCSWAGLTPGHRESDAKGHDTGITKQGSRLLRWALIEGISRYHGGPKLTGDYRRIAERRGKNKARVAIARKVLTLAYYGLRDGEIRCLAQPTAA

SEQ ID NO: 184110 - protein, 428 aa, unidentified
MNEVDITRLDQFRQIKKEIRGSRDYLIVGIDVAKSKHYAFFGTATGKTLLKRIIFENNIAGFDKLLTHEDSLKVKYGLEKVIYGLEATGNYHKPLGEHLIKCCRNVVLVPGIAVKNNRKMMDRRWDKNDTKDAAVIADLVSQGKFVFYEYASMPIRDLRNLLSLKKRLKKQEHSQKVRIRNNLLAQYFPELDEYYGTWGKEGLAIVRWCLAPSVIVGLEYDEFTRRVAPHARGGIPQQKRLRAVWKNAIESIGCMVGESLEVEAKLMVEGLQYTREAIKYVEEKIKEICLDIPEYQYILSIPGFGPDISSKVIGAIGYPFRFNNGRQVLKMAGMDLSASRSGKNSDNVTPKLSKSGKADLRYALYQAAMIASFKNIHFMKYYTEKIRGRDKEKGIKTKMRVKLAAKLLIIAWTLMKKQEYFDPGYLRI

SEQ ID NO: 184111 - protein, 464 aa, unidentified
MSKIVPVARKTAAESQDRPRGKGQQFAMAYPDACGIDIGSSSHFVAVPADRDGESVREFRAFTADLQALVAWLRQCQITAVAMESTGVYWIPLYEMLDEAGFEVHLVNARHVKSVPGRKSDVLDCQWLQQLMTFGLLRGAFRPADEVCALRAVWRHRDMLLSYQARHVQHLQKALTQMNVQLHHVITDLMGVTGQAIVRAIIAGERNAEVLAALRDRRIKADEAEIARSLQGSWRDEHLFSSKQALALYDAYAEQIAECDVELERLLGALKAHELPDDGLGRPKRRTPAKNAVSHFDTRSALFEASGVDLTRIPGIDTSTALKVISEVGTDLRRFPTVKHFTSWMGLCPGTKISGGKVLSSATKRCSNRAAQALRMAAQALRRSQSALGAYHRRLCARMDRPKAITATAHKLARLIYFMLTKGQPYVDVGQQYYEDRYRERVFQNLTKRAHTLGFQLIPVAAAV

SEQ ID NO: 184112 - protein, 322 aa, unidentified
MIKYKETYGVDISKDVFDVHGSNKGHKRYKNDETGFKKYLKELPEGSLVVMEATGYYHYRLAQFLYKNGVIVSVVNPLSIKRFIQMKLAKVKTDKSDAKAICEYALVNEVSLYNALTDTQSECLQLFRLLDTYLKQRTATKNKIHGEAVLGVPSKFVHRSLVRNKKQLDKEVEAIESKILSLVKEDQQEQLTLLTSIPGIGQKTALFLIVVTDGFSKFETASQLCSYVGITPMVRESGSSVRGRARISKVGNRKLRNLLFLCAFNACKHNKACRAVYERIVNKGKSKKLALIAVANKLLKQSFAIVKSRRPYDETYVSILPR

SEQ ID NO: 184113 - protein, 347 aa, unidentified
MKRIVKQAVGIDVAQKELVVCLGRMYDDWTPQLYASKTFDNTAKGFAALTLWVKKLTEESSPVRYVMEATGVYHESLAYYLEGKGFEVSIVLPNKISNYFRTLEVKTITDKTASETIARFGLERKLDTWKRPAEIFRKLKQKTRERDQLVGERTLVKNQLHAEQSEAYPGKESITRMKARINLLNKQVMQIKEEMNTLVKGDKGVKKSVELISSIPGVGTLTAVTVLAETNAFELIRNKRQLTSYAGLDVKEKLSGTSVKGKPRISKKGNRYLRKAMYMPALTAIRYDGRFKVLFTRLVSRHGIKMKAAVAVQRKLLEMIYTLYKTNTAFDKDYLKEEVMALSTQAA

SEQ ID NO: 184114 - protein, 353 aa, unidentified
MQIVGALDVHRRQITFKTIELATGEVRRGRITPAVRQSVREWLAGFAAGEAQFALEGTTGWRFVVEEIERAGHRAHLADPAETAAKRGRKRRAKTDKADCDLQLKLLLAGELPESWIPPAHVLELRTRVRMRKTLIDQRTAWQQRLQAQLFQQGIPAGLKPRTRVGRDALARVELSAAGRELVELALRMLDLIDRELVPLDRALRSFARRQPGCRALMARLYGVGPVSATAILAELGDARRFASSDDAVRHSGLDVTVHQSDSKRAPGHLSHEGPELLRWALFEAALSAARAGSPDHAYYLQVAERIDHNRACLSVARKLCRRAYHILRELGDEALAAVEGDPHAEAAVAAAA

SEQ ID NO: 184115 - protein, 427 aa, unidentified
MSEIGLLQPEPEFAAFIGIDWADQKHIWCLQSAGSAKRETGELEHSPEAVESWVAHLYQRFAQRPIAVAVEQSRGALVFMLSKYEPLHLFPVPPHMASSMRQALYPSGAKDDPRDADLLLDLLLQHRNKLRRLSPDSEATRRVQNLVEERRKLVDEKTAQINRLTDHLKVYFPQMLEWFGRLDSDVVCALLERWPALEELRKAPPASLRAFFRKHRCRDREQLEHRMEAIRQAIPAIHDRAVIEAKSAAVRVIVRVVRVLGEGIEDLDGEIEEAAAAHPDFFIFNSLPGAGPVMAPRLLAAFGSQRERYRSADELQSFSGIAPLTEASGKRKWVHFRWACPKFLRQSFHEWAGHSIAQSEWVRAYYQQQRSKGNTHHEAVRALAFKWIRIVFRCWQDRVAYDENTYLAALVKRGSPLGTTVATGKTL

SEQ ID NO: 184116 - protein, 347 aa, unidentified
MNFYTQQHKHYCGIDLHAKAMYVCILDQSGTKLVHKNLPTTPEAFLRVIAPYREDVVVGVECIFTWYWLADLCQQEGIAFVLGHALYMKAIHGGKAKNDKIDAHKIAVLLRGGMIPQAYVYPAEMRATRDLLRRRCHLVQKRAELLAHIQNTNSQYNLPEIGKKLAYKANREGVETHFPDPSVRKTIEVDLALLDHYDQLLREMELYLTRSAKVHDGQTYARLQSVPGIGQILALVILYEIQNITRFPRVQDFVSYCRLVKCAKESNGKRLGTSGKKIGNSHLRWAFAEAAILFLRQNHLGKEYFTKLEHKHGKAKALTVLGHKLARAVYYMLTREQSFDLQRFVSA

SEQ ID NO: 184117 - protein, 347 aa, unidentified
MRDDMYYIGLDVHKRTISYCVKDAAGHVHQEGKIGSTRRELDAWIKTLPQPRTIAMEATIFTGWIYDHLLPHAEKVKVAHPLMLRAIAAAKKKNDKIDAGKIADCLRCDFLPECHMTSTAIRDRRRTLRYRNLVLKQMVQMKNRISGLLMETGVSYNKQRLHKLGYFTELMSGNEEVDESIRPLLKLSRETIVRSQRLDYALVSSLERDPLLAERLERLRTIPGVGPITALTWALEIGDVSRFQSVKQAISYCGLCSAERSSADKLVRMPISKQRNKHIQQTLVEAAKLAPRYSHELALVYERERQRGNKNRATLAVARKMVAYMLAVERRKQNFVLKGEFSGTAAA

SEQ ID NO: 184118 - protein, 340 aa, unidentified
MKFIGMDVHSRTCFFVVLGKSGRVLKRARVKSQEDELLGFIRSIKGPKKLVFEEGVMSQWLYLLLKDEVQELVVCQPREKKGPKTDEIDAGELADLLRVGRLKSVFHSDSLLMDLRVLTSGYDDTMQELTRIKNRYKAMFRQVAIPTKMTGFYKSKEMLSLLNTQEQYYVACTLFEQISLFEEQCLGYMERFESNVRKYKPVRLLTSIPGIGPVRANQIVAVLVTPYRFSKKYNLFSYAMLTKHNQISDGKLYGKQQALGRSVLKKVFKSATLSAIKSNTAFRRKYDEMRAAGKDDRAARNAVAKMIAATVMGVWKSGKKYNDKHREVTQRRNRKSHSGA

SEQ ID NO: 184119 - protein, 366 aa, unidentified
MTEKEYYIGMDVHKDTVQMAVFEKTGDEPIYERRLKNDIGLLIKEVARFSREGATEAAYEAGSLGYVIQRAMADAGIPCYVLPANKVAKKREDRIKTDKRDARLIGRELRSKSIRPISVPDEADEAARDLLRCREDVSEDIRRVKQRLLKFMLRHGYAYIGGGNNWTKMHWHWMDRRQFKHEHERAVYEEYRSQIHSLEERLVRLEQQVVQTAESPRYKAAVSRLRAFKGIDYIIALAVVCEIGDFRRFGSAKAFMSYLGFVPSENSSGGKRNQGGITKAGNGHLRRLLVEGAWHYTKNAMPGKRLEQRRRESPPRIIDIADRALHRLHKKYIRLVMRGKHVNTAVTAVARELAGFIWAVQVSSAA

SEQ ID NO: 184120 - protein, 336 aa, unidentified
MTIIRIGLDTSKHVFQIHGVDETEMAVLRRQLRRSEVVKFFAKLPPTRIGIEACAASHHWARVLRSLGHAVVLIPPQYIKAYVKRGKNDAIDAEAICEAMSRPTMRFVPVKTAEQQAALTMLGVRDLLVKQRTMLINAIRGHAAEFGVTVAKGPKQVIELLQRLTDDAGVPALVREMVGLLASQLEAVKTKLKAIETQLMAWHRQDQTSQCLATIPGIGPIGSVSFALKVPDPSAFRSGRHFAAWIGITPRENSTAGKHRPGKISREGDENLRRLLVLGATAVIQQVKRGRASPWLLELLAPKPKKLAAVALANKMARIVWAMMMSGEIYRRPQEA

SEQ ID NO: 184121 - protein, 431 aa, unidentified
MDRVIIGVDPHKLSVTIEARDSREILRATGQFRTDARSYRQMLKLARQWPERIWAAAAANGIGRPVTQRLIASGEQVLDVPAKLAARARVFDTGQGRKTDAADAHAIVMVALRDKGLREVRADPDLAVLRMLCDRRNELSRARAQALNRLHRLFLDLIPGGAPVKKSTSQYQALLAAVRPRDLAGRTCRRMAAEELEDLHRLDAKLKAMKAELKTAVQALGSHLMDIHGIGPAGAARILADVGDIARFPDRNHFASWTGTAPIDASSGQHLRHRLSRAGNRRLNHVLYMAGFVQLRHDTPGRAYYRRKLAAGKTPMEAMRCLRRRLSDAACRQLVADALSQEEASPGGHPGASLTSSAAGLSPDTGTSDQPLPGPAHPTLPPPQPAREAMAPAAAPPRRRARGVNVQRPTGRTTLTPTSAAAPSKRRGHAS

SEQ ID NO: 184122 - protein, 356 aa, unidentified
MKRLECIEKFIQGKVVFCGIDVHLKHWDLCYFCDGEVLEKLVIPGDFDRLKGHTESRYNGACSVHFVYEAGFSGFWLYRRLTDLGYKCTITPPSRVPIIDNKVKTDKRDAEKLARFLAGGLLKNVYVPPPSVEMDRQLLRLLRGYKKKLTRVKNQINAILRLHGLSWDKTDGCRWTKRHVAWLEGLSFNGEASRFVLDQYLEEYRFLRSHIAELTQRIRKLSRSSAYQRHFVYLISCKGVGLLTAMTFLLELGELWRFPDTVKFCGYLGMTPSQHSSGERVRLGHITHEGNSHVRHVLIESAWSVIRHDPFLRDKYDRLRARGTNGKKAIVAVARSLAVRLRRCLLEETPYTIGVC

SEQ ID NO: 184123 - protein, 413 aa, unidentified
MVLFVGDDWSEAHHDVEVVDAEGRRLAAARLPEGLVGITRLHGLIAGVVPAEWAELDPVEAASRVKIGIETDRGGWVAALVAAGYEVFAINPMSVARYRQRHSTSGAKSDAGDAHLLAEIVRVDRAHHRPIATDSTDGQAMKLVARSHQSLIWDRARHVLRLRSALREYFPAALVAFEDLYAPDALELLGRAPDPDRAARLSAAKISGALKRANRRKITERTEQIQSALRAPALRQPPAVQAAFAVIAAGEINVIATLNTEIATLGEVVAEHFGRHPDAEVYASQPGLGVILGARVLAEFGDAPNRYADARARKNYAGTSPITRASGTKKVVLARYARNVRLTDAVRQWALSSLRGSPGARCYYDALRARKIGHEAALRQLANRLVGILHGCLKTHTRYNESTAWAHHIPAAA

SEQ ID NO: 184124 - protein, 345 aa, unidentified
MSKIIVSAGIDMAMDKFDACIMVGQRGSHAPIKGTHTFPNTAAGFKEFLAWMLARAVAGAVFKVTMEATGSYYERLAYYLHSKGIEVSVELPNMVKYYAKSLNTKGKNDKKDAKTIASLGLSRDLRIWKPMEKDLRSLRDLMREILSLKDCHTAAKNQMHAMDHSNDKLAAVSKQKQKQLDFYTSSIAELEAEVKTLLKGNAVLRKRIENVATIKGVGIHTALVVIAETGGFELFTSIRQVVSYSGLDPIENSSGKHVGKTRISKNGSKRLRTCLYMPSLSAGRHDKRMKDHKDRIIERNPTIKMKGQVATMRKLLVLIYTLWKTGEKYDPDYRWSGAASGSGEN

SEQ ID NO: 184125 - protein, 356 aa, unidentified
MQLQDALIKPKIFIGLDIHKKSWTVSIQTDLFFHRTYSMPSVAEDLFQYVEQTFPDYEVDLVYEAGCCGFCAARYFLNLGWSVLVVNPSDVKTGDKERYQKTDALDSRNLSNQLKAGVLRGVYIPTEEHEQFTTLARHRTQVTKKLRQSKLHIKSMLLFHGITIPQEFDNSNWSKDFIVWLENIKFSNTCGELALQGKIRMYKFIKSEYLEIANQMRAHCRKTHKKDYNLLKSIPGIGGYLASVILAECGDLRRFNNEGQFSSYIGLVPGIYNSGGSEKCLGITPRSRSQLRSYLVEAAWVAIRKDTEMQNYYRKHQGKNVKSIIIKIAHKMARRILSVIKTETPYQINRNLVLEK

SEQ ID NO: 184126 - protein, 371 aa, unidentified
MYIVGIDIGKNHHEASIVSPEGKQIGRSLRFATTHKGADSLMSFIFKNIGNSPCVFGMEATGHYWYPIYSFLKAKGYTIYVINPIQSDSLRKMYIRQTKNDSIDSFLIAEVIRFGQFGTTSMADENILAMRQLCRYRDSVISSRTEIKLRIGTIMEQIFPEYEKQFSSLWVSTSMGILEKYLTPENIENAPIDELFEIIKDKSHNRLTRAKAISIKEAAADTFGIKIAQDAFSFQLKQLIDRMNFLDKQIEALDCQILEYYEKFDCYLHTIPGIGMIAAATILAEIGDINRFKSSSALVAFAGIDPTVRQSGEFSSTHNHMSKRGSPYLRHAIFLAATTCSFHNSPLNAYYKKKRDQGKHHLTATGAVARL

SEQ ID NO: 184127 - protein, 360 aa, unidentified
MTSMTTTTSCVTAGVDTHGHTHHAAVLDHLGRQLGDREFPASPSGYTALLTWLRSFGDLDRVGVEGTGTYGTALARRLRTAEVVVVEVDRPDRRARRAHGKSDPLDAYAAARAALSGAASTTPKRRDGQVEAIRALRVARSSAVKARTQAINQIKALLVTGPEQLREQLRHLSTPSLIAACAKLRPGPNLDNAEQATKTALRRLARRHQQLSTEIHEADHDLDQLIGQAAPTLLALPGVGPEVAGQLLTTAGDNPDRITSEAAFAHLCGAAPIPASSGRTHRHRLNRGGDRNANRALYVVVLGRLRHDPRTRAYVERRTQEGLTKPEIIRCLKRYVAREIYQSLPTLISAGSSRQPLARP

SEQ ID NO: 184128 - protein, 436 aa, unidentified
MQVLLERVAGIDVHKDILVACVLLGPANGPLERLTRSFGATTRELLKLREWLEELRVELVVMEATGVYWRPVFNVLQHDVPAQDGEQGLRLILANPFHIKNVPGRKTDVLDAEWIATLGRHGLVAASMVPPRPIRELRDLLRYRTKLVAMLASEKNRLQKHLEDANIKLGSVASNILGKSSRAMLNDLIQGVTDSAQLAGHAKGKLRGKREALLAALEGRPTAAHRLLLRMSLDHIDFLQKSIEEIESEVSQRLAQQKDALENLCTIPGVRVTIATALIAELGTDMTVFPDEQHVSSWAGLCPGSHESAGKKKSVKTQVGRSWLKYVLCEAAWGAVRTKGCYLSAKYFALRARRGSQRALIAVAHKILVAAYHILRTGETYVDLGGDYLHKLHAERRRNGLVRALGELGYDVTLTKTTASEPSAELPSTMEVLAPA

SEQ ID NO: 184129 - protein, 317 aa, unidentified
MQKTTNFVGIDMAKNDFYACLSDIIEPQKFNNDTKGIKLFFNHLKHHDFQKENTILGVESTASYHLKLCIETSERDYKIKVINPLIVKKQNQTDLRRVKNDKKDSRLIRFCLIGGAGYIFDNDPEAMILKSLIRQRDSLVFSKLKFTRQQDDIRLKEKCLKQGISPVYTEIINVLEEKIDMLKADLRLYRPKEQYLLESIPGVGPITAASFISEVGDINRFKKPEQLVAYAGIDPRVHQSGTSVNGKGYISKRGNKILRTRLFNAASVAVLHDNLFKKFFQKKKDEGKPYRVALVATMRKMTHVIYAVWTRGTPFVK

SEQ ID NO: 184130 - protein, 353 aa, unidentified
MNALHYIGFDVHKKTISFCVKTASGEIVEEGSVPAQRRVLRQWASARPQPWQGALEATLFSGWIYDTLQPYGERLEMAHPAKMKAISAAKKKSDTIDARTIADLVRCNLLPACYVAAPRIRELRRLLRYRSLVVSEAVRMKNKMAGLLMETGALYVKEKLHRKKYFANLLEELEEVPESVIDLLRLSRGALEMFESTQKRLVRELLADPELAQRVERLMSIPAVGEITALTWALEVGDPQRFRSGSDAMSYCGLTAALQSSAGKQQRGPISKQRNRWLQTTLIEAAKLAPRWNPQLAALHARELERGHRNRATLAVARKLVAYLLAVDKSGQASNRACRWKRQHKKLPKKEKL

SEQ ID NO: 184131 - protein, 348 aa, unidentified
MLIIGCDYHPGFQQIAFVDTDTGEAAERRLTHREEAEQFYRTLEARRVRIGMEASGHGRWFERLLNELQFELWIGDAAEIRTKRVRKQKTDRQDAQLLLKLLMEDRFPRIWVPDAENRDLRQLLWHRHRLVQMRTRIMNQLHVVALNEGVRRKKALWRPAGRSELESLVLAPWALRRRRDLLDLFDQLTPKIHDLTRALEEEVEKRPIARRLMTHPGVGPLTALAFELVIGTPERFHCGKQIASYVGLVPSEESSGDRRRLGHISKQGNALLRFLLVEAAQVTVRSQPQWRSKFLHLAMRRGRKIAKVALARKLAVHLYWMWRQGLDYGQFEKLGSHAGEPGNRHGVQ

SEQ ID NO: 184132 - protein, 381 aa, unidentified
MASPQTLQERALDQACQTVLFVALELSDKKWKLAFSDGNKRRIITITAGDLVTLGEAVAKAKARFGMHGVVPIVSCYEAGRDGFWLHRYLVHCGVANVVVDASSIEVNRRARRAKTDRVDVEHLLRLLIRYHHGEQRVWSVVHVPNVEEEDARRLHRELERLKKERTGHRNRIQALLVSQGVRLQPRHDLLERLEAARLWDGSALPPDLQAEVRREDARLRLVDEQIRALETEQVRRLEEAVTPGHQQIAHLMHLRGIGLTSAWVFIMEYFGWRQFHNRKEVAALAGLTPMPYASGDSSREQGISKAGNRRIRTLMIQIAWGWLRYQPHSALSVWFNTRFALGGKRMRRIGIVALARRLLIALWRYVQSGAIPEGASLKPL

SEQ ID NO: 184133 - protein, 344 aa, unidentified
MTYYAGLDVSLRTVNICIIDEQGELVAESKLASDVQDIVAYLDNLDIDIESISLEAGTLAQYLTYGLQSAGFEVICMEARQVKGALSAMRNKTDKHDARGIAQILRSGWYSRVHIKSMQSHHIRMLLSSRKAVLSKCVDLENEVRGLFKIFGIKLPPKLGHGAFDVTVRGIIEFDATLSHALLPLLDARLVLYRTFRVLDNRTRKMAHADSVCVRLMSVPGVGFITALTFKAGVDDPKRFKRSRTVGAHFGLTPRRFQSGEIDIEGHISKCGDADVRATLYTAANALLTRSARWSPLKAWGMKLAKTRGHRRAVIAVARKLAVILHRVWIDDTQFRWGTEGARS

SEQ ID NO: 184134 - protein, 411 aa, unidentified
MEVICKRCCGLDVHKEIVVACLLIREGGKVVKEIRTFLTMTVDLVVLHDWLKAHQVTHVAMESTGIYWRPVFNLLEADFAVLLVNAAHIKAVPGRKTDVKDCEWIADLLSHGLLKGSFIPPEPIRDLRDLTRYRKSLTDERVRQVQRLQKFLEGANIKLASVASNVMGVSGRAMLEALAAGSTDPQVLSELAKGRLRKKLPDLKKALEGRFRAHHQFMVAQILTHLDFLDEAIERVSQEVSSRIVPFSEIVNLMDLVPGINQRVAEGVLSEMGAEMSCFPSHRHASSWAGLCPGNNESAGKRKSGRSRKGNQWLRRHLIEASWAAVKKRGTYLSALYYRLVPRRGKNKAIIAVAHAILVMIYHILKDRVPYHELGSDYFNKLNAAYVQRHHVKRLESLGFKVILEPLPKAA

SEQ ID NO: 184135 - protein, 451 aa, unidentified
MANRGKTACGTTILGRPEMFGKEIDKEIWWTVGVDCGEECHRFVLVDDRGERQRACWVRNRRDKIEEAVAQMVLALPTGVRLRLVTEGVRSLGWVVAQVSGSLGLEVWQVNPKALNHYRDLEGQPRKDDDIDAYLAARMVVFGMEGCRVAVDPRPEERALCRLTRLRRQLSDRRAVVKNRLRSLLVELAPEVVSKDWKGPVHHGKGMRAVLKRWPTFEGLEKARASTIEKMLKSSTRYGARCGAMSVLLKEMAGRVAMAPMEREIVKMDISMAIAELDVLDDSIAKLEKEIKHRVMEHPVGKKLLDMPGEGLVTAGTDIGEVLPVARNASEGKAATYAGLTPLSRLSGKGSKPSKLARGVNKHALRTNYLSAIAAVSASAIDAAYHQAQKEHHQGHPKPHVKATLSLARQRFKVKYKLMTTDAVYDKEKLISSHLERRRRVRASQSQQHVA

SEQ ID NO: 184136 - protein, 340 aa, unidentified
MSEVSIIGVDLAKRVFQVHGALPDGNVAFRKKLYRSQFMKFLAEQPPCLIAMEACATAHYWGRAALGSGHEVRLIPPIYVKPFVKRQKNDAADAEAIVEAALRPTMRFVEVKSADQQSLGLLFRTRELLVRQRTQLINALRGHLAEYGIVVAIGARNVKVFQQALLDHGTRLPKTVLSISGVYFEQIAALTEKVTELEIALRRETARDGQATLLQTMPGIGPMSAAAIQAFAPPLENFARGRDFAAWLGLVPRQHSSGGKDRLGRISKMGQRDIRRLLIVGAMSIVNWASRKGSQDSWLMRLLESKPKMVVAVALANKMARRLWAMCVKKEVYEIPVLVA

SEQ ID NO: 184137 - protein, 374 aa, unidentified
MSKVIRIGIDTSKSVFVLHGVDERELPVVRKTLRRREVVDFLAKLEPSRIGIEACGGAHHWGRSLAAVGHEVVLLPPQLVKPYVARNKNDRADAEAICEAMSRPRMRFVPIKTVDRQAAGMLIGLRDRLVRQRTQLSNAIRGHAAEFGLVAARGLDKIDPLLARIAGDPALPELAKTLFALHGREYAQLMARLRQVEAELMAWHRHHELSRRLAAIPAIGPIGACALAIKVTDPRAFRRGRDFAAWMGLTPKDHSTAGRRRLGAITRAGDETLRSLLVVGAMALIQQARRRPDRASPWLVDLLARKPPKLAAVALANKTARIAWKLMVSGERYDPRHAGAGRRAPSSPPADRVAPCSRRQGRSAPPAAVPCGQP

SEQ ID NO: 184138 - protein, 401 aa, unidentified
MNAVGIDVSKGKSMVCVMRPFGEVVLEPFEVLHTAQNLHDLAEKLKALDGETRVVLEATGNYHKPVAFVLHDAGLFVSVVNPVLIHDYDNNSLRRVKTDRKDAVKIANYTLDKWTRLRQYLPEDDTRLALKNCYRQYQQAVAIRTMLKNNLISSLDLTFPDANKLFTSPAKSNGCEKWVDFIGDFWHSECISSLSANAFAKKYLKWCQKHGYVFTRSKSDEIYACAVNSASLPKSPTSKLLIQQQVAQLKAVSQSVAAFRQEMLRLSQQLPEFDTVMEMYGVGPSLGPQLMAEIGDVRRFSSKKSLIAFAGIEPQPNDSGKVVGNDKGISKVGSTVLRRTLFLIMTVILQTQPQDEPVFQFMNKKRSEGKPYKVYMMASANKFLRIYYARVKAVMDSERSQ

SEQ ID NO: 184139 - protein, 310 aa, unidentified
MPQTYIGCDLSRDRIDVFDPRIGHATSHPNSPAGLKALFEACRPEAILVVEATSGCDQALLRACTTAARPFVRLNPLHAWHFAQSLNLPKTDRTDARMLARLGAERRPAPHRPPDPARGELAELADRRDQLKRMETQEKNRLGKTAAPLIRADIRASLKALSARIKRFEAEIAAFLARSPDLARDAELLRSVPGMGPVTSANLLARLPELGQLDRRAIASLAGLAPKARESGKFRGKRRIGQGRASVRRLLYMAAMSLWRRPGAMGGLTGRLLAAGKPPKVALIALARKIATIANAVLRDQKPFRTAPQP

SEQ ID NO: 184140 - protein, 409 aa, unidentified
MNTGTITAVGIDVSKHKSTVAARRPGGEVVLLPFDVEHTAEGLKKLITKLRELDGEIRIVMEHTGMYWRPIAMTLKEAGFYVSVVNAILIHNFSDNSIRKVKTDRADAMKIANYGLTFWIDLQEYAGEDENRQLLKIQSRLYERSATTAGMLRNGLISLLDQTFPGANKLFRDDSRNSKGHVKWIDFVLRFWHKECVAALSLAAFTDTFQKWCKRTGYKFSASDAERIHAIARNAVATLPKNDSTKLLITQATNSLNAIYDSLQAIRTEMDRLASMLPEYELVMGMEGIGKVTGPQLMAEVGDVRRFTHKGALVAYAGVDASPYQSGSFDSKSRHVSKRGSPHLRRVLFVIMSMTLIRANTANPVFCFMDKKRAEGKHFYVYTVAGSAKFLRIYYAKVKEYLNALEETA

SEQ ID NO: 184141 - protein, 368 aa, unidentified
MGTLYIGLDVHKASIAVSLAEEGRDGAVRFLGEIPNTPTDVAKLAKRLGKDSERLEFCYEAGCCGYGIYRQLIELGHGCTVVAPTLIPRKPGDRVKTDRRDAQKLAVLHRSGDLTRVWVPDPVHEAMRDLVRARLDAVMALMRARQQLLAFLLRHGRTYEKGKNWTQRHRVWLAGQVFDQPVHQIVFQDYVEAIFTAQDRRDQLVARITALIPSWSMGPVVEALRGLRGLEAISAVTFVAGIGDLTRFDSPSQLMAYLGLVPSERSSGDHVRRGGITKTGNGEARRMLVEAAWSYRYPPRVAQEKVEVLVRLPKSVRDIAWKAQMRLCDRYRKLTRSGKKPTVVVTAIARELAGFIWAIGQEVRPAAP

SEQ ID NO: 184142 - protein, 402 aa, unidentified
MKASKQYLRFCGIDIAKQKHVACIIDKNGRYLVRPKSIRNDAAGYQQILNCLKTSGRKKSILAGMEATGHYWYGLHDFLIRHGYAVAVLNPIQTAQQAKQAIRKCKTDKYDAFHIANLLRSRQYKAAVVPGELAMTCRLLTRLRYRMVRQSAMIKQLVHSRLHPVWPEYEGLFSNTFGTTSMELLQMAPTPKELLELDVDDLSEQIRKASRGRFGPAHTQRILHSARNSVGMKRGNYGISTGIKFLLEQIVALEPVRKKLDVEIQKLAARLPEYLFTLPGATELTIVSLYGEVDPIETFERPSQLVAFAGLDPKVFQSGQYDAPRRHVSKRGSPYLRRTLWQMAYRAVCTEGDLRDFWRKKHRQNKHHLVAVTAAANKLCHIAWRIMTDRRDYIPTGYNPKS

SEQ ID NO: 184143 - protein, 416 aa, unidentified
MDTMYERCCGLDIHKKTIEACFRSGKKKTHMSFGTTSAELRKLTMWLVENDCQSVAMESTGSYWKPIFNILELSGTDMEIIVVNARHMKNVPGRKTDVHDAEWIAELLQYGLLRPSFIPDREQRELRELSRYRKSLVGERAREINRLQKMLEGGNIKLTSVVSEVTGYSSRRLLDRLLRNDEPMTEDVISGLVHTSLAGKSKELETALDGLLSELQKELLIKVLDHIDDMSRRIADLDDFCRKQMKKYEDALDKLDEIPGIARRTAETILIETGLDMSRFPTAKHFARWAGLAPGNNESAGKRSSGRTTKGNPTLKSTLIQSAKVAARKKNSFFKARYQKIAAKRGANRASVAVAHSMLIAIYHILKSGERFKDLGEDYYNQFNKEKKKKYYLKKLTKLGVNLKEATLSISIQTAT

SEQ ID NO: 184144 - protein, 310 aa, unidentified
MPSIKYVGVDLCKRELMADLSAEAKPRAFPNDAAGITAFIAALPAGAHVVCESTGGYERGFAQVLYDRQIPVNIVQPGRVHYFARSKGKRAKNDRIDAKLLTAFGETMALAAPPPPTAQAQELQDLFRARQQLTAQLNEQASHDEHVRLPFLAAQAKERRELLQKQIQAIEKRIRTMIAADRQLRQRAERVQQVQGIGEVSAWTVLAEMPELGSLRPGQAGYLLGVVPHPDESGPRSGQRHIGGGRAHARKVLYMAALTASQHNPVLAPFYRRLTQAKHKPHLVALGAVMRKLVELLNRLLQDPNFVLAS

SEQ ID NO: 184145 - protein, 361 aa, unidentified
MKKTAQHLIAEVPSRHSPTELTIGVDLGDVWSHYCTINQNGEVIDRGRFRTNPQGVEKWFKNLAPVRVAMEAGTHSIWISEQLQLLGHEVIVANVRELRAISHSDRKSDQVDAEKLARFARLDPKILRPIAHRTLQQQQALTLIRARDLMVRLRTAAVNAVRGLTKSCGHRMPASTTACFAKRGLAMLPAELAPALGPVLEQIAEMTTKIKQYDQQIRQLSQTEYSETQALMKVYGVGPITALTYVLTLGDKQRFQRSRDVGCYLGLRPRRSQSGDRDPQLGITKSGNGYLRSLLIECANHILRPPGKDSSLRRWGLALAARGGKKAKNKAVVAVARKLAVLLHRIWITQEPYIPFYAEAA

SEQ ID NO: 184146 - protein, 330 aa, unidentified
MIDAQPPQPQTTAAAAAAAAVHAGIDVSKARLDVCVLPAGRTLSAANDDAGVRQVIDLLAPLAPALIVIEATGRYHRRLAADLLAADLRVAVVNPRQARDFARALGKLAKTDAIDASVLAQFAAVGHLRPCEKQPENRAALDERVTRRRQVVHMLVMEKNRIEGAADKRTLASIRKVIRVLEQQREGLDRQIAKLIEQDDDWRGRHEILTSVPGVGDTTANLLVSDLPELGKVNREQLAALVGVAPVNRDSGEMRGKRACFGGRPHVRAALYMAIVSAIRFNPVIRAFAGRLTAKGKPFKLVATACIHKLLTILNVMIRDGQKWNPPAAA

SEQ ID NO: 184147 - protein, 354 aa, unidentified
MKRTTKYVALDVHQATTVASVREESGRVIARSVLPTDHASITEFMRGMRGAVHVVFEEGTQAQWLHDLLAPVVDRVVVCDRRGSPRQGNKGDQVDADQLSELLRRGGLRAVYHGSAHRAVLKELTQTYRNLVEDSTRVMLRLKALFRARAIPTPGTTMYQARARGQWLAQLADRGARFRAEALYAELDVLRRLRPRAKAAMVTEARRDPAWPVLRTIPFLGPVRVALLLATMQTPWRFRTKRNLWAYAGLAVVTRSSAEYTIVAGQAVRRRRPPMTRGLNRNHNRVLKDVFKGAATAATARPGPLQDFYHSVIARGTREELARLTLTRKLAALTLRLWKKGERYDPTKLTMPAR

SEQ ID NO: 184148 - protein, 343 aa, unidentified
MEQVSIIGIDISKKSFQLHGATSEGSPVFRKKLSRGRFLTFLCEVPPCLVVMEACGGAHHWGRQIIALGHACKLIPPIYVKPYLKRQKNDSNDAAAIVEAAQRPTMRFVAVKSEEAQADSMLFRTRALLVRQRTQSINSLRGHLAEFGLIAAQGTGSIAVLRLELATVKEGLPEQVISMSRLLLEQIAVLNEQITDLDKEIRSRSRTHEEMKRLMTIPGIGPNCAMAVQAFAPPMESFGCGRDFAAWIGLTPKQHSTAGKQKLGRITKMGQRDLRRLLVLGATAVLQHRRKCPELDDPWLRRMIAEKPPKLVAVALANKMARIIWALSVKKEPYRAPAAAGAG

SEQ ID NO: 184149 - protein, 354 aa, unidentified
MMIIGCDYHPGFQQIAFVDTETGELQERRLEHREEAEKFYRDLAAQGIKVRVGMEASGHARWFERLLSELQCELWIGDATEIARKRERKQKTDRQDAQHILRLMLKDDFPQIWVPSGENRDLRQLLWHRHRMVQARTRIMNQLQAVALNEGVRCKKRLWREKGREQLESFRLAPWASRRRHELLELLDRLNPTIAALSQAIEQEVEKCPEAQRLRTHPGVGPLTALAFVLIIGRADRFQCGKQIACYLGLVPLEDSSGQRRRLGHITKQGNSLLRFLLVEAAQVTVRSLPEWRSKYCHLTMRRGRKIAKVAMARKLAVRLYWMLRKGWDYGQLTKFGSHAGKPGSGDGVMSNTE

SEQ ID NO: 184150 - protein, 376 aa, unidentified
MTKVRFIGLDVHAETIAVAVAEPGGEVRSLGVIPNRLESIRKLVKKLEPAESLRACYEAGPTGYVVYWQLTALGVRCEVIAPTLVPTKAGDRVKTDRRDAEKLARCYRAGDLTAVWVPDAAHEALRDLVRAREAAKKDQLRARHRLAKFLLRQGRRPPTGTTAWTQRHLAWIQSAVHFAQPAQEATLLDYRHEVEHMGERLVRLARAIDEAVAQAPAAMRAVMDALQALRGIALVSAVTIVAEVGELSRFARAPQLMGYSGMGVREDSSGGRTRRGGITKTGNAHLRRILMEAAWAYRHRPSVGSALRKRQAALSEEVKAIAWKAQHRLHGRYRRLLGRGKCQPQVVTAIGRELLGFIWAIGVAVETRSKTPSVAA

SEQ ID NO: 184151 - protein, 394 aa, unidentified
MVAICEDGVVRSAGRVPSTPEGLLTLAESLLPTDRVALEVTGSCWEVARLLEPHVERVIVVSPDDTGITSARAKTDKLDARTLASLLWKGELEAVWMPDDRCRVLRRRLARREQLVHSRTRAKNEIHAVLQRRLQGKPPCSDLFGVKGRQWLAGLELPPEERESVDAGVRHVEFLDWEIAEVERLIAKQALAWPEIRRLMSVPGVNLVCAASFIAAVGSPNRFLTSRKLVAYLGLDPKVRQSGEAPTRSGRISKRGSASARWALVEAAWTAVQQPGPLHAFYERTRGRRGHGKAIVATARKLAVLFWCMLTRDEDYAHQQPSLTNKKLRRLEITAGAPKYAKTARGTWNTNVAMRQAERQLAEQAEASYKRMVKDWQAGAPTRKTGASATPERA

SEQ ID NO: 184152 - protein, 335 aa, unidentified
MNRYIGIDVHQGKCHATVQNCDGETVKQDYFQNSPSGYDDFFDGAGEGIVAIEAGDAWQPIYDWLDEKGFEVKLADPHKLRIIAEVKIKTDCRDSEALADLVRADLIPEVYVPCDEKRDLRRTVRHRGKLVKDRSKLMNRIQAVLRERGIELDVDLRTKKDRRKLLELGIDSIDDYLEVIETLDDRIGELEEEIEETAGDMEEAQLLMTIPGVSYYSALTIIAEIATVERFPTSGHLCSYAGLVPSVNQSGSKEVHGSIQGGRSLLRWILYQCTHVHIQNAPESHITKFYKRLVQKKPKKLAKTAAARKLTKVIFWMLKLKEEFHPEGHDPRNSR

SEQ ID NO: 184153 - protein, 348 aa, unidentified
MTMLSELVDVVIGVDTHTDTHTAAVLAVSGAVLAESTEHADPDGYAALVALADRHGRSRAWAIESANGYGAGLARFLAELGEWVIEIDRPNRSARRHGAKSDPIDAVRAAREALSRARLAVPRCGAQRGALSVRLTARRSAIDASTVAQRQLRALIIAAPETLRSRLRNKTTPELVKACTHLRGHSRWDITTRETATVLRNLAKRITALNDEARDHQRAIHTIVRAWRPDLLEQLGVGPIVAATVLCAWSHPGRIRNDAAFAMLAGTAPIAASSGQTVRHRLNRSGDRQLNRAIHTIVLARLRHDPQTRTYRERRHSEGKTDREIKRNLKRYITRQLYRQLENPPSPT

SEQ ID NO: 184154 - protein, 368 aa, unidentified
MKQQTSATIETFIKGRTVTDFSGKTIYVGIDVHQKDYQVAKILGGICLGNHRMGADNNQLIEHLRSRYPGAAFKCVYESCAWGFALQRKLEQAGMECIVVHAADVSSSDKEKRRKTDTVDALKLARNLESNQLKAIHVPPEDIQKQRNLIRLRKRFVGDLNRSKNRLKSLLKYQGIDIPEKFGKKNNWSHNFMNWVEAEAKKDELLEDSLLLLLEEIKMLRQLLLRAERKLRELMKSKYKGNAELLVSTPGVGPTTAMLFLLEIGDIQRFGTFDSLNDFVGFCPDTASSGDTEQDRGITCRRHKQLRSALIESAWQAIRVDPALLEAYQLLTKRMKGNEAIVRIARKLLRRMRAVLLSGKPYQIGLVK

SEQ ID NO: 184155 - protein, 330 aa, unidentified
MYLGIDTHTRYSQVAVVDGDGNLQDEIRLPNDRLSEIAEQYAGGEAAIEASGHYRPVYEMLDEHLDVTLVNPSKNRLIADATVKTDRIDAKRLAHMLRADMLAESYVPSDEIRTLRDLVRTRKSLVEERTAEKNRVRAVLKRTDNPYDSELFGPTGREFLAELSLSDADRTIVEAHLSVIDEYDEQIDRLEEKIEQKVLESPAAQRLLSIPGVGQSTAALVVAEIGEIDRFDRDEELVSYAGLDPMVHQSGDTEVHGSISKEGSAPLRWALVQCAHVAVRYDDYLGNFYTRLKRRKNHQIAIVATARKMLVSIFYMLKRREAYDPPEVSA

SEQ ID NO: 184156 - protein, 400 aa, unidentified
MRTVFGIDVSKASSEVAILVNGEKVHGYTMPNDCIGFSRLLSDLDSVYRPEVIFEATGVYSRRLQTFLDNNDYTYTRLNPLEAKKQLDSLRVRKTDKIDAEKLALSQFSLNRKPSYVQKSVYQELRDLSRFYQNLTEDIVRTKNRLHKALQVTFPELETLLSAPTGKQYWFLVTAFPSKDFILDWSKADLTKVIRQSTAKRMSDKRVSYLVTKLLELAKQSYCAVKKASPMIEEVRYYAQELLRLTERRQVTLDNMIELAQPLPEYDILLSIPGIAETTATSIIGELGDVRRFQSANQINAFIGIDLRHYESGIYLAQEHITKRGNPYARKILFKTIHNITTAGHYHPCHIAEFYEKRKRQSQVISTKSATIAAMHRLIRTIHYLIVHNKLYDYDLAKSY

SEQ ID NO: 184157 - protein, 342 aa, unidentified
MKDIRAVVGVDIAKHVFQLHEVSKEKGEITNVQLKRKKFLAHFSNRSACLIGMEACGGAQHWARKLVALGHDVRLLPALQVKAFVCGNKNDMADARAIWMAVQQPGVRTAAIKTEAQQAVLAMHRIRQQLIKFRTAQINALRGLLTEYGEGMPLGRSGIARRLPGIFANLADRLPAVLVDTLREQFARIGRLDEEVVEIERRLRDWYRQDDACRRLAEVPGVGLLTATAVVAAVGDAKTFRSGREFAAWLGLVPRQTGTDGRVKLLGISKRGDTYYLRTLLIHGARSVLTHSKSPSEWIVKLVKRRPINVAIVAMANKTARTLWALLAHGQLYQREHNSSPA

SEQ ID NO: 184158 - protein, 353 aa, unidentified
MEQFIGCDAHKRFSLFIAMNEEGEYGRPIRVGHERERMRAFLEALPVGSQIALETSGSYYWLVEEMERAGHRPQLAHALTAKRRMEGRHKTDERDARGLAMLLRNGTLPRVWIPPAALRDQREMLRLRMILVESRSQVKNRIHGVLLRYNVELKGKDIYTQGGREELDGHLTELPEWTRESVHKQLGMVDHLDQQIEACEQSLETMLEPNAERDLLKTLPGVGKILSAVIALEIGDIARFGNAERLVSYAGLVPAARESAGRKRPGKCPSACNTYLKWAFVEAGNVIATHHHKWPERHVAQLYVRVKHNTKMHGKATVAVGRHLAEAAYWILSKQELYREPKSNRQALSSTHG

SEQ ID NO: 184159 - protein, 421 aa, unidentified
MCLSEAKGMDIKMYNAKMYNAVGIDVSKGKSTVTVLQPGGTVIRKPFDVSHTSQNLNELAAYLDSLDGDTRIVMECTGRYHEPILKALSEAGLFVSVVNPHLIKNFGSNSLRKVKSDPADARKIARYTLDNWAELRQYSGMDNTRTQLKTLNSQFSFFMKQKVAVKANLIALLDNTYPGVNKLFDSPVREDGSEKWVDYAYSFWHVDCVRGIGLKAFTERYQAFCKRHHYIFQADKPEKLFNASKELAAVFPKEKTYKLLIQQSIQQLNLASGHVERLRREMNELASTLPEYSTVMGIYGVGRTYGPQLIAEIGDVSRFTHREALTAFAGVDPGVDESGQHKSKSNRASKVGSARLRKTLFQIMTTLLQNAPEDDPVYRFLDKKRSQGKPYYVYMTAGANKFLRIYYGKVKECLRNLEQES

SEQ ID NO: 184160 - protein, 390 aa, unidentified
MQALYPRPDEHAAVRTDLKAIFVSLELSRSTWVITSLSPGGGEKMSKHAVPSGDVAALLARLSKLKEKARLRTGQVFPIIVIQEAGLDGFWIHRVLQQEGIESHVVDPASIATSRRCRRAKTDRIDGEALVRALLAYKRGEPRVCAMVKAPAPHEEDRRRTSREREVLTAERVQHVNRIKGLLFAQGIGDYEPLHRNRRERLEELITGDGRPLPECLKAQIRRELDRLELLIEQIKAVEAERDALLAQAQASSGVPAPAAQLLTLKGIGPEAAATLWTEGLFRTFNNRKQVAAYAGLAPTPWQSGSVHRDQGVSKAGNPRLRTIMIQIAWLWLRHQPQSALALWYRARIKRTGGRLGKTMIIALARKLLVALWKYATAGVLIEGAVLKPA

SEQ ID NO: 184161 - protein, 430 aa, unidentified
MKSNTQNKKIEAITEKTLVIGIDVGSETHYARAFDYRGIEYSKKPFKFSNTEAGFVTFKEWILDLKEKHEKDKVVPGMEPTGHYWFNLGKYLQDNEMKPVLVNPHHVKKSKELDDNNPTKNDRKDPKVIAGLVREGRYMIPYLPDGVYADLRTASNIRFQLQSELTRIQNRISRWFNIYFPEYKTVYGKPDAKSGMLILKEAPLPEDILTLGIDGVDQIWRDAKMRAVGKARAKTLIEAAEHSVGSKEGAVSARMEIRMLLEDYESRNMRLQEVMVLIEELVKQIPMAEKLLEIKGVGIKTVSGFLAEVGDISRFNSPKELQKLAGLALVENSSGKHKGETTISRRGRKRLRYLLFEVAMSLVAKNPEFRELHNYYTTRRLNPLKKMQSLMAIAAKLIRVFFAMLIKGVDYDPKKMVSDIKRPAVYLQAA

SEQ ID NO: 184162 - protein, 386 aa, unidentified
MIIIGVDPHKRMHVASAIDPATNRQVTALQVEASLAGYRRLLRWAGGFGERSWAVENAHRLGRHLAQWLLARGEAVEDVASTATARVRELSRGGRRKNDVIDAAAAASVAALRGDANPVLAEDITTVLGLLDERRSNVTTQRTRLVNQLHAVFRDLVPGGAPKGLTAAAASRLLAGIRPAGPVEAARKQLARDLVAEIRDADRRLKLLKAQIAETVAETGSHLIEVDGVGPIVSGRLLARTHKMSRFPTAAAFASYAGVAPVEVSSADRVRHRLSRGGDRQLNLALHVVAVNQIRMPGSTGRAYYDTKIAAGKTEKEARRCLKRRLADHIWRLMIRDEGGEAAGPGGHQGTTLQSSAAGSTPTTSSSDKSLPEPADSDSTTRQPAA

SEQ ID NO: 184163 - protein, 373 aa, unidentified
MVLRHNRHYEEEVSMSTITIGVDLAKSVFSVCEVDASGRVIRRLDLKRDAFALWLAQVPAGTVVAMEACSGAHHWARRCLEHDLEPRIIAAQFVTPFRKGRKTKNDRADAEAIATAARQGNMRFVPAKSIDQQVRLSWHRVREGYKTESLAVSNRIRGLLAEFGVIVAKSDLALRRLLGDLDAQVGVPAELKELLRDLTAHWASLRTALDACDARIDAHARQDERCLRLRAIIGVGPITADAVVATVGHAREFKQGRQMAAWLGLVPAQHSSGGRSRLGEISCRGDAYLRTLLVQGARSSLQRAKAVATEKATPEQVWIRTLEGRMRFGKVIVAIANKHARQIWAILAHEVDYDPHACLNHPMHQNSQTANAV

SEQ ID NO: 184164 - protein, 318 aa, unidentified
MNTKTNQNINVGVDTGKYQLDIYIRPLDIYFTVENNEKGIKEAVKTIKKYKPERIVIEATGRLEMPFILACANANLPFTIANPVHIKRFAGALGQRAKTDKLDAQLIAHYSEAIKPRLSRLKPDTMQAMSDLVTRRNQLLVMQTMEKNRLQIMPKELAMTIKPVLTLFKNQIIKIENKIVKLIESCPEYQAKNMILQSMTGIGKIAAASLISNLPELGYINSKQASALIGVAPINRDSGRYKGQRKIQGGRPQVRTVLYMAMMSAMQSNPVFKSTYQRLLAAGKPKKVAIIACIRKMIVILNSMLRDGVMWEAPKVNN

SEQ ID NO: 184165 - protein, 389 aa, unidentified
MNLFVGLDVSSEKLDVCFLSDDDNLTILEEITLGNDIDGATTVKEKVITFQEAYGFNQVIMGMESTSMYSFHPAMFFNQDKELKAINTIVTIENPFRISQFSRMFDEDKTDRNDAFRIADFLRIQRFTTSPIKEEKYMALQRLTRTRYQLIKQLVRTKQHFLENLSYKCNTLTRELKELDGTTSVFSTTVMSLMTNNYSLDELAELPLEDFATLLQEKGKGRFKNPKSLAKSIQRAIANSYRLGTIAQESVDVVLSVLVREIRALEASIKDLDKAIEQLVVILPEYQCLTSIPGVGKVYAAGMIAEIGQIERFEDQTKLAKYAGLSWKVKQSGNYQSEYTPLTKQGNRYFRYYLVEAANSVRRYLPEFQEFYSKKFKETPKHQHKRASS

SEQ ID NO: 184166 - protein, 431 aa, unidentified
MDDVSRFDQFCKLRREIRGSTKYLIVGIDIAKDKHHAFFGTAKGRALWRRLIFTNDLAGFERLIEQVNTLIAQHKLEQVVFGLEPTSNYHKPLAHWLTGHEYLVVLVAGKAVKDNRELLDGRWDKNDTKDSANVADLISQGKCLFYETPEDEIISLRNLLAVRKQLKKEEHRLRMRIRNGLLAKYFPEMDRHWGKCLEENLAIVRWYLDPRKITETDFNLFVQHVTATDRGLRQVDRLRKIYEAAQHSIGLPVNAAAVYEAKMLVERFKTVREQGLQTMGQIAIICRKLPAYKLLLTIPGFGPYIAPLVLSALANPLRFQSRKQVIRLAGLDLNASRSGKKSQESVPVISKKGDADLRYGLYQAALIASYHNDCFRRIYHRMLEGRQGERGIKTKVRVKIAAKMLVIAWTMLKNNASFNAARMAAEPDQQR

SEQ ID NO: 184167 - protein, 313 aa, unidentified
MSNKQQIEFEQVIERGCGIDVHKSIIVATIKGTGIREETRSFDGFTHSIEQLRDWLIANNVSHVAMESTGVYWKPIYNILEEGFEILLVNARHIKNVPGRKTDKKDSKWIAKLLLSGLLRGSFIPPKPVRELRDLTRYKRKVIEQISSEKNRIQKLLEDANIKLSSVVSNMSGATATKIIDAMIEGQEDVEELLKFRHGKMQSSIEDLASSLKGKLTDHHRFMLSIIKESIADKKRTIQKLDQKIENQLKENELALDAGLLETIPGVAKEGASYIIAEVGNNMDQFPNEQHLASWAGMSPGSNESAGKKKVVE

SEQ ID NO: 184168 - protein, 299 aa, unidentified
MLDTTTFVGLDVHARSIKAVSLDVMTGEVRCATFGYDAGAVAAWVRSVDPKARCVHESGVTGFDLQKRLSGLGVDCAVGAVSKMIKPSADRRRKNDRNDAEFLARMLSVGNVVEVWVPDDECEAARDLTRALEDARDDLSRSKQRLSKFLLRHGLVFDERTPTGRRKGNWTRAHWSWIESIRFAEGADNDVLAYYVDAVRRAAEEKARLEGLVEAEARKPRWRKRVDSLRCLKGVDTASAADLVFEAGEFSRFRNARSFAAWVGLTPSEHSSGESDRRGAITKAGNKHLRKTLVEAAWC

SEQ ID NO: 184169 - protein, 334 aa, unidentified
MDQGTGECGERRLSHSDGEAEKFYRDLKQRGVSVRVGMEATGYSRWFERLLAELSIELWIGDAAKIKTKRVRKQKTDRQDAQLLLRLLLEDTFPRVWVPSPENRDLRQLLWHRHRLVQMRTRIMNQLQALAMNEGKRWKKKLWSEQGRAQLEKLPLAAWASRRRQDLLELLDRMNPTIEELTAAVEQEAKKWPEVLRLMTHPGVGPLTALAFVLIIGTPERFRCGKQVGSYIGLIPSEDSSAGHQRLGHISKQGNTLLRYLLGEAAQAAVRCDSDWRRRYVHLAMRREKNIAKVAIARKLAVRLYWMWRNGWEYSQSIEFGSYAGELATGHGVK

SEQ ID NO: 184170 - protein, 409 aa, unidentified
MVSVTIRVPSDTRKGGRQQETREFGTTRRQLLEMADWLRCRGVERAGMEATSDYWKPVYFLLEQQGLDLLLYQASQVKALPGRPKTDKLDSVWLAKVTERGSLAGSFVPPGDIRRLRTHTRYRRKLTQARTAEKQRAEKLLEDAIKLSSVVTGLHGVTGRHIMDRLIAGDRDPRALAQLARARARRKIAELEQALEGTEFFTPAHAALLKTMLERIDWINAEIARLSQVVEELLAPYEEQLQQAESMPGWGRRAAQDVIAETGVDMSRFRTPGHLASWAGRTPLDKQSGARKGQRRHKRGNRYIGAVTGETAVAAGKTDTREGARHRRLARRRGKAKACVATGNTQMRVFHVLLSNPGMRYEDPGADWYDNQQQRARKLSRLVGALDAMGYDVTLSRKPGPGPEAASAA

SEQ ID NO: 184171 - protein, 370 aa, unidentified
MLNTTTFVGLDVHARSIKAVALDAMTGEVRSATFGYDAAEVAGWVSSVDPSAKCVYESGVTGFDLQKRLSSMGIDCVVGAVSKMIKPSADRRRKNDRNDAEFLAHAVGRQRRGEVWVPDDECEAARDLTRALDDAREDLKRCKQRLSKFLLRHGLVFSETNAKGQRKKNWTAAHWAWIRSISFPDKADDEVLAYYIDAARQAMEDKARLERLVEAEASKPRWKKRVDSLRCLKGIDVTSAADLVFEAGEFSRFKNARSFAAWIGLTPSEHSSGESVRQGGITKAGNKHLRRVLVESAWHYLGCSPHSKDLAKGQAPDPGARRHAAKGVRRLVGRRAAMLERGVHKNKANVATARELACWCWAIGRMVENG

SEQ ID NO: 184172 - protein, 343 aa, unidentified
MQTITTIGLDIAKSVFQVHGVDAGGRVIVRRQLKRRSVLAFFQKLPPCLVGIEACASSHHWSRELQALGHTVRLMPPAYVKPYVKRQKNDATDAEAICEAVTRANMRFVPTKTPEQQSGLVLHRTRHLFIRQQTAVINAIRAHLAEFGIVAPVGRHGVEELLNVVADPGDRRVPEMARACLLAFGAQLRRIKEQILEFDRLIRAWHRSNEMSMRLDEAPGVGPVLATAVVAAVADPKSFRSGRNFSAWIGLVPKQHSSGGKNRLGNISKQGDRYLRGLFVAGALAVIRYAKIHGTKHRPWLTALLARRPTKVAAIALANKIARMVWAMMARGERYKEPAALAR

SEQ ID NO: 184173 - protein, 359 aa, unidentified
MTSAQVFVGIDVSKAQLDMALRPEGRFSTSNDDAGFAQILERLRDVPPTLVVLEATGGLEIPITGILAAAGVPVVVVNPRQVRDFAKATGRLAKTDALDAQTLAHFAEVLRPTRRPLPDAQTQALAAILARRRQLVEMLTAEKNRLGSALKPVRTSLRTHITWLERELQHTNTHLADAIHQSPVWREKDDLLQSVPGIGPVATSTLLANLPELGTLTGKQIAALVGVAPLNRDSGTWRGKRTVWGGRAHVRAILYMSALVATRFNPVIRAFYQRLCAAGKAKKVALTACMRKLLTILNAMMKHHTRWEHTTGEAEAVRHGRLSPSGGYQPTGGRAIVDPRPMLCDIFPMHHEKNQLSRA

SEQ ID NO: 184174 - protein, 345 aa, unidentified
MKITTIGLDLAKRVFQVHAVNGAGEVTVRKTLRRAQMLGFFAKLDPCLVGIEACGTSHYWAREITKLGHKVRLMPPAYVKPYVKRGKTDAGDAEAICEAVTRPTMRYVAIKSPEQQAALALHRTRDLFVKQRTQLVNMIRGLLAEFGIEIRRGITHALMLAERIAAGEIPDIPPLAAKVITGLAGQILDLQARLREIERELLAWHRSSDIARRLATIPGVGTICATALAASVTDPHKFRSGRQFAAWLGLTPLQHSSGGKERLGRISKMGDKYLRRLLVVGMTSLVRRAKYKPDAVDARLAHLLSRKPVRVVTVALANKTARVIWAIMTRGGTYRAPQPAGAVVA

SEQ ID NO: 184175 - protein, 435 aa, unidentified
MDEVTDEPLYRNRVCGIDIGKAQMVATIRVPSDRDPARRSAETRTFATTKRGVLALADWCRSWQVPAVVMEATSDYWKGPFYRLEAEGFECVLADAKQVKNLPGRPKRDPSDSRWLTACFERGAVTPCFVATPEFRIIRLHTRYRRDLTDERTREKNRAEKLLESAALKISSVLTDLHGVTGRDIMDHLIAGERNPKVLAQLARAAARRKISQLEEALEGAEFFTAEHAALLATMLARIDRLSADIGDLTEVIERLLAPYEEQLQQAESMPGWARRAAQDAIAETGVDMSRFRTGGHLVSWAGRAPQDHQSGKRKGRAKAKKGNRYLGAITGETAVAAGRTQTREGVRHRRLVRRRGSAKACVATGNTQLKVYHKLLSNPGMRYEDLGSDYYERQRDVRRQIAHHVGKLGSLGFEVTLCRIPEPDPDGTSPAQPA

SEQ ID NO: 184176 - protein, 419 aa, unidentified
MTDPPLQSWLRFIAIDIHKHYLMIGAIDAAKQVVLPPRRVELSRWPKWAHANLLPTDAVVIEATTNAWAIYDLLAPLVGRAVVVHPAKVKLIAASRVKTDKIDVLSLAHLLRADLLPEVWVPPQHVRELRALLSHRRRLVSLQTTAKNRLQSVLHRLNLRPPDGDAFANKQRAWWTELDLSPTERLRVNQDVATLDHVVAQIAAVDAELRCLSTSELWAEQVPYLVQLPGIALLSAMTILGAVGDITRFATAKKLVGYAGLGAGVHDSGKTHRDKAITKQGRRELRYVMIEAARAAVQSHPYWKDEFAQLERRIGDAKAIVAIARKLLMVVWHVLLAKSADRRADAEQVAFKLMVWSWKLSDEQRGGLSSRQFIRAQLMRLGLGEELTHITRGGTRRPLATSEEVLALRPELRGPPNTT

SEQ ID NO: 184177 - protein, 345 aa, unidentified
MNKLVFTQQATVFCGIDVSSRTLTVSQIGSDGSLAQREFANSASGHTALLAWLARCNCKVRVSLEATGIYSLDLALALDREASIELAVLNPKLVNRFAQTLRRSKTDTADAVVLAEYSQRMPFTPWQRPLASHLRLRTVGRYIESLVVDQAGLKNRLRTAEGTSTTPRAVLVDLRQALAALERRVAKMRREALELVRAEAALWERFRLLISVPGIAEISALQILSELVLLAPTMTVRQWVASSGLDPAHQQSGTSLHKPSRISRAGNRHLRRALYMPALSAARNDPHLRAFYQALRSRHKTGLQALMAVARKLLHAIYGIFKTGTPYDGSRLFPNLLLELESTAG

SEQ ID NO: 184178 - protein, 376 aa, unidentified
MTASGEVFVGIDTAKARNAVAVAEDGRDGEVRYLGEFDNTPDAVAKLIRKLAGRYETVHVCYEAGPTGYGLYRQILALGHACVVVAPSLIPRRPGDRVKTNRRDARSLARLLRAGELTAVWVPDETHEAVRDLVRTRAMAVEDYRRKRQHVTAFLLRHGRSYDGKTSWRGRHRRWLDGQSFAHPAQRLAFQEMLNAVQATVERIDRLEAALFEIVPAWTMAPVVAAFQAMRGVQFMTAVTMVSEAGDLRRFDHPRQLMAFLGLVPSERSTGESRRQGGITKAGNSSARKALVEAAWTYRHSAGVGVAHQRRQAGLPPQVREIAWKAQTRLCARYRRLMAKGKRNTVVVVAIAREIAAFLWAIARHIAPLPPMAAVV

SEQ ID NO: 184179 - protein, 335 aa, unidentified
MEHCGIDLAVRSSSICVTEESGKILEERVVPTEEEAFTEFFGGREQMSCLVEASPLAEWAAKVLEGLGHRATVIDTRKAKGVIRTKKKTDRLDARNLAKMSRTGWYTAVHRKSARARAMRTYLQARQGILATALAQGSRIRGLLRAHGIKLGQVADSRYEQRVRQLTMEKAPQLWPMLQPLLRLRAEAMRSAREMQKQMASQMSQDEVGRRLMSVPGVGPLTASVFMATLDEPQRFGSGDQVAAYIGLVPSVQQSGEKDFHGQITREGDRLLRSHLFEAAHTLLTRKKGTSRLKKWGLKLAKKKGYGKARVAVARKLAILLHHLWITGQSFQAAA

SEQ ID NO: 184180 - protein, 384 aa, unidentified
MKKNISRFVEMKSTVIERKAGVQNPPGRTIPQRPDYQAVVGLDVGDRQTHYCVLDLDGELAVEGAVATREASLRVQFEGKARMRIALEAGAHSAWISRLLVALGHDVIVANPRKVRLISSSDSKNDPADARTLARLAHVGPELLSPIQVRSEKTQVDLALVRARDVAVQSRTKIINAVRGIVKSTGRRLPKSSTLTFARKAKDACPEALLPALLPLLRVIEELTREIELYEKLVSKKAETEYPETNAIRTIHGVGPLTALAFVLLLNNDRSRFRRSRDVGCYIGLRPKQRESGQRAPQLGITKAGDPLLRRLATQCAQYILGPFGKDSALRRWGLSLALRGGKNAKKRAVIAVARKLVILMHRIWITQEVSEPLRGVASKSTAA

SEQ ID NO: 184181 - protein, 470 aa, unidentified
MTYDFVMGMDVGKYFHHACVLDPQSRQVLSQRINQHEGSLRKPFGKFLANDAEVLVVVDQPNNIGRLTVTVAQAIGADVHYLPGLAMRQLSRIHVGNSKTDVRDAYVIAHAGLNLPDALRSVDRVEDVFLQLKVLNGIDEDLARAYTRLTNQMRSTLVGTHPAFEHVLHGQMIHHKWILHLLAKYGGPTKIRRIDKARLAAFARGHRARNPEPVIDAMLAAIHGQTVSIAGAEYAELGVAMSAKDALAKLEHRKEIEAQVLELIQDIPQTEILLSMPGIGPRSAAQILMTVGDMSDFPNAAHLASYAGLSPRTNQSGTSVMSNSPNRAGNKKLKNALWQSSCASIRFHERSRQFYERKRNEGKRHNAAVVALARRRLNVLFAMMRSGELYRDTPQPRRPQQPNHSKTRSRLCRKPNRPFSMPENNIRSVKQKPFPPPNNLTHGVDNLYRNTPPPAHTSPPLEKVISLKLK

SEQ ID NO: 184182 - protein, 367 aa, unidentified
MKKVSTVAAKQGRNFSQQRLTIGLDLGDRSSWYCVLDERGEVLLERRLSTTPKAIREVFGGMPRSRIALETGMHSPWVSRLLSELGQEVIVAHARSVRLIGESRKKDDRLDAQTLARLARIDPQLLCPVKHRSARAQADLTVIRARAGLVRARTALVNTARGLAKSYGERLRSCNVRNLNPEKAESLSPELQAALEPLLNAIESLSERIVEYNERIENLAQQSYPQVALLKQIKGVGTLIALTFLLTLEDPHRFGKSRDVGCYLGLQPARRNSGQSEPQMHISKEGDPYLRTLLVQGAHHILGPFGADSDLRRWGLKLAERGGKNGKKRAIIATARKLAVLLHRLWVSGEVYEPLRNSHPAALPAAA

SEQ ID NO: 184183 - protein, 402 aa, unidentified
MNAVGIDVSKGKSMVAIMRPFGEIVSAPFEIKHTASGINSLVELINSVEGESRIVMEHTGRYYEVLAHQLSEANLFVSAINPKLIKDFDNDSLRKVKSDKADAVKIARYTLDKWQNLKQYNVMDELRNQLKTMNRQFGFYIKHKTAMKNNLIGILDQTYPGVNTYFDSPARSDGSQKWVDFASTYWHVDCVRKMSLNAFIDHYQNWCKRKKYNFSQSKAEEIYGKAKELVPVLPKDDITKLIIKQAVDQLNSASITVESLRTLMNETASKLPEYPVVMAMKGVGTSLGPQLMAEIGDVSRFTHKGAITAFAGVDPGVNESGSYEQKSVPTSKRGSSDLRKTLFQVMDVLIKTHPQDDPVYQFLDKKRAQKKPYYVYMTAGANKFLRIYYGRVKEYLASLPES

SEQ ID NO: 184184 - protein, 352 aa, unidentified
MSTVPVFVGLDYSLTGVQVCVLDREGKMLGNQKVPDRVDAIVQAASRFGPVHSAAIEACCGASDLAERIVQQHGWVIHLGHPGYVSRIKQNPDKTDFSDAHLLADLERVGYLPRVWLAPKSLRELRTLVRDRQALVRQCQNIRLRMTALLREHRQVSPCNRWTQKWYAWLKHGVELGEHSHWVLDRQLDRLAWMTGEIRQAEKRLHEVMQDDRLVQFLLKIKGVGYVTAWTLRTEIGRFDRFRTGRQLARFCGLSPCNRSSGSKMADAGLIRCANPELRRVLIEAAWSLIRHQPRWQKLAASLRARGKKGSVTCAAVANRFVRWLWHQVMNNVENAPPAQRPTVADVPVHLG

SEQ ID NO: 184185 - protein, 336 aa, unidentified
MLIIGCDFHTRFQQNAMLDPETGEVMERRLEPGKGEAGAFYAALPGGAQVGMEATGYAHWFEEMLAGQGHELWVGNAAAIRAAMVRKQKTDARDVGHLLDLLLRDKFPRIWIPSPNDRDTRQLLRHRHKLVCLRTSVMNQLHALAMGRGICRKAKMWTAAGRQELEGLALGPWASRRRQELLEMLERLDGSIEELDKAVIQEAKSRPAAVRLMEHPGVGPVTSLAFAVTIGPVARFRKSKQLVSYLGLNPREHGSGGKQRLGSISKQGNSMMRFLLVEAGQTASRMDPELRRDYQRLKFRRSSAVGKVAIPRKLAVRLYWKLREAAQPSAAGSHAG

SEQ ID NO: 184186 - protein, 342 aa, unidentified
MNQVQAYHFIGLDIHKRSIVFCEKNVTGQTVAHGAITARKPELVKFAQSRARPWVGGLEATLFSGWVYDVLAPYAIELHVGHPKRLKALSKNKNDRIDAELMASLLRADLFPSCYMASPQVRELRRVLRYRNFLVIEATRMKNKASGLLMEVGVEYTRSKLHGKKYFSELLDGLEEVPQSVRELLRMTRMNLEVFTGAQRRLLDALSRHAALRERLELLKTVGGVGDVTALTWALEIDDPYRFSRIKDAQSYCGLCSAEHESAGKQWRMPLSKERNPHLQTILIEAAKLAPSRQPHLRRVHEQALQKPGGNRNRATLEVARKLTAYLLAVDKSGQPFKAPDL

SEQ ID NO: 184187 - protein, 350 aa, unidentified
MIAVNKDIITTIGVDLGKNTFHICAMNDKGTIVLRERLTRASLPKRLANIPRCLIGMEACAGSHHIGRQLATLGHDVRLMPAKYVKPFLKGHKNDFRDAEAIAEAVQRPTMRFVPFKNDEQLDLQALHRVRSRLVGQRTAVINQIRAFLLEHGVAVRQGPGALRRALPSILAQRTDVLSPRIIHLIEDLTDDWRRFDQRIADVTREIEQLAKQDEHCKGLMGVPGIGPMTASAMVAAIGDGAAFSKGRDFAAWLGLVPKQISTGDRTILGGISRRGNRYLRTLFIQGARSVLQRSDGWEKKSFGRWLIAASKRLHKNVLAAALANKLARIAWAVLSHAREYDAAFALKAA

SEQ ID NO: 184188 - protein, 472 aa, unidentified
MSKGSGSGMTRGDRRRNARRERLRALLPRDGAVVGIDLAEEKQALAVIDHDVRVLARKTVRVKAFGLGEALDWAVAQARGKGFTQVTVACEPTGPRWMQVQRLCAERGLPLVCIQPLVSHIAREQQDYTTHKTDESDCVMIARLAVELHCYIPEELDETWAHLRHLGRRRQQLITAQTASGQRIMDFLSVAWPAVTETCADPVESRTWLAALEVVTARCGADPGALAAMGREGFTALTRGGVAGWGITRAHGPICARVFAALTDTEGAVTWSRRGLLRRVADELGDLKRTRAQLRQAGADMVAVLDELGLSRLADIPGLTAVGAAAILAETGDPRRYDSSSSLVKHAGMSPSDNASGAFAGQAHISRRGRPGLRLVVWRAVWPMLQYNPVMAAKYQAMTRAADAAATGAGPRQGTAAQAAARARRAKARVACAASLLRWIYCMIVHDTSWDPAAASGAASRHDTARTQAEAA

SEQ ID NO: 184189 - protein, 345 aa, unidentified
MKITTIGIDLAKTVLQVHGVDERGKAVLRKQLKRKDVLSFFANLEPCLIGMEACGSAHYWARKLSELGHTVRLMAPQFVKPYVKTNKSDRNDAEAICEAVARPNMRFVAVKTAPMQAVLALHRARQGFVKARTAQGNQIRGLLAEFGIVIPKGIGHIAKRLPEILEDGENGLPGMMRELLQRLGANLKDMDKHVGELERQITLWHRDDEQSCKLEAIAGIGPITASAYVASVGDAKSFKNARQVPAWLGMVPRHEGTGGKVKLGGISKRGDVYLRTLLIHGARAVIAHIERKPDQADTWLKKLLARRNKNVATVALAAKNARIAWALLAHERSYQHDYVATRTAA

SEQ ID NO: 184190 - protein, 346 aa, unidentified
MEITTIGLDLAKNVIQAHGINSAGEVAVRKTLRRSQVRRFFEQLEPCLVGIEACGTSHFWAREITKLGHEVRLMPPAYVKPYVKRGKSDASDAEAICEAVTRPTMRYVAIKSPDQQAALALHRTRDLFVKQRTQLINMIRGLLAEFGIEIRRGIEQALMLAKRIAAGEVPGIPSLAAKVIAGLAGQVLDLQARLGEIERELQAWHRSNDVAKRLATIPGIGTVCATALAASVTDPHQFRSGRQFAAWLGLTPLQHSSGGKERLGRISKMGDKYLRRLLVVGMTSLIRRAKYKPEAVDPWLAELLSRKPARLVTVALANKAARVVWAIMVRGGVYRRPAGAGVMAPV

SEQ ID NO: 184191 - protein, 424 aa, unidentified
MKPSTEYAALIGLDWADQKHDVCLLVPGQSASERLVLTNTPEAVTAWVQQLRQRFGGRPVAIALEKTRSGLLHTLMQYEFLVLYPLNAAAVARYRQAFATSRAKDDPTDAELLLDLIARHRAEFQPWTPDTATTRELAALGEARRQAVNLRTRLSNRLTATLKSYYPQALVLAGKDIYSPLACDFLTKWPSLPAVQRARPATVRRFYHTHHSRHANVIEERLQLIAASQPVTTDVAIVAPATLTVQMLVAQLRVLADAIDRYEARQAALFATHADAPLFQSFPGAGAVFAPRLLAAFGTDRTRFETAANLQQYSGVAPVTERSGNRCWVHWRWGCPRFLRQTFHEYANESIRHSLWARAFYESQRQKGKGHSAAIRALTFKWQRIMWRCWQDRQPYNEVYYLTMLQKHGSSLLKLIAEPMEKVA

SEQ ID NO: 184192 - protein, 387 aa, unidentified
MLFCGIDVAKHQHAALVVDDKGRVVQSAFSFDNSRAGFDQLATTLTELSEPVSVGLEATGHYWLALFDDLTRQRNSVTVINPLQIAAYRRSGIRKVKTDTADAFWIADFLRIANLRPTDQELPVILQLRELSRFRFWLTDQIGDCKRKILCILDRVFPEYETLFSSVFLKSSRALLKEAVSAQEIADFDLAELTVLLRDASRGHFGQPKAKAIQNAARRSVGVGFLVDAVRVQMRCLLQQIDLLHEQIAHLDAALAELMDQIPQYITSIPGIGLATGAAILGEIGDVHRFESADKLVAYAGIDPTVYQTGQFQASEAHMSKRGSPYLRHALWLAATVAVRHDPDLQAYYETKRKQGKHHGTVIGAVCRRLLARVYVILKEQRPYVIR

SEQ ID NO: 184193 - protein, 380 aa, unidentified
MNKTSKKKISKKRTAPQSQPAIATVCESAPRKAKTIKLGVDVHLGSYVVVRIIDGGTPQPGQRFTPADFLVWCAKQLTLAEQVFTCYEAGPFGYTLHRRLKEMGITNYVIRPRDWDEYGKKVKTDKRDALAMALCLDRYVSGNLKAFCVVRVPTEAEEKQRSVSRQRESLQQEKQRLAAQGRSHALYYGGHLQGEWWREAAWKKTSQKLPAIVANLLEPLRRLLSAVEAELKVRTQELEAAAPEALPVGLGGLTSQILEREVADWNRFQNRRQVASYTGLCPREDTSSDRRFQGAINKHGNRRLRPVLVEGAWRLVVFQPEYRPVKKWRAVLLDKKSSSGRRKKIIIAIARIFAVDWWRIRTGRCTAEALGLKLQPAPGA

SEQ ID NO: 184194 - protein, 423 aa, unidentified
MQHPKMQYVYVGIDSHKETHCAVFLNCFFEKLGEISFPNVPNDFPAFLGKAQQFRLEGTKLAFGLEDVTAYGRSLTVFLTKKKQLVKHVNASLVASERNSRNVLHKTDAEDAECAARVLLNRFDQLPEADPQDKFWVLKSLVTRRDSIVKMNTALKNHLHAFLTSHYPHYQQFFANIDCNSALAFFEQYPSPSKLAGVTVAELAELLEDNSHRKLGLAKARQILEYVKKDGDTKTQYQESRDLAIQSTISQIKHNLQEIDSLDAILEDFLNLFPYKLQSMKGIDTVLAASLIAEIGDITRFSTPAKLARYSGIAPVTYASGKSDVQFANQRGNRVLHALFYHLAVLVTMTAGKNKRIINPFFYHYYHRKISEGKTKAQALKCVQRRLVNILWSMMTRQTEYLNPPAENYPVKEEAKEKQAEKT

SEQ ID NO: 184195 - protein, 315 aa, unidentified
MHAPRTFMVGIDVSKAHLDVAVEGKRTVVRFDNDAAGRAALAAAVAGAELVVVEATGGYEMATVRALMAADIPIAVVNPRQIRDFARASGRLAKTDQVDARVILHFARAMRPAQIPHIDDGRIALAALVTRRRQLIDMAVAEKNRLEHAPQAVAVLIGETLAALKAQLARVDAAIALAIEAEPDMAARRDLLLTVPGIGEVGAAVLIAELPELGGIDDKKLAAPVGVAPMAHDSGAWRGQRHIAGGRATVRCALYMATLSAIRCSPAIKAFYTRLRDAGKPPKVALVAAMRKLIIMINTILKRHTPWSEPQQHGC

SEQ ID NO: 184196 - protein, 476 aa, unidentified
MLIKPANLRDWIDFDSKAARDHVIETINVIEVLIREIASSFTARTKKNNRESEVITMSNPMTTLYVGIDVSKNSNVVCCLNFEGKKLYSGSFKNNQDESLMLQSKLLETKTNNSFDAIEIVLESTGVYSFHIGLFLSSSEPLNSANTTVYVVNPKMTNNYAKSYIDMTKSDPSDSFMLADFARCGRTKLLTPFRGKQRLALQRLTRYRKHLVDLLCQEKMYVLNNIFLKFSEFNNSSHDFKTFANTFSTTSIELLTNYYSPETIASTSIDKLANSLSKYSKNKFKDPKAVAMKLQSAARASYRLDKVMYEPINSCIASSFCLIRAYEKQIKDIEVQINSLIKGLDNQNEYKSLMSIPGIGPVYASGILSEIGSIEDFQSDDALANFAGLTRKKTQSGNFDASDTPMQKNGNSYLRYYLIEATQNVISNISSYKEYFDKKKSEVTNHAFARARVLTARKVLRLIYSLTSQNKLYTPK

SEQ ID NO: 184197 - protein, 357 aa, unidentified
MKIIKKIIDFTGEKFFIGIDVHKEHWTITIRNNGIILKTFTMEPLTINLINYLKRNYPGGEFYSVYEAGFCGYWIDNELKRYGIHNIIVNPSDIPTRSKERITKTDPVDSKKLSRELENGTLKAIYIPETNKEQFRTLCRLRYQLVTNQIRLKNRIKSLLAYYGITVPKERNLKTWSKKYIEYLNKVELPHKLLRESLNIHLEELSLLSERIERVIMKLKECIKEYGVEREIIILTGVPGIGFVTAITLYTEIMDINRFNRFDELCSYVGLVPAVHSSGQRERIMGISNRQSKYLRNLIIEAAWTAIKKDPAMTIKFNELCKRMCKQKAIIRIAKKLLSRIASVWKNNIEYQLAVVQ

SEQ ID NO: 184198 - protein, 354 aa, unidentified
MSNKSAATVATMGIDIGKNSFHVIGLDERGAIVLRQKWSRAQVETRLANIPPCLIGMEACVGAHHLSRKLQAHGHDARLMPAKYVRPYSKGQKNDFRDAEAIAEAVQRPTMRFVATKTADQLDLQALHRVRERLVSQRTGIINQIRAFLLERGIAVRQGVRFLRTELPIILTTRSNVLSPRMLRTIEDLAGDWRRLDERIQGLSDEIEAVAHQDLACERLMTVPGIGPIIASAMVAAIGDGAVFTKGRDFGAWLGLVPKQISTGDRTILGAISRRGNRYLRALFVQAAWVVLIRIKDWERYGLKAWIDAAKKRLHHNVLAIALANKLARIAWAVLRKEREFECIRTRAMTSRPA

SEQ ID NO: 184199 - protein, 310 aa, unidentified
MGTLTVVGIDVSKDRLDVAVRPSGEAFAVARNAAGLDDLVKRLSALGPRIVALEATGGFETVVTATLAAAGLPVAVVNPAQVRAFAKALGQRAKTDPIDAAVIAHFAETTKPEPRPLPSEETQVLSDLVARRRQIVEMIGAERQRMKRARGSLAKRIGRLVAVLENELNEVDTDIDGAVRSSPVWREKEDLLSSVPGVGPVISRTLIAEMPELGSLGRREIAALAGLAPFTRQSGQWRGRSFIGGGRTSVRTALFMGALNGIRRNPVLKAFFNRLVAAGKPKMVAIVAVARKLLTILNAILRDQKPWQTA

SEQ ID NO: 184200 - protein, 367 aa, unidentified
MRKNIIYWVGMDVHADKIQVAVYRGDAASPVEEYESQTDARSLGRLLKRFQGLPGDVRCVYEAGPCGYVLQRYLTENRILCEVAAPALIPKKAGDRVKTDRRDARKLGRLYRAGELTMIYIPKEEDESVRDLIRARETAVKEVRRVRHYLGKFLLRHGHRYRDGKQWTLKHKAWMKGIRFDLSSSRIVFEEYELSLEQAEERVKRLTHEIEEIAKEPEREKLVSALMVMRGVQVITAMTILFEIGDLRRFIKAKDFMAALGLVPSEYSSGGKTSRGSITKTGNTHVRRVLVESAWHYRHRPTVGKAIKARRAGKPPELLSIAQKADVRLNRKFRRMTERGKRSTVAAVATAREMAGFVWAIGQQAHP

SEQ ID NO: 184201 - protein, 347 aa, unidentified
MKKLVKQIVGIDVAQNELVVCLGRMAEDWSPELYANKAFANNPKGFTALESWVKKFVNPEVSVRFVMEATGVYHEPLAYYLFDQGHPISIVLPNKISNYFRTLEVKTINDQTASQAIALFGLERKLEDWKRPNAVFKRLRQLVRERDQLVQERTIVKNQLHAEKSEAEPGNTSMQRMKKRIVLLDKQEMEIKEEIQGIVKKDTSTNEAVKIITTIPGIGLLTAVTVLAETNGFELIRNKRQLTSYAGLDVVQKQSGTSVQGKPRISKKGNKYLRKAMYLPALSVMRCDERFKGIFARVVAKNGIKMKAGVAVQRKLLEMTYTIFKTNQPYDKDYFKKQIEEQIIRQN

SEQ ID NO: 184202 - protein, 342 aa, unidentified
MEKRHIGIDLHRNQFTCCVRLANGRNYLSTWKLEALPEFVKKLRPSDEVAVEVTGNTRLFYDAVAPQVARVVAVDPNQFRVISHSVKKTDPNDARSLALYLAKGLLPEVRMKEKTQAQIASLTQTRDPLVKLRTALQNKVNNILSAHGINLEKEALSSEKKLGEVLAMPFDPMVQIELKVIVEQIRSLNQSIAELEKTITDEGRKLPGHKNLTSIKGIGPLSGSILLSVIGNIHDFPEEGKLAAYFGIVPRVSNSNETERSGRITKRGSKLGRTALVQCALIAQRYSPYRKKFYEKTKARQGTGKAIIALARKLLGIVYRTLKNNGVFEDFPNFVLAEGATA

SEQ ID NO: 184203 - protein, 448 aa, unidentified
MSKPQVIDDQEHERVFERVAAVDVAKKDGMVCTRTPHPSRPGGRRSTVWTVQATVPAVRQLAGQLKAERIQKVTLESASDYWRIWFYVLEAAGLDVQLVSARQARQLSGRPKTDRLDAMWLARLTEMGLLRPSFVPPAQIRALRQYTRARTHLTGDRTRCFQRLEKLLEDALIKVSSVVSTLATASAQDMIAAMIAGERDPQALAALARGRMKARHDALVAALDGMFDDHHGQIAQLLLDQIAFCDARIARLTMLISEQLAVICDGWGVDADGTTGPVAGTSDDAPVLSAVARLDEIPGISAELAAAIIAETGLDMTRFPAPGHLVSWAGLCPRTIQSGARTRHGKNQGNAYLRGRLGQAANGAAGTATFLGERYQRIARRRGKAKAQVAVARSILVIIWHLLADRQARYADLGPGHYQARTDKNRKARNHIRQLQALGYTVSITPAA

SEQ ID NO: 184204 - protein, 338 aa, unidentified
MKKRDYIYLCGLILPFKLSHMEEEVVFDQLVSRGCGLDVHKKEIVATIRGTGLRKETRSFGATTRSLTELKDWLLENEITHVAMESTGVYWKPVLNILEPGGFTILVVNARHIKYVPGHKTDKKDSAWICKLLLGGLLKGSYVPDVNQRNLRDLTRYRRKLVDQQSAEKNRMIRIFEDANLKLSSVFSDVTGATCTRIIESIIRGKEDPEELIELCTHKNLKTSRDEIKEAIRGHMTDHHRFMLSIIRKDIENIQSLINELDKKIENLMLPYADDIARISEIPGVGEQTAKELIAEIGTDMSAFPTEGHLASWAGMCPGNNESAGKKKVPAPLMVANR

SEQ ID NO: 184205 - protein, 407 aa, unidentified
MEVVIERACGMDVHKDNITACILTPEGKEIQTFSTKTVFLLQLVDWIKQHNCTHVAMESTSVYWKPIVNLLEAEDIEFLVVNAQHMKAVPGRKTDVKDAEWIAKLLRHGLLKASYIPDRNQRELRELVRYRRSIIEERARQHNRIQKVLEGANIKLGSVVSDVLGVSARDMLDAIADGEEDPEKLANFARRTMKKKKEELELALKGYINSHQRLMLKTILGHIDFLTEQIEMLDQEVADRVSSHQEDVARLDSIPGIATRMAEQILSEIGTDVKKQFPTAAHMCSWAGLVPGQNESAGKRKSAKTKKGNKYLRSALTEAAHSVRGSKNYLGALYRRTASRKGKKRAGIVVAHAMLRISYYLLTRKEMYVDLGEDYFDKQRQQSIVRHSLRRLESLGYTVTLEEPKAS

SEQ ID NO: 184206 - protein, 330 aa, unidentified
MTTHAPDSNPGEAAATIWIGIDVSKAELELHAPAGCGLKLPARLSNNAAGFAALARHLDIPAPVHVVFEATGGYERPLMLHLQASAIPCTRANPAQVRDFARSRRMLAKTDAIDAAVLAAFGESLRPAPTPAADPRLAELAELLHYRKHLLDSLDRDRAQLEHDKPRQIATLIKTRIRTTRARIDRLEKMAGELVAAVPEIKAAVDAMSTVKGVGRLTAMSVYAAMPEVGTMTRNQSAALAGLAPLNRDSGTLRGKRTIKGGRPVVRKALFMAAMTAVQYHPDLKKAYAGMVARGKLKKVALTAIMRKLVILLNSLVRKSIAATSPPIST

SEQ ID NO: 184207 - protein, 406 aa, unidentified
MQVVYERCCGLDVHKAKVVACLLAGKQKEIQTFTTMTEDLLRLATWLTDVGCTHVAMESTGVYWKPVYNLLEATGMTVLVVNARHIKAVPGRKTDVKDAEWIADLLRHGLLRGSFIPDRPQRELQELIHYRRSLIDERTREVNRIQKVLEGANIKLSAAISDVVGVGGRKMLGRIVEGETDPEAIVGAVQTKHLKATQEELKRSVQGFVGPHQRMMLEIQLEHIDSLNDKIAYIDAALKERMHPFADQIARLDTIPGINVVGAQEIIAAIGTDMSRFPTAKHLASWAKLCPGTNESAGKRGSGATGKGNPYIRTTLAEAAWGASHTKDTYLRAQYYRIRMRKGEKRAVIAVGHTILVIVYNLLKYGGTYNDLGGNYFDEHSKEAATRQAVRRLERLGHKVTLESAA

SEQ ID NO: 184208 - protein, 328 aa, unidentified
MFQVHGIDGDDKVVVRKQLRRSQVMRFFQDLAPCLVGFEACATAHHWARELTKLGHEVRLMPARDVKAYVKRNKNDAADAEAICEAVRRPTMRFVQVKSAEQQAQLMQHRTRDLLMRQRTQLINAIRAHMAELGITAPQGRDGIKQLLAIIAGEQDTRLPVDARASLMVLAAQLQAIQTTIVLLEKRIVARHRSNQDSKRLQTIPGVGVIGATAIAATVTDPAAFRSGRDFAAWVGLVPRQDSTGGKPRLGPISKQGDRYLRRILVLGAVSILRRAKLNPQRYPWVTRLLARRPFKVVAIALANKMARIAWALLAKGETYRRPRLAAV

SEQ ID NO: 184209 - protein, 326 aa, unidentified
MDMDGKRVAKQKLPCDLKEVEQFLAPFKKRLETVAVESTYNWYWLVDGLRARKYPVVLANPAAMAQYSGVKHADDTHDAFFLAELLRLKILPTGYIYDPELRPVRDLLRRRLMLVHQRTALMLSFKSLYARTTGQEMTLSALKGLEIKKAQELYEHPANQLIAGMQIEQIEHLTQSIEKIEKVVLASARALPYYPKLATLPGVGKILGMTITMEVGDIQRFADPGHFASYCRTVAAQRLSNSKKKGENNSKCGNKYLAWAFVEAANFARRYDESCRKWFDRKAAKTSQIIATKALACKLAKAAWYLMAEGTEYDPQRMLGQPSTMK

SEQ ID NO: 184210 - protein, 381 aa, unidentified
MQASTEITPTAGHIDTVFVAIELSQKTWLLTLHSPDRDRISRHKIEGGDHAELLAQIEKVRARATAKLGSAPRVVSCYEAGYDGFWLHRLLQAAGIANFVFDAASIAVEQRSRRVKTDRIDGELMLRTLMAYLRGEPRVVRIVRVPSVAEEDARRASRERDRLVEEQTGHTNRIKALLRLVGMAVGNPRRGDWLAWLERQRDWQGQPVPPHLLAEVKREHARLMLLRDQLAALEQAQAADATVPAAMVDRRNQLQRLKALGPAFTTTLVDEVFYKDFRNRREVASYNGLAPSPWKSGGIDREQGISKAGNRRARHKAIELAWLWLRHQPDSALSRWFRTRTANAGKRAKRIAIVALARKLIVALWRYLTTGLIPEQATMKA

SEQ ID NO: 184211 - protein, 331 aa, unidentified
MKILETAGIDVSKNTIDVKLHLKKCHNQFNNNTTGFKSFIRWAEKNSQLGINQIQICFEHTGLYSMKLATFLSNNEIKFSMVPALEIKKSLGIVRGKNDKLDAQKIAEYAFMRKDKLTCYNLPSSQVLKLQALLTLRAQMVKNRSGYQCSLKGLKTFFTIKDNEELFQTLQSEISGLNKKIKKIESHILQVIKSDRSLLRLYHLITSVKGVGLILAANLLVRTNCFTNFENSRQFACYSGIAPFDKQSGISLNAKSRVSHYANKKMKVLLNLAASSAIQCDPELKAYYNNRIKNGKSKMSTLNIVRNKIVFRVFAVVKRGTPFVPLHQHAV

SEQ ID NO: 184212 - protein, 326 aa, unidentified
MMGLPNSLCVGIDVSKMSLDISSNQTISPFTTSNDVDGFDAIIAELKQHSIALVLMEATGGLEAAVACSLQAQGFDVAVINPRQAHDFAPLVTRSMGYLAKTDRIDAAMLAQMAEVINRHPERVRFIRNLPDADREVLNAMVVRRRQLITMLTAERNRLHPSHPQSRKSISTIIGVLQDELKRINKSMEVHISTHFKTLAEILGGVKGIGAATIATLLAEVPELGHLSRREISALIGLAPFNRDSGNMRGRRTIFGGRANVRSALYMATVVATGHNPVIKQFYNRLVESGKAKKVALVACMRKLLTILNAMIKKNEPWDASHHYLS

SEQ ID NO: 184213 - protein, 429 aa, unidentified
MVKPFLSVGVDVGADFSFMSIALPSQEFVSKPYKIVHSDPRSLSGAVSCIRKAEERESSKARVVLESTGIYHIPLFCYLKEAGFDVIVINPLISHSNRNFNIRKVHSDKLDSKKLALLGLNPDLKTSVMPVELVLNLRGLAREYFSLVDNRAAYTMKLNTVLREAFPQYLGIFSKVRGAASLMILEKYALPKNILAADPDALAAEIAKASRRKVSTVYPQCAKLIEAARAAQSFGHALPCHAVMIRLYIDFIKRFDEAAAGVQRQMEDLVRANEHEPFIWQIRLLQSLPNTGFLSAVTLMVEMGDSSVFRKPKQLFAYFGIDPEVKQSGNFQGTRVKMSKRGSSLARRILYLMAVRSIANNRKGLPNNAVLQAYYLDKCRSKAKNVALGAIMHKLCNIVFAMLRDNKPFVMISPEEHCRRHEMLKTVAA

SEQ ID NO: 184214 - protein, 352 aa, unidentified
MKKIFIGIDISKETFDASVIFSAECSFDYIQLGYEQFKNEAKGFRQFRTWVRKLTAKVHMGKKENWLLCCETTGGYDHGLCAWCHGSGLDIWRESALQIRRSSGVRRGKSDRADSLMIAEYAHKNQRKCKLWEPLPQSLCELKELLLYRERLVNQRKAAKVRANEKRLTSARSKISDYIYNSSRRGVERLGKEIKACEKRMMEIINADGKIKRNYDHITSIGGVGLINATALIVFTGNFKTIDDPRKIATYFGLVTFYEDSGTSVHKKDSTKHLCNKLCKKYISNAATVVIKTNRELRQYYDRLLSNGKHKKIAKNNLKHKIIHIAFSLVMNDCDYEENHEYKRAERNKITA

SEQ ID NO: 184215 - protein, 387 aa, unidentified
MPEQFDSHNARAAFDHDSTLVVALELSGKSWQLGAVVPGVARRPRPRLEPRDMAGLLKAIERWVAEASAAGRAVRRVALIYEAGRDGFWIARYLLAQGVEVQVVHPASIPVERPGRRAKTDRIDLDMLLRTFLAWLRGEPRVCSMVRIPNEAEEEMRRPGRERERLVSERLQLENRIENLLCLHGIAGFRPRLKKAAERLEALRSFAGTPLPAKTMAELRRLMARHALLSEQLQEIEAERDRVATVAQPDPAEQMIQHLALLVGLGLETATLLVREMFCRSFRDRRAVAGFAGLTGTPFRSGGIEREQGIGKNGNARVRRIVMQLAWRWLRFQPQSALARWFAARTGGAKGRIRTVMIVALARKLLVSLWRYVETGEVPAGARLAAA

SEQ ID NO: 184216 - protein, 335 aa, unidentified
MDFCYFIGIDIAKDTLDWAVWTQQGVVLNTHTANSVAGIKTALAEFKVLPGWNAKQVVLCMEHTGIYSAHLLEILYELKLPVWLESSLQIKQAGGMQRGKTDKVDAQRIAQYAFRFRDQIRLWEPPREVIQKLALLSATRQRLNQAYNLLAVPASEQETFIGRSLKKTLKDNIKKSLAALREEQKAVDQQIHQLVQDDARLKELFDLMVSVPGIGPVIATELLIATNEMQTISDPKKLACHAGVAPFEYRSGSSIRGKTRVSHQARKRLKSLLHMGTMLAIQMKGDLQDYYQRKLSEGKHTMLVLNAVRNKLIHRVCAVVRRGEKYDKFYTPSFV

SEQ ID NO: 184217 - protein, 351 aa, unidentified
MKTESTAQPKLFIGIDIHKRSWKIHCATDLFSGKSFTMPPKPEILKDYVLKHFAGYEVCTAYEAGCCGYSAHRSFKSYGWRSLVVNPADIHRKGKEKYTKTDKIDAQLISRELKDGRLESIVIPEVQREQLRSMFRRRNDLVKDFRRIKSYIKMQLLYFGIEVPQEFDNDHWSHKYRNWIDTLEFEYPTLRFTLDSRMRSFRFIDQELRDVSTMMRKYCKQYYKEDYNLLRSIPGIGGIVACGILCELGDLRRFKSIKHFAGYVGLAPGVHQSGDNLRHTGITRRSHRLIRSYFIEASWQAIRTDPVMQSYYRKHIGKNPKSIIVKIARKLLSRTLAVIKTRIPYQIGVLE

SEQ ID NO: 184218 - protein, 325 aa, unidentified
MSNPIMYCGIDISADSFDICMLQSAGDFSWHQLPNNTRGFKQLIKLCPGNYHFVMETTGVFHLPLCFFLHEKNCAYSVVNALQIKRYIQMNLERNKTDKKDAWHICMYGIERKPAQYQMPEQQYFECRILNSSIETITAEITAFTNKIYALKKQKTDTAAVLRSYNQIVKTLKAELKKLKEELQNKLLLWQPSLVKQVRSVKGIGSRATATLIVATQGFKNTHSYQQLISYAGLSPKLYTSGKSIRGKVRISKKGGKQLRHVLYMCALNAKTTNPACKDLFDRLVAKGKNKKLAIIAVCNKLLKQVFAVVKSGELYSDNYYKKAA

SEQ ID NO: 184219 - protein, 334 aa, unidentified
MNSKLSYAGVDVSAATLDVRVRTAGGETHTAQFGNNAAGHQQLIRSITKKGRAARVVLEATGVYSLDLALALHAAQGVEVMVVNPRSARRFAEARLQRSSTDRTMALTLCEFAARMEFVPWTPPAPEIRELREIGRRIATLTAERTSELNRLHAARSSAETAAVVVNDIAVNARHLARRIAALERRALELIAAHPQLQQAYRHITSVKGFAARSALQLLGELLVLPSDMLVRQWVAHSGLDVRHFDSGTSVHKQPRISKHGNAHIRRILYMPALVAIQREPHVRAFYDQLIAAGKEKLQAVVAVMRKLLHAVYGMLKTNTDFDGARFRRLPEGA

SEQ ID NO: 184220 - protein, 338 aa, unidentified
MSKRVVKAGDTAGLFDLIRHLKATFRRRTGRDVPVIAIQEAGLDGFWIHRILERVGIESHVVDAASIATSRRKRRAKTDKLDGETLLRALLAYKRGEPRVCAMVVPPSPEQEDRKRNSRERRALIAERIKIVNRVKGLLFSQGIVGFGPLKRDRRTRLEELRTGDGRELPSNLKAEIVRALDRIELVLRQIKDVEAARDEVARDECDPSKIANGMSMLKQLRGVGADFAEVLWSEGLYREFANRRQLASYAGLTPTPWQSGSISREQGVSKAGNPRLRTVMVQLSWFWLLHQPRSALAQMVPGAGRARRWQAPEAGHYCAREKTSDRAMEVCSSWCCH

SEQ ID NO: 184221 - protein, 406 aa, unidentified
MRLFAGDDWAEDHHDVELMDATGQVLARRRLPEGVAGMARLHELTGQQLGEAGEDAEVVIGIETDRGPWVAALVAAGYTVYAVNPLQASRFRERLGVSGAKSDPGDSHMLADMVRTDSHQLRAVAADSAEAGGIKVVARTHKTLIWERTRQVQRLRHQLREYLPAALEAFEDLAAPDALELPGKAPDPARAARLTRAQVSAALKRARRRTIADQTTQIIAALRSQQLARPAALTAAYAVTVRALAAVITTLNEQVKALESQVEAHFGQHPDAEIYLSQPGLGRILGARVPGEPGDDPHRYPGARARKNYAATSPLTRASGKKKTVTARFIHNDRLIDALMAQAFSALNVSPGARALYDDLRARGIEHNDALRRVANRLVGILHGCLKTRTLYDEATAWSHRQNLAA

SEQ ID NO: 184222 - protein, 386 aa, unidentified
MPQLNDLSRSLVILEQDATLIAVIEMGQSNWLVAGIVPGVERSPLKKVAVDESALLKLLNRWREEAEKARHRIERIAIAFEAGRDGFWLARWLRARGIEAHVIHASSVAVSREHRRAKTDRLDTELLKRAFLGWLRGERDHCKMVAIPTLAQEDAKRPNRERESLVGEQSRIVNRMKAALARLGIRGFNPKLKKAVERLDGLRTPEGEPIPPNTLAELKHDMERRRLVRSQIRDIEGTRLERLKQTPGDGPHVTVRLLARVIGVGVETADMLVQEVLSRNLRDRRAVARYGGLTGSPDESGKKRREKGLARSGNARVRRGMIQLAWRFLMFQKDSALAHWFYARTKNAPQTRKTMIVALARKLLIALWRLAREGAIPEGIVLRPAL

SEQ ID NO: 184223 - protein, 371 aa, unidentified
MEGRDRPIPPWCKKTVIKRGSSRPHSKRARTVVRSCWEDQQARIVQGRARKGGKMEKGYVGIDISKGSLDVAVYASSKQWSFANDRAGIARLCKLLAKLEPALVVFEATGGYEMPLYVALSEAGLPAAPVNPRQIRDFARSMGKLAKTDAIDARVIAHFANTATDLKPKPIPDTQALKEIVTRHNQLVEMITMESNRLRGAGQALTEGIEAHIAWLKQQLKDVDGKLRSRIEQDPVCREKDGLLQTTPGIGPTVSAALVAELPELGTLNRRQIAALVGVAPLNRDSGIFRGKRVIWGGRGRVRAALYMATLTATRFNPVIRSFYTRLLAAGKAKKVALTACMRKLLTILNAMLKHHTGWSNSYSLTLASCY

SEQ ID NO: 184224 - protein, 353 aa, unidentified
MVIIGIDPHSTTHVAAAVDEHGQLLGSIQVGASPQQLQGLAGWVGGFQGPRLVAVEGARGYGLALTRVLLAAGERVVDVAPALTAAGRRRGRARGKDDRIDAIAVARLARQEPGLPALSLVGLNADLKLLVDARDQLVVEAGRVRNRLHALLLVLAPGYRTSTGALAKRPALRRARRLIERAAPGEAVRARLALAAIARLEALEDECAQLEHEVKTALTPLRPTRLLAICGVGALTAAKLLGETHSVDRFASAAAFAAHTGTAPIPVSSGNTQRHRLSRSGNRQLNRALFTIAMCQARWDPNARAYLARKRSEGKSPAEARRCLKRHLANVVYRAMVADAQALQATPTTNGLP

SEQ ID NO: 184225 - protein, 345 aa, unidentified
MELHTIGIDLGKTVFHLVGVDPRGEVVVRKKFSRKQLLHFTANLQVKLIGMEACGGAHFLGRALQEQGHEVRLMPAQYVKPYVKTNKSDYIDAEAIAEAVGRPKMRFVPIKSDDQLDLQSLHRVRERWVMRRTAVINQIRGLLLERGVTLRKGRGHVDAALPGILEDASAKLSDALRGLLAQLKLELDHLQMRIDEADAVIKKTAGENEACRRLVAIPGIGPITATAIIAAIGNGAAFKKGREFAAWLGIVPGEYTTGGKQKLLGISKRGNSYLRRLFVHGARAVLQQSAKQSSGLSSWLAQLTTRTHRNVAAVALANKLARMAWAVLAKNEPYRPPMLADAATA

SEQ ID NO: 184226 - protein, 387 aa, unidentified
MARKRILSTLDTSITYDALGLDIAKEDVALAAFGDDHDEPYFVDKLTFDGLYALLADMAPTLVAMEPCSGAHQIAEHIEALGHQVMMISGKHVQAWVKDHCNGQKTDLNDAFAILNLAYDRWLTPIRGKTREECRLLALQASYRQLQGQRTKTLVHVKATLHAWGYPIRTGSFNQKALHELIEANRDLFGDEVAETLHLMINRVRDLDHDIAKVLKLLTEATKRDPRASLLRSIPGFGVLTTSRWCAVMGDIARFESPKQAMAFIGLVPNNRITGHHTETSSGREARGQGKMSKRGDKMLRSLCILGAASLCLMVRNNRLPDCPFVAGIKERLASPRPWFKVLVYVAAKLVRIATALLKYGETFSFEKAGISKAVLKQWELEQAKAA

SEQ ID NO: 184227 - protein, 331 aa, unidentified
MKKFYIGADVSKKTIDCVFYDANMEKMKSSYIKISNDKDGRDALIKWIKEHKIVKKDAIVCMEYTGKYSYDFAQLLDKKDMDFVLIPALKIKGFFTGARGKSDKVDAIRIATYAYRFQEEIVPANLKDDNLMHLRDLMNDRKLAVKHAAAYKSIMTEYTDKRSSSRYKRAAKMVAEYKKQISAIEKEIKEMINKDEKMKKNYELLTSIPGISLVNAVNLIVFTGNFEFFEDSRKFASYCGVAPFEYSSGTSVNRGTHVSRMANKMLKSDLSQAAKAAINFDPWLKGYYERKRKEGKSSGCVLNAVKFKLICRVFAVVKRGTPYVNTMKYCA

SEQ ID NO: 184228 - protein, 429 aa, unidentified
MKIIYPRVCGIDVHKKFIVAVICISESVEPIYLKKRFSTFHNDLIRFRDWLIQNDCQNVCMESTGKYYIPVYNVLESHISNIVVANPKWVCAVKGEKDDDKDAKWIADLFKLGIVKSSFIPQKDFRILRELTRYEYKLVNMRSSEKNRYQNALTSGNCKLDMVFTDVFGKSASNIIDLILSDNPYTDEDILSKVHKNCKASPDMILNSINGTDLTSVQKSRIELVNDHIKQLSSNIQRLDKLIDLMIEPYEDYISFLCQIPGVSRNSAIIILSEIGVDMNQFTSTRRLTSWAGLTPSSNQSAGKKKSVRISRAGVYLKPCLVEVAHAAVKDKNHPYYANKFNKISKRRGKKRAYIAIARKILVAAYHMLLTGEIWNPADLAEVETPVEQRIKYVKNNLKSDIKQLLDIGLTVEELTLMIQQNANTMTAQ

SEQ ID NO: 184229 - protein, 394 aa, unidentified
MKLIGIDIGKNKHFFCVMDQQTGEIISQPVSFSNDKEGFDFLVQKIKSYPKDSILIGMEDTGHYHFALLKYLLELQYTVALINPKTTDFNRKMQGGITKNDKLDTINICDVLDTPERKKQYRITKVNSFDLYEQKQLTRHHHNLKEEENVYKNRLQKCIDIVFPEFNKLFNSKYGIVYMNILKMFGSAENIANTDIRTIRKCFEIESRGNRISLTPERLKECARSSIGISSSAEVIQIKHLTAQIELIEEQLTEIDKKIEEFSIQNNSPILSIPGISHFSGTSILAELGDISNYSKPSQIIKFAGVAPLHYESSQFNAQHTAITKKGSKYLRKTLYQIILPVIRHNPVFNKYYQLKISQGKGHRCAQGHCVRKLLRIIYHLLKTNQQFDPQLLR

SEQ ID NO: 184230 - protein, 310 aa, unidentified
MTACVGIDVSKEWLDIHCLSSGRAWRVRNQAVDIEPLAKQLQGAGPIVLEATGGYEFALLQALQNAGLKPWRVNPKRVRDFARSHGILAKTDKLDARVLALFAQEKQQYQPKTMFKPNPRLKALNAHRQDLIKSLVMEKNRLKQTTDSFVKENILAVIACLKELLAKTRKEIEQLIEREAHLQLQCQVMQSVTGIGPTISSVILAELPELGHLKRKQIASLVGVAPFNCDSGQMRGRRCIWGGRQPVRNALYQAAFIAKRYDPKMKAHFDQLRERGKPFKVALIACARKLLVILNARMRDHFAQLSPLPA

SEQ ID NO: 184231 - protein, 349 aa, unidentified
MTYYAGLDVSLEETAICVVDDTGRIVKEVRALSDPEALVKGLQALNLPLDRVGLEACSLTAWLHEGLRAAGLPAICIETRQANAAMKTMPNKTDRNDARALAQIMRTGWFRQVHVKSRQCRLWRSLLVARRTVLNEMRAIENVVRAILREAGLKVGTPSRATFDGRVRELAAGDSTLMPLVEPMLAILATMLRELGRLTKQVLAIVRNETVCRCLMSAPGVGPITALAFRATIDQPERFGHSRDVGAHLGLTPSRYQSGETDIKGKVSRCGDELARTALYEAAHSLLTRSRKWSSLKAWGMKIAKRRGMARARVAVARKLAVILHRMWSDGAEFHFGKEPGTDATAVAA

SEQ ID NO: 184232 - protein, 351 aa, unidentified
METQQTASSKLFIGIDIHKRSWKIHCATDLFSGKTFSMPPRPEVLKDYVAKHYNDYEVTTAYEAGCCGYHAHRCFESYGWSSLVVNPADIFRKGKERFTKTDRIDAQLIARELKDGRLTSICVPDKCREQLRSLFRRRNDLVKDMRQIKSYIKMQLLYYGIEIPPEYDNDHWSHNFRYCLDDLKFEYDTGTEVLRSRMRSFRFIDQEFRDVSTLLRRHTKTHFKHDYMLLRSIPGIGPIVASGILSELGDLRRFKNIKHLAGYVGLAPGIYQSGDTLRHTGVSMRAHRLIRSYFIEASWQAIRTDPVMQTYYRKHQGKNVKSIIVKVARKLLSRTLAVIKTGIPYEIGIIE

SEQ ID NO: 184233 - protein, 344 aa, unidentified
MNQVSTVGLDLAKYIFQLHGADSAGAVVFRKRLRRGQLLAFLATLPPCTVAMEACASAHYWGREIAKLGHTVKLIAPAYVKPFVKRQKNDMADAEAICEAAQRPTMRFVALKSANQQAAAVVFRTRDLLVRQRTQTINALRGHLTEFGVIAAKGLVHTSKLIAALEDPASDLPQAARAILAVLVEELRSLDERVAVLDREIARHAKENSVARRLMTIPGIGAVTAAALTALAPPAETFRRGRDFAAWLGLTPVQRSSGGKERLGKTSKMGERSLRRLLIIGASAVARWAARKGVPAGSWLGRMLARKPPMLVRVALANKMARIVWALLAKGGVYRAPGADRVHA

SEQ ID NO: 184234 - protein, 414 aa, unidentified
MKLFVGIDVSSQELEACFMNADGDKLETLTVKNNLNGASHLRDQIVAAADKLAVTEIHIGLEATSVYSWHPAMYLHQDPALRERKAKVFTLNPKLISKFREAYADMDKTDRLDAWVIADRLRFGRLTTTIVMQEQYVALQRLTRMRFHLVHNLAREKQYFLQNLFYKCNAFTTEVDSSVFGHALMEMLSEKFSLDDIAEMDVADLADYLRDKGRNRFPDPERVARCIQQAARASYRLSKVVEDSIDLVLGTSIESIRSIQKQLKDLDKAIERVLDGIQGAQCLLSVPGIGKVYAAGLLGELGDIERFKDQAAVAKYAGLTWRRHQSGVFEAEDTARIKSGNRFLRYYLVEAANSVRMRDEEFGEYYRKKYHEVPKNQHKRALVLTARKLVRLVDVLLRSGQLYTPRRKVNSAKD

SEQ ID NO: 184235 - protein, 321 aa, unidentified
MTKNKNYIGIDISKLSFDVAIKNESDKYSHYKFSNDYEGFISFKKLLNEDLDVCVMEASGPYYLKLAQYLFDHGVGVSVVNPLVIRRFSQMRMSRTKTDKKDAAIIAEYGKTENPDFWKPEADYVLEIKQMQAYVEQMNKSRTGFLRQKEAFKHNTSECLILNESLDKIIAVLEIEITLIENKMISIINQHHGQLFKQMQSIPGIGKKTAMLLIVISGGFTKFTDAKQLSSYIGISPRIFESGTSVKGKSKICKMGMSRIRAMLYICSWSAKKCNNPCRELYDRLVEKGKARKVALIAVANKLIKQAFALASKNEYYLQNN

SEQ ID NO: 184236 - protein, 363 aa, unidentified
MNATAALPVVAVDVAKSVFQLAIADHTWRLVEQHRLSRTQFERWFINRAVGLVVMEACGSAHHWARWLSGLGVEVRLLPAAYIRAYVKCNKTDAADARALLEAARCAEITPVKIKSIEQQALQGVHRTRSLWMATRTSRINALRGFCREFGIVIAQGSRLGVEQIGRVLADPRSCVPPLIRGTMTLLVEEIRLLEVRIAQLERELTTLARQSPACTTLLSIPGVGLLTATAMVAATSGEVSHFRDARHFASWFGLTPKEHSSGSTRHLGRISKRGDRYLRMLLTHGARSVLRAASVAVRAGKTVDRLRQWALGVQHRSNHNKAACALANKLARICYATLRDHEPYSAARLNKKIARTAFALPA

SEQ ID NO: 184237 - protein, 344 aa, unidentified
MKQYAGIDVSLEYSSVCVVDADGRIVREAKVLSEPDALISWFGEHGVSMERIGLEAGPLSQWLHAGMTKAGLAVELIETRHVRAAFKTMPVKTDKKDARGIAQLMRLGWFRPVHCKSLPAQEVRALLTARKLIQGKLYDIEMSIRGILRGFGLKVGPTTRRTYAARIRELIEGHPTLEAIAASLLKVRDALADEFAGFERKLRAMARQDGNARRLMTTPGVGVLVALTFVSAVDAPERFRSSRAVGPHFGLTPKRYQSGETDYSGRISKIGDAGVRTALYEAANVILTRPVKGSDLKSWAIAVARRAGPRKARVALARKLAVVLHHMLRDGTNFIPHKAAATTA

SEQ ID NO: 184238 - protein, 400 aa, unidentified
MKGFLHMKLIGIDIGKNKHFFCIMDQQTGEIISQPVSFSNDKEGFDFLIQKIKSYPKDSILIGMEDTGHYHFALLKYLLDLQYTVALINPKTTDFNRKMQGGITKNDKLDTINICDVLDTPERKKQYRITKVNSFDLYEQKQLTRHHHSLKEEENVYKNRLQKCIDIVFPEFNKLFNSKYGTVYMNILKTFGSAENIANTDIRTIRKCFEIEGRGNRISLTPERLKECAGSSIGISSSAEVIQIKHLTAQIELIEEQLTEIDKKIEEFSIQNNSPILSIPGISHFSGTSILAELGDISNYSKPSQIIKFAGVAPLHYESSQFNAQHTAITKKGSKYLRKTLYQIILPVIRHNQVFYKYYQLKISQGKGHRCAQGHCVRKLLRIIYHLLKTNQQFDPQLLR

SEQ ID NO: 184239 - protein, 402 aa, unidentified
MISVGIDVSKETSTICMLRPYGEVVASPYEIGHSLSAARALRDRICGIEGEVRVVMEATGRYHLPLLNALKEAGVFVSIVNPLVMKKYASTAIRKGKTDKIDSVRIASFGIDNWFKLVDYSMPDKIYTELKLLGRQYSHYITLKVASKLSLSDILDRTMPGIKKLLTWGTRADAPTKDKLCDFVEEYWHYDNITKKSESQFISSYCRWAQKKGYQASEAKAKKIYVMASCGIPTLLSSAASTKMLTLEAVRVLREVNRTLESILAYMLELASALPEYSIVREMSGVGIALAPRLIAEIGDVRRFHSGSALVAFAGIDSPPYQSGNFTGTQRRISKRGSTLLRKTGYEVMKCLKTVKPTQDATVYQFMIKKELEGKPKKVAKIAALNKFLRIYYARVMEVYES

SEQ ID NO: 184240 - protein, 409 aa, unidentified
MELLYARCAGLDVHSATVVACARIAMGGTVTYHHRTVSTTTKGLLELAEWLSAQGCTHVVMESTGVYWKPVWHILEGQFALTLANAMHVRNIPGRKSDKKDAIWLADLLAMGLIRSSFVPPAPIQDLRDLTRTRKLFSREIARHTQRIQKTLEDANVKLTEAISDLLGVSGRAMLNAFIAGETDPERLADLANGRVKASRTQLVDVLHGRVTVHHRFMLKVHLDQIEALEKIVAALEARIDEALIPFRAALSLLKTMPAVRATIAPVVLAEIGTDMTQFPSAGHLLSWAGFCPRLDESAGKRHSTRTRKGAPWLKTTLVQAAWAAARKRDSYFHAQFVRLTSRRGPKKAIVAVAASMLTDIYYMLRDGVEFHDLGSQYFAQRDKEHLTKRLLRRLHDLGVEVEVKDNAA

SEQ ID NO: 184241 - protein, 341 aa, unidentified
MDQAVTIGLDIAKSVFQVHGVDESGAVVVRRQVRRAQLLSFFAKLPACLIGIEACATAHHWARELIKLGHEVRLMPPSYVKPYVKRQKNDAADAEAICEAVTRPTMRFVEVKSPEQQSVLVLHRVRLMLMRQRIQLSNAIRGHMAEFGLAAPIGREGLASLIRLIADNDERVPAEARTCLGMLAAQLGLINEQILQMDRRIRANARATEIGRKLMEVPGVGPLLASALIAAIPDPRAFRSGRNLAAWIGLVPRQNSSGGKERLAGITKQGDRYLRQLLVVGALAVVKYAQRNGTRRPWLVQLLARRTIKVATVALANKTARIVWAIMSTGEAYREPVLQTA

SEQ ID NO: 184242 - protein, 428 aa, unidentified
MNEDELSRVQEFRQLKKQIQGSESHLIVGIDVAKDRHHAFLGTATGRTLVKKLIFENSASGFSELLARVEAVRAQSGLSGVVFGLEPTSNYHKPLGRYLISKGCHVVLVGGKAVKNNRELLDERWDKHDTKDAANIADLVSRGKCFYYDMPSGQIEELRELHSLRARLKKEEHSLNLRIRNNLLAKHFPELDSFYTASERETLAIVRWCLNPQQIAGMPFDEFFKRVAPNARGIGQKLRLQKIHRLAHESIGCPVDSAVQLQAGLLVEKIKQVREQIVQVEQVIQQLCVQFPSYEYLLSIPGFGPYVASKVLATLADPRRFDTAKQVIRTAGYDLCADRSGKSSDQAVPVISKKGNSQLRYALYQAALIASSRHRFFMAYFARMLQGRERERGIRTKMRVKLAAKMLVIAWTLMKRGEPFNPEYLKMQ

SEQ ID NO: 184243 - protein, 332 aa, unidentified
MYYIGLDIHKKNTQACVMNEKGKIIVNERFPSEIVAINAFLDRLGSVEAKVVMEATGFYQYIYEMIEARGYDVVLAHPLKLKALTAGRAKTDRNDAEMLAELLRINAIPASYVPSKEIRELRDLTRHRSSLIAESTTLKNKIHAELARRGTKPPAEARSAFSKKFIGWLRGLNGSMIDDLLDILAVVQEKIKRVDDRIKEEANNDEDVRLLETIPGVGHVIATVIKAEIGELGRFRSSDALASYAGLAPAVRQSGEKSHIGGMSKQGNPRLRYMLTEAVHVHVMFCEDSRLTAFFLRKKEEKGSKKATVATAKKLLEVMYLMIVRRRQFQAH

SEQ ID NO: 184244 - protein, 378 aa, unidentified
MPSENTVHIAIELSFSSWLVAARLTGAKKSRLHRIEGGDTGALLALIAELRSRALTQLGGAAEVACCFEAGRDGFWLHRLLTAHGILVYVLEPTSILVNRRSRRAKTDRLDAEGMLRVLAAWLGGDRQVCSMVRVPTPEEEDGKRPHRERERLVQEKLRIENRIEALLFTQGIRARPSLRSWERELTELRTGDGRTLPPLLRAELDRLRRRLVLILEMVRELEAERAAALAAAPDEAMAQKITSLQRVRGIGANFSAVLVREVLYRSFANRRQLASYVGVAPMPFQSGGMDRDRSISRAGNPRARTTLIQLAWLWLRYQPGSALATWFRERVGTLQGRTRRIAIVALARKLLIALWRYVEAGVLPAGVEIRTGTVPAA

SEQ ID NO: 184245 - protein, 411 aa, unidentified
MQVVHERCCGLDVHKKTVVACILITLANGEVQRHIRTFSTMTAGLLALSDWLESLAVTVIAMESTGIYWRPVFNLLEEGRSVILVNAQHMKAIPGRKTDIKDSEWLADLLRHGLLKASFIPPAPVRELRDLTRYRKTLVQERAQEVNRLHKVLETANVKLTAVATDVLGKSGRAMLEALVKGATDPEILAELARGRLRQKLPQLQEALDGRVEPHHRLLLKHILAHIAFLEETLEQLQRDIEERLHPFEEAMTLLMSIPGIQALAAATIVGEIGDDMTRFPSAKHLVSWAGVCPGNKQSGGKRLSGKTTRGNATLRAILAEVVWVLSHMKDNYLSAQYHRLARRLGKKKAVMAVSHSLLVIIYQILSTKQPYSDLGADYFEQRDSARLTQRSVRQLEALGYAVTLVPKEVA

SEQ ID NO: 184246 - protein, 372 aa, unidentified
MKRNIIYVGLDVDDTQYHGSALDKNSGEVIDFKCRPTLKGLLGQLEKLGKYFPRRTLKLCYEASYIGYTLQRDLAAKGYHCDVVAPTSIPSPRGKQIKTDRIDAGQLAQFYANGLVSVVSIPEAEREQDRDLLRSRQNLLQQQTELRKHIQALLRRNGLHYKAQTQNKTHWTKHHYCWLERTIDCASGSLKVNLELLVRQLKCLNAILAEYTQQIEVLAKTQRYEKPVQALICYKGIKNIFALTMITEIGDVKRFPHPRQLVSWIGMDIREYSSGGKHRRFGITKHGNRYLRTAFIEANQRGYRSARLSKAIRARRASAAPEFIDIADRCLRRLNRKGNRLLLAGKHPNKVKVACAREMVGFVWESLHHAAA

SEQ ID NO: 184247 - protein, 391 aa, unidentified
MKSSHHIDTPAAGAKDGTLYVAFELSKSKWLIGIVLSGESKMSRHQVAGGDTAAVWQLISKKRAQAEKKLGRPVRVVSCYEAGFDGFWLDRWLAEQGIENRVLDPSSIELPRRARQAKTDRLDLERLMRVLIRHEGGEPRVCSVVHPPSPEQEDARRLSRERDRLIGERTAHGNRIKGLLHGQGVRDVEPRRKDFREQLARARTGDGRALPGKLVAEIVREHDRLVLIAGQLAEVEGLMKAEREAAVPDSRARQVNQLIGLKSIGAVGGETLANEVFWRDFQNRRQVGAYFGLVGTPFDSGQSSREQGISKSGNSRARTLAIELSWLWVRYQPDSALSRWFKERVGDQKGRIRRIAIVALARKLMVALWRYLTQGVVPENAIVRAAAPAGR

SEQ ID NO: 184248 - protein, 399 aa, unidentified
MLAVGIDISKSKSVAAILNQDGSMHTSPFEFHHTQPELDAFIKYILNSNQSATILMENTGHYHYPVLKAFREAGLPVCMVNAYQIKKFGDMDLRKAKTDKKDAVRIARYALEKSYSLVPYTSMEQKYEDLRFLARQYNQRMLTLKTNKVFLLNLLDETMPGITNILPLTTRTPETSLSVLFINRFKSYDRIKKMGKSRFLDAFEKIARKSRNRQTKTYGLAIYEAALRNITTRGENEYTLAAQDQCLELVCESQKAADSIILKMKTLAETLPEYAVLRSMAGVGNRLGPLILAEIGDIRRFHSGKALNAYAGNDAPPYQSGTFESYNRHISKRGNAALRKYCFEVMQALKLTRPQNDPVYLFLLKKEQEGKPYNVAKMAGVDNFLRIYYARAMETLKQQ

SEQ ID NO: 184249 - protein, 373 aa, unidentified
MPRYSTAFGMDVHLRSTTVCALDAETGEAVTRRFRGNPWGEVAEWMSGFPGPSLAAYESGYLGFAPQRELSALGVDCVVAAVSKVPRSAADLSSKNDRNDAARMAKAILSHDVTPVWVPSPEIEGLRDLAAAHDAATARLAAAKQRLLAFLARRGYAYGGTTPAGNPRRYWTYGFLRWLDKVRPADDGGIRALAALRNEVEAADETREALLAEYRAAVAAGPLSAEVEALQSIKGCGFALAAAFAAEVGDFSRFRSGRQVTAYFGLAPKQRSSADSVRLGGISGAGNALVRKLAVEGSWRYAQAGHQPKLMPKGSGVPLEIRMHGRKGSERLLRRREEMLERGMPQAKANAATAAELVRWLWALGAMCREAGE

SEQ ID NO: 184250 - protein, 432 aa, unidentified
MICAAIERCAGIDIGKNRLAVCVMVGPLAGEPRVEIREFGTITAELERLRQWLQQEGVTHVVMESTGSYWKPVFNVLEDSVQVYLANSQEVKNRKGHKTDKKDSWWLAHLLRHAMIRPSFVPSRGLRELRDFTRRRRKMIGVATSERNRVEKILQDANVKLSTALSDIFGVSGQLMLEALLEGKAQPEEIAQFAQRAAKRKIPEIIAALEGHRMSDHHRQMIRYSLEHLRFLEEHILQLDEQIVVKIEALGYTRQWELLQTVPGVQANSAASVLAEVGPDMGQFGSEKHLSSWAGVCPGNNRSAGKNKGSKTTKGNRWLRAALTECAWGASRKKDCFLKEKFWRLATKKQRKPPAIMALAHTLLVLSYQVLKTGQPYQERELPVLDEKQKNRIIWHHVKRLGKLGIRVRSLDLRKHLTGKGDKGKKEAVSKN

SEQ ID NO: 184251 - protein, 417 aa, unidentified
MPEGEAIGMQVMHPRCAALDLGRSVLVAAVRVQEGREVRRECRTYQTTSRRLLELASWLVSQGVTHVVMEATGSYWKSVWHILEGQFQLKLANPAQIRNLPGRKSDVNDATWMADLLAHGLVRASFVPPAEIGALRELTRTRKQFVREIGRHTQRIQKILDIANLKLTGTITDVLGASGRAIVKALIAGETDPERLASLVNHRLTATRDQLIEVLQGRLTVQQRHLLQLHLKLVETLETSIAQLDQQIEQAVHPSRETVERLKEVPGLSDVNVPALLGEIGVDMSQFRTHRQLLSWARLCPRLDESAGKIHSTRTQKGAVWIKTLLVQAAWCATRSKNSYLRAQFLRLRARRGANKAILAVAASILTAVYYIIREGVPYKDLGLGYFDHIDRSRVTRRLVARLHHLGYRVQLSEAAA

SEQ ID NO: 184252 - protein, 318 aa, unidentified
MPDSAIAWIGIDVAKESLDTWWAGSAAPQALSVANDPAGFAALIQALPPAANARVVVEATGGYERALVTALIEAGYRVAVANPRQVRDFAKALGILAKTDRIDASVLARFGEQLQPRLVEEDPAQRAELMQLVARRRQLVELRTMESNRLGQATARAAQTSIRHVLRLLDKEIGKLEAEIARLVQADDDWRSKMELLTSVPGVARVTSSTLIAEVPELGRLNRQAIASLVGLAPFNDDSGRHRGIRRIQGGRSPVRSVLYMAAIAARRWNPVIRAFSERLAAQGKKPKVVITACMRKLLVILNTMVKNNTPWKQSNAS

SEQ ID NO: 184253 - protein, 370 aa, unidentified
MRGNTHVRFGGRTGKTERPKGRHRVPVRPYDLSRQRLDVHVLDEAGRTVEVSAVHPDADALRTLAGRVLRHGQEVSAVIESMTGSRFVHDQLELAGWEVAIADPVKAKGLAPLAAKTDKIDAHVLAELARRDLVPEIWLPTPGVRAERERARFRLHLVRHRSALKCRIHATLMSFGHTVPVTDLFGNSGRELLAGFELPEPWARTLTKSLAMVDELDERIDECGQELTRLGADQPYIPLLLTVPGVGPLLAYTIAAEIGDIGRFASPKKLTGYTGLCRLVRQSGNHDFRGPLAKNGPKYLRWALVEAATHAARDPRYRDRYERNKKRLGRQRGAKVARIDIARQLAEAIWHVLTKNEPFAPASPAILLVA

SEQ ID NO: 184254 - protein, 458 aa, unidentified
MSRNKSTDRVRRTMAVVHPNAAAIDVGATMHMAAVNADRTTEPVRSFGTFTTDLHRLVDWFAECGVDTVVMESTSVYWIPIFELLDARGFAVFLVNARDAKHVPGRKTDVSDAQWLQRLHSFGLLRASFRPKGQIAELRAYLRQRERLLEYGASHIQHMQKALTEMNVQLHHVVTDITGATGLRIIRAILGGERNPAVLARMRDRRCHATVETIEKALAGNYRAEHLFALEQALALYDTYQQKAYACDARIEAVLKELSARRGREAGPLPSPRQNRSRQQNSLLFDVRTALFALLGKDLTQINGLGPYLALKLIAECGDDLSAWPSAKHFTSWLCLAPSNKISGGRMLSSRTRRSGSRAAALLRLAAATVGRTDTALGAFYRRLSARIGKVKAVTATARKIAVLFYNALRHGMDYVDPGASSYEIRYRARVIANLHRRAKAFGFMLQPMAPTPEMAVS

SEQ ID NO: 184255 - protein, 339 aa, unidentified
MKNIKYYIGLDVHKKSTTYVVRDKKGNIVTNGETATLYPELCERIEPFLKSSIIGLESCTSYYTLYQNFLKNKHNIKVANTIQLRQLITKNDKLDAKRLSEMLRLGTFPCSYIPDEKIQHLRSLLQVRHSLMEEKNRCNNRIQSLLDRNGIIMPDQEAFGKKWRQQLMQYIGSGEVSLELRYEYDHFVYLEKQSEHLGQEISGYTLKHWTKEYRLIQSITGFGPVLSCYIIANILPISRFPSNRKLRRYAGVVPAFHESDDKKSKGHIPKTSSRKLLRWALIQAANAAGKTNTKLGRYYRKKKKQKNNAGIAHVAVASSMIDIIYKVLTTNKPYNPRFC

SEQ ID NO: 184256 - protein, 480 aa, unidentified
MAKRAVQHADLKAVPMLLNESLYVGIDIGKAKHVAGFLSKTLLERHERFEACPALVFENSREGFRLLIERIRSLAPLEHIFVLMERTGHYHRTLEQYLQELDITVYVMHVQSRSTGMLKTDKRDALTLANQLYNQLELGVQVPNKLQLIRRVVPPTQAAAELRGLIRHRYELIHESTRRKNKLTAICDELFPELVRVVKDPNGQVALALRERFPTPAALATVSLTTLQQIRGGARSFSDAKLLELQRQAAQSIGIKEVARLRGLVLEQTQLIKELQMLQEHIQQLDKEIGGIVEHAREGQILLSFPGIGPIMAATSIAAIGSIHNFPSAAALKSYFGWAPVVAQSGSTLDHTRLTHGGARTMKHMLFLAVFQAIRLKDNEWARLYERLVKTKCPFDERTQSYLGKTRVIGRVAGQMTEAIYALLKRDAELLSKVPPSQDPPPPLLYDPEVHRQHHLGHYRPLKSTPPPNTITLLHPLPAE

SEQ ID NO: 184257 - protein, 409 aa, unidentified
MQVVHEVCCGLDVHKKSVTACVVWAAGRRRQTRAFGTFTRDLLELGDWLRSCGATHVALESTGVYWKPVWNLLEGQFEVLLVNAQHIKAVPGRKTDQKDSEWIADLLQHGLLRPSFVPPTPTRELRDLTRYRASLAQEINRIANRIQKVLEDGNIKLASVATDTLGASGRAMLEAMVNGEQDSQRLAEMARGKLRNRIPELGRALEGRITAHHRFLLRELLDHLYFVESKMLRIEQEIEERLGPFQSEVARLCTIPGVDRVTAWGLLAEIGLNMSQFADARHLASWAGLCPGSHESAGKRKSGKIRKGSLWLRRCLCQAAWAVSTKKNNYLSALFRRLAARRGVKRATIAVAHNLLVIAYYILRDQTCYQDLGPDYFDRLNPDGLRRRLTKRLAGLGFKVTVEPLAQVA

SEQ ID NO: 184258 - protein, 358 aa, unidentified
MYYVGLDVHKNRSSLAILDENGAAFKRIEVKGPWPKLIDTIAREVPRPFRICYEASCGYGYLHDQFSRIAAGVSVAHPGQLRLIFRSKKKNDRVDAEKLVKLLYLDEVPAVHVPGVDVRAWRGLIEYRRRLLQSRTGVKNQVRALLRGVGMVTAGRGLWTKQGLARLEKEAMGEGDRLRLEIMIEEMSGLTAKVKRVEKELAIIAAKHPGVALLRTIPGVGVRTAEAFVAYVDDVRRFTRVSQIGSYFGLVPCQDASADRNRLGHITRDGPSCVRALACEAAWQGVRHSPTIKAFFERVMKGDEQRKKIALVAVAHYLIRVMGAMLKSGETWHESKQVEPTEEAAHGVACVCHAAGPA

SEQ ID NO: 184259 - protein, 361 aa, unidentified
MPNGMRWVGLDVHAHTSTVAVFDDVTGEVMTRRVNGRPLEVLDVLHQLPRPLRAVYEAGPTGYGLVRRARMEGIEMAVCSPGNIDRRGGDRVKTDKRDAIRLARLFAAGDLRLVWVPTEEQEQLRDLVRCREDLRADLMRARLRLAAFLLRRERYFPGPGERWTLRHRHWLSQQSFEDAPSRVTYADYLHAHDVLLARRELVARELEAIAPNCVWGQTIARLCCLRGINTLTALGLCAEIGDWTRFDHPDAIAKYVGLVPSEHSSGQTRRLGKITKAGSTHARRLLVEAALHYRLTPAVGGKLAIRQRGHDPALIDQAWRVQRRLHARWKLLREGRGKPAGIVTIAIARELVGACWEIATA

SEQ ID NO: 184260 - protein, 406 aa, unidentified
MNQDSPDGASRFWCGIDWGGCSHHLCVLDDNGHQLLSRKIAHTVDGLMALVEVIASLAGSVRIAIERAEGLLVEHLQQHCGAEIYCVSPKISARARERYRMAAAKSDEFDTYVLADTLRHQYAQWRPLAVASPALAELIAVSRDRQRILDMQVDTENRLRSILEAYHPAPLHLFSSLDRDITLAFIRTFPTPAQASRITTRRMGGFTGRHGYSGRQKPETLIARMQPHLLSASEGTVAGKALAAKAFTEQLALLNTHLRAHDKRLGELLDMHPDTPIFTSFPGIGPVTAGVLISEMGEQRSRFPSAPSLLAETGLAPVTKASGRTRQVRFRYAANRRMRHAIDWWMFVAVREDPWSADIYEHARAAGQPHHRALRGLGARWCRILWRCWHDHALYDPVIHRRATAA

SEQ ID NO: 184261 - protein, 358 aa, unidentified
MTKDTATHSQETIGCDLGDKRSEICVLDAGGKVRQRASVRTTRKGIGEWFSRPAAHVVVEVGTHSRWVSAAVRELGHRVTVANPRRVKLISDSDSKTARHDAELLARLGRVDEKLLSPVVHRTPQVQADLAVAKARDVLVATRTKLVNHVRGTVKAFGERLPTCSSASFPAKTRELVPVILKAALEPVYEALERLNEQIGEQDEMIERVGQKYPDVEVVSQITGVGILTALVFILTIEDKARFSKSRMVGAFLGLRSRKSASGDGDPQLRITKAGDPFVRRLLVNAANYILGPFGKDSDLRRWGLELAKRGGKNAKKRAKVAVARKLAVLMHRLWVTGEVYEPLGYHQRQVEEKKRAA

SEQ ID NO: 184262 - protein, 413 aa, unidentified
MVNTARKGGLMDFYVGIDVSKFKHTVAIIDEEGEIRKKSFDISNSREGFSSLLNELGLLGEKEQIKIGMEATGHYMNCLVRCLISNGYQFQIYNPSLISKFRDAESVNLAKTDNLDAMLIAKYVATHPFTSSPQLSYLIGEISKISRAKYFLFGDKTACYNHLLRYLDEVFPEFVSFFKKNEDGTRKNMGRNLFESPTIRWLLSEYTSPQKMARMRIETGETLRRMSKGSISFNRFNQLRELAKNSIGYSTEVDEQIIRNLVTQVRIIDEEIEMLNELLEPFMEEINSPLLTIPGIGINLAAMIIGEIGDISRFENPEKLIKFAGLDVKVYQSGTINHKGHIRKRGSPILRYALALSVQKLRIHSPVFSEYYYSKLRQGKATNVAIIATTRKLIRVIWKMMTTNQVFENIKRD

SEQ ID NO: 184263 - protein, 350 aa, unidentified
MAVNSVIAVIGIDIGKNSFHVVGLDERGAIALRQKWSRGQVETRFANMPSCLIGMEACVGAHHLSRRLRALGHDARLMPAKYVRPYSKGQKNDFRDAEAIAEAVQRPTMKFVATKTADQLDLQALHRVRERLVRQRTGISNQIRAFLLERGIAVRQGLRFLRAELPGILAKRRDVLSPRMVRLIEDLAGDWRRLDERIESLSGEIDALARQDCGCERLMSVPGIGPIISSAMVAAIGAGDAFEKGRDFAAWLGLVPKQISTGDRTILGKISKRGNRYLRVLFVQAAWVVLIRPKSWERYGLKPWIEAAKRRLHHNVLAIALANKLARIAWSVLAHGRGFEARSIATVQPA

SEQ ID NO: 184264 - protein, 343 aa, unidentified
MEHFAGLDVSVKETSICIVDDTGRIVREVKVASEPEALLAVLKSSTYRFKRIGLEAGPLSQWLFSALAEAGLSVIWVETRHMRAGLKAQINKTDRNDARGIAQMMRAGLYRPVHVKTLRSQKLRMLLTHRKLLQSKAIAVENDLRGTLRNFGLKVGIVGKLKFEARIKELIENLPDLAVLVEPLLVVRRVLREQLGILHRRVLAIVQDDEVCRRLMTTPGVGPVVALTFRATVDVPARFRNSKTVGAVLGLTPSRYQSGEINRTGAISKCGDEMMRVMLYEAAQSMLVRSAKWSWLKAWAMQIARRRGMKKAIVALARRLAVIMHRIWVDGAEFRWSKNAVAA

SEQ ID NO: 184265 - protein, 373 aa, unidentified
MTAIGASEDSSNTVYAAIELSKKTWVLGIARPERDRPSIHRISGGNLRELVARVRAAAKGGGRILVCYEAGYDGFWIARSLARENIECRVLDPASIQVNRRARRVKTDRIDVLALLRALIAIDRGERHVCAVVRVPSTEEEDARRPHRERQRLVRERTGHINRIKGLLFAQGIRGIEPKLRRTKIDFSALMTAEGHPLPDRLRRELEREYARLEVIQNQIREIENERDAADAQEPAVERKRQMLIALQGIGGAGAAILAREVFARTFGNRRQLGSYLGLTPSAYDSGSTTRCQGISKAGNSWARRVLIEIAWLWRKYQPESPLSRWYAAKTREQSPRIRRTMLIALARKLAITLWRYVETGVVPEGAIMSNAA

SEQ ID NO: 184266 - protein, 354 aa, unidentified
MWLKALFILKELKDMETKFRHFAGIDVSKHKLNVCLIVNSQRTQMHYGCFEQSLSGYKAMKKWFAELSGKAVDSLLVLVENTGLYDDALLVWLWDRKIAVCLENATNIKRSVRDNRTKNDKLDSRNIALYLLQHFHELSLWQKPRDVIGQLKLLLTQRSNLVDGLKRLKALHKEWKQYQWSGVHRLGSYEAGIKGLKADIDAIEKDMWELIKSDTALLTMFTLIVSIPAVGKITAMHFICYTNEFKTVKSGKQLSAYCGVVPFEKSSGKSVKWKPKLPHQANKVLKTLLHLCATTAIKMKGSFAAYYRRKIEEGKHSLIAINGIRNKLALTIAAVIRTGEPYNENYIYQHFEKP

SEQ ID NO: 184267 - protein, 385 aa, unidentified
MTSTDSCFRIIPSHFDIFAGLDVDKKSMATTFSDHGTLVKSLRLPNNATHLLNYVDKHFAGQRIAFVYEAGPTGFGLHDELVARNHRCLVVAPSMVPTEPGKRVKTNRLDSRNLSLRLRGGELNGIHVPGRCYRELRHLVQLRDTHTRQLTATKCRIKALLLYEGIAFPEPSERWNARAIAGLQRLSCSSEVRFKLDHMIGTLYFHFNSAALVQKRIRQFCKKDPELGQSIALLTSLPGVGWITAAHAVARLGDWRELKNVRQIAGFLGLVSSEHSTGDKQNRGSITRSGDSRLRNKLIQCAWVAIKQDPELRAFYRSVYQRQPQKLAARKAIVAVARKLTTRMYVVLKEQRPYIIRPEISEAPLTAEETVGSGERLDASQNEQS

SEQ ID NO: 184268 - protein, 345 aa, unidentified
MQPQKSTACGIDIHKDFFVAAIMSRDGSTKIEKFDHTQEGLLLLKSWVLAEDCSTVAMESTGSYWRPLYLTLEGYVELILSNAYVIKRIPGRKTDIIDAQWIAELALNGLLTPSRVFPKDVREIRELTRARERLVDQRTGCKAIVHDVFDAACIKLSSVITDIFGKSGRYLIHGLLQGKTIDELIEGIPSKRVQYKEKLLKNAIKSALSTSQVIVIEQNLRLIDQITEPVTQIDDEIIGRMKNREDDVQIAMSLPGIGITAAVTILAELGDYHDFKSTDSLASWAGMVPSVFQSANKLRTGSITKHGSKHLRRILTEAAQAAARTKDTRFSAFLQGRSFAFSGIS

SEQ ID NO: 184269 - protein, 314 aa, unidentified
MPSFIGIDVANTTLDVAAEPATALGALTTVPNDEAGHTALVAALTPLRPTLIVLEATGGYERAVTVALAAAGLPVVVVNPRQVRDFAKATGQLAKTDQLDAAVLARFAAQVQPALRPVPDATTHALRELLTRRRQLVAMLGQERNRLAQARDRAIRRDLQQHIRWLERRVTTSDDELHQQIEQSPVWRVRDQLLQSVPGIGPVTAQTLLASLPELGALNRKQIAALVGVAPLNRDSGQWRGRRHVWGGRAPVRHALYMAALVASRHNPALRAFYTRLRAAGKPPKVALVATMRKLLVMLNAMLAHQTPWSPALA

SEQ ID NO: 184270 - protein, 425 aa, unidentified
MQRSFGLDVHLDFCEVAVCEDGRVSQLGRIASTPEAIREFAAGLNDSDQVVLEASCGAMRIARLLEEGPVARVVVCNAAETRAISHARVKSDRFDAAMLAKLLAAGMLNAVWIPDETTSALRRRVARRAGLVRARTRVKNEVHAVLARCLIGRPPVSDLFGKQGRVWLAEQELPEEEAQTVTSCLRHIDFLDGEVTELDQWIARQALALPGFHRLLTIPGVDVGTAAAVIGAVGDSTRFSTPGQLVAYLGLDPRVRQSGSEPARYGHISKRGDPQARAMLVEAAWRAIRTPGPLRAFGERVRARRGAQIAAVAVARKLLVLCWHLLTKEQDYAFARPSLTRQKTRRLELLAGAPPLPRRHNGATVTPTPSQREAELALGRQAEQAYRRLIADWRTTAPRGGAGATPGRASNRPSKGKAARQATSP

SEQ ID NO: 184271 - protein, 363 aa, unidentified
MTSMTTTTADVTGGVDTHGQTHHAAALDPVGRQLGDREFPTTPAGYRAMLSWLQGYGHLERVGVEGTGTYGAGLTRQLRTAGVTVVEVDRPDRKARRAKGKSDPLDAYSAARAALARTATGVPKAQDGRVEAIRLLRVARSSAVKARSQATNQLKALLVTAPAELREQLRHLTKTTLVATCARLRPGADIADPEHATKTALRRLARRYQYLSEEISAADTELRTLVTAAAPRLIAMPCVGTEVAGQILITAGDNPDRLRSEAAFAHLCGVAPVPASSGRTHRHRLNRGGDRGANNALYIVVLGRLRYDARTRAYAARRTTEGLSKPEIIRCLKRYVAREIFTVLTARTANAQSRTPTAMSTAA

SEQ ID NO: 184272 - protein, 368 aa, unidentified
MDIPLWKSAPVDVTIGTPFIFQRGDQMNEVKGVVTVLGIDLAKRVFALHGVDRDGKVVLKQVVSRSTLPRLIAQLPPCLIGMEACSGAHEWARQFAQHGHTVKLMAPVFVTAYRKAGKNDDNDADAICEAVGRPNMRFVPVKTRAQQALLSLHRVRQGFVEERTGLINRLRGLLAEFGFVFAQRHCGLRAVPSALEGLPALAKRAVDDLLEHLRTLNERIAAYDLEFKHLAAQDDAAKRIMTIPGVGPITALALVATLGNARDFKNGRQLAAWLGLTPKQHSSGGKIRLGPVTKHGDGYLRTLLVQGARAAMQHASRAQPTRLSRWATNLVTRRGYHKANIALAAKNARIIWAILARGGEFQPHAAAA

SEQ ID NO: 184273 - protein, 453 aa, unidentified
MPGSKKTRGRSSGRLSTINPDAAGIDVGSTFHVVAVPGDRDDNPVRTFRTFSGDLHRLADWLEETGIKTVAMESTGVYWIPVFEILEARGFEVLLVNARDVKNVPGRKTDVNDAQWLQQLHQHGLLRGSFRPRDGVVRLRAYLRHRERMVDYAAAHIQHMQKALMQMNVQLHHVVSDITGVTGMRIIRAIIAGSQAPETLAEFRDVRCAASEETIREALTGNYRPEHVFALRQALELYDFHQVKIAECDTEIEAVLHTLNEERTTPEQPLPSVRHAKGRNEPGFDARPALYTLLGGDLTQIHGFGPYTVLRLVAECGDDMRKWPTAKHFTSWLCLAPGNKISGGRLLSSKTRRSSNRAAALLRIVAVNVGKTQTALGAFYRRLAARTGKAKAVTATARKLAILFYKALRFGMTYVDSGASYYEERYRQRVIQNLHRRARDLGFTLVADSAANG

SEQ ID NO: 184274 - protein, 446 aa, unidentified
MQVVHTRCAGLDVHKKSVVAAVRLLSADGTLTTHVRTFGTTTAALLDLVAWLITLEVTHVAMESTGEFWKPVYNLVEGSFTILVVNAAHIKYVPGRKTDVKDAEWIAELLAHGLLRPSFVPPAPQRALRDLTRQRTHLIQERASVVNRMQKVLEWANIKLASVVTDITGVSARAMLQALVDGQTDVSALAQLAKGRLRTKLTELEQALRGTLQPHHAFMIGQHLALLDVFDEQITAFDMRIQTAIEGTRPDPPPADGEAGSGQGARESATDATTPSAPDGAWAAQAIVDAIPGIGERVAEVILAELGTDMSRFLNAGHVSSWAGLAPGQHESAGKRKSTRIRDGNRYLRTALVQAAWAAVKQADTFLAAFYRRLAARRGKKKAIVAVAHKILVIVYTLLKTGQVYQERGAAALDERQKERIVHRLERRIAQLGYKVNLEPITAAVP

SEQ ID NO: 184275 - protein, 388 aa, unidentified
MTQAPGALPTPTVLDYERTLILAIELSNTSWVLAAQIPGLPGVKAKRSIEPTPEALMAAIEDYRTRAMKAGRNVEQVVAIYEAGWSGFWLARWLAQYGIETHVIQPSSVPVDRRARRAKSDGIDAELLLRTLLAWLRGEPRVCSMVPIPAEADEDARRRVRERAELVAERVGLVNRIGAVLATLGVGEYNPLRRDRRQRLDELRTALGGSLPTHARAKIVRMLDRLELLLLQITELEKSRDAVLEDENPDKAASMIQQLAKLRGVGVQSATVLVREGFVREFPNGKALGSYAGLTSTPYSSGGTEREQGIGKAGNVRLRTLMVELAWLWQRYQPDSAQVSWFRERVSGTGRRMRKVMVVALARKLLIALWRFATQGVVPEGAVMKPAT

SEQ ID NO: 184276 - protein, 343 aa, unidentified
MQMITTIGLDIAKSVFQVHGVDAAGQAVIRRQLKRRHVLAFFQKLPPCLVGIEACASSHHWSRELQALGHTVRLIPPAYVKPYVKRQKNDAADAEAICEAVARANMRFVPTKTPEQQSGMVLHRARHLCMRQQISVINAIRGHLAEFGIVAAVGRNGVEELLDIVADPSDRRVPDIARTCLAILGAQLRSLKEQILEFDRMIRAWHRSSEMSMRLDDCPGVGPVLATALVATVADPNAFRSGRNFSAWIGLVPKQHSSGGKNRLGSISKQGDRYLRGLFVIGALAVIRYAKIHGTKHRPWLAALLARKPVKVAAIALANKIARMVWAMMARGERYKEPVALAR

SEQ ID NO: 184277 - protein, 430 aa, unidentified
MKSNTQNAKIEAITEKTLVLGIDVGSETHYARAFDYRGIEYSKKPFKFSNTEAGFVTFKEWILDLKERHEKDKVVPGMEPTGHYWFNLGKFLQDNEMKPVLVNPHHVKKSKELDDNNPTKNDRKDPKVIAGLVREGRYMIPYLPDGVYADLRTASNIRFQLQAELTRIQNRISRWFNIYFPEYKTVYGRPDAKSGMLILKQAPLPEDILTLGIDGVNQIWRDAKMRAVGKARAKTLIEAAEHSVGSKEGAISARMEIRMLLEDYESRNIRLQEIMTLIEELVNQIPMAEKLLEIKGVGIKTVSGFLAEVGDISRFNNPKELQKLAGLALVENSSGKHKGRTTISRRGRKRLRYLLFEVAMSLVAKNPEFRELHTYYTTRRLNPLKKMQSLMAVAAKLIRVFYVMLTKGVDYDPKKMVGDIKRPAVYLQAA

SEQ ID NO: 184278 - protein, 348 aa, unidentified
MYYAGIDYHKRYSVVSIQDAQGQIVQEERVDHAYPEGFRRLFRECPEPVSVVYESTVNWSWLYEILKPLRNVSSVTLANPFKVRLIAEAQIKTDRISARALATLLRLNVVPACHIPDQKTRRRKEVLRQRSYWVKLRTAVRCRVHQIVGRQHHLSMPQVTDLFGGKGRAALDKALLPEPDDDLLEQNLHVLDALDDEISDNEKLIRKAGKADHATKILSSIPGIGLILANVIATETDGIGRFRDSPHYTSYSGLSPTVHSSGGKTRTGRMVPQCNRWLKWAYVEAAWVAVGCSPYFGGLYRHHRSRGKQANTAITIVARRMCHIAYQLLTEDRKYKELPFSPAALVKG

SEQ ID NO: 184279 - protein, 377 aa, unidentified
MFERTHIGLDVHAQSIVACALNPATGEIARAKMNADPVAVLDWIQKQETGSKVVYEAGPTGFGLARFLREHDIDCVIAAPSKLLKAPGEHVKTDKRDALTLARILSLGQITEVRVPTPEQEALRDLSRARQQASKELAHSRQRINAFTLRHGLYYPEKSRWTQDHLDWLRKQHFEEAAARQALEADLELEVTLLAHLKRLEALIAEHAQDCEYAGVIDALKCFRGIDTTTAYGLAVEIGDWTRFSGSSIGSYLGLVPSEHSSGTTRSQGSITRAGNTYARRLLVEAAWQHDRPYTRPGARLMKQFELVDSATRLRAMEGNHRLHRVWENFTQRGKKRTKANTAVARELAGWCWSVAAPLQEQAARTPIFSGAAIDAA

SEQ ID NO: 184280 - protein, 432 aa, unidentified
MKQNATTSPRVIGLDCHPDSFTAALVEGQTPAQAIVQKVFNKLPIDRLSSWAQKNLHAEDQVVLEASGNSFEVVRRLQAIGLKASVLESCQLGKLKEAHANNDKISAVRMAKAYLAGTTKTVWVPDRLTQERRDSFHAYQKTTKRTTQVTNRLLSYLSDNGVRLAHGLPALKERLEVLQKTKAWTPRQWQVIQGMLLELSHADEQREHWRSFMAQEVLSDPLLLSMVRLCGVRDVIAFTLGAIIGDIRRFAGPRKLVAYVGLNPAFDDSGETEWEGGIGCHGRSDLRSLLCEAAQAILRSDHSLAKWGKKLLASKGSYNLAVAAVARRLTVAIWYLMMGRWTELEEVDVRLSRKVGKIITRAGKQHLQAAGKSRQQLREEAFGSLKTGRVYVLGLKKMFTETVSPRPKTMLEEIRVEMEQYERERERADPKH

SEQ ID NO: 184281 - protein, 348 aa, unidentified
MQSIATLPIVGMDIAKNVFQLHVVDIDTGEIQRHKLKREKVSAFFANHQKSLVAMEACGGAHHWSRVLQALGHEVKLLPAKHVKPFVLRDKTDARDAQAIWVTAQQPHIKPVPVKNEQQQACLALHRLRAQLMKMRIMQTNGLRGLLYEFGIVLPEGHRTLLKRIQGELAKAQEGGTLPTVLVDSVQDQLRRIDGLQKDIDQLERRLAATIKENQHMQALQAVPGIGPLTATALVSTATDMNSFASARQFAAWLGLTPRQTGTGGKTRQLGISKRGDPYVRTMLMHGARAIITRSTQTSWVQRLLQRRPFNVVVAALANKLARTAWAILVKGKAFDQVRWNPVDLAAA

SEQ ID NO: 184282 - protein, 345 aa, unidentified
MADFNVLAIDLAKNVFQVCKTNSRGKVIYNKSFTRKKLQELLIREPMSLVAMEACGGTHYWARYAIEHGHKVKSMSARRVKAFRQGQKTDANDAAAIAIAALQPQVKSTRLLSIENQCQQGLVRIRELLVTQKVATAKQIRDLLLDFGFPIPKGDSALFGALSEILEDAENSLGMDFRMAIESQRKHLNQLLARLADIDARLATQIKADETCQRLQKLEGIGPVNAIALKLTLNTVEHFRNSREAAACVGVTPIQHSSGGKDKIGSISKSSGCKGLRSTLFEGSMAVIRQLDKREARTTKEVWVKDIVARRGKKVAAIALANKNVRTAYAMLKNGTDYQPSMLAA

SEQ ID NO: 184283 - protein, 342 aa, unidentified
MEYYAGIDVSLECSSVCVVDANGKIVCEAKVASEPQALISWFGSLGFGLQRIGLEAGPLSQWLFAAMKAAGLAVELLETRHVRKAFEAMPVKSDRNDARGIAQLMRLGWFRPVHCKSMSAQETRSLLTARKLVQSKLQDVENSLRGILRGFGLKVGKTTGQTFAGRIEELVAGHPHLQIIAKALLAVRAVLRTEFAAFEKQTRRMVRSDTQARLLTSVPAVGPIVALTYASAIDDPARFKSSKQAGAHFGLTPKKYQSGETDYTGRISKIGDASVRTALYEAANVMLTKPVKGCSRLKSWAMRIKRRAGMSKAKVALARRLAVIMHRMLADGTPFNAAAAAA

SEQ ID NO: 184284 - protein, 352 aa, unidentified
MARSYVIALDVHCQTCEFAAVTPGGRIIDRRQVATAIPELTEAIRSVRRPRTVVLEEGPLADWLYRSLAPAADAIIVCDPRRNALIAKDGDKDDPIDAEKLAQLARGGYLRPVHHSASPARALFKQRVALYHQRVGHRVAQANRVIWYLRRFGIMIREPVLAEAEKRAALMDRLPKGESVREDLTVLLESYDLAAEHVGQLRQRLIKQARGIDQIRRFTLLPGVKWIRAATFYAYVDTPWRFKSKSALWKYLGIGLERRHSGSGYERLGVPRHCHRPLKSMILGAAKSAVASRSNPFADRYERDLHAGCSPRIARRNVARSMAAVMWGMWKTERDYQPQWVGVPADALMVGS

SEQ ID NO: 184285 - protein, 360 aa, unidentified
MTGTMTWAAMDVHARSTTAATMDVQTGELSRRRFATGQVEPVVEWLAGLPAPVHACYEAGPTGFGLYRAATAAGVRCEVIAPSKTPRASGEKVKSDRKDAEHLLRQLMAGALTRVVVPPASHEAARDLARAREQVRGDLMRSRHRLSKLLLRHGRVWDQSTWTQTHQRWLGAQHFELVNSELAYLDNLAACQGLLARRVALDERLSHVARDPEFWPVVSRLRAFRGIDTLSALIIVLEVGDFARFERAVQLGSWLGLVPSRQQSGESDTHGPITKTGSRYARRILVEASWHYLRTPRIGVTLAARHDGLPDHVLQIAWRAQKRLYRVHQRLRAHRKAPNIAAVACARELSCFLWAAATAP

SEQ ID NO: 184286 - protein, 340 aa, unidentified
MHATIIGLDLAKNVFQLHAEDRSGTVLWKRRLRREELEAFLRKQPPALIGMEACGSAHHWARVFTAMGHEVRLMHAKYVKAYVKRGKSDVRDAEAICEAVQRSSMRFVPIKSVEQQIDRSLERARDLLVKQRTQLMNATRALLAELGVVARAGLRGFTTLADKIAAGDAVIPRPSLTALKPLVEQWRALQASIDELEARLVARAHSDERMRRLMKIPGVGPLTAHAVVTAIGDPKRFSTGRDFAAWAGLTPLTDSSAEKTRIGHISRQGDHSLRRLMVLGAVNMARHARAKPCEANAWLNGVIARRPVKVAMVAQAAKTARIAWALLCSGENYRGRTAAA

SEQ ID NO: 184287 - protein, 386 aa, unidentified
MPQPKDDLSRSLVAFEQHRTLIAAVELSLATWLVGGIVPGIERDPLKKLVSDEEGLLKLLYRWRDEAVKAGHKITRMVVAFEAGRDGFWLARWLRARGIEAYVIHPTSVAVSREQRRAKTDRLDITLLKRSFLGWLRGEKKHCTMAAVPTLEEEDAKRPTREREQLVGKRTGVVNRMKAALVRLGIRGFNPKLRKAPRQLAGLRTPEGRPIPPNTLAELEREMAHLRFIDEQINQIETSRLKQLKQVLQQGANTRVLQLQRVNGLGIETADMLTSEVLSRDLRDQRAVARYAGLTGSPDESGSRRREKGLAKAGNARVRRGMIQLAWRFLVHQKDSALAQWYQASVAAGKKRKTMIVALARKLLIALWRFVTTGDVPQGVVLRPAA

SEQ ID NO: 184288 - protein, 383 aa, unidentified
MKSVCGLDVHKDSVYLCILSEFGELIEKVFGVLTYQLEEMRDLMLHHHVIEVSMESTSVYWIPIWRVLSPHFKLNLANPYFIKQLPGRKSDVKDAQWIAECTMKELIRGSFVPPEIIQQLRQYDRRIFDLNEEIVRKLSKLDAVLQRCNIRLSNYVSNVDSKSYKAVVRAISQGITAPEELVKLIHGRIINHHGIDVITASLKGVVSLAEIDMISQLRDELDMAEAHKEKCQARMLEICERDFPEELRRLQTIPGIKERTATSLIAEIGTDMNKFETANHLASWSGLKPRNDESNKKIKSRSITHGNVYLRKTIIECAWAASRTKDCFFSRFSFHQTQVRKKNKMKVLVAVARKMLIAVWHVLHYNTNYIDFTTDCKTSQTRG

SEQ ID NO: 184289 - protein, 337 aa, unidentified
MNVSLISIDLAKNVFQVCGVNREGKQVFNRAVRRAKLAELIAQHSGTVIAMEACGGSNYWGRRFEQDGHEVRLIPPIQVKPFVKGNKNDRNDAFAISEAARRPNVSIVPPRSVEQTDLILAHRIRDRRVKSRTALINQARGLLGEYGIVVAPGPAALRAALPLLLEDAGNALTPMARQYLHSVLEEWRALEQHIDDIDQAIKVTARSLPAVRRLLDIQGVGCMIATAMVAKLGRGLQFRSGRQFSASLGLVPCEHSSGGKQRLGGISRRGDHYLRRLLIQGAWSVIRYADTREDRLSRWARELVQRRGKHKAVIAVANKLARIIWAMVRYERDYQAM

SEQ ID NO: 184290 - protein, 349 aa, unidentified
MAMLADQVDAVIGVDTHKLTHTAAVVTPTGGLVADLTVPTDAFGAKRVLAFAREHAPARRVWAIEGSGSYGSGLTTYLLEQGEWVVEIDRPARPARRNGAKSDELDALRAAREALSREHLAQPRRRGDREAIRVLVCTREGAVLTRTRAITHLHALVVNAPEGIRNQLRRLTTDKLLERCARLRTGPSQSVEHRSTIMALRSTARRALACEAEAGDLESALELIVERVAPELLAEPGVGVMSAARLLNAWSHQGRIRSEAAFANLAGVAPIPASSGQTVRHRLNRSGDRQLNRALHTIVLSRLQHHQETRVYADRRRAEGRTDREIKRCLKRFVARGLFRLLERPAQAA

SEQ ID NO: 184291 - protein, 382 aa, unidentified
MRCGGGWKRTYGSASEALPQETGSKQIGRACGAPRQSSTLPSISIAVRDASGKLVIESLIETKAATILEFLQGLKGTLWVTFEEGTSAAWLYDLLKPHVVKVIVCDPRKNALLKTGNKNDRVDAQKLSHLLHAGLLTPVYHGESGVRTLRELARSYLTLTKDLTRVMNRLKALYRSWAIPCVGEKVYSPRHRSAWLEQLSEAGVRRRAEQLYQQLDILLQIRRDARQELLRESRKHPAHELLRQIPQLGPIRVALLIALVQTPHRFRTKRQLWAYCGLALQTRSSGEYRFTVGQLQHSNKQPALRGLNSNHNHDLKNVFKSAATHVSTSPDAWGDFYRSLLAKGMKPAMARLTLARKMAAIVLTVWKKGARFDPGELKRQAA

SEQ ID NO: 184292 - protein, 320 aa, unidentified
MQTPSAVLNIGADVAKDAIVVACSEGSFPVREVANQRAAVLAFLQSLPAGSRIGVESTGTHHELFAAVAHQLGFLVFLLNPKDTHHYAKAVGLRGKTDRVDAELIARMIAHEHTKLHTWIPPTPQQREIDRLIKRRATLISLREAVAMSLHELDGFAGELKALRTRFNQLIARIDLRVKALVEASPERKQNFMRLCTITGVGPIVGTALVNTLERVPAKSADAFVAFTGLDPRPDDSGQHRGKRRLSKRGPAELRRLLYLAALSAVKTKPWRLLYEHYRARGLSSTAALVILARRIARTAWSIYTYKTEFDPTRLTNPLT

SEQ ID NO: 184293 - protein, 390 aa, unidentified
MLKYCVGIDVSKTELQCCISVIDQLQKVTVKASAKFTNTKTGFPRLHQWISSRHKSKEVPLVVVMEATGIYYEQIAMYLSDQHYALSVVLPNKAKKYLQSTGLKSKNDKIDAQGLSRMGAEQCLALWQPMDSYCYQLRELTRQHQRLQELKTTVNNQLHASAAGMYQNNLVIHQLEALLITFEEQLHALAAAIDQHLADKEEVKQKVDHICKIKGVGTLTVAVLLAETNGFALFENSRQLVSYAGYDVVENQSGNHRGKTKISKKGNSHIRRALHMPAFCVVSYEQPPFIGLFNRTFKRHGQKMKSYVAVQKKLLVIIYALWKTNSAYELNYQHTKDQPTGEKEQVLSSLPGLAKADPAAHKNSASLQAQPALHKVNLLSNNRSLLPLCQ

SEQ ID NO: 184294 - protein, 325 aa, unidentified
MNQEKMYCGIDVSAETLDICYQTQNSGKQNLKVKNNKQGFAQILKYCPENFHFVMEATGVYHLQLVFFLNENTQAFSVVNALQIKRYIQMHLERNKSDKKDAKRICEYGIERHPAVYEMPDSAYFECRSLNNTIEDLTKEITKISNQIHSLKKVPYDASIVIKSYQSIIKKLQLEKSKIEKELLVKLQNWQPELLKQVQSVKGIGKRASSELIIYTKAFKGMENYRQLISYAGLSPVEYSSGTSIKGRTKICKQGGKQLRHILYMGALNAMKTNVACKALYERLVANGKNKKVAIIAVCNKLLKQVFGCVKNGTLYQDNYIKNLC

SEQ ID NO: 184295 - protein, 394 aa, unidentified
MKVTTLGIDLAKSVFRLHGVDARGVAVLRRQLTRQQLLPFLAKLSPCLVGMEAGPGAHFWAREIGKLGHEARLMSPHFVKPYVKSNKNDANDAEAICEAVGRPSMRLVPNKNTAQQDVQALHRIRAQLIKWRTALANEIRGLLAEYGIVVTRGIAPLRRMLPVILDDVENGLSGLFRELLVEMAERLRSLDERIRQYDLRVVRVFGQDERCQRLAQVEGVGPLIATALVAAVGNAHEFKSGRELSAWLGLVPRQRSSGGKTVLLGISKRGDRYLRTLLIHGARSAVRTMEGRRDPRSVSISRLKGRQGPNVAAVALANRNARVLGRYSPRVRVIEQRRFPPASPKLVEGRRAENGYYQPEIAQAVFNDDGEPVRPALSKPELRRGPRGHRSDEG

SEQ ID NO: 184296 - protein, 402 aa, unidentified
MNAVGIDISKGKSIVCIMRPFGEVVASPFEVLHTDSELDKLASLLKSLNGETKVVMECTGSYYYGVAYALHDAGLFVSAVHAKIIHDFGNNTIRKVKTDKADSIKIANYGLSHWLELPEYIPQEDIRRMLKAFSRQYSKYGKLKIMLKNNFISLTDETFPGVNELFSSPPRKSDGHEKWMDFAMKFWHCECVCGLTPKAFSERYSKWCKKEGYYFNQDKADDIYAAACGHLIGMPKNDTTKLLITQSVNQINAISESIAILASEMKRLAEMLPEYPVATGFFGVGGILAPQIMAEVGDVVRFRSKGSLVCYAGLEAPPFQSGKFESGERNISKKGSPFLRKALFQVMDCILQCKPVDDPIYQFLDRKRAEGKHYYSYMTAGCAKFLRMYYARVNEFIDKLED

SEQ ID NO: 184297 - protein, 337 aa, unidentified
MGLYCGIDLHSNNHVLTVIDDADRRVYERRLPNRLAITKAALEPYRAELVAVAVESTFNWYWLVDGLMEAGYTVRLVNTAAVRQYEGLKHTDDEHDAFWLAHLMRLGILPTGYIYPKSERGLRDLARQRMRLVQHRSSLITSVQNQVWRSTAVRLRSDTIKGRGKQPWPEISDPDLALSVKVGRAAIDTLTVQIERLEKLILKRVDLSPQFRMLKTVSGIGPILAMTIALEVGDIGRFTAVGEFASYCRCVDSQRLSNGKKKGEANRKCGNRYLAWAFMEAAHFAIRVLPAAKRFYERKRRQRHALIAVKALAHKLARACFYVLRDQVPFAPERLFA

SEQ ID NO: 184298 - protein, 393 aa, unidentified
MQTPIYVGIDVSKDKFDYAAIDTQNTTIKKGSLQMNRDGFQELEKLIQSYPNAVVGFESTGTYHINIMSFLLSITNHVHLLNPALVKKFAEADSLRKTKTDAVDALVIARFLIHRQHNISATTEIDSAYLTQLARLRESITRDVAKTKTHLKQMLNIAFPELLKSANVFTDTLLHILIQFPSAKAIRKATKKGIRKTFYNLTKSRGKNPNLNPDQLYELAKKSIGTADESLEMAIQFDIKHLEFLQKQLDEVTSKLIDNVNKCFANELEILKSIKGIGDTTASHFLSEVKDIHRFSSAKQLIAYSGTDPSVKQSGNMIKKGKISKRGVSSLRRVGYLITCSVIRHDGVFRDYYLRKRAEGMVYRKAVIATWNKLLRVIFAILTKQVKFDHNHG

SEQ ID NO: 184299 - protein, 350 aa, unidentified
MKNQSSAITIGLDLGDRKHAVCVLDAKGEILKQETITNSRGSLVALSRRYPGALVAMEVGMHSPWTSRFLKELGHRVLVANPRKVHAIYKNVRKSDRNDAELLARMARSDEKLLSPVEHVSEEMQRDLLQIKLRDNLVRQRVDIISSVRFTLKSLGITLPSPNSDAFAKKARATLRKEHSDMLALIEPSLCVLDGMTEQIRTLDQSIAAMAAEKYPESEFLSQVGGVGLLTSLTFILTIGDPTRFQRKRDVAAFLGLVPRRDQSGETDKQLRISKAGNTYLRRLLVGCAQYILGPFGPDTALKRKGLKLTEKGGPRAKRKAVVAVARNLAVLLLTLWHDEAIYEANRGAA

SEQ ID NO: 184300 - protein, 372 aa, unidentified
MNYNTVYVGMDVHKESFTLCSCKYEDEKASHYQRTPASYKNVLRYLAFLRTIYGEDTRFVCGYEAGCLGYSLYHQLENFNVECVILAPTTMLEQRSKRRIKTDKRDAEIIAKSLAQHNYSPVHIPTKMDNQTKEFIRMRDDHKAELKKIKQQILSFCLRQGYQYDGSGNWTAKHVKWLRSLKTEGLYKEILDEYLLTYTILTDKLNRLDQRIEELASEEEYKEPVSKLTCFLGIKTHTALSVIVEVGDFQRFASARKFAGYLGLVPGQHSSGDDRNGLGITKAGNTHVRRLLVESAQSYTRGKIGYKSRVLRSRQAGNSPQIINYADRANERLRRRYYQMVLKDGKKYNIAKIAVARELACFIWGMMTDNIY

SEQ ID NO: 184301 - protein, 344 aa, unidentified
MIFVGCDLHTRMQQVAVLDTETGERGEHQLRHDGMAVEEFYAALRRPVTIGIESTGYAVWFHSLMQRLGHTVLVGDAAKIRAMVVRKTKTDRRDARHLLELVSHDRLPTIWVPDPATRDLRALLTHRMRLVRIRTMVKNGLHAIALNCRLVRGARLLRQAGLAHLRALALPPHTARRRDQSLALLTELNAQIRELDDAITTAAHAHPDAPRLITHPGVGALTALATVVVLGPIERFHDSKHVVSYVGLAPAVHASADKYHLGHITKQGNPLLRFALGQAAAHAARMDSDLKRTYFTLMHRRGRPQAKVAVARKLLVRLFIMLRDHIDYDEFRRRGRQTLTLAPT

SEQ ID NO: 184302 - protein, 428 aa, unidentified
MTVKDCTSIKEFWQLKKEIRGSNDHLIVGIDVAKDDHKAFFGTANGKTLLKRLTFKNDIEGFEKLLARAKEMKVKHSLKEIVLGLEPTANYHKALGDFLIKSGHMVVLVSGVSVKRNRELLDGRWDKNDTKDSANVADLISQGKCLYYEYAPVLLRDLRNLLSLKRRLKKQEHGLRIRIRNSLLAKYFPELDKYYSKWEPEVLSVVRWCLDPSVIAGLEYDQFVSLVSPGRNNIRQQERLEWIWKKAGDSIGCDAGEAAEFEAKVMVEELRHIREIIKETDAKIKDVCIRFPEYDYLLNIPGFGPDVSSKVLAAIGNPFRFNSLSQVLKMAGMDLNANRSGKSSDTAVPVISKKGSAHLRYALYQAAFIASVKNKIFIRYYTNTLRGREREKGIKTKMRVKLAAKMLVIAWTLMKKKEPFNPAYLKID

SEQ ID NO: 184303 - protein, 355 aa, unidentified
MATYYIGADVHCNSIEMAIMNRGKIVKRYTIPTSISSAAEVLDSLSGKKYMAIEEGPMSGWLYRNLHQKVERFVVADPRRNKLISSDGDHDDKIDSAKLALLLAGGYLREVYHSNDERRVELKHWVSLYHDRVHDAVRHINKIRARCRMHGVTIPRKVLRQPEHRDVWLSQLKHPVLARQLVMLWIGYDATAKQARMAKQQLIHLSQQYPIISLWKQLPGIGTIRAVTIFAYLDTPWRFKRKNKLWKYCGIGLQRTTSGTDKKGNPKPTLLQLPRSANRILKNAGLGAALTAINQAQSSFREDYERMVRHGIIPSNARHTVARKLLTMMWGMWKRNCQFGPDDIEPVQRSVCASL

SEQ ID NO: 184304 - protein, 343 aa, unidentified
MRGITTIGIDIAKSVFQVHGIDAEGDVIIRRQLKRRYVLAFFQKLPACVVGHEACASSHHWSRELQALGHTARLMPPAYVKPYVKRQKNDATDAEAICEAVRRPTMRFVETKTLEQQSCLVLHRTRHLFIRQQTSVINAIRAHLAEFGIVAPVGRRGVEELLDVIGEASDKRLPEVARACLATLGNQLRMLKAQILNFDRMITAWHRSNETSKRLDELPGVGPALATALVASVADPKAFRSGRDFSAWVGLVPKQSSSGGKQKLGSISKQGDRYLRSLFTAGALAVIRYAKIHGTKHRPWLTALLARRPTKVAAIALANKIARMAWAMMARGERYREPVALAA

SEQ ID NO: 184305 - protein, 430 aa, unidentified
MKSNTQNAKIEAITEKTLVLGIDVGSEMHYARAFDYRGIEYSKKPFKFSNTEAGFVTFKEWILDLKERHEKDKVIPGMEPIGHYWFNLGKFLQDNEMKPVLVNPHHVKKSKELDDNNPTKNDRKDPKVIAGLVREGRYMIPYLPDGVYADLRTASNIRFQLQAELTRIQNRISRWFNIYFPEYKTVYGKPDAKSGMLILKAAPLPEDILTLGIDGVNQIWRDAKLRAVGKARAKTLIEAAEHSVGSKEGAVSARMEIRMLLEDYESRNTRLQEVMVLIEELVRKIPMAEKLLEIKGVGIRTVSGFLAEVGNISRFNNPKELQKLAGLALVENSSGKHKGETTISRRGRKRLRYLLFEVAMSLVSKNPEFRELHNYYTTRRLNPLKKMQSLMAIVAKLIRVFYAMLTKGVDYDPKKMVSDIKRPAVYLQAA

SEQ ID NO: 184306 - protein, 354 aa, unidentified
MIFKGHKLTIGLDLGDRWSFYCVLDEAGQVILEQKLPTTPEAMKQTFGKIPRSLIALETGTHSPWVSRLLTELGHEVIVAHAQKVQLITKSNRKDDRHDARTLARLARIDPALLGPVRHRSAKAQLHLTVIRARAELVSARTALVNAARGLVKSYGQRLPKCGTYQVSRELAAGLSNELRDVLEPLLKEIESLNERVKEYDERMEKLAKDVYPEVALLKQVKGVGTQIALTYVLTIEDPYRFAKSRQVGCFLGLRPGRRNSGESEPQKGISKEGDRYLRTMLVQGAHYILGPFGEDSDLRRWGRKLAERGGKNAKKRAVVAVARKLAVLLHRLWVGAEVYEPLRNSQKAMREVA

SEQ ID NO: 184307 - protein, 343 aa, unidentified
MTEYIGLDVSMKETAVAIRREGVRVWRGKCISDPHVIAELIRKRAPTVKLVVFETGPLSVWFYHALRAEGLPVICIDARHAKAALDMATNKTDANDADGLAHLAEVGFFREVRVKGFDSMLARTLVAARTRLVHMTTELSNQIRGIMKTFGLVVPAGKGSVFEKNVRDLVSSDHDLAHIVLPLLDAWKGLRARAADLGRKLVADARQSQACRILMSIPGVGAITATSFATAIEEPGNFRKSRSVGAWIGLTTRRYQSGEVDYDGHISRRGDRHLRGLLYEAASVILTRSSVQSSLQTWGLQLRERIGFKRAAVAVARKLAVIMHTMLKTGELFNPNTGVTVTA

SEQ ID NO: 184308 - protein, 341 aa, unidentified
MGDITTIGLDLAKNVFQVHAVDVAGSVVLRKQLRRGQVLAFFAELPPCLIGLEACATAHHWARELIALGHETRLMPPSYVKAYVKRNKHDVADAEAICEAVRRPSMRFVPLKTAEQQSALMMHRARDLLIRQRTMLVNALRGHLAEFGLVEAQGLHKVARLIAIVMDEMDARVPDIARQVLKVIVSQIEDIQTRIAGLETQVLAWHKSNPVSQRLATIPGIGLIIATAIAATVADPSTFRSGREFAAWLGLVPRQNSTGGKARLGGISKRGDSYLRRLLVNSAHTVLLCSKVAKTDPWLTSLLSRKPRLVVAVALANKTARMAWAIMSRPDSTDTQRSQHD

SEQ ID NO: 184309 - protein, 337 aa, unidentified
MKYSGIDLHSNNSVVTITDEEDRVMAEKRLPNDLAKILDFLKPWKEELAGVVVESTFNWYWLVDGLQAAGHKVHLANTTAIKKYEGLKHSGDETDARHLAHLLRLGILPTGTILPPEQRTARDLARKRMQLVRSRTAHILAVENITARQLGARISGNQVKQLTAEAVDQMALPPDVALAIKANVAVITTLSAQIDLLEKRLQESVKARAEYGLLTSAPGIGQVLATTILLETGPINRFAAAGNFASYARCVDSVHTSNGKKKGEGNTKNGNKYLAWAFVEAANFALRYCPEAKRFYERKKAKTNNVVAIKALAHKLARACFHMLKEKKPFDVKRCFA

SEQ ID NO: 184310 - protein, 348 aa, unidentified
MPNYNQPHQFYAGVDLHARSMFVHVLSAKGKTVFERDLPAEPDVFLDAIKPFRKNLVVGCECMFAWYWLADLCEDKRIPFVLGHALAMKHIHGGKAKSDKIDAGKLANMLRGGMFPLAYVYPRAKRQTRDLLRRRSFFVRQRAQLITHIVNTNSQFNLPPFAKKLSYAANRSAEIAERFPDPSTRLMIHADLHLIDAYDAQIAELERHLLQSAKLDDPVTFGFLRTIPGIGPILGLILLYEIDRISRFPEAGNFLSYSRLVRCAHESAGKVKGFGGKKIGNAHLNWAFSEAACLMLRTCLPVKAWLQRQEQKRGKRKALSVLEAKIGRTVYHLWNKQQAFDVKKFLHS

SEQ ID NO: 184311 - protein, 348 aa, unidentified
MTMVCGLDLHRRQITFDAVHVETGEAWTGRVWQPDRERFRRWLRDDVAERAHGGSVSIAVEGCTGWRYVVEEVVAAGFEAHLAEPADTQAARGRKRRAKTDRSDCRLMRELLQDGRLPASWIPPTIVLEWRERARLYKTLVDQRSTWVQRIHAELYQHGVTLPETSIRWAKTRELLEDDGLEISPAGRQRVLTAYRMIDTITIESRPLKADLQRFGRLQPGCRALVDSQYGIGGLLAVVMWSELGDCQRFARSEQVVRHSGLDVTVDQSDRRRAGGFISRQGPQTLRWALYEAAKNASHQRSPDHDYYRDVKEHLNGKLATISMARKLARRCFHVLRAVDPDEVYATP

SEQ ID NO: 184312 - protein, 374 aa, unidentified
MSNLSEAFVAFDTSKLRNAVAIADAGRTGEIRFLGEIDNTPAATAKPARKLADKYARLTFCYEAGPTGYGVYRQITGLGHECMVCAPSLIPKKPGDRVKTNRRDAVSLVKLLRAGELTAVWVPDRHHEAMRDLTRAREAAVMDSRRKRQQVSAFLLRQGLHYPGKDTWGKKHMNWLTSQKLEFLEQRIAFEEMMLAVRQGQERLERLEQAVHSAVPDWSLAPVVTALMAMRGMDVISAATFLAEIGDLSRFQTPSELMGYLGLTPSEDSTGDKIKRGPITKAGNRRARRMLVECAWSYQHPPRVGRDKQAKVAAAPRAVREIAWKAQCRLNKRYRALIRRGKLKTVAITAVARELAGFIWAVAREITPVRAGAK

SEQ ID NO: 184313 - protein, 442 aa, unidentified
MTTDKEMRLERRSDRRLLVMPRVVTTQTRGRWEQVLLVGIDWADKEHVYCLMDDAGTTLATGTVEHTAEDLERFMNAVRARVQTPHDILIALETSHGPLVGALLDQGFTVYPINPKAVERHRERFRVAGAKSDLRDAWVLAALLRTDRALYHPLTPDSDVAQELRALTRDRADLVRTRTMLSNQLTACVKAYFPEFLTLFSDPDRPVALALLQAFPTREHLQAAPRAELETFLRRHRCPHSRKRAAAIHERMQAPGFHIASPIVRAKARLAATLVAQLQTLGEYLDAYEREIQRVLRLHPDGELYLSLPGAADVLAARMVGELGDNRDRYRDPNIAQCEAGTAPVTKKSGSTRTVHFRRACIHPLRETLWQFAFSSLRRCGWAQAYYNQARKRGKKHAEAIRMLGNVWLRIIIAIRRNRRPYDEEVLQKARLRHGTPGLCFA

SEQ ID NO: 184314 - protein, 406 aa, unidentified
MELTTIYPRVIGLDVHQAQITACAIIQETDGTTRVEQRQFGAFKRDRRELAEWAALLKPDQVVMESTGIYWKSPYAALETVGIRGLVVNARHVKNVPGRKTDIGDAQWLATLARAGLLRGSFVPPAKLRELRLISRQRQKLIGQLSSEKNRLHKLLTDSGIRLGVVVSDIHGQSARAMVKAIIAGQQPHEVLHLASRRLKATREELFDALQGELTANHRFVLNEIMCHIEEIEARIARFDARLLEELKDEQNKLALLQTLPGVDLIGAAMLLVEIGSDMNAFGSANRLASWIGICPGNNESAGKRKLGRVRKGNIYVRRLLCEFAHAASRTKSVFHSKFQSLLVRRGYKRSIVALAHKLLRTIYFMLSRGEHYRDSATDYEALSTRRNAPRWIKALIRFGYIPKPV

SEQ ID NO: 184315 - protein, 341 aa, unidentified
MNIKRVGIDLAKQVFQVHGVDNQEQAVLRKQLRRAQMLDYFQKLPPCLIGMEACSSAHYWGRELQKLGHTVKLMAPQFVKPYVKSNKNDANDAEAICEAVARPTMRFVAIKTIAQQDIQAIHRIRSELVHQRTAKVNQIRGLLGEYGLVCGQRIEVLHNALPLLLEDAGNGLTLDFRELLQGLQQDLIKLDERVAEMDKKIKVLASSNVDAKRLQQIPGIGPITATALICAIGDGKQFKRGRDMAAWLGLTPRQHSSGGKDRLLGISKRGDAYLRTLLIHGARAVLRVAANKDDPRSRWLQNLCARRNKNIAAVALANKNARIVWALLTKKTDFLPEGKPA

SEQ ID NO: 184316 - protein, 613 aa, unidentified
MSITTPLQRIGVGIDTARYGHRVSFLRPDHQPAAKPLTVLESRAGYQTLHERLEHLHQQHPLAHFHVRIDAAGQYAANLEHFLRALPLPLTLSIGEPKRNKDYQKAHFPKRTTDDTESQAMARFAVVELPPATRPVGPAMAVLREVAGRLQAKVKQSTQALNRLHNLLARVFPELATLTDDLSAAWVLQLLEKYPTAQRLGQARLSTLQNIPYLTPELAAQIHLVAQQSVACLSGDIAEQLMRDLVAQVRHTQQAESQMRALLSAAYEALPPSPHWHVITVPGIGVATAAALVAQAVDINRFSTPKRFVGFFGVFPEEDTSGVDKYGQPLPPGTQRMSRKGNDLVRHYLWNAARSAITHNPAVRALYQRLRAKGKRGDVALGQCMRKLLHLVYAVWKTNRPFDEQHQAGSTSNATAPTTAPADLSAAAPNPTEPPVAGANPPCSGNDAATAPAANDAAQAAAPKETAVGHKRDVPAKEVVTTATATVVPTPLPVKPANRPARPKVDFAFLRQQVSMEQILSHLGLLDSLRGRGHQRRGPCPIHSQAGDTQPTFSAHLGKQLFQCFQADCRAQGNVLDLWAAVHKLPLYDAALHLAETFHLPRNREEEPVGGTR

SEQ ID NO: 184317 - protein, 386 aa, unidentified
MKRNDLSRSLVAFDQDSTLVAVIELSLKSWLIAGLVPRLARQPLKKQSADAEAIVKLLYRWREEAVKAGGKIERIVIAFEAGRDGFWLARWLRERGIEAYVIHPTSIPVSREHRRAKTDRLDTALLMRAFLGWLRGEAKHCSMAAIPTLAEEDARRPNREHEHLVGERSRIINRMKATMIRHGIGNFNVKYRKAAERLEEVRGPEGMPLAENTLAELRRDMARLALVRVQIKEIEKTRLERLKKAPQEGSHPMVLMLAKVMSIGIETADMLVHEVLSRGLRDDRAVARYGGITGAPDESGSKRREKGLARAGNARVRRGMIQLAWRWLMFQKDSGLAQWYRARTASARRDVRKTMIVALARKLLIALWRYVTTGEIPLGARLRPAQ

SEQ ID NO: 184318 - protein, 389 aa, unidentified
MKIFVGIDIAKLNHFAAAISSDGEILIEPFKFTNDADGFQLLVSKLESFDKNSIIIGLESTAHYGDNLVRYLVAEFYQVCVLNPIKTCQMRKNNVRKTKTDKVDTFVIAKTLMMQDDLRFITFFDLDMMDLKALGRFRQKTIKQRTRLKIQLTTYVDQVFPEIQYFFKSGLHQNAVYALLKEAPSPKEIASMHMTHLANLLKVNSHGHFTKEHAKELRVLAQKSVGANDSAISIQITQTIQQIELLDSQLEKIEAEMTDIMKFNDSVIMTIPGIGYINGGMILGEIGDMHRFSNPNKLLAFAGLDPSVYQSGNFQAKTTRMSKRGSRVLRYALVNAAWNVVRNNATFKAYYDAKRAEGRSHYNALGHCAGKLVRVIWKMLTDEVEFNLE

SEQ ID NO: 184319 - protein, 341 aa, unidentified
MTVTIGVDPHKATHTAVAIDGNERPIARLELTADRRQTHRLLAWAAPFGRDRRWAVESANGLGKLLAQELLGAGEQVVDVPSTLSARVRLLGSTKASKNDPNDALATAIAGLRHSGLRTVRLDDHAAVIRLLVDRYDDLTRLRTQVACRLHVALRELIAGGAPRRLSAERAARLLRSVRPVGVAAIERRRLAGELLADVRRLDRDIAAARGRVADAVTKSATSLLELHGVGPIVAGFILGHVGDPARFTTADRFASYNGTAPIEASSGPMKRHRLNPRGNRKLNHAIHMAAVTQVRHNTPGRVYYERKLAEGKSKREALRALKRRISDSVWRQLQVDLGRR

SEQ ID NO: 184320 - protein, 305 aa, unidentified
MMENVFGVDVAKAWVDVVGPDGHERVGNDDLKAFALRVGKAGGRVAFEASGGYETPLRTALGSAGVPAIRVNPRRARAFATSLGRLAKTDRVDAGAIREMAARLDLPECPPETKEVSQLKALQLRRRQMVEDAKREKIRLSQTFDKGTRASVMRVMRLLQREIDSIEAAISRCIAGSEDLRSKAALLRTAPGVGPVSATALLAEMPELGTLTPRQVAALAGVAPMARDSGVRTGKRRIGGGRKSLRDVLYMAGLSAARHDPSLRAFSDRLRANGKAPKQAIIAVTRKLLIILNAMIRENRPYQPT

SEQ ID NO: 184321 - protein, 389 aa, unidentified
MIYVGIDIAAAKHACCILSEEKKVIKQFTFANSASGYEKLRSALLSPAETKIGLESTGVYGNNLAEFLRRNGYETHIFNPLLVKKSIQATTLRKTKTDKSDAKHIAQYTKEHSQPNLEPSYHISELKSLSRGRFSLVRERSKVKAQAKGLLVQLFPEFSQAFSDVFGAAASAVLKQLPSARMISQCPVDVLTNLLRTASHGRLGKVKAELLIDLAEHSVGIQSMALELQTQMLLQQIDLFTIQINRYEAAIKSEMETIQSPITTIPGIGCVLGAAILSEIGDIRRFTTPAKLQAYAGVDPSVGESGTSVSTPGRMVKHGSHYLRWALCQAARCVSLYDPIFAVYMKAKRDEGKHYCVACSHVAKKLTRVIYSILKKNTAYSLTYSQIGA

SEQ ID NO: 184322 - protein, 333 aa, unidentified
MSLTTDNPPFALGLDVGKAEVHAAVLSPTNPAFLAEKVFTNNTAGHQALLAWLAAVLPPTAAVHGCMEATGSYSQPLALFLHPRLARVSVVNPQCIKAFGQIGLRRSKTDPADARLIARFCLKEQPEPWRPPTPHQRKLQALSRRLKSLQAQHAAEQHRVGQCLDKDVLADLRAHLLWLKNHQAKIEAQMHRLVATDEALCAQARLLVSIPGIGKKSAALLLAEIPHPDAYASARQLAAHAGLTPRHHQSGTSGRTATPLCKIGSTRLRSILYFPAMVALRHHPPARAFGQRMRDRGKAEMVILCAFMRKLLHVVFGVLKNQQPYDPSFHTHA

SEQ ID NO: 184323 - protein, 316 aa, unidentified
MAILVSKITLGIDVSKDELVIADWDTGQLTRLANQRSQIRSWLKARYGPVRLAIEPTSHYHLAIVEEAQALGFEVYMINPRQLTHYREAVNVRNKTDPEDAWLLARYLAHEASQLRLYQPQSHQAQRLWTLLKRRGVIVASRKQLHLSLQRLPISSQALFRQFDQLLKRIDQHLKRLIRELGWWPDYQRCLSVPGIGPINATALLCAFHRGSFASSDAFVSFIGLDVRRRESGQYKGKRKLTKRGDAELRRLLYCAAQPARCYYPFDQYLQKQLDKGLSKIAAKVTLARKLARIVFALLNNQQSFRKQECMPIHSP

SEQ ID NO: 184324 - protein, 315 aa, unidentified
MAMPVSISKPIVGVDVAKNELVIYNAELDLLEEIPNTKAAITKWLKALPGAVAIAIESTNIYHLAFADLAHEAGCVIYMIGGYELHHYREGVKVRAKTDALDAKLLARYLKNEQQELRPWTPPSPLYRQLLSLFRRRAALVQARVGLEQSWANEPLLKTAFAEQVKSMQQLETLVEKTINDQLKEAGLVGQLKRCLKVEGIGFLTGARLIAAFQRGDFRNADAFVAFLGMDLRVSKSGQKDGRRSLTKRGDPEARRLLHNAAMSASRTKAWKGFYESQRARGFSTTQALVMLARKLARVAFALLKGQGEYRPKVS

SEQ ID NO: 184325 - protein, 298 aa, unidentified
MVQVAAQQALRVENSKVALRAALKPYAGRGDMLAICEATGGYEDDLLDVLEDLTIPAHRADAVRVKAFIRACGANAKTDPIDARHIAQYGLSRAQSLPRWRPSPPHEAKVKLLVLRRTDLVSMRVQEENRLKAPRNKPIAREIAGHIAEIKRRIETIDKQIETIISLDKRLKDRKAILQTVPGIGKVIAPMLLALMPELGHIDRKQAASLAGCAPHPRDSGAHKGRRFTTGGRRQLRPLLFTAAMAASHSKSHLAATYRRLLHAGKSKLTALGAIMRHIIVIANARLKEYQNEQIRLT

SEQ ID NO: 184326 - protein, 317 aa, unidentified
MKRYAGVDVGKDQLDVAVHGGPHRKFKNTAGDIEKLAKWLLAKGVTSVVAEATGDYETLMLERLQVLGFEVARVNPKRVRDFAKARGSLAKTDRIDAFVIAHFGTAMTPRPLPLLKQWQKRLRASIRHRESLVAQRTAESNRKRSKGVGEWQNSIARHIQWLDDEIKLVDAKIQELVQNIDEASKLSKRLQTAKGVGLIVAATLIAELPELGTLNRKEIAALAGLAPYNNDSSTILKRRATWGGRAAARGPLYMAAISAMKCNPPISQFSERLKQKKKPNKVVIVACMRKLLTILNSMVANQQDWSLEANSKNRETQ

SEQ ID NO: 184327 - protein, 344 aa, unidentified
MEITTVGIDLAKAVFQIHAVDERGKTVMKKQLKRDQVAASFANLPPCLIGMEACGSAHHWARKLGGFGHTVRLMAPQFVKPYVKTNKNDAADAEAICEAVARPNMRFVPIKNIEQQSVLSLHRVRQGFVKARTAQANQIRGLLGEFGLIIPQGIANLAKRVPELIEEASNELTCAFRLLIQRLMEHLKELDRQVAEMEGQIKAWHHASDHSRKLEKIPGIDPITASALVATLGDAKSFDNARQLAAWLGLVPRQHSSGGKPTLLGISKRGDSYLRTLLIHGARSVIFRAQQKVAKGGWLHKLLERRNPNVAAVALANKNARIVWALLANNREFRADDTPAIAAV

SEQ ID NO: 184328 - protein, 460 aa, unidentified
MTPPPPASPGPWTGNREKRRRAPVSDHPGAGLVAESSLPLEGITLSVVIPGVGCFVGIDWAAETHAVCVMNTGGTVLARFTVTHTADGIQQLVRRLARHGDPAEMPIAIERPDGRLVDLLLEAGHPVVPVSPNAIKTWREGEVLSGAKSDAGDAEVIAEYLRLRSHKLSVAAPYSDATIALRTVVRARGDLVRQRVAATNQLSALLDSYWPGAKAIFADVESPISLAFLTRYPTPASAARLGQQRLAAFLAKHGYSGRRHPAVLLQRLRQTPPGTTDETITAALADAVAALVGVLTTLNTAIKNLDRSIAARLGEHPDAKIFTSLPRSGRINAAQMLAEWGDCRQAYDGPDSVAALAGCTPVTKASGKHKAVHFRWASNKRFRAAITAFADNSRHESPWAAKIYNDARAAKKDHPHAVRILARAWIRVIWRCWLNGVAYDPAQHGAARAVQHQPPPPIAA

SEQ ID NO: 184329 - protein, 340 aa, unidentified
METIGVDLHKRESQICIRRETGEFIEQRIVTGRGAFHAMFATRPRARILLEAATESEWVARYLESLGHEVVVADPGFAPMYATRSKKVKTDKRDARTLCEACYRGTYHAIHRVSDARRHLRSALTVRDALVRTRTRYVAIVKAFVRREGLRLRSGEPQHTVAKLAELELPAHVAAELAPLLALLGPVHDEIERANDHLTQLATSDPIVPRLRSVPGIGPVTAIAFVAALDDVRRFTSAHQVQAYLGLVPSEFSSGERQLRGHITKRGNSRTRWLLTEAAWRVLRSSDPDAAPLRTWAERIALRRGKRIAAVALARRLAGILYAVWRDNSSYQGRRHRIAA

SEQ ID NO: 184330 - protein, 362 aa, unidentified
MPKMIWLGMDVHAASITVARYEDQAATAMVQTIANDPAQVRRLVRRLPAGSEVRACYEAGSCGYGLHRQLTALGVHCDVIAPALIPRRPGERIKTDRRDAEKLGRFHRSGELTTITVPTPSQEAVRDLVRAREDVRRDRTAARQRLAKFLLRHGHRYPGSHWTKRHWEWVCGRPFEGAARTVFVHYCDHVLALNERLAHLEREIHTFADSPVYQPVVARLSCLRGLATLSALMLIAELYDLRRFRTPRELMAYLGLVPSEHSSGARERRGRITKTGNALARRLLIEAAWAYRHPARQTRRVHQALTTQPPEVHAISDRALHRLTARYRRLLSRGKTPHLAVTAIARELCGFVWAIALVPDLA

SEQ ID NO: 184331 - protein, 409 aa, unidentified
MVNNMVEKFCGIDVHKDTLVATILDGQSEEKQTKKFHNTLPDIENLKQWLTQTQCQTAVMESTGIFWVALYLTLEEAKFRVMLANAYRVKGIAGRKTDQSDSEWLAYLLRAKLIKPSYVPTKQLRDLRLLTRLRTKYTQNKTQYKNRCQAILSRVNIPISTKISDVFGKAGSELLEGLMAGKSVVNILDTTQNKWLIAHREEILEVAMGTLSATDVFMLEQLTDMIAHLNTQIAKVEMRIERLLVEADLRIISSVPGVGKTTAASILAELGDVSRFENAKQVSAWAGLAPSVYQSAGVTILGHITKHGSRWLRRSLVEAAHAAVKVKNSVFRRMYFRIAERRGKKTAVVAVARKLLTIIWHLLVCGELYVEEGFSKKPLKLRSNGLGGLSLDGMVEVLRKAGYTVSSEG

SEQ ID NO: 184332 - protein, 320 aa, unidentified
MSQPSVYIGLDVSKATLDVAVRPTDQQWQVPHTEEGLRDLMARVRVLHPTLVVLEATGGLELPVVAALAAAKLPVAVVNPRQVRDFARATGKLAKTDRLDAQVIALFGERVQPTPRALPDAQAQEFAALLARRLRLGRSPPAEGTRLASALPRLRPQLQEHITWLRSQLAQVDEDLGSTVRRSPLWREKENLLRGVPGVGPILTLTLLAELPELGTLNRKQIAALVGVAPLNRDSGLLRGKRTVWGGRAPVRAALYMATLVATRYNPAIKSFYQRLLAAGKAKKVALTACMHKLLTILNAILKHRTPWASPTYSRLGPCS

SEQ ID NO: 184333 - protein, 427 aa, unidentified
MPYRIAGIDVHKKMLAVVVADVEVEGDYHFERLKVGTSPAQLRALADWLVEREVDEVVMESTAQYWRPVWEALELHWRPKRRTREGASPICGTLHLAQAQSNRGAGGRKKDFPDAERLVKRLVAQELTLSFVPDAEQRLWRTVMRRKYQITRNRVQLHSRLESLLEEAHIKLSSLVSDLLGTSARRMLQALADGETDPATVASLADQRLRATAAQLSDALSAGMTLHPVYRRLLKLTLEELRLIEEHLGQLDQQMADLLAEHHEAVQRLAEVPGLGVDSAQQIIAEVGATAATFPSPKHLASWMGACPGTEESAGKNYSHRCPKGNRQMRRVLNQAANAAVKAKGTIFAIVYRRLVPRLGHAQAIGAIAHRLCRLIWKILHQSIRYEERGPAVSEEARKVRARKMIRELRSLGYHVELLSAPSGSPA

SEQ ID NO: 184334 - protein, 471 aa, unidentified
MSNSIFKFSNDLKNLLAICKPEQLLYAPIDVAKYNHSAMIVNLLGEIIIPKFDFPYNLHGIDFLKNKIQSACDISHAKKLFLALESTGHYHENLVASLSLSGYDITIIRPIDSKNERDNVHAKTDAIDLAAIAKVIISNKGTRSNMPDTVYYNLQRASRTHRQLTWQDTRVKNIITMLVDKTFNGLWNPDNAIFSDKWGKASLLFVEHYPTPQQAIKMGAKRLSEFFKKHNTKLGIETADKIIALAKDTPARPLETMESDILALKANISVLEALTSAIQQQKRQMVKYLVQTPGTYLLSIPGISVVYAGDFTAEVGDIHRFAYAGQVVSLAGTAPRKYQSGELDKANLPTSHKGKNLLRMTVNQTALSLNTHCPEFHKYYSDKLFHYKDAPPKARTATANRFIKLAYAMMKNETLYCPKTGNPLTTEKEYYQSVWSKVKEKLTDYLSDDIPDNYMSKIQHQLEDKYGITQD

SEQ ID NO: 184335 - protein, 458 aa, unidentified
MRILGIDLAVTAKHRAILADERGRFISPLLRFRTCQADLERVYALARQGMASEEPLVVVLEATDIVWYPVAVFFHQRGTTVYLVNPRMAADLARFYQRYAKSDRLSAQTLARLPVVNPDRLYPWTPLKPGYLALQRGCKELDRLTEQASAIRNRLRSTDHLGWPDLQQRVFADPFSPAARWFRDHFYDPRRVVAAGVSGLRQAWRAAEAYDGDEDWIEPLYTLAQEVLSLYGAQSEYLDYQALAEEVRREQRRLADLEADAHFVRLQVTRPRYRQLHPSRNLETIKGVGEDGAAVYVAFVGDPDRFANHRAFRSWSGMIPSSDQSGEREGKGLRITQAGPDLVKKYAFLGAETARHWDPQIAAIYYDQMVNKGKHHAQAVCAGATHLLDRIRVVLTEDRPYELRDVDGTPVTPQQARAIIAERYTVPEEVRRRNTRRARRERRERREEKRSRSRPVSG

SEQ ID NO: 184336 - protein, 494 aa, unidentified
MNIGEAPVALPQTRIHVWPPWAFVFGKRGGEMPRSQKETRSAGDEAEVEGLPVLRPYVAGIDLASEIHWVCAPNLNGTGREVEKFGATTPELERMAEWLEERKVESVAMESTGVYWIAPYEVLERYEFEILLVNTRELARVPGRKKSDHVDCQWIQRLHSCGLLRGSFRPAEQVCMLRTLVRDRGNLVAAAADWLRRMQKSLDQMNVRVHRAVKDIEGATGMAIMRAIVKGERDARKLAELRDPHCQKSVEQIAEQLSGHWREDHLFSLQEALKMYDAVQTGIADYDQEILRQLAEMEREECRGQQAPKLKNVNKARQIKSRGEEAMRQALYRMSGVDATAIDAIGVGTVQVILSEYGPDLSRFATEKQFVQHATLAPHKPTSGGKALKKKKPGSASTRVAAALRMAATSLEHSPTALGAYYRQTARHKGGSVAVFATARKLATLVYRLLRWGQPYIDEGAAAYEKRYQESRIKRLTATAKQLGYQLMPKASEA

SEQ ID NO: 184337 - protein, 325 aa, unidentified
MEKKQIIGIDVSSQKLNLHFLEESLDFEIPNDAQSFRRFFKDQKLNSKNCVIGAESTSRYHLICQNISVSSGFEFRLLNPILTNKKITNSIRKKKTDRNDAKFIAQLINQGEGRIITKNQLDITKKTLLRTRTGVVNQRSGIKVMIQELKRVKNNKKIKSAIISLEKLVSQMDKCVEAVENQALDEFETTKEEKLIQTLPGFAERLSAVVATETGNFSRFPTATQFKAYVGIDPKVIQSGGSLRTGRITKRGNVHLRTAFYLAAQVARCHDPELKAFYQKKKNEGKPTRVAIIAVARKLCERVFAVVKKGTPYEIRQVKSQPTLA

SEQ ID NO: 184338 - protein, 329 aa, unidentified
MTTDHLTPDSQATARPHTNTLFVSLELSKSRWLLTVSAPASTKLSKHAIAGGDGPALLALLARLRASAERRCGGPVPVTLIQEAGLDGFWIHRLLSQHGIDSHVVDPASIAVNRRQRRIKTDAVDGETLVRTLLAFLRGERQVCSMVRPPSVAAEDRRRLSRERATLLKERTQHTNRIKGLLYGQGVLTYDPLRKDRLARLAGLVTGDGRPLPERLKAEIGREIARLELVCAQLAAVERERDALVAQTAQADPQAPAAMLARLRGIGPELASLIWLEALFRRFDNRRQIAAYAGLAPSPWQSGETARDQGIAKSGNRRLRHAMVELAWF

SEQ ID NO: 184339 - protein, 336 aa, unidentified
MKRAQSNTKKKAIKSGQDAAPVHHRKPVVAGVDTGKDWLDAAIHNVDCAPLRRPNNLQGRAEIVAFFKQRGVTRVGIEASGSYEFEMVEAMRDAGLEVCVLQPAQVRAYAKFLNLRAKTDPIDAALIARCAAAQDEVRERPDPRLAPFAEHLTFIEQIEEDIARLRTRRDRFRDAQFIDALREEIARQNKRKRAELAKLDHAVRAHADLARKLDLLISIDGLGQRTALTLVVRMPELGRVTRERASSLAGMAPFTQKSGRWEGQAHVEGGRARVGKALFAAAQAAAQRWNKQLVVFYKRLRNEGKHHSVAVVACARKLVIYANTILARGAPWLPQT

SEQ ID NO: 184340 - protein, 344 aa, unidentified
MGEVITIGLDIAKSVFQVRGVDGAGVVVIRKRISRAKVLVFFADLQPCLIGIEACPSAHHWGRELEALGHTVRLMPPSYVKAYLKRSKNDANDAAAICEAVTRPSMRFVALKTKEQQAFLMLHRTRQMLVRQRTMLINAMRGHLAELGIVSAKGRNGTGELLRIITDGADGRIPPMARGILGVLARQYSAIGAELGSIQKSILAWHRSCEASRRLEEIPGIGPIVATALVAEIGDWKAFGSGRNLAAWIGLVPKQHTTGGKDRLGGITKQGNRYLRWLLVTGAMAVIRYAQKHGTHKRPWLGRLMERRPTKVAAVALANKIARVAWAIMVHGDRYKEPELQAAA

SEQ ID NO: 184341 - protein, 322 aa, unidentified
MPEPILGVDIAKKKFDAALLINGKLKHKVFANNQEGFEELELWLKKQGANHVHVCLEASSTYGDELAAYMHDAGHTVSIVNPARIKGFAQSELVRIKNDKVDAGVIARFCHAMHPEPWSPAPPEIRQLQSLVRRVDALINMRTQELHRLGTAQDTVEQSIQEHITYLDKQIAALKQQVADLIKHDPDLKIKRDLLKSIPGIGEATIAAILAELHMFERCDRVQKVVAFTGLAPRQFISGSSVKGKPRLSKVGHARLRKALYMPALVSIQCNPIIQIFYNRMKENGKNGKVIVCAIMRKLIHLIFGIMKSGKPFDPNYTTNHA

SEQ ID NO: 184342 - protein, 299 aa, unidentified
MESQEVKYVGVDCGKKSIEVVRINSENSLERRQFSTTESGINNLLQWLTLNDIVGLEAGSQSFRIAKSILNKGVQVIVLNPGNLATIYQSLKKTDKEDSLKIARLIQRFPIEELPVVPIPNDEEEDNRRLCTEQENWTRQLTQSKNRLHSLFTQAGLTHITKKHLRTKANREISVALLPSRYQKEAERILKVLDLVEQNLKLIEKEIQEALKKNKAYVQTIMSMPGIGMITSLAIMSYMGDCKRFSSAKQAAYYAGLVPRVDISGDTVRYGRIINRGCHSIRRVIVQAAWSLVVNTVVR

SEQ ID NO: 184343 - protein, 461 aa, unidentified
MKPEKIENQEAGRELDGLPVLRRNVAGIDLGSQMQWVCAPSLDGQSWEEKAFGATTPELERMAEWLKQRQVESVAMESTGVYWIAPHEVLEGHGLEVLLVSTRELTHVPGRPKTDRIDCRWIRRLHSCGLLRGSFRPPEQICMLRTLVRDKGRLLEERADWVRRMQKSLDQMNVRVHRAVSDIQGSTGMRIIRAIVEGQRDPLELAKLRDPGCHKSEQEIAEQLSGHWREDYLFSLQQSLKMYDAIGERIAAYEKEILRRLGEMEKPDLPDRSAPELKNKNKAKKIRDRGEEPVRQALYRMSAVDLTSIDAVGAGAAQAVLSEYGPDLSRFPSEKEFISHVLLAPRRGITGGKPIRKKKRNSASCRVSEILRSAALSLQHSQTALGAYYRHTAQRLGPDIAAFATARKLATMIYRMLRWGQSYVDEGAAAYEKRYQEARFNRLHAAAADLGFQLVAQTANP

SEQ ID NO: 184344 - protein, 454 aa, unidentified
MIAAVVERCAGIDVGKRFLKVCVMVGPLGEEPRFEIRRVDCTHTQLEELRQWLESEAITHVVMESTGPYWVPVFNVLESEVKVVLANPQEVKNRKGHKTDAQDSWWLAHLLRHGMIRPSFIPEKATRDLRELTRRRKKLVEQAASERSRVQKQLEYGNVKLGNELSDVFGLSGQLMLKALVDEKRTAEEIAELAQGSLKKKKKEIAEAVRGQRLSETQKELIRSSMRHMTFLELEIEQLDGLVAGLIQQSGQHQQYELLQTIPGIKQEAAGNLLAETGSDMKQFPDAGHLSSWGGVCPGNNESAGRHKSRHTTHGNPWFRGTLTECAWSASRTKGSEFQRKYESLKPKVGHNRALVAVAHLLVHALYHVLSRREAYRANTPEELNEIQRRRLIRHHTRRLRRLGCWLEPDRMTPLKEWYVMHEIPNLNPPEPKRRGRRKKQTSENTTEAGDVKP

SEQ ID NO: 184345 - protein, 328 aa, unidentified
MGNRNMFVGLDVHKETIDVSIAEGQREGEVRHYGVIASDLEPLDKVVRALRAPDRQLHFVYEAGPCGFGIYRHLTKRGEACVVVSPSMIPKRSGDRVKTDPRDSQMLARLHRAGELRAIYVPDDTDAAMRDLVRAREDAVVVGTQAKYRLKAFLLRQGRRYPGREGWTRPYRRWLTDLSFPNAAQHIALQEYRDAIAETETRINRLTEQWRQLAPTWRWAPVVAALQALRGVSFVTAVALVAELGDLTRFGHPRALMAYLGLVPSEYSSGPNVRPAASRRRAIPMCDACSRKPRGRIKGFRGSDASMRTGKTGCRRSCVTSRGRPNSG

SEQ ID NO: 184346 - protein, 357 aa, unidentified
MKTQQVNQKLDFTGESIYVGLDVHKKQWSVCIMNAYKEHKTFVQPPEPAVLSRYLRENFPGGTYYSAYEAGFCGFWIDEALKKEGINNIVINPADVPTTDKEKKRKRDRVDSRKLCRELRDNSLKGIHVPDRSQLEDRDLVRLRKKLVKDTTRCKNRIKGLLNFYGIKIPEQYGGHWSKAFIQWLDQLELNYFSGTSTLRILTEELKNIQQLKERVSRKLVLLARQKYAQSMELLQSIPGIGLLGALTFITELGDIKRFRHLDTLCDYVGLVPNIYSTGDTVHVGQLTSRKNMYLQPILIQCTWKAVGRDPALLHAYTRWCKRMKGQKAIIRVARKLLSRIRYVLLKQRKYELKIVS

SEQ ID NO: 184347 - protein, 314 aa, unidentified
MSQPLFVGIDVAKDTVEVACSDASSHSFTNNEAGHAKLLRWLARKSITLIVLEATGGYEQACAVALAAAGLPVSVLNPRQARDFARAMGKLAKTDRIDAAVLAEFAAVLHARGHQPRPLPSMEQRELAALVARRRQLVVMLVAERQRLGVAHSRAKPSIQAVIELLLKQLADIDDDLQRTLRERHADLSDLLQSVKGVGPTTASTLIAELPELGLLTRKQITSLVGLAPLNRDSGTFRGQRHIFGGRASVRRVLYVAALVATRFNPAIKDCYTRLVAAGKPKKVALVACMRKLLITLNAIARTKTPWRNDFALA

SEQ ID NO: 184348 - protein, 450 aa, unidentified
MSRPQVIDDQEHERVHDRVAAVDVAKDSGMVCTRTPHPSRPGARRSTVQSVTARMKAIRGLGRQLKKDGIEIVTLESTSDYWRIWFFVLEACGLAVQLVNAAQAKNLPGRPKTDKLDAQWLARLTEMGLLRASFVPPKAIRDLRDYTRARTRLVHERTRCWQRLEKLLESALVKVSSVASKLTTLSAQDMIKAMIAGQRDPKVLAGLARGRMKARHDDLVEALDGMFDDHHGELARLLLDQIAFLDGPIAALTARAAGLTAAMPEAWGVDPDGTTGPGAGTTPGAPVLNAVARLAEIPGISEDLARTIIAETGLDMSRFPAAARLVSWAGLCPSARQSGPRTRAGKKGQGNGYLRGSLGQAAIGAARTDTFLSERYHRIARRRGKAKAQVAVARSILIIIWHLLADPAARFTDLGPGYYQARTDKDKKIKNHIRQIEALLGHPITITNAA

SEQ ID NO: 184349 - protein, 362 aa, unidentified
MGSCGEARPRISLRRKGNDMDLYIGLDVSLVSTAICVVSSHGKVIKETTSPSEPEELERALRGLSGPVTGVGLEAGPLSQWLYRHLIEAGFETVLMETRQVKGALKAMPIKTDRRDAEGIARLLQMGWFRPVHCKSMSAQEMRALLSSRKAIVQAITNLELSIRGVLRNFGLKMGRVAKGRLGARVRELADGNAMLEAAATPILTAREALRQELAGLEKLLRDHAKSDPVCRQFMTMPGVGPIVALTVKSAIDDPGRFRSSKDVGPWAGLTPRREQSDERDIIGAISRAGDAGLRTVLYQAAMVMLNKGRPSWLTAWAWNVAKRRGKRRATIALARRIGVILHRMWRDGTEFQFTRTEAVAA

SEQ ID NO: 184350 - protein, 358 aa, unidentified
MQKQITKLDFNGENIYVGIDTHKKNWKVALYSDDIALKSFTQDPDSGLLINHLRKNYPNANYYCVYEAGFCGFWIQKELADQGIDCVVVNPADVPTTNKEKEFKTDPRDCRKLAISLRSNLLTPIHIPSDYTLSCRSVLRLYNDVKKDQTRVKNKIKSMLNFYGIIYPSEFENENTHWTKSFCNWLTQVSLKYEENTWTFQHYVSEYLKVKDKVMQVKKKVKEISEKDPFSKYVNLLTTIPGIAVLTAMKILTELEDIQRFKSLDQLCGYIGLVPTTKSSGEKEKVGEMTHRGNKRLKTAIIESAWSSIHYDPYMSLKYSDLRKRMEKNKAIVRIAKKQLARILYVLTKEQEFKTINV

SEQ ID NO: 184351 - protein, 402 aa, unidentified
MNAVGIDVSKGKSMVAIMRPFGEIVSAPFEIKHTASDIHSLVELINSVEGESRIVMEHTGRYYEVLAHQLSKANLFVSAINPKLIKDFDNDSLRKVKSDKADSVKIARYALDKWQNLKQYNVMDELRNQLKTMNRQFGFYMKHKTAMKNNLIGILDQTYPGVNTYFDSPARSDGSQKWVDFASTYWHVDCVRKMSLNAFIDHYQNWCKRKKYNFSQSKAEEIYGKAKELVPVLPKDAITKLIIKQAVDQLNSASTTVESLRTLMNETASKLPEYPVVMAMKGVGTSLGPQLMAEIGDVSRFTHKSAITAFAGVDPGVNESGSYEQKSVPTSKRGSSDLRKTLFQVMDVLIKTHPQDDPVYQFLDKKRAQGKPYYVYMTAGANKFLRIYYGRVKEYLSSLPES

SEQ ID NO: 184352 - protein, 340 aa, unidentified
MEKVSTIGLDIAKNVFQVHGVDSAGVVVIRRTLRRSQVLAWFAKLPQCLVGIEACATAHYWGRELRRLGHEVRLIPPAYAKAYVRRNKSDPADAAAICEAVGRPAMRFVAIKTAPQQALAGIHRVRDLLIKQRTMLKNQLRGLMAEFGIVAAQGRRGLNELLAILSDIEDRRIPSPLREALIAVMETLRGIERKLEGIDRQIVAAGREDATCRHLVTAPGYGPILSSAMAALAIDPGAFKRGSDFAASLGLVPRQEGTGGKLRLGPISKRGNGYLRRLLVNGATSLIKAQHARQDPWVAKLLLATKPRKVVAVALANKLARIGWALMTRQEDFRGRPAAA

SEQ ID NO: 184353 - protein, 333 aa, unidentified
MPSAHAQARELKIMSVSSVVAGIDVAKAHVDVDVVGAEFMPRRFDNEADGHSAIASALKSLGVGLVVMEATGGYETSLACALQGAGLAVAVVNPKQPRKFAEAMGYLAKTDRIDARVLAEFGQTLARRPDLTRFLRPMDDVDQQWLAALVTRRRQLVAMMTSERQRLQITPKKLHPSIEAIIKAIKAQLDDVEGQMVGHVKAHFGQLDAILQSVTGIGPVASATLIAELPELGKLNRRQIASLVGVAPFAKDSGTTKGRRRVQGGRFDIRRVLYMATLTAAFRNPVFKAYYQRLVAAGKLPKVALVACMRKLLTTLNAMVKAGSKWDPEHRGA

SEQ ID NO: 184354 - protein, 450 aa, unidentified
MRSIALDAHRDFCEVAISERGRVRLAGRIATTPEALRFFGESLQSTDQVVLEATGNAVEIARILEPFVERVVLADAKAVRGAARGRAKTDKVDARLLARLLAAGFLAEVWTPDEQTRARRRLVSRRAQLVRQRTREKNQVHAVLMRRLVGKPPMSDVFGVRGRAWLARLELPADERLTVDGCLRHIDMLNEEVGMVEQAIALDALTSPEMRRLLTVPGINAVTACALIGAIGDIRRFPTPAHLVGYLGLDPRVIQSGSEPARHGRISKQGPGEARHVLVEAAWYLARTIGPMRAFHQRIRARRGANVATVAVARKLAVICWHMLTDEEDYAFARPSLTREKLRRLELLTGAERNRGRRHPERIFAPRRQHELERELAAQAETAYKRLTADWAARRPKASAGAATGRASSRQPEATSPRGRIEPQAPALRPAVTRAHTEASHPPEDASSGT

SEQ ID NO: 184355 - protein, 320 aa, unidentified
MRNTVGLDISKLTFDATAIVGNAEYSAKFDNDSKGLDQFSDRLKSLGCQNLHICMEATGNYYEEVADYFAQYYSVYVVNPLKISKYAESRFKRTKTGKQDAKLIAQYCRSAQESELVKRQKPTDEQYRLLRMTAAYAQIKSECAAMKNRHHAAKDEEAAKAYAQIIKAMNEQLEVLKEKIKEQTEKPNCKEGVKRLETIPAIGRMTAAVLFHHLTSSKFETSNKFAAFAGLSPQQKESGTSVRGKGKLTKFGNRKLRAVLFMPAMVAYRIRAFPDFIKRLEEKKKPKKVIIAALMRKLAVIAYHVHKKGGDYDPSRYKSA

SEQ ID NO: 184356 - protein, 354 aa, unidentified
MNYVGVDIHKRYSVLVAVDERGRELARGRISGNSVHAFAQFFEALQGPGKVVLEACWNWGRIYDVLSEIEQVEEVVLAHPLKTRLIAEAQIKTDSLDALALATLLRGNLIARAHVPSKATRARKELLRQRLDWARLRTRVRNRVHAVLDRQRELEMPQCSDLFGRKGLNALSKLRLAEPDATLLSEELDLLKLIDSQIKAQEGRIVAFNANEQATQYLQSLPGMGKILAAVAAAEIDAIERFDGAAKLCAYAGLVPTTYGSGGKVHQGHLLKSRNQWLQWAFIEAAWVAVGCSSYFGGIYRYQRGRGKKANIAITIVARRMCRIAFTLLKERRNFQEQHRTFPGRSAVRLTAAA

SEQ ID NO: 184357 - protein, 352 aa, unidentified
MTNTNISGVIIGVDTHKSIHVAVAIDNNGNRLTAFSAPATTKGYKLLEDWACALGTITAFGIEGTGSYGAGLSRHLLAQGHKVIEVTRPNRQLRYQHGKSDSLDAEGAARSVLAGQAIAQPKTQTGSVEMIRHLKIARDTAVKCRSQAMVTLKTLIINAPAALRDTLDQISGKIALIRYIAAFRPGAMTSTMASAKTALRALAQRWLTLHEEIQSHDKALEQLVIVRAPTLLASHGIATMTAAEMLILVGDDPTRIRCEAALAKLCGVCPIPASSGKTNRFRLNRGGNRQANAALYRVAIVRMRNHPPTLAYVSKRKMEGKSNREIIRCLKRYIVREIFTHLCRPKTSRTSA

SEQ ID NO: 184358 - protein, 381 aa, unidentified
MVNPTTLPDRTLEQACTMVLFMALELSDKKWKLALSDGTKRRIVTIAAGDLVALGEAVAKAKARFGMHGVVPIVSCDEAGRDGFWLHRYLLHCGVANVVVDASSIEVNRRARRAKTDRIDVEQLLRLLIRYHHREKRVWSVVHVPSVEEEDARRLHRDLERLKKERTGHHNRIQALLVSQGSRLQPRHDLLERLEAARLWDGSALPPDLQAEVRREEARLRLVDEPIRALEAEQARRLEAAATPCHQQIAHLMRLRALGLTSAWVFVMEYFGWRQFHNRKEVAALAGLTPMPYASGDSARDQGMSKAGNRRIRTLMIQIAWGWLRYQPHSALSIWFNTRFALGGKRMRRLGIVALARRLLIALWRYVQSGAIPEGASLKPL

SEQ ID NO: 184359 - protein, 387 aa, unidentified
MARKRTLSTLDTSIAYEAVGLDLAKTDVALAAFDSDHKEPYLIDRIPYDKLYELLADMAPTLVAMEPCSGAHQIAEQIQELGHEVMMISGRHVQAWVKDHCNGQKTDLNDAFAILNLAYDRWLTPIRGKTREECRLLALQASYRQLKGQRTKTMVHVKATLHAWGFPIRAGSFNQKALHELIDANREAFGDEVVETLHLMINRVHDLDHDIATVLKLLTEATQRDPRASLLRSIPGFGVLTTSRWCAVVGDIARFDSPKQTMAFIGLVPNNRITGHHTETSSGREARGQGKMSKRGDKMLRSLCILGAGALCLMVRNDRLPDCPFVASIKERLASPRPWFKVLVYVAAKLVRIATALLKYGETFSFEKAGISKAVLKQWELEQAKAA

SEQ ID NO: 184360 - protein, 356 aa, unidentified
MEKGKRLDFTGQTVFVGLDVHKRSWSVSVYTEHGEYKTFTQPPEPEKLVCFLRRHFPAASYRVVYEAGFFGFWIYEELAERGVECVVVNPADVPTKDKEQRVKRDGVDCRKLARCLRAGEIEGIYVPSRGRLEDRSLLRARLSMGCKLRRCKNQIKALLYFYGIGVPEELEGRCWSVRFIRWLEGVRMRSRAGQMALRVLIEEFRHLRSIIVSLDREIRQLARSEAYRESVRLLRTVPGIGTFFSMLLLTELCEIGRFPSIDELSSYVGLVPDVHASGEREYVVGVTKRRRAYLRWLLIEASWVAVRKDPVLMMAFKEYCRRMKKTRAIVKIARKLLNRIRYVLKNRSEYVAGVIE

SEQ ID NO: 184361 - protein, 377 aa, unidentified
MNRIIKIGMDVHTTNYTLCIFEPSFENKGTVHFVTQVKPNVKNIVRVIDTFKRKNENDELRITCGYEAGCLGYSLYRELKDKGIDCVILAPTTMKTEKGGRKIKNDYRDAKMIAECLAYGGYSAVHIPNELDNSVKEYIRMRDDIHENLKKIKQQIISLMTRNGKQFDGKSYWTKKHLDWIKATAFQEEFLNETLDEYMIEYHHLIDRVEALDKRIEEISTKEEYVEKVQQLQCLIGIKTHTALSLIVETSDFTRFTKGNVFAAYLGLIPGEDSSGEKENRLSITKAGNRHLRKLVVESAQGYTRGQIGFKSKDLKARQSKCSNEVIAYADRCNERLRRKYYRMIARGKSYNVAKVAVARELACFVWGIMTDHMELQ

SEQ ID NO: 184362 - protein, 369 aa, unidentified
MKKNNTSRQSSKRGQKTRARSITIGLDLGDKSSRYCVLDNDGAMVLERTVGSTKKALTQVFGRMRRCRIAMEVGTHSPWVSRLLGGFGHEVIVANPRQLKLISSSSRKSDRVDAQMLARLVRIDPELLRPIRHRSAEAQADLLVIRVREALVKTRTGLVNTARGLAKAAGERLPKCDADQLGVERMESLPAWLRERLRPLLEEIESLTKKIKESDVEIEQIGRTKYPETALLKQVWGVGTLIALTFVLTIEDKDRFEKSRDVGCYVGLRPKRSESGERQPQLGITKEGDVYLRKLLVQGAHGVLRRNGPDTDLKRWGLRLAGTSKNAKKRAIVAVARKLAVLLHRLWVTAEVYEPLRNSELRERQQAAA

SEQ ID NO: 184363 - protein, 356 aa, unidentified
MSSMTITVPVRQAVFAGVDTHKATHHVAVVDEAGSVLADRQFTATSAGYDAVASWLGQWQVARVGIEQTGTYGAGLARRLGAAGHEVIDVNAPDLVVRASQGKSDPIDAVMAAQAVRTARATTAAKDRTGIIEAIRMLHIARASAVKARSAALAQLGDLAVIAPQDVRERVQGTSRQIARRALRLRPDRSRMADPAQASKAALRSVAERVRDLDAEIRSVDTALTGLVARAAPRLLALPQVGTHAAAQLLITAGQNPDRIRTEAAFARLTGVAPIPASSGKTNRMRLHRGGDRQANKTIHMIAVGRLKHHQPAIDYLTRRTHEGLSKKDTIRAMKRLITRELFGALKTDLTTLDAL

SEQ ID NO: 184364 - protein, 322 aa, unidentified
MVKINEFIGIDVSKDTFDVWSSSYGHLCLDNTKKGFRELKKHLNENSWCVMESTGSYHQLLAHFLYDKKIIVSVVNPMVIKRFIQMKLQHNKTDKSDAKMIALYAEEQPLEPWEPDPKYIEDCKILNTNIALYFKQSTALKNKLHSLTSKGTKGFVLQSLKRQIKQLQKEITLLEGHLEALIKEHEPAMLTNISSISGIGKKTAMILISNTYAFKSFDNYKQVSVFFGLAPIERTSGSSIRGKSRISKKGNPLVRNHLFLCSFTACENNPQYRALYQRIVDKGKSKKLALIAVSNKLLKQAFAVAKSGIPYDKNYRSRLTIQ

SEQ ID NO: 184365 - protein, 462 aa, unidentified
MPGRDESASSGTNRGQLAGLPIIRHNVAGIDLGSERHWVCAATRDRSGREVASFGATTAELIRIAEWLKARQVESVAMESTGVYWIAPHEVLEAQGLQVLLVDTRQLAQVPGRDKKSDPTDCEWIQRLHSCGLLRGSFRPEEAVCMLRTLVRDKANLVAESGDWLRRMQKSLDQMNVRVHRAVSDIDGVTGMAILRAIAGGERNARKLANFRDARCSKTEQEIAEQLSGHWREDHVFSLQQALKMYDAVQERIAAYEQEILRQLDQMERAEPQEPTAAPLQNANKARMIKKRGQEPKRQALYRMSGVDMTQIDALGVETVEVVLSEYGSDLSRFPTEKEFVSHVTLAPRVPKSGGKPVKKRKRNSASTRVAAALRMAALSLRHSQTALGAYYRRMAQRRGGDIAVFATARKLATLIYRLLRWGQPYVDEGEAAYENRYRQHRIGRLAATAKELGYQLTPVPA

SEQ ID NO: 184366 - protein, 362 aa, unidentified
MRKKTLTQKIRKGNWLNVTSNDDLYVGLDVHKKNIHAALHLDGSIVETLVIPADPEKVIQLLQPLSCAIRCVVYEAGPTGYSLARALQRESIPVMIVAPSEIPRPSKRGSKSDRLDCCALAEYCSTGLLSPIPIPSEQEEADRQLARYRDSIVGKRRRVKQQIKSFLLQHGKPIPSSCWSGKGLFTLSEMELCEQLRFCLDELLSELDYHNNALRRINSSLRELMLSPHHRKSFALACSHPGVGRVVATSFITELFALDRIPDRCRLASILGLAPRVRQSGQSVKRGPIVKAGKGQLRAKLVESSWVWMRHSDYGRYLYQRYLRNTGSAQKAITALARRLAINLWAMLRNEQSYDPQHVRAA

SEQ ID NO: 184367 - protein, 421 aa, unidentified
MKNSAARKLKQVPAGYLIVGVDPHKKKHAAVAINEDLVVQTKFKFMNSRNGFDEALEKARIEMVKAGCRGVMFAIETGGHFWRNFAYFLEERGIPFRLISQFTLKRMRDGRDLNRRKNDFRDAEMAAGVLRTGDFTETKLPQGVYAELRSTHSAYYRLVKERTRIINLMKGLLDGLFPEFTQIFKNPCGHTALVVLSICPSPAAIASMNEDVFMDVIRSRRQGRLMRKKLRALHQTAQTSIGIKPGADAVAVEVTLLVSRYYLIEQQVDRLVKSLIRLVDKTEEGKYLLSIPGINYLSAAALLAELGSLRSYHNAKQLIKMAGTNPIELESGGKRRGQTPMSKKGRPRLRYSAWSAVIPLFRHNPDFRAWAKRLRERPAHANPLNGKEVVGAALNRLLRLVYTLVKKQEFYRSPQLALVAN

SEQ ID NO: 184368 - protein, 442 aa, unidentified
MGRRCIGIDVHREFAQVAVWEDGQVRHAGQVAITGEAIRVFADSLGPEDEVAIEATCNTHAIVRAIAPRVARVVVSNPMKTRAIAEARVKTDKVDAAILAQLLAADYLPAVWVADEATQALRRQVARRARIVRQRTRLKNQVQAILHRNLIARCPFSDLFGIKGRCWLSNQYLPADEELAVDALLRQLDFHAQELRIIDAALGRIALEREEVLRLMTIPGVDATVALSLVAAVGDFRRFRRPEQLVSYLGLNPRVKQSGGKVATHGKITKQGRANARGMLVEAAFTAAKIPGPLRAFFERIRARRGTQIAIVATARKLVCLCWTMIDRGEDYAFARQSLTDKKRRALELRAGMPSRRGRKGAAANYSLKEVRRRELELAEHAERAYRQQVSAWQAHRPAGKPGVAAANGTRLKRPSAGQAARQASVPEPALRSGVDHAQQPA

SEQ ID NO: 184369 - protein, 346 aa, unidentified
MEHYVGLDVSLKQTAICIVDRTGKIEREGVVPSDPEAIAVFIKTHAPHVARIGLETGATSTWLWTELKKKELPVICIDARHAKAALKMQINKNDRNDAVGIARIMQCGWYKEVRVKDLDSHAIKALLVSRALLVKMKRDLENQIRGLLKNLGLVIGRAKMTTFWARATELIADKPALAAAVEPLLKARDALERQIDDLDRKVLAMARNEPDVRRFMSVPGVGPITALCYFATIDDPTRFNKSRNVGAYVGLTTRRYASGEIDRTGRISKCGDAMLRSYLYEAANVLLTRVAKWSALKAWGMRVAKRSSLAKAKVAVARKLAVILHRMWIDGTEFNWSSKEATTQTA

SEQ ID NO: 184370 - protein, 402 aa, unidentified
MNPLYVGIDVGSRNNAVYLMKPDGEKHSSFSVENNLGGAKTLTERIISALASQGLTDVVIGMEATSIYGETLVYALREDGALGQFHKKIHVLNPKLVAQFKESYPELPKNDPVDAFVIADKLRFGRITKEVYMDDYRFQSLQMLTIARFFAVQNLTRNYLFLKCSGLAQDDNIPNTSATTIALMEHFETPDQLANTSLEELTSFIIKAGRGRFADPEATAKAVQSAAKASYRLPKTVNDSVNQVMAVSISAMRALETQIKDLDKAIERQVAVIPNTLTSVPGIGKVYSAGMLAEIGDINRFQSHASVAKYAGLVWKQHQSGQFEAQDTRLIKSGNRFLRYYLLEAANSVRRCDSEFKRFYNLKYREVHKFQHKRALALTARKLVRLVFRLLKDNRLYIPPGN

SEQ ID NO: 184371 - protein, 311 aa, unidentified
MNSPAWFVGIDVSKGTLDVFVRPTGEAKTFVHTEEGLAQMADWLQSFPQALIVLEATGGWEMGAVRILVARGVFPVVMNPRQIRDFAKATGILAKTDKIDPQVIARFAEAVRPEVRPLPTLEAQELEALNARRRQIVEMLTAEKNRLSLAPRWIRKEIQAHIRWLEKGLEKVNKELKDRIQKSPLWREKDEILRSARGVGPVTSTALLCDLPELGTLNRKQISALVGVAPLNRDSGLFRGRRMIWGGRATVRSALYMSTLVAIRFNPAIRAFYERLRAAGKPFKVAATACMRKHLTILNSMIKYRTRWQTA

SEQ ID NO: 184372 - protein, 386 aa, unidentified
MQTVAALIPAAVDYERTLVLAIEVSNESWVLAAQVPGLPHTKAKRTINPDPESLMTAIAGYRARAAATGHSVERVITVYEAGWSGFWLARWIIRQGMEAYVIQPSSVPVDRRMRRAKSDGIDAELLLRTLLAWLRGEPRVCSMVPIPDEADEDARRCVRERTELISERVGLTNRIGAVLATLGVSDYNPLLRNRHRRLTELRTGLGEPLPRNAQAKIERLLARLELVLAQIAELERERDAVVEAEASDKAGKMIQQLTKLRGIGVQSATVLVREAFVRRFANGKTLGSYAGLASSPYNSGGIDREQGIGKAGNRRVRTVMVELAWLWTRYQPGAAQVRWFRERVGSTGRRARKIMVVALARKLLIALWRFVIDGVVPEGAILKPAA

SEQ ID NO: 184373 - protein, 355 aa, unidentified
MLIIGCDYHPGFQQIACVDTDTGELSEHRLAHREQAERFYRELKQENLSARVGMESSGHSRWFERLLQELGFELWIGDPAEIRTKRVRKQKTDRQDAQLILQLMLENRFPRIWVPDAENRDLRQLLWHRHRLVQMRTRVMNQLHVVPLNEGLQRKKALWRPAGRKELESIALAPWASRRRQDLLDLLDQLTPKIQELTRALEEEVEKRPVTRLLMTHPGVGPLTALAYELVIGTPERFHCGKQLASYIGLVPTEESSGDRRRLGHISKQGNVLLRFLLVEAAQVTARSQQEWRSKFFHLAMRRGRKIAKVAMARKLAVHLYWMWRQGLDYGQTQKLGSQGRKLCSHTVVTKGSTR

SEQ ID NO: 184374 - protein, 380 aa, unidentified
MCILYENGSKIESVFGVLTPELDKLRDLLVSHHVCEVALESTSIYWIPIWNILSVDFSLKLVNPYFIKQLPGRKSDVKDAQWIAECLLKNLIKGSFVPEPIVQDMRKLNRRIFDLQEDVSYYSNKLDAALHRCGFRLSNYVAKITGKSYRKAVKTIATGMTDPNELLKCVHGRVLNKHGKDTILAALTGAFSQTDITVIRQYWELLEIYEKQTKECQSRLTELCEIHFPVEYKRLQTIPGVKERAATAIIAETGVDMKMFATAAALVGWCGLKPRNDVSNGRYKSRKITHGNKYLRHILIEISWTASRTRNCFFSNFSYIQVTQKHKSKMKIQVAIARKILVAVWHMLSKKEDFIDLYLKRLEEQRLMEEKIRQIESKMA

SEQ ID NO: 184375 - protein, 350 aa, unidentified
MIVIGSDPHKRSYTFSAVVAGTGELRSSETVSVSSAGHERMLAWARAIDPERVWAIEDCRHVSGKLERFLLARGERVVRVPPKLMAGRRRGSRQRGKSDPIDSLAVARAALEEGIQTLPVARLDGPEREIKLLLDHRDDIVGERTRIQNRLRWLLHDRWPELELPAGCLDRHLWLERLADRLRRSDQHADIRVMRAQVRRLRQLTREAAATERELLGLVRGLQPRLLALPGVGVLTAAKLIAEIAGIERFRSHAKLARLAGIAPIPAQSGQSTRVRLDRGGNRQLNAAVHRIAVTQMRCHQPAKDYINRRLAEGKTKREALRCLKRHLIRTIFNTMTPTTTPLDSALVLT

SEQ ID NO: 184376 - protein, 345 aa, unidentified
MDIAVLGIDLGKNVCSVVGLDEGGRVLVRRRLKRRAVVEFARQSSGCVVAMEACCGAHHLGRQLAAEGHEVRLMSPEYVRPYVKAQKNDDRDAEAIAEASLRPTMRFVPVKSEIQSDLQSLHRARERLIGERTALINHLRAVLLERGIIVAQGRRKLEKELPAILADATSGMSPRIRQLISDLREEWHTLDIRITNFDAELVSVARTDEAARRLASVPGIGTINATALVAAVGDGSAFARGRDMAAWLGLVPRQATTGGKPRLLGISKRGNRYLRKNLIHGARSVLPYLVQRDTPLGRWVTGLMTRAHKNTVVVALANKLARIAWAVLVHGRGFDASFDASHVAA

SEQ ID NO: 184377 - protein, 339 aa, unidentified
MYYSGIDQHKRDSFITTYDSNGTVVKQARVRNSPLLIQSYFAEFQGPHKAVVESTGSWYWLADLLQKHNVELTLAHATRLKAISAAKVKTDKVDSDILAQLLRANLIPEAHKISPDRRGPRDLMRTRLRLISKCASCKNSIGRMLEKFNLDDIAGLDRLYQLQARAFEEQIALLDQQVHIVECTLHPLLIPNEDIQRLLWIPGIGKVNAFTIYTEIDDIERFPTVKQFLSYCRLVPGADNSAGKSRHRSGSKAGNVYLKLAFSHAGTRAIQYYPEIKAFYKAKVRRKPVRIARTLVSLEIARIVYHVLKNRKDFNGLFKNQQLSRTKQLQWPRLASPAV

SEQ ID NO: 184378 - protein, 355 aa, unidentified
MKYYTTTTEYNCGIDLHARQMYVCLMDRQGKKLVHTNVKDNDFKFFLKLIQPYKHDLTVCCECMFGWYWLADACQAAGLTFVLAHALYVKAIHGGKNKNDRIDSEKLTHLLRSNLIPPAYVYPASMRPLRALLRQRIFYVWRRSELLARIYSHQLAHNRTLVRQTSRRNRDPWAEQLLKSENHPLRQLALKNDLAMISHFDEQIFALEEELQRQTKRTACREFTLLKTIPGIGETLSLTILYEIGQIERFPTVKDFLSYCRLVKGTVASAGKIKGLRGAKLGNPYLRWAFGEAAVIAKRDHCVIGPLAQRLEAHMNGNKFKANTVIAIKLARAAYFMLKNKTVFDQERLVAALTT

SEQ ID NO: 184379 - protein, 401 aa, unidentified
MFAGVDWASEEHAVCVNDADGRIVEGRRYRHDERGIKALCARLLELAVELVALERPDGLLVERLLDAGLRVIAVHPNQVAAMRPRFSAAGGKSDSFDAFVLAELARTDSHRYRVLVPDGDATKALRALSRAREDLVAHRVALGNELRAQLECFWPGAIEVFAEIDSPIALAFLKRYPGPLDAHGLGEQRMARFLARHHYSGRKPAGELLGRLRAAAWGRAETVEAEARRQVVLALVAALEPIVAHIRELTREIAAALADHTDADTFRSLFRDPKSVVTAACLLAEMGDCRERYPTKASLAADAGQAPVAVESGKRKHARFRWACDHRLRNSICTLADTSRHHNPWAADIYARARARGCTHQHAIRILGRSWCGVIWRMWQDRTTYDPTRHTGLQRLIAAGG

SEQ ID NO: 184380 - protein, 356 aa, unidentified
MSREIKYIGMDVHKEATVIAVLSGGGKLVMESIVETKASSILQFTQGLRGELHVTWEEGTWAAWLYDLLQPQVTRVLVCDPRRNALLKEGSKSDKVDARKLADLLRTGMLRPVYHGEHGLRTLRELGRSYQTISQDLNRVMNRIKALYRGWSIPCAGTQVYAPRYREEWLHKIEHAGVRRRAELLYQQLDGLQMLRRTLRPELLAESRKHKASKLLRQIPCIGPIRAARLLALMQTPHRFRSKRQLWTYSGLGIETRDSAQYRYVLGQLQRTKKPQQIRGLNQNHNHEMKEIFKGAATRASCGVGPLRDFYVALLAKGMRPEMARLTLARKIAAIALTLWKKEERFDAEQLKPQAA

SEQ ID NO: 184381 - protein, 350 aa, unidentified
MEILYTNCAGLDVHKQTVKVCLLTRTSDGQPHKEFRTYLTTTQELLQLGDWLKEQGCTHVAFEATGVYWKPVFNLLEGSFELLVVNAHHIKAVPGRKTDVKDAEWIADLLQHGLLKSSFIPSGPQRELRDLTRYRVRLTEEKAREPPPSPEEVTSSRKEEETMPEGSADSTSPQESASASQAALSWSEAVALLCSIPGIGERAAIGILAEIGIHMRQFPTAAHLASWAGVCPGNHESAGKRLSGKTRKGNPWLRCLLVQAAHSASHQKHCYLAEQYRRIAKRRGSKRAALAVAHSILVIIYHLLSHHTTYQERGETFFEERERQGAEKRLVRQLSRLGYHVELQPVALAG

SEQ ID NO: 184382 - protein, 389 aa, unidentified
MKIFVGIDIAKLNHFAAAISSDGEILIEPFKFTNDADGFQLLVSKLESFDKNSIIIGLESTAHYGDNLVRYLVAEFYQVCVLNPIKTCQMRKNNVRKTKTDKVDTFVIAKTLMMQDDLRFITFFDLDMMDLKALGRFRQKTIKQRTRLKIQLTTYVDQVFPEIQYFFKSGLHQNAVYALLKEAPSPKEIASMHMTHLANLLKVNSHGHFTKEQAKELRVLAQKSVGANDSAISIQITQTIQQIELLDSQLQKIEAEITDIMKFNDSVIMTIPGIGYINGGMILGEIGDIHRFSNPNKLLAFAGLDPSVYQSGNFQAKTTRMSKRGSRVLRYALVNAAWNVVRNNATFKAYYDAKRAEGRSHYNALGHCSGKLVRVIWKMLTDEVEFNLE

SEQ ID NO: 184383 - protein, 390 aa, unidentified
MIYVGIDVAKDKHDCCILGSDGEVLFSPFTIQNSFQGFDELYEKIWSLTSDLAEIKVGLEATGHYHLNLLRSLLDNGLPSFVINPLHTNLYRKGQSLRKTKTDKVDAASIAMMLLTDRTLKPYSNTSYHNEELKSLTRYRFDKVRERARLKVSVARLVSILFPELEKLVPSLHMTSVYTLLAEFPGASFIASAHLTRLKHLLYDASKGHYGRDMALTIRGAAASSIGSAIPAKSLELKHTIHLIQVLSAEIDEIEDAINAIMDMLNSPITTIPGIKSRMGAMILAEIGDFSRFDGPDQILAYAGLSPSTYQSGQLTSSYAHMEKRGSRYLRYALFNAAIYVCHWDPVFKAYLTKKRAEGKHYYVAISHACKKLVRVIYRMQLTGEPYRSA

SEQ ID NO: 184384 - protein, 352 aa, unidentified
MNTVTGLEIATAHWVGLDVSKQTFDAAVMGYGQRVGSTPMAALPARSFARSAEGVDAFVQWLEDVVDAGPQRPVRCVMEATGHYSTELAFWLVERKAALAPAIEPPHQTAAYMDSLGIRTRTDLVAARALAAYGMERQPHAYRAASSAELELREVCRYRHSLVQERTALGNQAAECARNRFTARNQAKRIALLDGDIRRAEAEMRRLVDASKDLCEDVALLDSIYGVGFVTAVTVRVELGDLRRFAKARQLSAFAGLNPSFHRSGTSVRGKARMCKRGNARVRHALYMSALTITQGDNDLQRAYVRLIQNGKTPMAALGALMRKILGVMRAILISGQPYDRQWKTRGQLTHA

SEQ ID NO: 184385 - protein, 351 aa, unidentified
MAAKKRPVTGGVDTHGRTHHAAAVDQTGRVLADQQFPATAAGYQALLAWLRSLGRVMKVGVEGTGTYGAGLARYLAAQDVELVEVDRPDRKTRRNKGKSDPIDAIAAARAALSGQAAGAPKTRTGPVEAIRTLRVARRGAVKARTAALNQLHGLITSAPEPLRAELVNRRGAALVAACAALTADEARLNYPLQATRAALRAVATRVQALNAEIAQADKQLRPIVAKTAPRLSSLYGVGPETAGQLLTTAGDNPNRLRSEAALAHLCGAAPLPASSGRTDRHRLNRGGDRAANTALHTIALCRMRYDPRTKAYVDRRTKQGLSTKEIMRCLKRYIVREIHTALLADFAALTP

SEQ ID NO: 184386 - protein, 349 aa, unidentified
MLHVGLDLSRRRLDVCVLSDDGELVEELAAPPDPEGLRYLVSRLARHRQPVRAVIESMTGARFIHDTLEQLGCDVLIADAQRVKGLAPLACKTDRVDARVLAVLSHRNLVPAIWLPDPRVRAEREQARFRLHLVKHKSMLKHRIHATLMTFGHPCPVTDLFGLEGRKLLERLELPQPWRETLDASLYLIDYLESEIDAIERDLRATGADHPYVPLLLTVPGIGWVLAFTVASEIGDVSRFPSAKKLVGYTGLCPRVRQSGDSDRRGPLSKQGPRYLRWAMLEATMHALRHPAYRDRYQRTKQRLGKQRGAKVAQVELARKLTEAIWHMLTTNQPFDPAAAGGATFRLAA

SEQ ID NO: 184387 - protein, 421 aa, unidentified
MNQLAEIPFTVYVGIDWADAKHDICVQEAGSEDREFDRIVHKSEEIEVWAQALYQRFGGPIAVALELTKGPIVSALLKYDFFVIVPIDPIRLASYRKSFTPSGAKDDPTDAEFALDYMMRHPEKLKVLKPQSVPMRKLTYLVEARDRLKGDQSRFVNRLIQALKQYYPQTLDWFSERNTVVFCDFLVQWPTLEKAKRARKKKLEAFFKNHNVRFAHVIDARIDAIKAATALTHDEAIISAHRIQVEALVQQLRLTIQAMKRFDKEIVATAEQLPDYELLFNPLPGAGKVLAPRLLAAFGEDRARYRCAEELQRRTGIAPVTKRSGQSQWVHWRWQCSKFLRQTFIDWSAQTINKSAWAGAYYRQQRAKGSSHQAAVRALAFKWIRILYRCWQDRSPYDESKYLEALRRSGSPLLKQLAEAA

SEQ ID NO: 184388 - protein, 449 aa, unidentified
MAKSKRSHPERDISPTHRDAAAIDIGAKMHVAAVPPDRDTESVRSFGTFTGDLQCLADWFERCGVRTVAMESTGVYWIPVYEILEQHGFEVVLVNARDAKHVPGRKTDVSDAQWLRRLHEYGLLRPSFRPKGELAALRAYLRHRERLLDYAASHIQHMQKSLMQMNVQLHHVVTDITGATGMRIIRAIVAGERDPAALAVHRDRRCHATVEVIGAALTGNWRDEHVFALGQALELYDAYQAKLTECDVQIEAVLRRLRNVAEPIGPLPAARHRDNTANAPAFDARKALHAVLGVDLTQIHGLGPSLALKLIGECGTDLTAWPDAKHFTSWLCLAPANKISGGKILSTRTRRSGSRAAALLRLAAVTVGRTQTALGAFYRRLSARVGKAKAVTATARKIAALFYNTLRHGMAYSDPGASYYDERYRARVLNNLRRRAKSFGYVLQEAPSA

SEQ ID NO: 184389 - protein, 366 aa, unidentified
MKKTSTVRVNGNMIFKGHKLTIGVDLGDHWSCYCVLDEAGKIILEQKVATTSEAMKQAFAKIPQSLIAMETGTHSPWVSRLLTELGHKVIVAHAQKVQLITKSNRKDDRHDARTLARLARIDAELLGPVRHRSAQAQIHLTVIRARAELVRARTALVNAARGLVKSYGQRLPKCGTRQVSRELGAGLPAELREVLEPLLKEIESLNERIQEYEVRVEKIAKESYPQVELLKQVKGVGTQIALTYVLTLDDPHRFPKSREVGGFLGLCPGRRDSGESQPQMRISKEGDRYLRTMLVQGAHYILGPFGADSDLRRCGLKLAARGGKNAKKRAVVAVARKLAVLLHRLWVSGEVYEPLRNSQKAMRVAA

SEQ ID NO: 184390 - protein, 315 aa, unidentified
MSLPSCYLGVDVSAQTLVVAGAGRRWQFANTPQGHRKFIVQIKKLSSPAHVVCESTGAYHLRLCLALQEAGLAVTIANAARIHYFGLSEGVIAKNDPIDAELIERFANVKRLPADPPLCREQLALSESVTHRQQLVEMIKVLRTYRQQVLAVALVTEVDRSIAVLEKRLEVLDRQLRAQIDAQPLWKAKFALLTSAKGVGFVTALSLLAKMPELGSLNRGQCAALGGLAPYDEDSGQHQGKRSIRGGRHEVRTALYMAALAAARSNPILKTFYQRLLAQKKPAKVALTAVMRKLLIHLNTLLKTITPPSPTTITS

SEQ ID NO: 184391 - protein, 321 aa, unidentified
MYKYNQIFGVDISKDVFDVMSSQGKHLQFENSSKGFNQLTKHLTKKDLIVMEATGYYHYCLAQYLYDLGYIVSVVNPLAVKRFVQMKLSKIKTDKSDALAICQYANSNEVPIFTSRDSNQAECLQLMSLIEIYLKQSTALKNKLHGEKTLGIPSKTVYHSLNRSLKLIQKEVQLLENKLLELVKEHQHKQLTLLKSIPGMGTKTSIILIVLTDGFTKFDNAKQLCSYAGTTPTIRLSGTSVRGKSRISKMGNQKLRNLLFLCAFSACKYNKACRELYERIVAKGKSKKLALIAVINKLLKQAFAVAKSGLPYDENYVSNLS

SEQ ID NO: 184392 - protein, 354 aa, unidentified
MKYVGVDLHKHLIVLCVVVPVAGRPKVVRRARFRCGEPEAIWAFFQELGPFQVVVEATAAYEWFFLLIEDLADRLVLAHPKKLRVIAESTRKSDKIDAEVLAVFLALDMIPQAYRPTPRIRQHRVLARHRCWLQRRITSLKCKVRNILGHYNADIAELFTRKGEQHLASVPLSPADRFVVQALQEQLELFQRQLREADRQLARFAESGPLVEREARALLATIPQVGPVTIDVVLSELGDWRRFRSQKAVTAFAGLEPGFRKSAEKCLELHISKEGSRLLRWAMIQAAWRLAVRSPRWRAMLGRLQINTGSKKKAIVGVSRHLLCMMFAMLQSSRPYELLGVPNGNIGRSRCAVG

SEQ ID NO: 184393 - protein, 391 aa, unidentified
MSLYFVGIDISKYKHDCCIISATDQKVISKFSIKNDKVGFEELITTFNSLSSPEDIRIGFESTAHYALNLELFLENAHHSFMEVNPVLIKEYKKSTTLRRTKTDSVDCESIARWLMTVEYKPHSKGFYHAYSLKSLTRLRDKLIRQRSFYLIKITNVLDHTFPEFKPFFNERLSKTALYLLENYGSAEKMARMNSASYEKLRSLSRGRFSPQQFLRLKELAANTVGVNNSIFDVELNSLLSLYKSLVKEINTIEKEINKLIEEVHPHYMSVPGIGPLSAAVIYSEYGDISNFTNPGQMLAFAGIEPGINESGTESHGGKMVKRGSSQLRYTLINCCLPLIRFDMTFATYYAKKRGEGKPHRVAITHVAKKLIRVIYALERQDIDFNAQKLR

SEQ ID NO: 184394 - protein, 358 aa, unidentified
MIHLAIDHGKKVSHAAALSDAGEVLFDQEILSTLGGFASIKEALPSNEPIQSIVEAGWNWGKVFDGLEDLGLNPKLSNPTKSRFIAESFTKTDPIDATTHAIMLKAGITPLVHVPGKLTRDHKNLLRHRFWLVRISVMIKNRVHSILDRNHLQPPARSDLFGTHGRAWMNALTLREPDNKLLKAHLELFDIIRDDTRETEKWLGTALKDNKMIPILESLPGVGKIFGALIALEIDTIHRFSSASKLATYSGLVPSTYSSSGKTFHGRMIAASNRHLRFAYIEAAWNASRVSPYFHAFYERLKERKGACKAIGAVGRRLCEISYFCLKANRVYEERPYRYKRSLEPAQEQFGRVALISE

SEQ ID NO: 184395 - protein, 352 aa, unidentified
MMLIGVDPHKSTSTATAVEPESNREVASIRIEATLREYRRLLTWAGRWPQRRWAIENAEGLGRHLASWLLARGEQVVDVPTTATARVRQLSRGGGRKNDRIDAAAAACVAALQGDARPLEAEGTTDVLGLLDERRANLSQARVRAVNQLHALLRALLAGGAPRGLSAAAAAALLRTVRPAGAAERVRKQIAGDLVVEIRSLDSRLKANEAAMAELVKSSGSTLTETVGIGPVTAARLIGRSGRPSRFPSSAAFAAYSGVAPVEVASAEHARHRLSRSGDRQLNSALHIVAVTQIRTAGSQGNIYYRTKIAEGKTEREARRCLKRRLADHVWRTMIADEKRQRAKPASASDAA

SEQ ID NO: 184396 - protein, 409 aa, unidentified
MERLVDRVCGLDVHKQTVAACVRVPGRQGTREQQVRTFGTTAAELLVLRDWLEAHGVTDVAMESTGVYWKPIYYVLEERFACLLVNAAHIKQVPGRKTDVKDCMWIAQCLEHGLLRGSFVPPVPIRELRDLTRHRKVLIQDRTREANRLHKFLEDAGIKLASVATDVLGVSGRAMLEALIHGTTDPEVLAELARGKLRAKLPALRQALAGRFRPHHAFLVTQLLAHVDYLDNTIAALSERVEAAIAPFAEEVARLDTIHGVARRTAEVLIAELGIDMTQFPSERHLASWAGLCPGNNESAGKHKSGQTRRGNRWLRAALVEAALAAIRKRDSAFAARYRRVMRHRGHKKAVIAVAHAMLVTAYHLLARRTTYHELGADYFDRRHAERVTRRAIHMLEGQGYRVTLEPAA

SEQ ID NO: 184397 - protein, 328 aa, unidentified
MDVHKDSVYATVMNYGGEIVDKRKLTNDEVVSYLGRYPIDKVAMESSTSIVPVYRALRGKGYEILVSHPKKTRLIAESRIKTDRVDSWALTELARLDALPLSYMPPDDIAALREKVRRRAFLVRMRSKLKVKIKAQLAMNGFTPPSEYGLFTSKGLEWLRSLQLDAVDCYLSVISTLDIQVGKLSRELRGLASGDEDVRLLMTIPGIGYYSALLVKSEIGTVDRFPDGEKVCSYAGLAPSVSISGRYRRYGSITKEGSRWLRWIMVECVHTHLKYDTSITRAYHAIAERKGAQIAKVAAARRLLMCCYSVLRNREPYHDPAGSYQASS

SEQ ID NO: 184398 - protein, 308 aa, unidentified
MRYVGIDVSSRWLDVAIHGDATVRFAYDQDGLQQLQRVLLAESQVVVVMEATGGLERTVSKVLADANLPVAIVNPRQIRAFARAMGRLAKTDSIDAQLIAGFGAAMKPPLRQLSDAKERDLKDVEARRRQLREMIIAEGNRLRTASPAVGKQIRRHLKWLEKEAKALDEALSATLAADPKLRGNARLLQTVPGVGPATSVSLLAGLPELGTLNRRRIASLVGVAPFNRDSGTRIGKRIVWGGRAHVRSALYMAALVATRYNPPMRAFYQRLLAAGKPKKVALVATMRKLLAVLNSMLRARTSWKAATS

SEQ ID NO: 184399 - protein, 325 aa, unidentified
MTYIGIDISKATFVAAFPHGKGYRTETFQNDVKGIRRFISKLAPDIHHCVMEATGNYCFLLLYLLDKAAIRASLINPKKIKNYARVMMSVTKTDSKDACLIADFGERFKPEPYKFPSEQIMILKQKKTVLRQLQKQLTATKNLLSSLEPLPVKDKKCVNSLKQTITFLEKQIKYMRQEMEAVVTEVFDKQLKLLTSIKGIGVTLATALIIATGGFTYFDNAKQLSRYIGICPTIEQSGTSVNIRGHINRNGDETLRSMLYVAAWSASQHNKACKECYQRLRGKGKSAKIAMIAVANKLVRQAFAVVSSNKSYSDGFVSTKPVTAS

SEQ ID NO: 184400 - protein, 322 aa, unidentified
MQHDTSTVLIAAGLDVSKLKLDSHVQPSGKKLSVSNDQQGIAALIAHFRSLGVVLVLMEATGRYHRRVAGDLIDAGFQVVIVNPQRAREFARAIGKLEKDDDIDAEVLALFAQAAKHRPMEKTPEKQVELDDLVCRRRGLVQIRIAEKNRLHEQMPKFAATQSQKLLRFVEQQIEDLDRVIAALIEDDDDWNQKSRLLTSIPGIGQTTAHQLIAELPELGKLNRQQIAKIAGVAPLNDISAQRDGRRHISGGRSSVRTTLYMAAFNAMQYCERLKQWTARLTAAGKPFKVVITACMRKLLITANQMIKMNSTFQASLNLSVP

SEQ ID NO: 184401 - protein, 367 aa, unidentified
MTSVAHRRFVHLGMDVSRDSISVAILPAERDSAEVEKISSDAESVRRLVKRLGRPAGLWACYEAGPTGYDLYRLLRDLGVRCDVVAPSLVPKGRGDRVKTDKRDARRLAGLHRAGELRAIGVPNPAQEAVRDLCRTRGDMVEDLTRARNRLGKFLLRHSLVYRGGSTWTMRHERWLRQIHFDDRALQLSFDHYLSTVELRDTALAAVEADLQTYFATAPFADAVLRLGAYRGVTHMGALCLAAEVFDWRRFPRARTFMSFTGLTASEHSSGLSQQRGWITRAGNSHIRGQLCEAAWSYNHQAHIGPVLATRHADVPPATIARSWKAQSRLCRRFRTLAARKNVKSVVATAVARELAGFLWAEMTVTD

SEQ ID NO: 184402 - protein, 392 aa, unidentified
MVISVGIDVSKDKHDCFIQSSEGEVLVDVFTIPNNMDGFNILLEKIQRCATSQDKIKVGLEATGHYSYNLLGFLLDNGLATYVLNPLHTNLYRKSLSLRKTKTDRVDARTIASMLLSDVGLKPYTDTAYHNEELKSLTRYRFDKVKERAKLKTSVSRLVCILFPELEKLVPSLHIASVYALLAEFPGAKQIAAAHLTRLKALLETASKGHYKRDMALEIRDVARNSIGSWMPAKSLELQHTIRLIRELDDEIVEIEEQIQAIMDELNSPITTIPGLGFRMAAMIFAEVGDFNRFDSPDKLLAYAGMSPSTYQSGQLKNCYPHMEKRGSRYLRYALYNATKYVCHWDPTFAAYLAKKRAEGKHYNVALSHAAKKLVRLIFAMEKSRRPYCLAA

SEQ ID NO: 184403 - protein, 331 aa, unidentified
MRFKETVGIDVGKSFLEVCIHSIEQSKEFRNTLNGRKSLIKWVINLSSYSKEQLLFAFEHTGLYSFPLSIELKTQGLFFVVIPGLQLKRSMGISRAKNDKVDAKKIALYAFRRKGEIKPHTMPSPVILSLKRLLSLREKLVKHRSGYKASLKEYGLFLEKKESKLIMATHKKMIAYLNKQIKAINKELMLLIESDKQINNYYELAISVRSVGPQTAMFIIAYTNGFTSFKKWRQFASYCGIAPFPNTSGTSLRGKTKVSNLANKKLKSLLDLCAKSAIQNNPEMKIYYRRRIDQGKPKMSTINIIRNKLLSRVFAAVNRNTPYVNTIAYAA

SEQ ID NO: 184404 - protein, 405 aa, unidentified
MQTVYERCCGIDVHKKLIVACFRNGKTAELRKFETLTCSIKELGNWLLENDCQKVAMESTGAYWKPIYNILEMLGLDVIVVNARHMKSLPGRKTDIKDAEWIAQLLQHGLLKASFIPNREQRELREIVRYRKSLVEERARELNRLEKTLEGANIKLSSFVSNLTGVSSRRLIEQALFGEINPDNIDDFIHHSMRSKKEQLLKAMDGVLSSIQKQLVRAILDHIDDMTKRIGDMDRIIDEHMKHYTKAIEEIDKIAGIGKRSAEVILSEIGVDMNRFPSAAHISSWAGLCPGNNESAGKRKSGRTNKGNKYLKSTLIQCAKSAQKNKNSFFYAQYQRLVVRRGKNRATVAVAHSMLIAIYHMLKDGVPFKDLGSDYYSKFNTEKKARYYLKKLTELGVPLPVSVAT

SEQ ID NO: 184405 - protein, 344 aa, unidentified
MLKSTIFGIDLAKNIIQVCEISKHGELISNKGVSRQKLKELLAKAKPAVVAIEGCGSSHYWGRYAQSFNHDVRIISPKKVKGFLQGHKTDANDALAIANASLQIGMKSSKPKNEEQQTIQTLETSRFHLSRSITSLSNHLRAMLYEYGIVSARGVKALTTVVQDTLNDADSIPECLRPTVNQLWLTYLHLRKELAQLIKTKNALIRQLQPCKKLMDLEGVAEVCAGLLYSSIGDGKQFKNGREASAFIGLTPKQHSSGGKVFMTGIDRAGGIKELRSALYQGALSYICRLPEEPKTAKQAWLIRLVQRAGIKRSCIALANKTVRTAWAMLRYENKYEQQPLLTI

SEQ ID NO: 184406 - protein, 390 aa, unidentified
MNRTEGKRIIGLDMHPDVFAAAALSADALRQHADWVHDRLPTGGLEAWAKKHLSKDDVVVLEASGNSFEVAARLHALGHTAVVLESAQAGKIRENFCNDDRHSALKLAKVYRSGLAKEVWQPDAKTREYREVFFAHRNAVKDATRCRNRIRSFLNEHCVRLKTGVRLTEASGEATAKAAKAWTPLQAELLSDAFAQLREVEVRRKKLERVMVRELIANVRWASLWRLMGIRHRVAFALMAMVGDVHRFPTAKKLVGYLGLAPRKDQSGNDKKGHDTGVGRFGRGDVRGLLIQSAHNALTQRQSPLHKWGWKLLVKKHRNQAAVAVARKITVSVWHLLMGHFTPLVDATEHLRMKLLKLATLIGRDVLNSLGFANREAFVNTQIKSIQLSP

SEQ ID NO: 184407 - protein, 363 aa, unidentified
MDAPRRHLRARVRCWLHSREASMGDVTTIGLDIGKTSFQAHGADASGAVVFRKKLSRGGLLTYLGAQAPCLVAMEACAGAHHWGRELMRRGHTVRLIPPAYVKPYVKRQKNDEADAEAICEAAQRPTMRFVPVKSAEQQAVGVVFRARDLLVRQRTQIINSIRGHLAEYGKVAPKGLCYVERLVREIEDPESALPLAARASLKILADVMARLDDEVARLDREIANRAKEDPIARRLMSIPGVGPITATALVALAPAPEAFRCGRDFSAWLGLTPVQKSTGGKQKLGQITKAGERTLRRLLVIGASAVIKQALLKGAPPGSWLAQMLARKPRMLVAVALANKTGRIVWALMARGGIYRAPAMAG

SEQ ID NO: 184408 - protein, 451 aa, unidentified
MSEAAFYVGLDWGTERHAICVTRANGSVVKERFVPNDATALLVIADLIEGAKPSAVFIGVETPRLPIIDALMAREYRVFSINPKQSDHFRQAESASGAADDRRDAKVIATSLRTHAHCFDAVEPEGSELRDLRAAMKANHVVDKMFRQVANRLSAVVLEAVPTIAPLCFGAQDPWYWDLVLKVLGSKRCDISDHVVAGILKKHRMRRAIEDVRRVLDVPRLHTADGVREGAYFRAQLLVEQLRLLRKEQKLIDARRDAALNALPKGDGGKSDAEIIMTMPGVGPFVASTLVVDAHHAIARRNLKQLRCLCGVAPVTRSTGKQEQRQEKRRARGKTNERKEKWWREQQEKPVHMRYAASLRLRNAMHYAAATAARHPDFAPYYVTQRERGRSHARAARAVGDRMLTRLVAMLRDRTAYRPRNPPIPSSSAVEPITSSDAGAQSASQAVDVTA

SEQ ID NO: 184409 - protein, 349 aa, unidentified
MKRTTIGLDIAKRVFQAHAVDPESGEVRRTKLQRSEVLRHFAQLRPSLVAVEACGSAQHWAREIRKLGHEVRLISPQFVRPFVKTNKTDAADAQAIWTAAQQPEMRSVAVKTEEQQAVLALHDIRTRLQKSRTAAINQLHGLMGEFGVELPRGWRTMLPQAAAALESANSPVPALLQPQLHFQLMEIRSLTARITEVEGHISAWMRRREDCERIAAIPGVGLLTATAAVATIGEARTFRSGREFAAFLGLVPRQSGTGGRVRLLGISKRGDRYLRTLLIHGARAVISVRKGKYATDPNTWLDRVLQRRPTNVAAVAQANKTARQIWALLAHGRIYEPKHGVLEAAAAPA

SEQ ID NO: 184410 - protein, 344 aa, unidentified
MYFIGVDHHKQVSVMTVLDEDGRELKNGRVANLRSHVDRFLEGCRPFTAVLEAGRASYVMADLLRELGGQVKMANPLQVKAIAHARIKTDKRDSRTLAQLLRADLIPEVYQRDEWNRRAQRVMRMRAYWVRKQTEIRNKIRVLLAQQREEIRLEVERREGKLFSLSGQEFLSRLALEGQDKLILDDLLQGHLEVQAHVQLSDGLVKALYGELEEAARIDTIPGFATTLSVLVAVEIADVRRFPRPADLHSYAGVIPSTYSSGDRTTHGHITKQGSVWLRWAVVEAVHPAVRKDLALGALYKRLARRKGPNVAKIAVARRLLTIIYRVLTERRDYIPGIMKTSAA

SEQ ID NO: 184411 - protein, 352 aa, unidentified
MSDPLAPSTRPALVVGIDIAAQSFVSVYRLPAQRPSRPASYAQTPLGFSALQERLAATGVPPAATLIVMEATSTYWIRLACTLHRAGYQIGIVNPKQAHDFAKAVGQPGKTDRLDAALLALLGEKLELPRWTPPPQVYHELRQRLEAREDLVTMRTQLRNQLHALRQEEVVIEAVVATKQALISQIEEHIAQLEAALAGALGAEPEWAASVARLESIKGIGRQTAVVIVVQTQNFRATPSAEAAVRYAGLAPLPYSSGTSVYGPARIGPRGAGRLRGALYMASLSAVRSNPVLAAYYTRLVGKGKAKKVALCAVARKLLHIAWAVVTKKQVWDPEYGQAPAAAAAKLVAVGA

SEQ ID NO: 184412 - protein, 355 aa, unidentified
MLTIGVDSHKHSLTAVAIDSAGREVGALQVPSTPRGRDDLLEWAQSLRAEARQWGVEGSGMYGRPLAQQLTRAGESVHEVSGLATSRERRGGVGVHRQKTDTSDALAVARITLREHTRLPQIFPAGVAHRCKLLTEHRDNLVLQRTRLMNQLHAHVSLLDPLQMPGIRCAQGRDILSAWAEGQVPSTDPLLRVQGQIVQQLARLILIYDEMIQQLGLELTDLAKAAVPSLLALRGLGALTAAKILGEVGDIRRFPSSSKFASYCGVAPLEASSGERIRHRLSRRGNRKLNSALHTIATTQRRWDPRARSYLERKISEGKTRKEALRCLKRHLANVIYNLLRNAAVSQSGDGAVAA

SEQ ID NO: 184413 - protein, 388 aa, unidentified
MSQSFDTSKSLTAFEQDSTLVAVIEMSQSKWLVAAMIPGVERRPLKKLDADAGALLKLLQRWRDEARKAGRTIRRIVCAYEAGRDGFWLARWLQAQGIETYVIHAASIAVSREHRRAKSDRIDTELLMRSFLGWLRGEKRHCSMVAIPTMAEEDARRSSRERESLVGEQTRTVNRIKAVLALFGIGSFNPKLRKAAQKLETLRTVEGTPLPENAHAELQRDLERLRLARDQIRAIESERSRRLAAAPAAGPHAMVRLIARVLGVGIETADMLVTEVLARKLRDRRAVARYAGLTGAPDESGKRRREQGLARAGNGRVRRGMIQLAWRFLIFQKDSRLVRWFRERTTDGRKTTRKTMIVALARKLLIALWRLVTIGEITEGLKLRPAGT

SEQ ID NO: 184414 - protein, 431 aa, unidentified
MNQNTTANPTAPAGPASAAPAPTPVAWIGLDWGHQTHAFVLQDGSGPPEEGTLPHSAEALHAWLRDLEKRFGGRPVALALEASRGAVIHALVQYPWLTIYPINPVTSARYRSAFTPSGASDDLPDARVLLELARDHAAKLRPLETQDPQTLKLAGLVEARRDTVDRRTQVLNQITSLLRAYYPQALELVGELDTELAVDFLSRWPELITLKAVKPGVIKRFYHAHHLRRPELLEARLQLIQKAVALTTEEARVSVAVLQLRCLLDQLRAFRKHVAILDTEIKTVFAAHPEAALFRDLPGAGPALAPRLCVAFGTIRPLYPEPASLQKHAGVAPVREKSGQSLWTHWRWLAPVFLRQTLVEWAGQTVCDSAWAKGYYQRMKAKGKGHHAILRALAFKWIRILWKCWQTRTPYDEVRYLKQLVHRKSPNALPA

SEQ ID NO: 184415 - protein, 407 aa, unidentified
MPLFVGIDVSSKNLEACLMDDAGETLATRTVTNNLPGATELKAVILQHVKKDDSIQIAMEATSVYSWHPAMFFHEDPELKQRQTKVFTLNPKLVKNFKRAYAEMDKTDPKDAWVIADRLRFGRLPKSVIQSEQYLALQRLTRMRYHLVHSLTREQQVFLNHLFFKFSAFNLEVDTSAFGHAITELLLEAYSLDEIAQMPLEDLAKYLQTKGRGRFSDPEDVASSIQKAARDSYRLSKCVEDSIDLILGSSIEIIRHLKRQIKDLDKAIARVLDGLPNTLETIPGLGPVSCAGILAEIGDIERFENQAAIAKFAGLFWPRHQSGDYEADDKMLARTGNRYLRYYLVEAANLVRRHEPEYRAFYQKKYREVPKHSHKRALVLTARKLVRLIDALLRNDQIYAPKKKVTR

SEQ ID NO: 184416 - protein, 331 aa, unidentified
MADAKRFVGIDVAKAQLDVALGPKGERFAVANDERGISALLKRLEPADLVIIEATGGLEVPVASALATAGIGVAVVNPRQVRDFARATGQLAKTDALDAQVLVRVGEAVKPQVRALPDAQAQALEALVNRRRQLVEMLTAEKNRRANSPKVIHKSIDEHIRWLEKRLAGFDDELAGLVRETPIWRERDELLRSVPGVGKVLATTLLAHLPELGALNRKQIAALAGLAPFNRDSGSLRGSRCIWGGRAQVRRVLYMAVVAAVRSNPVIKNFYAQLRARGKYPKSALTACMRKLLVILNAMLHDKTHWQPPALTSPTSPLSPLLGAVPEHGCC

SEQ ID NO: 184417 - protein, 335 aa, unidentified
MAADWKGEPMKEQQFVGIDIGLRDLAMSSWPSQQRLQVANDDCGRARMSEWLTAMSPQFVVLEASGGLEATLAAEIHAAGLRVAVVNPRQAREFARSLGRLAKTDRVDAQVLAQFGQSAAQSVRLRETRVADAAETELKELLARRRQLIAELVAETNRKPRAGKLVRKSIVQNIKWLKRLVEQVNNQLQDAVKASSLWQTRVNLLMTVPGVGPQVAMVLTAELPELGQLNRRQIAALAGVAPHAHDSGQFRGQRRIWGGRASVRCALYMAALVGSRRNQILRACYQRLLSKGKARKQALVACMRKLLVILNAMVKHDRAWQLPQQQFSPCPPNHA

SEQ ID NO: 184418 - protein, 317 aa, unidentified
MEAQELFVGIDVSKSSLDVAVHPTGEAWRVANDPDGVQRLAERLASLGPQRIVLEATGGYERLAVGALRAAGLPAVLVNPGRVRYHARAMGQLAKTDRIDASVIAHFAAAVRPEVRPLPDEAQQRLAGALTRRQQLVQMLTAEKNHKGTAHSRMLPGIQAHIASLQEQIAAVEQDIDQQIQDHTLWREKREILESFPGIGRVSAVALVSDVPELGQLNRKQISALIGLAPLNNDSGRRRGQRSVWGGRARVRSILYMAAMCAIRHNPVIKAFYERLLRAGKKHIVALVACMHKMLIILNAMVRTRTPWCPDAGPASP

SEQ ID NO: 184419 - protein, 366 aa, unidentified
MTASTDDHTDAADVEAREEIVLGVDTHADMHVAAVITVMGVLMGTQAFPATADGYAALLSWASGHGRLRRAGVEGTSSHGTALNRYLRRHDLRVLEVNRPDRARRRRRGKTDAIDAENAARAVLSQEAAAIAKTGDGPVEMIRMLKVARDSAVKARTQAINQLRAVLMRADSALRDALAGLGSVTLIRTCADLPAAEHRTIDDAARGVLRMLARRILALTEEARAHERTLVAIITECAPKLLQQYGIGPDTAAALLITAGDNPDRLGSEAAFAALCGVNPIEASSGKTVRHRLNRGGDRRSNSALYTIVVTRLGRDARTRAYAERRTTEGKSKKEIIRCLKRYVAREVFPIITAALSPARTPPAAA

SEQ ID NO: 184420 - protein, 384 aa, unidentified
MTKHNILFIGLDTHKTFTEVAYIEDQRGVKAIHLGKILSNKAAFKKLARQLQSKYPHATLHFVYEAGPCGYWIYRLLTSLNHCCYVIAPSLIPKKPGERIKTDKRDALKLAKLLKSEDLTPIYVPEPEDEAVRDLSRARETAMKDLKDAKYQLKAMFLRNNITSKVNDNWSLQHLRWLAELILPHPCQQIVLQEAVSTITERLKRLKRLDNELAHQVKKWRYYPVVKAVQAMRGVRLLVATGVIAELGDLTRFDHPRKLMSYLGLVPSEHSSGGKRHLGAITKCGNSRARRLLVEGAHAYKHNAKISKEMQLRQEGLPKEIVDMAWQAQLRLCRRYNRLMQKGKHRNVVVTAIAREMIAYIWAISREVVLPVVDVKLRLARMPA

SEQ ID NO: 184421 - protein, 456 aa, unidentified
MQQYYLGVDVSKGYADFVILDDKKQPVEKNFQLDDTFDGHSHLYERICKFSQEHPESIINASVESTGGYENNWFNSLIKFQGSLKLRTARLNPLGVNANSKADLKRNITDKISAQNVAEYMIAHPEKVSYQEEDPLSGLRKQWGFIQMLTKQKTQLLNQLESLLYTTNPDLLTYCKSGVPEWVLKLLVQYPTAYKLSKAKISSVAKIPYISSKKAQELVAYAKKSIASANDKITAQLIIATVKQILHLSEVIKSQTKVMAEECTLPGIALLKTFVGIGDFSAIGLLIQIQTSERFSSTKKLASFFGLHPVFKTSGDGSSGFRMSKKGRKEPRHILYMVALCAIQNNPLIHDIYLEHIKKGMNKMAAIGACMHKILRIIYGMLKHNKAFDPEIDRRNRDKKSQKKKSSSVDKNRRYQHFDFKAPISRRQKRKRKELEQSHNDNNTKNGIITPVPIQL

SEQ ID NO: 184422 - protein, 475 aa, unidentified
MSRKHTKRSSSTVPVRRGGLPVSQAGKTPSLTELNPHAAGIDVGATVHFVAVPEGADEVCVRSFGSFTADLEGIADWLTQCGVTTVAMESTGVYWIALYEVLERRGFHVVLAEASQIKKVPGRKSDVLDCQWIQRLHSFGLLRASFRPADAIVVLRAYLRQRELLTQGAAQHTQHMQKALEQMNVKLTEVLSDVTGQTGQRIIDAILAGERNPAVLARLRDSKCKHDAATIALALQGNWRDEHLFSLRQAVELYRIYQHKIADVDQQIETYLATLTGHSDGTALPALPRRKRQKGRQEPAFDVRASLYRVTGVDLTSIDGIGPYAALQIVSEIGTDMTRWETDKHFCSWLAVCPGVNKTGGRVKSKSGKTRPSANRVARVLRLCGQSLLRADCALGAFARRMRAKLGAPQAITAVAHKLAKIVYGMLKYGKAYVDRGAEYYDQQYRQRLVEQVRRRAEQLGLRVSQPEPSATTPT

SEQ ID NO: 184423 - protein, 416 aa, unidentified
MEVIVSRCAGLDVHKNTVMACVRVPGPNGGRTSTVRQFRTFTAGLRQLRDWLVAEQVSQVVMEATGVYWKPVWHVLDATPGLALMLVNAHAVKNMPGRKTDVADAVWLAELGECGLLRPSFVPPPVIAQLRDLTRYRKKLIEERARETQRIQKLLEDAGIKLDSVVSDILGVSARQMLEALIAGVRDVAALAELARTRMRPKIPQLRQALEGRFGAHHALMLRMHLEHVDQLSVSIDRLDSEVDRVIRPFSSALQRLITIPGVGRRTAEVIIAETGADMRRFRTAGHLASWAGMCPGNHESGGKRRSGRARKGNAALRAALCEAAWAASHARSGYLPAQYRHLLRTFGKKGQTRAVFAVGHSILVIAWHLMAHDRDYADLGGDHFTRATDAEARERYLVRQLEALGHKVTLEPAAA

SEQ ID NO: 184424 - protein, 377 aa, unidentified
MKKNSTVQQSSKQRAKGTKSCKGSITIGMDLGDKTSRYCVIDQEGEVLFEGAVATTKKGLAQTFGVLARCRIALEVGAHSPWISRLLKSFGHEVIVANARQVKLISESSRKNDRLDAQTLARLARMDPKLLRPIQHRSEEAQQDLMLIRVRAGLVEARTALVNSARGLAKAIGERLPKCDADNLDVKRLEGLPAGLEIVLKPLLEEVKSLTEKIHACDEQIEQIARTKYPEIARLKQVSGVGTLIALTFVLTLEDPARFRKSRDVGCYVGMKPKSHDSGDRQSQLGISKEGDVYLRKLLVQGAHCILGRRGPDTDLKRWGEKLCARGGKNARKRALVAVARKLGILLHRLWVTGEVYQPLRNSQARQVAAQAKQQAA

SEQ ID NO: 184425 - protein, 376 aa, unidentified
MRNVIFVGLDVHAETIAVAVAEADGSVRSLGIIPNRAESVGRLIRKLGKPEQLRVCYEAGPTGYVLYWQLSELGVKCEVVAPTLIPVKAGDRVKTDRRDAEKLARCYRAGDLTAVWVPDAAHEALRDLVRARLAAKRDQLRARHRLGKFLLRHGRRAPEGTSAWTDRYLAWVQSVHFEHSAQETTLLDYRHEVEHVAERIGRLERSIDAAIATLPVKLRAVIEALQSLRGIAQISAVSIMAEVGELSRFEHPRQLMGYSGAVSREHSSGPRVCRGAISKAGNAHLRRIVIEAAWAYRHRPAVGKTLAARQRRTTAPVTALAWKAQLRLHQRYARLIGRGKCKQQTVTAVGRELLGFIWAIGVHVEREMTVPLAQAA

SEQ ID NO: 184426 - protein, 415 aa, unidentified
MEPMHQRVAGIDVHRMKHVVTILIGQEDGAVSSETREFGGFKRDMRALVAWLQTHRIQQVVMESTGIYWKSVFAHLEAAGIAALVVNAFHVKNVPGRKTDVGDSEWLAQLARFGLLRGSFIPPKDLRELRIVSRYRRKLTGMLAGEKNRLHKLLDDAGIKLGGVVADIDGVCASKMVEGLIAGGKPDELAALGRGKVRATTDILEAAMDGELSARHRLVLDMASDHLRYLEGKLAALDRYLLAAMQPYAWAWRLLQTIPGIDAISAAMILIEIGDDPHRFGSPARLASWSALCPGNNESAGKRKSGKTRHGNPIVRYLLCEAANAARRTKTVFRAKYESLVIRRGHKKTIIALAHKLVRTIFCVLVRRKPYRDSTVDYEAASVAKNAPRWIRALKKYGYWPQVAAPSAPIVATAS

SEQ ID NO: 184427 - protein, 309 aa, unidentified
MKQEVVYCGIDVAKEQLDVALGPKRWQVPNTKQGVGQLVKQLKAERSKVHAICEASGGYEKAIVIALQKSALAVSLVQANRVRQFARAAGVLAKTDQIDAAVLVHFGRAMHPPPSAAQSEQIARLRELDAQRRHLSRLLSAEQNRLAQLSCAELRSLSRSLISKVKKQIATIDARIAILIAQDQNLCVKAQKLTSIAGVGPRTAALLLAQMPELGSLNRAQAAALAGLAPFNRDSGSMRGKRTIFGGRRTVRTGLYMAAVTAARCNHILAPFYQRLCAAGKPPKVALTAVMRKLLLALNSALAPALNPA

SEQ ID NO: 184428 - protein, 316 aa, unidentified
MLYVGIDIAKNKHDVTALNVQGKTVLKPLTFSNNKAGFELLDLSLRQLNQDCLIALEDTGHYAFNLLNFLHEQGYKVYTYNPLLIKEFAKSLSLRKTKTDKKDAHGIALKLLSDPNREQFQHNNRQVELKILTRHIHRLKKKQSDWKVQYTRCLDIIFPELDKIVGKHSEYTYQLLTRYPNPQKRIEAGFDKLIEIKRLTASKIQDILSVAPRSIGTTSPAREFEIIENIKHYKRLIDKAEKCVNDLMAELNSVITTVTGIGNRLGAVILAEIQNIHAFDNPAQLQAFAGLDSSIYQSGQIDLAGRMIKRGSPHLR

SEQ ID NO: 184429 - protein, 435 aa, unidentified
MEQPTRFIGMDVHKETIVVAVTATGDVGKAAPYGTFPNTAVALEKLVKRLRQAGNGPLKFCYEAGPCGYSIHRTLTRLGEECMVVAPSLIPRKSGERQKNDKRDADGLAVLHRGGLLTAVWVPDAAHEAMRDLIRTRLAAVRSVRTARQQLSAFLLRHERIYPNGGKAWTKAHRGWLADLSFAQPAQQIVLEECIEAVRLGEQRRDRVDGYLRAQIPTWSLFPMVQNLGALRGLDTIASAGLAAAIGDPSRFASAPDFMAYLGLVPSEHSSGPKRRTGGITKSGDIHARTLLIEAAHSYRFPARITRHKLTVVDAVPEAVRAIAWKAQTRLCQRYRQMVAKGKPKPVVVTAIARELAGFVWSIACITSDPPAKSSAATTTSNEVYAPTSAAPTELRYVTGVKPAAQSPTTRNPKSTTPKSRARQSAAASAGESTG

SEQ ID NO: 184430 - protein, 382 aa, unidentified
MQASTESTPTVGHIGTIYVAIELSQKTWLVTLHSPDRDRISRHKLEGGDHAGLLALIEKVRARAAEKLGSAPQVVSCYEAGYDGFWLHRLLQAAGITNFVFDAASIAVEQRSRRAKTDRIDGELMLRTLMAYLRGEPRVVRIVRVPSVAEEDVRRASRERDRLVKEQTAHSNRIKALLRLLGVDVGAPRRQNWLAWLEQQRDWQGQPLPPHLLAEVKREHARLMLVREQIAALEQAQGAEDSAAPAAMSERRQLLQRLKALGPAFSATLVNELFYKDFRNRREVAAYCGLAPSPWKSGGIDREQGISKAGNHRARLTAIELAWLWLRHQPDSALSLWFRNRTANAGKRAKRIAIVALARKLIVALWRYLSTGLVPDQATMKA

SEQ ID NO: 184431 - protein, 356 aa, unidentified
MGTLYLGVDLHVRTQMVCWMNTGDGELHQRELDHQHDDVRGFYTQLPRPAIVGVESCGYAVWFHRLVEETGHELRVGDARQIRQFAKRRQKNDRRDAALLLELLVKGDFPAVHRPSGKSREVLLLLRGRQRLVRMRTTLKNGLQAIALAHQLRLGFRLWTQKGQRQFAALALPEADGLQRLQMQSVLRTVEEQLAAAEQELERRAAGDARVERLRTHPGVGLLTALAVVHTLEPVERFQRAKEIAAYCGLDPMEHSSGETVRYGHISKQGNRLLRHTLVEAAMSAARCEEELGRFYRKLRGKRKAHGVAIVAVARKLVLRLYRMLRERKDYEEFRRQGRDADVLGLPGVRRGEQPH

SEQ ID NO: 184432 - protein, 405 aa, unidentified
MDIQPIFRCAVGIDIHLALICVCIIVAEPGLEPVVHRREFGGFQRDRRAMADWIASFTPDMVVMESTGIYWKSPYAALEHVGIHAQVVNARQVKKVPGRKTDTSDAEWLAMLARAGLLRGSFIPPERLRTLRQVSRHHQKITAMRAMEKNRLVKVLSDAGIRISAVVSDPHGVAASAIIDCLLEGGTPEQALTLAGRLQAPREVLLAALQGELSADHRFVAQTIRHHLRALEAQLADLEHYLVDALQPHEAALQLLMTIPGIDQLAAAKLLVEIGADMAAFGNAGRLCKWAGVCPGNDESAGKRRRGDTAPGNRYVRALLCQIAWAAVRTTSQFKSRFQNWVSRRGTKRAIVAIGHKVLKTVFVLLSRQVPYHDSTVDYEALVVKRNAPRWIKQLRKFGYLPKMA

SEQ ID NO: 184433 - protein, 456 aa, unidentified
MTKHKRQKSPAEQQLPAQLHAVNLHAAGIDVGAEAHWVAVPVEADPQPVRAFPAHTASLHALAAWLTLCGITTVALESTGVYWIPLFELLETQGFEVILVDPGTMPKNGRPKTDVHDCQWLQRLHTLGLLSAAFRPDDPVVVLRSSLRLRLTLLAAAARHIQHMQKALTQMHITLQHVVSDITGVTGLRIIKAMLNGERDPRRLATLRDQRGKENEATIAQALHGTWREEHLFALHQAVAASEFCHQHIQECDAKIAAQLQTFEDRSKGEILPPKARKRHRNRFSFETRPLLHRMTGVDLTKIEGIDETTALIVLGEIGLDMSRWPSEKQFTSWLGLCPRVRVSGGRVLSSRTRPTANRAAAALRLAAASLHHAKSALGAFFRRMKARLGTPKAITATAHKLARLIYAMLKHGTAYVAGSMAEYEQKYRQRMMHTLSRKARELGYELHPVLGGPPA

SEQ ID NO: 184434 - protein, 342 aa, unidentified
MDHYAGIDVSLECSSVCVVDASGKIVREGKVASEPAALIAWFGSLGWSIERIGLEAGPLSQWLHAAMREAGLAVELLETRHVRDAFKAMPVKSDRNDARGIAQLMRLGWFRPVHCKSIGAQETRAVLTARKLVQSKLFDVENSLRGILRGFGLKVGETTAQRFAGRIRQLVAGYPSLAMIAEALLSIHAALLREFKAFEKQVRSMARADAKAKLLMSAPAVGPIVALTYASAIDDPRRFKSSKRVGAHFGLTPKKYQSGETDYTGRISKIGDAAVRTALFEAAHIMLVKPIKGCSQLKSWAMRIARRSGMKKAKVALARKLAVILHRMLANGTPFNAAAAAA

SEQ ID NO: 184435 - protein, 383 aa, unidentified
MAKGNTKVVRFVGLDVHAASIAVAVAEKDGEVRSLGVIPNRAESVKRLVKKLGPAGTWRACYEAGPTGYVLYWQLTGLGIDCEVVAPTLVPVKAGDRVKTDRRDAQRLAQSFRAGDLTAVWVPDAAHEALRDLVRAREAAKKDQLRARHRLGKFLLRQGRRAPEGLKAWTVGYVDWIRRQVRFEQLAQQVTLEDYLEEVDHAGQRIARLEKAIDEAIELAPQSMRAVVEALQALRGVGKMTAVTIVSEVGQLSRFAKARQLMGYSGAVASEHSSGQRIYRGGITKTGNAHLRRVLVEAAWSQRYTPVLSKELRRRQEGLSGEVQEIAAKARHRLHARYRRLLARGKTKQQVVTAVARELLGFVWAIGVEVERKAADVATIKVA

SEQ ID NO: 184436 - protein, 422 aa, unidentified
MLEETQDSDQIIQRVAALDIGKAELTCCVRVPGARGSGRRLQEVTTYQTMTRWLLVMADRLGELGVTRVVMEATSDYWKGVFYLLEAHGFEVWLVNARDVKHLPGRPKTDTLDAVWLCKLAERQMLRPSFVPPRPIRQLRDLTRYRADLVAARTAEKQRVEKLLEDAQIKLSVVASDIFGVSGRAMLAALLAGERDPKRLAQLARARLRAKLGPLAEAFTGFFTDQHAFLLAKMLARVDALDADLADLDAKLAELIGPLAGAVDRLDEIPGVGQLAARLLLAEIGTDMTRFPTAGQLVSWAKFAPGVKESAGKRKGRGSTGRGNPYLARVLGEAAVAASKTDTFLGERYRRIARRRGKKRAIVAVGRSILVIAWHLLSDPEAHFHDLGAGFYDTRIGPERAKRNHVRQLEALGYKVTLDPAA

SEQ ID NO: 184437 - protein, 409 aa, unidentified
MVVGIDIGNTKQYARAFDWRGIELGKVFTFSNSREGFEAFKAWMQYLQDKYRKSDVIVGIEPTGHYWFDLGAYLEDEGILLVMVNPYAVKQTKELDDNSQSKNDRKDPKVIAKLVTEGRYSAPYTPDGVYADLRIMVTNRKRLIREMTQIKNRFARWFAIYFPEYTDVFGDYEAQSSMLLLKKVCTPEAIVELGAEKINQIWRDAKLRAVGMKRATTLCETAKRSIGLKKGSSAARYEMKLLLEDYEYKKAQLDAVMEEIEKLCRKIPESEQMLAIKGIGVITVAGFLAEVGDVRRFESPRQIQKLAGLSLRESSSGKHKGQTTISKRGRSKLRAVLFNAAIPLIAKNPEFKSLHEYYTTRANNPLKKKQSVIAISCKLIRVFYAILANGVTYDPQKMLSDIHRQPQAA

SEQ ID NO: 184438 - protein, 356 aa, unidentified
MSRDLKYIGMDVHKEAVVIAVRNSNGQLVMESIVETKTSSLLQFIHGLQGELQVTWEEGTWAAWLYDLLKPHVHEVLVCNPRRNALLKEGSKNDKVDARKLSDWLRTGMLRPVYHGEHGLRTLRELARSYQTISQDLNRVMNRVKALYRGWGIACAGTQVYAARYRQEWLEKIEHAGVRRRAELLYQQLDGLQGLRRNLRPEFLAESRKHKAVKLLRQIPCIGPIRAARLLALMQTPHRFRSKRQLWTYSGLGIETHDSAQYRFVRGQLQRAKKPQQIRGLNQNHNHAMKEIFKGAATRASCGVGPLRDFYVALLDKGMKPEMARLTLARKIAAIALILWKKEERFDAEQLKTQAA

SEQ ID NO: 184439 - protein, 395 aa, unidentified
MYTYFVGIDIAKYKHQAAFIGAAGDKAGPEISFDNTKDGFALFSIALNRFDKEQTVIGLESTGHYWLALYSFLLDDGWTVKVINPIQTDAFRKMNIRKTKTDRIDAVVIAELLRFGQYSETTLASEELIQLKMLSRLRTSLTETVGDFKRQIITILDHFFPEFSSCFSHVFGKTPTALLAEYPSPEELASCDLEKLIELLEKNSRGRHSLNKAVELKEKAANSIGVKRGADASRFALKSLLALIECVNEQIAAYDGRISEIMENYRIILSIPGVGPVTGGAIVGEIGDISRFKSPRQLVAYAGLDPKVTQSGQFTGTRNNISKRGSPHLRRALYIAANSARLFDPVFKAFYEQMVTRNKHHNQALNAVASKLARVIHAVLITQKPYSGEILGNTV

SEQ ID NO: 184440 - protein, 375 aa, unidentified
MKEKVRFLGLDVHAETIAVAVAEQDGEVRSLGTIANREESIRKLVKKLGPVEQLRACYEAGPTGYVLYWQLTQLGVECAVVAPTLVPVKVGDRVKTDRRDAAKLARSHRSDDLTAVWVPDEGSEALRDLVRAREAAKQDQLRARHRLSKFLLRTGRRPAMGLKAWTERYLAWVQQIQFSQPAQEFTLLDYLHEVQHMDERVQRLEQAITEAVKLASSQVQEVIRGLQALRGVAHLSAVTIAAELGNISRFESARKLMGYSGAVPSEDSSGKRQRRGNITKTGNAHLRRIAVESAWSYRFRPAIGPRLRQRQEGVPEEIKEIAWKAQIRLHKRYLKLMAAGKDKQKIITAVGRELLGFVWAIGIKAETAGKLQMAA

SEQ ID NO: 184441 - protein, 366 aa, unidentified
MTSVPSAAELIHLGMDTSMNEIVVAVLRPGEEVPVVHRIPSDEESVRRLIGRFPDRRLLSACYEAGPGGYELHRLLTSMGVACDVVAPSLIPKGSSDRVKTDKRDSVRLVLTHRAGLLTPVRVPSPAEEAVRDLVRARGDLLDDRKRMQQRLNAMLLRHGRIWRGGAKWSYAHRAWVDRQVFDEPALAEALALYRGGLEAREAELAAAGARLAAWAGREPLAGPVARLGGYRGIAQLTGLTLAAEVVDWRRFACARAFMGFAGLIPTEYSSGSRSRRGHITKAGPEGVRTALVEAAWAYRYRPAIGATLRRRQAGLPPETLARSWKAQQRLHAKYKKMIARGKPPGVAVVAVARELAGFVWAEMIT

SEQ ID NO: 184442 - protein, 383 aa, unidentified
MRIVCGLDVHKDSIYLCILSSTGEIIEKVFGVLTCQLQEMRDLMLTHHVEEAGMESTSVYWIPVWRVLEPHFKLKLINPYFIRQLPGHKSDVKDARWIAECMMKELVRGSFVPPERIQQLRQYDRRIYDLDDEIVRKLAKLDAVVQRCNIRLGNYVSNTDSKSYKSVIDRICEGVTDPKVLVEEIHGRIINRHGKDTIISSLTGCVTECDMDILRQLKAEIDMAGQHKQECMDKMQAVCEREYSAALQNLQTIPGIKMRAATSLIAEIGTDMGHFQTANHLTSWSGLRPRNDQSNKTIKSRCITHGNRYLRRTLIQCAWGASRTQGCFFNRFSYHQTQVRRKNRMKVQVAIARKMLVCAWHILSRNVQYKDFDNRIGTSDENR

SEQ ID NO: 184443 - protein, 406 aa, unidentified
MGGDAMSGLKVSFDCFVGIDVSKDKFDACGITGSEAKLFQFSTTMDRKGFEKLKGYLVAFSISSVLIGMESTASYHVNLFSYLVSEGYKVLLINPLLISNYVKMQLRKTKTDKKDAVVIAQFLLTNGDTLLQRASPSLISDLRDLSRQRESLVDEMTSRKIEIKQLLNITFPELEHMTGIFTKAILKLLQQYPSAFALRDVDLGQLSQMLIADSYGHKREAFAAELIKTAHSSIGSKSTAKEMILKQKIALLLHIEDALQEITVMLIEMSRKLMEEEINIMTSIKGIGDKSAANFLIEMGGDINQYERSGKIIAMAGLDPAVYQSGKHDGKGRITKRGNRHLRRIIWLMTTSVIQYSDVFKVYYLKRRKEGLPYKMAVLATAHKLVRVIYAMLTHRTTFCSQVENS

SEQ ID NO: 184444 - protein, 401 aa, unidentified
MVSDFMKGRYNLMKIFVGIDIAKLNHFAAAISSDGEILIEPFKFTNDADGFQLLVSKLESFDKNSIIIGLESTAHYGDNLVRYLVAEFYQVCVLNPIKTCQMRKNNVRKTKTDKVDTFVIVKTLMMQDDLRFITFFDLDMMDLKALGRFRQKTIKQRTRLKIQLTTYVDQVFPEIQYFFKSGLHQHAVYALLKEAPSPKEIASMHMTHLANLLKVNSHGHFTKELAKELRVLAQKSVGANDSAISIQITQTIQQIELLDSQLEKIEAEMTDIMKFNDSVIMTIPGIGYINGGMILGEIGDIHRFSNPNKLLAFAGLDPSVYQSGNFQAKTTRMSKRGSRVLRYALVNAAWNVVRNNATFKAYYDAKRAEGRSHYNALGHCSGKLVRVIWKMLTDEVEFNLE

SEQ ID NO: 184445 - protein, 430 aa, unidentified
MGLIVSAPMSPKQDEQAMSYEWFVGIDWGSQQHQVCVIDLNRRVVGERVVDHDGSSLAQLATWLLALSQGQPHRVSVAIEVPRGAIVEGLIERGFHVFAINPKQLDRFRDRHSVAGAKDDRRDAFVLADSLRTDQPSFRRLRLDEPRLLMLRELSRAEEMLLEEFRRTANRLREQLHRFYPQMLHLSSAADEAWLWDLIELAPTPSHAALVTDEQVRHVLTSHRIRRVTAQEVMVCLQAPALPAAPGVLEAAQAHCAFLLPCLRVLAEQLRSCAQQVEAVLTALAEEPDEAGGPSDMAIVQSLPGVGRKITAWLFAEAAQALGERNYQVLRTQGGVAPVTKQSGKRRQVVMRRGCNPRLRHALYHMARVAAQRDGHFGVVYEALRAKGQRHGQALRNIGDRLLRLLIAMLRDRTCYDATRNRREPVVLTG

SEQ ID NO: 184446 - protein, 349 aa, unidentified
MRESLEQGEIAMPTDQTVWTYALFVGADIAAKTATVATQRPGAKASRSFTIEQTPEGYTSLLHQLQATGYVPGEILVVMEATGSYWISLATRLVHEGFAVSVINPAQAHHFAKALLKRAKTDVIDAQTLAQLAMVLQPAPWTPPPQIYYALQQRLAQRDDLLNLRQQVRNQLHALVQHPTVILEVRARMEHLLTTFEAQLVEVEAEITTALCQESAWSAAAQRLQSIKGVGWVTAAWVLVTTLNLTSCDTVDALTAYAGLAPMPRQSGASVWHRPAIGHTGNGRLRTAFYMATLSAARHNPVIKAFYTRLRAVGKPEKVARCAAARKLLHIAWAVVKKDQPFDPYYAQG

SEQ ID NO: 184447 - protein, 322 aa, unidentified
MSAPIKYTMIGVDVAKLTLDIAIDDNKVLTIDNNEESFKKLLKIIPDIDQACFVMEATGGYERKLTSFLQSKNIAVAVINAKRVRDYANAMGAYAKNDRIDAQMICHYAQVAFAKGRLKLRESRTEIAQQREDLLRRRHQLVGQRTMEKQHLEATINKESVRSITRMIKQFDKEIERIEDRIKAYIEDDDNLGKSKEQLMQVQGVGEVTALTLLTQLPELGKLSNKEIVALVGLAPYCQDSGKKTGRRVIFGGRELIRSTLYMATMSAIRFNKPIREFYQRLLGNGKLKKVALIACMRKLLTILNSMAKTGSEWNPDFAKTV

SEQ ID NO: 184448 - protein, 411 aa, unidentified
MKRVYDNCCGIDVHKKLIVACFKQGSEQEVREFGATTRELLELCRWLKDGDCEMVAMESTASFWKPLYNILEASELDAIIVNARHMKNVPGRKTDVNDAEWIADLLQHGLLQASYIPDKDQRELRELVRYRKSLVGERTRELNRLQKMLEGANIKLSGTVSNINGKSARAILEHVLTGESFDDAKYDEMYENNVISHRLKASKEEIIDDLNGVMSALQRRMMKELLIHLDELNIHIRNLDDEINNFMKPEAKTASVALQEMPGIGETSAQAILAVIGTDMSRFPTAGHLASWAGLCPGNNESAGKRKTGRTTKGNCLLRETLIACAHAAILKKDTYFYAQFQRISAHRGKKRAYVAVAHSMLTAIYHMLKDGVVFKDLGADYYNQFNRERKINACLRKLERLGYRAEIAAT

SEQ ID NO: 184449 - protein, 412 aa, unidentified
MEVLHPCCCGLDVHKQSIAACVLWAERAGKKRREKRSFGTFTEDLLALADWLQMCGVTHVAMESTGVYWKPVWNILEGRFTVLLVNAPHIKAVPGRKSDQQDCEWIADLLQHGLLHGSFVPPRPIRELRDLTRHRTSLAQEYNRIANRIQKLLEDANIKLACVATDVLGTSGRAMLEAIAAGQNDALQLAEMSRGKLRKKLPAMQRALEGHITAHHRFLLGELLEHLRFVESKMIRVEQEIEQRLKPWQAAVDRLRSIPGVERLTASTLLAEIGVDMRQFPTAQHLASWAGLCPGSHESAGKRKTGRTRKGSVWLRRCLCQSAWAASSQRNTYLSARFHRLAARRGGKRAILAVAHSILVIAFHLLDRGLEYRELGGDFFDRLHPDTLRRRLVRRLETLGHKVTLEPLAHSA

SEQ ID NO: 184450 - protein, 318 aa, unidentified
MMDLERFIGIDVSKELLEIAILPEKETWSSRNDEAGVEALVKRLKGLSPSLIVLEATGGLETLVLASLAAAGLSVCVINPRQVRSFAKATGTLAKTDRIDANILAQFGQKLRPEPRALKDHELQQLGALTVRRHQLVTMLTAEKNRLGAAPKSVRRNIQAHITWLEQCLKEINKDLEQSIKATPLWCEKDALLRSVPGVGPVLSATLLTGLPELGTLNRKQIAALVGVAPLNRDSGQLRGKRGIWGGRALIRTTLYMATVVAVRCNPVIKVFYTRLIAAGKGVKVALTACMRKLLTILNAIIKNHKPWQQSFAATVDN

SEQ ID NO: 184451 - protein, 392 aa, unidentified
MYIVGIDIGKNHHEASIVSPEGKQIGRSLRFATTHKGADSLMRFIFKNIGNSPCVFGMEATGHYWYPIYSFLKAKGYTIYVINPIQSDSLRKMYIRQTKNDSIDSFLIAEVIRFGQFGTTSMADENILAMRQLCRYRDSVISSRTEIKLRIGTIMEQIFPEYEKQFSSLWVSTSMGILEKYLTPENIENTPIDELFEIIKDKSHNRLTKAKAISIKEAAADTFGIKIAQDAFSFQLKQLIDRMNFLDKQIEALDCQILEYYEKFDCYLHTIPGIGMIAAATILAEIGDINRFKSSSALVAFAGIDPTVRQSGEFSSTHNHMSKRGSPYLRHAIFLAATTCSFHNSPLNAYYKKKRDQGKHHLTATGAVARKLTTVIYAVLRDSKPYEPKKFC

SEQ ID NO: 184452 - protein, 428 aa, unidentified
MDLLYSRCAGLDVHPRSVSACLRVVVDGRVSQEVRTFGTSTRELTEMAEWLASAGCTQVAMESTGVYWKPVWHVLEGRFELVLANAMYVKNIPGRKSDVKDAVWISDLLAHGLLRGSFVPPERIQELRDLTRTRKQLVREIARHTQRIQKTLEDANVKLTEVITNVIGTSGRAILRALIAGETDLDRLVDLTSGRLKASRAALKDALQGRVTEHHRFMLKMHLDQLEHLEATVRDVEARADQQPFRAATELLKTIPGVSGVTARVIVAEIGDDMSRFPTAGNLVSWAGLCPRLDESAGKRRSNRTRHGAPWLKPVLVQAARSAANKRDSYPRAQYMRLKARRGPNKAVLAVAASLLTAAYHMLKHGVEYRDLGPNHFERDKQVQAHRLLRRLKALGLEVTIKPASEAGSFCLADPQCSADPTRRSGAE

SEQ ID NO: 184453 - protein, 350 aa, unidentified
MITFGVDAHKATHTIVAVTSTGCQVGVVTVPATAAGLLRLMRWASQFGERRWAIEDCRPVTRRLERDLLAAGERAVRVPPMLMAQTRRSVRTPGKSDAIDGLAIARACLENSDLPQVWLDGPERIIRLLSDRREGLVAEKTRLVNRIRWRLHELDPQDLPPRGALNRRNVLGELTKRFTLWASSINPVIACLGMLGLNELDRVGQLLDEIKHLDGLLTQTVSDTYGDLMNIVGVGITNAAAIIGHVANIDRFATGDKFAAFVGTAPIPASSGNNQRFRLNRGGDRQLNSVIHRIAITQLAHHQPAKNLVAAAISRGKTKREAIRILKRHITRAIYNSLKQDQQLNIRTAA

SEQ ID NO: 184454 - protein, 330 aa, unidentified
MGFRYFLGVDVAKAKLDCLLLDSVEQRHRSKVVANTPEGFEQLVKWLTKQGVGCEQVHAVLEPTGVYHERALFALSQAGIAVSLVNPAQLRRFAQGLGIHTKTDACDSAVLARFGEMIKPAHWQPAPSKARALRALLARRDVVAQDLQRERNRCEALVIEDTPERVRQSLTDTITFLEQELQALQKSIDEHIDDDPDLKRIWDLLQSIPGVGQRVADHFTALLAGRDFRSAEQLAAYLGLVPTEWQSGTSIKGRPRMSKAGPASLRQLLYMPAVVATRHNPHVKALYQRLLAKGKAKMSALGAAMHKLAQLCFGVVHTGQPYRADWPGRA

SEQ ID NO: 184455 - protein, 347 aa, unidentified
MSITMIGLDTAKSVFQIHALNESGKAELKRKLQRSELLPFFEKQAPCTVILEACGAAHHWARMLSALGHNPKLIAPEAVKPFVKKGRKNDAVDAAALCTARTRPDVEFVPVKSGEQHGILALHSAPTLLVKQRTMLGNAMRGLASEFGLTVPKSIDKLGELMALVDGDESFPATARQAIRGLFDHCGWLVESIATFEAEIVAHVRRDETARRLATIPGVGPITASLIVATVADIGMFKSARHFAAWLGLVPRQHSTGGKSRLGRITKTGNREIRRMLVLGATSMVYRAQQWNSAVGAWLREVLERRPVRLATVALANKMARIAWALMTRNEVYRPKGTSSTAAAAAG

SEQ ID NO: 184456 - protein, 370 aa, unidentified
MHDDTTAFVGLDVHKEAIAIAVADPGRAAVRYLGAVRPALTPLTKALAHLGPPQSLALVYEAGPCGYGLARRLLKLGYRCEVVAPGKIPHRPGERIKTDRRDALTLASFARSAELTPVLIPDERDEAMRDLARAREDAVRARLKARQQLKAMLLRHGHHYSGRIFWSAAHQRDLAKVSFPHPAQQIAFTEYRLAVTEADERVARLSAALREQAETWRLQPLLNALMTLRGLQFLTAAIVLAELGDLRRFPHPKQLMSFLGLVPSEYSSGLSRRLGPITKCGNAHIRRVLIEAAWSYRYPARLSRELQLRQQGQPKAVRDIAWKAQLRLCARYRRMQARGLHQNKTCIAIAREMAAFIWDIARHVPIAPAP

SEQ ID NO: 184457 - protein, 469 aa, unidentified
MKRKSRRAKGQKVFPLSGDLKLIEPDAAAVDVGSRSHWVAVNPERDPNPVREFGTFTADLMSLADWFAQCEVKSVVMEATGVYWVNLYDLLEERGFKVYVVDAHTVRHLPGRSKSDVKDCQWLRRLHSYGLLRSSFRPPAQIRQLRNYHRSRSNIVDAAAQQQLRMQKALTLMNIHLHHVNSDISGLTGLSIVRAIVGGERDPKQLARLRDPRIRASKETIQKSLEGNWQEELLFDLKIALESYDHFQGQISAYDEQIRQALKEVPSKVDLLQEALPPGRLRVCRKRPGMSHQDQINLREELYRISGVDLTRIDGISLQTAQKVFFEIGTDVGAWDEEKRFTSWLGLSPNHCISGGKVLKRSSRKVVNPLSVALRLAARTLNNSHSALGANFRRLTAKIGMPKAITAMARKLAVLVYRMLKYGTQYVDKGMQHYESKYQATKVHYLRAQAAKLGMILLPKQPAGAGAAA

SEQ ID NO: 184458 - protein, 346 aa, unidentified
MLHAGLDLSRKRLDFHLLDEEGESVEVGAAAPDADGLRSLAARLGRHGQPLRAAIESMTGARFVHDQLELHGWEVEIADAVKVKGLAPLACKTDRIDAWVLAELSRRELVPAIWLPDPGVRAERERARFRLHLVRHRSSLKQRVHATLLTHGTPCPVSDLFGVRGRALLERLCLPEPWMGTIEASLRLIDELEREIDACEAELRTLGAEHRYVPLLITIPGIAWVLAYTIAAEIGDIARFPSPAKLAGYTGLCPRVYQSGESDRRGPLSKMGPRYLRWALIEATTHASHHPAYRERYERTKARLGKQRGPRVAQVDLARKLAEAIWHMLTHNRPFAPAGAPAPMTA

SEQ ID NO: 184459 - protein, 342 aa, unidentified
MPQVAIIGVDLAKRLFQLHGAAADGSVVFRKKLTRERFLPFLASQPPCVVAMEACATAHGWGREIERVGHTVRLIPPIYVKPFVKRHKNDAADAEAIVEAASRPTMRFVAVKSEAQQARAMLFRTRDLLVRQRTQLINALRGHLAEHGVVAPRGPAHVKRLADAIANDEAGLPIAVRELGQLLLEQIAALDGKTGDLDKRLHEAAKREGTTKRLQTMPGVGPVTAIAVETFAPPMEVFRRGRDFAAWLGLVPIQRSTGGKPRLGKTSKMGQRDIRRLLITGAMSVVQAAGRSAPPENSWLARMLGRKPRMLVALALANKMARGIWAMLTKVENYRDPVATGA

SEQ ID NO: 184460 - protein, 338 aa, unidentified
MENIGLDVHKRETQICRLTATGVVERRIPTSRERLSAEFGARARSRIVLEASTESYWVAGLLEQLGHEVIVADPGFAPMYGAARRVLKTDRRDARALAEAARTGVYRPVYRITPARQAQRALLTVRETLVRTRTRASNVVRALLRQQGLRLPVGTPGRLAARVATLALDPPLAAQVAPLLRTWPQLSAELAALEEAVAAEVTADPVLPRLQSVPGIGPVTALAFVATLADPARFRTAAQVQAYLGLVPREHSSGDAQHRGRITKAGPTRLRWLLVEAAWRLRRSRRPEAARLQAWLQRIEHRRGRHVAVVALARKLAGILFALWRDGTTYQGTPPASA

SEQ ID NO: 184461 - protein, 421 aa, unidentified
MRGFGLDVHRDFCEVAIAADGVVRSAARVATRVEAIEVFAQSLGPDDVVALEATTGSDKIVSILQRHGVRVVVANTRKLKSITEAKAKTDRLDARALARLLVAGLLEEVWTPDERSRTLRRLTSRRERVVRARTRAKNEVHGVLGRNLCERPPVVHLFSKSGRRWLAALELPIDERLTVDGCLRQIDFLDAEIGALNAEIARQALAWPEVLRLMTVPGVNVQTAATFMASVGDIGRFSSPRRLVSYLGLDPRVRQSGSTAARHGRISKAGASEARHMLGEVAWKVMQTPGPLRAFFERVRARRGPQIAATATARKLVVLFWHLLSRDEDYAFARPAMTRNKIRKLELLAGAPPQKGRSGVAGNKSRAVFDAERELSRQAEASYRRLVNDWKAAGPPKVGAGATPGRASQRPSKGKAARQAV

SEQ ID NO: 184462 - protein, 380 aa, unidentified
MRQVCGLDVHKDSVFVCIINENGVVFQEKYGVLTPELEQMLAKMMEYHVEEVCMESTSIYWMPVWRVLENYVNLKLVNPYFIKQLPGKKSDVKDAEWIATCLLKDLIKGSYVPDDLIQQLRQYDRRISDLNSEIVRKLGKLDAALQRCNIRISNYVATTDGKSYKEVVRLISEGTRDPAELAKVIHGRTINRVGKDVILASLTGVISNTDIDVIRQLREEVALAERHKDECQSKMDAICQQYFPQQLKNLQTIPGIKGRSATAIIAEVGTDMSSFEDAAHLVSWCGLKPRNEESAGKIKARSTTHGNRYLRKTLIECAWAASKTQGCYFNKFSYHQVVVRRKNKMKVQVAIARKVLTAVWYVMHDNVAYRDFTPDIAPAE

SEQ ID NO: 184463 - protein, 470 aa, unidentified
MSKEYFLGIDVSKGYADFILVDDNQETVEDFIQLDDTTKGRDILEKLVAKYFKLIPGLTIYCGLESTGGYERNWHVHLLSLATRYNLKVARVNPVSIKGISKASLNRSTTDETSAVNIATYLASYKSKIDFSNKSLDLTFQAERSVYTFYKMLVKQDTQLKNQLEKLIYQSTSELLFYCKRGIPLWLLRVLEKYPTAESINKAGASKLVKIKGMSAARASALLKRVEDNKSKLSPEVSFVIKNTVGEILHKKDKIEELEEHMVETYGNHEYVQLLTSIKGIGIPTAILALFEIENINRFRTVKQLVAYFGVNPEFRQSGDGTSGNHMSKKGRKTLRATLYMSSLTGLRWDPVMSQLYKRFRGMGKNHYFAMGVLMHRLLRVIYGVLKSGKRYDVAIDQGNRDRAMEKQKSINEMKKIQIKNNRLKRRRYLEDDNEAAPISGRKDRKLKELETSPSTKSAVVRDHLQPMQK

SEQ ID NO: 184464 - protein, 400 aa, unidentified
MISVGIDVSKGKSTVCLLKPYGEIVCKPFEVQHTEKDLEELANLLQKLDGEIKIVMEATGIYHLPILTFLLEKGFFVSVINPLMMKRFSKDNSLRGAKNDRLDSVMIASYGIEKWYKLKKYEVNDRIYAELRLLGRQYYRFMQTHVKHVQELTHLLDYTAPGLKAMFNSWNEHSNRDKLSDFVERFWHFDLITSLSREEFVEQYLLWAKEKKYHQSRSKAEKVYDLASNGIPTLSSHTPSTQLMIQGAINVLRIVNNSLYHILSRMKELAKSLPEYATVRSMGGVGDSLAPRLIAEIGNVKRLRNGHALVALAGIDPPPYESGQFVGTHRRISKRGSPILRKIGFEVMRVLKSHKEPEDNAVYNYILKKEAEGKNKKLSKIAGLNKFLRIYYVRVMEVYQ

SEQ ID NO: 184465 - protein, 477 aa, unidentified
MAIKHNAATEAKLNRKQRREQQRKIWTDNPGLDVVHPNAAGIDVGNSEHYVAIAPDKSAEPVRRFGCFTADLRELAGFLKEHGVVTVAMQSTGVYWIPLYDVLEEAGLEVYLVNARDTKNLPGRKSDVQESQWLLKLHTYGLLRNSFHPTSEIRVLRAYWRQRAEHIHTATECVQRMQKALTQMNLQLANVISDIMGVTGQAIVRAIVAGERDAEKLAKLRNWRIQASHEEIVASLMGNWREELVFALGQEVARYDFCQKQILECDREIERHLGSLPARPQEVSQPGEAALPPQKRKKATGNEPTFDLAGALVRIAGVDFTRIDGISVLTTQTVISEVGLDMEKFETEGHFASFLGLCPFNAVSGGKVLRRGTRKVVNRAATAFRIAAFTLKNSDSYLGAQYRRLRSKLGAPKAITAMAHKLAVLFYRMLRYGQEYVDRGQQFYEEKYRQQQISLLNRKAAQLGFSIVPAANAQATA

SEQ ID NO: 184466 - protein, 347 aa, unidentified
MRFYTKQHKFYCGIDLHAKKMYVCVLDSAGEIVLHRNINTEREIFLAVIEPFRENVVVAVECMFTWYWIADLCAKEAIPFVLGHALYMKAIHGGKAKNDKIDSHKIAVLLKGGMIPMAYTYPAKMRATRDLLRRRNHLMRKRAELYAHIQNTRSQYNLADSFGRIAKPQNREGVAERFEDPAVQNMIATDFAVITAYDPIIAKMERDIISMANHHDPVAYALLKSIPSIGRILGLVILYEIETIKRFPSVQDFVSYCRLVKSIKESNGKRYGSSGKKIGNAHLKWAFSEAAVLFLKGNEPAKRYLNRLTAKHGKGKALSILAHKLGRAAYFMLKNKEPFDQKKFLGL

SEQ ID NO: 184467 - protein, 343 aa, unidentified
MQRDLGMVVGVDTHKDSHSAALVDAMGALVAATDVAANRKGYRRLLEWARCRGSQRTWVVEGTGSYGAGLASFLATAGEVVFEGDRPQRRKPGAAGKSDQLDAVKVAREALAREHHAIPRQRGNREAIRILLSTREGAVVAHRQALNQLYALVVSAPEPIRERLIRLKGEHLVTACSRLRSTAGDIEVSVTSRVLRQVARRIRALQAEAAEHEALLEKLVAETAPSLLAQPGVGAITAAQLLVSFSHAGRIRNENAFAAMAGVAPVPASSGKVVRHRLNRQGDRRLNRALHVVAICRSSFHAPTKLYIARRTAEGKSTREIRRCLKRYLARRFFRLLQGLDNL

SEQ ID NO: 184468 - protein, 406 aa, unidentified
MLFVGDDWAEDHHDVEIQDETGRRLAKARLPEGISGIAKLHGLVGRFLPEGDAAAQVKIGIETDRGAWVAALVASGYQVYAINPLQSARAREGHGVSGAKSDAGDAHVLADLVRTHSHQLRTVAGDSEQASAVKVLTRMHQTLIWDRTRHVLRLRSSLREFFPAALEAFEDLASPDVLELLIKAPEPSSAARLTRPQITAALARARRRDRETKTTAIMDALRTEHLNQPPTIAAAYGATVRALAALIATANEQITALEGQVEAYFGQHPDAEIYLSQPGLGPVLGARVLAEFGDDPTRYVGARARKNYAGTSPITRASGKKKVVLARYVRNNRLTDALHHQAFSALSGSPGARAYYDALRRRDISYNAALRQLGNRLVGILHGCLKTNTPYDEATAWNQLTEQAAA

SEQ ID NO: 184469 - protein, 377 aa, unidentified
MTIVSDTYRLVVGVDTHAATHTVAVVDARTSAAQDTAKFPTSPAGLQRARSWVDRRTSEHAKNTVLVVVEGVGSYGAVFADVLTQAGYQVVEAPTVPTAVQRGVGKSDSLDAVRIAQAAIGVAVDRLREPRADKGPRAALRVLSVARDQMNGERTRAINRLTALVRTIDLGVDARRALTAVQIRTIAAWRARRNEDVATATARGEAIRLATQTRSLDAQLRQNQASIQRLADALAPQLQDMVGVGPVVAAVILIAWSHPGRIRSEAALASLAGTCPIPASSGNTVRHRLNRGGDRRLNRAIHTIVLTRMNFDPRTKEYVARREAEGRTKKEIRRSLKRYVTRQIFRTLAQQNQTQDRAPKHQAPLPENMPQHIRLVA

SEQ ID NO: 184470 - protein, 372 aa, unidentified
MASIIYVGMDVHTTNFTFCCYTADSDRGFAVAQTEPDYRQVIKYMERVQKQRGEECKFVCGYEAGCLGYSLYHQLTRCGVDCVILAPSTMHQEKGKRIKTDRRDAENIARCLAFSLYSPVYVSTTEDDAVKEYIRMRDDIKADLKRVKQQIIAFTTRHGFAFDGKSYWTQKHLKWLETLVFEHPLYKETLQEYLILYYMLDEKVAVYDTRIGEMSHLEHYEENVQKLCCFRGVAAHTALSLLVEVGDFQRFRSAKHFAAYLGLVPGEHSSSDKQIRTSITKAGNTHLRRLLVEAAQSYNRGAIGKKSAALKARQGGNPAEVIAYADKANERMQRKYYRITFKSRHNIAKTAIARELACFVWGMMTGNISNAA

SEQ ID NO: 184471 - protein, 355 aa, unidentified
MSQEKYIGMDVHQATISVAVMDARGKLIMECVLETKAATILEFIQGLRGTLAVTFEEGTSAAWLHDLLNPHVNRLVVCDPRKNALLKDGNKNDRVDAQKLAELLRTNQVKPVYHGKHGTRALKELGRSYLTITKDGTRVMNRIKSVYRSWAIPCAGTSVYTRRHRAEWLAKLVEPGVRIRAEHLYQQLDSLQPLRLEVRRQLLLESHTHAAVKLLRQVPAIGPIRAALLVALLQTPHRFRTKRQLWAYSGFAVEVHDSGEYRWVRGKLQRNRERITVRGLNDNHNKEVKSLFKAAAISASTRPGPLHDFYVARVESGMRPTMARLTLARKIAAITLTMWKKGVSFDPKQLHRQAA

SEQ ID NO: 184472 - protein, 370 aa, unidentified
MEQYTEAFVGIDTAKNKHALAIADLGREGEVRYLGEIDSAPAAVERMIRKLAGRYGKLYFCYEAGPTGYGLYRQVRALGHDCIVVAPSLVPKRPGERVKTNRRDAVTLARLLRAGDLTPVWVPDTVHEAVRDLVRAHAAASQDLRRKHQQLLSFLLRHGRIYSGRKHWTKPHLRWLAQQKFDHPAQQIVFQDAVDTIEDAATRLRRLDEQLAPIVPSWSMAPVVEAYQAMRGVSFAVAVTFVAEIGDLQRFDNPRQLMAFLGLVPSERSTGERVRRGGLTLAGNKRARRVLIEGAWSYRHPARVSQTLQARLEGLPKAVRAIAWKAQIRLCARYRRLTAAGKKRPVVIAAIAREMAAFLWAIAQHVAPTA

SEQ ID NO: 184473 - protein, 478 aa, unidentified
MTPESNVQPENPPTAKFSKQLDIINPHCAGLDLHKDIIWACTAPFRDGIAPEVVTFPTHTEGLQQLVSHLKTRRVTTVAMESTGVYWLMPYLTLLDADLAPCLVNPSDVKNIKGRPKSDRADSVWICRLHSYGFLRASFIPPPTILNLRNLCSTRDKLIVQAGSAVQRMNNELVKMNIRLDNVVSDINGKSGVLVTEAIIRGERSPEALYDLLATRIQNKGKSKIIPYLTGRCDEFSIFNLETWHILHKSIEQNIERINEKIYQILQSLPKKASAADLPPAKKNYSESYLDFPYPLRPLFYEIFGVDLTQLPGVGAELLLSLVSTVGTDLSPWQDASHFVSWLALAPVNRESAGYRKSGKTKRTGNPLANAFKMSAMAARRTTTYLGQTARRLSNRITPKKAKVAIARKLAEIVYNIIRHGMPVYVKTLEEYESRRKKREIQHFVKSLNKFSSGDGFIPEVIEEIQRHNAKFTSTVAI

SEQ ID NO: 184474 - protein, 404 aa, unidentified
MPELWAGTDAGKGEHHCTVIDADGTKALSRRVPNSEDELLQLLGDVLDLADGSPVTWAVDLNAGGAALWIALLVNHGQRLFYIPGRTVHHASGSYRGDGKSDAKDAFVIADQARMRRDLQPLQETSEIAVDLKILTGRRMDLSADRTRAINRLRSQILEYFPALERAFDYSTSKTALILLTGYQTPAALRRIGRARLATWLKNHGVRTLNVAKSAADAAVTAAEAQFTVVPGQKTAAKMVHTLAREVMALDEEIAQTNALIEGRFREHPDAEVITNMPGIGDMLGAEFIAATGGDMAAFGSPDRLAGVAGLAPVPRDSGKISGNLRRPRRYSRRLLRMFYLSAQVATVHCPQSKTFYQRKRAEGKSHKQAVLALARRRLNVLWALIRDHRTFETTAPFPAAAAA

SEQ ID NO: 184475 - protein, 321 aa, unidentified
MTYVGIDVSKATFVVAYSSAKSSETKTFKNTTKGIREFIRTISPEENHCVLEATGNYSMLLVYLLSKAGFTVSMENPLKIKNFARVMLSVVKTDEIDARLIALYGERMQPAPFKLRSDSLLLLKQKRTVLRQLKKQLTANRNLEGSLKILPFIDSKCKNVLEKTIKFLEKQIEEMEEELTSLAEIEYKKQMDLLTSIKGIGATLAAALIIATGGFTYFDNAKQLTRYLGLSPTYQQSGTSVNVKGHINRNGDAYLRSQLYIGAMASLRCNTECKACFERLRSNGKPGKVAIVAVANKLIRQAFAVVTQEKIYIDGYKSVKP

SEQ ID NO: 184476 - protein, 345 aa, unidentified
MKHTVVGVDIAKHVFQLYWVDIDTGEIFNKKLSRDKFLEHFANRSPCLIGMEACGGAQHWARELIKQGHEVRIIPAQKVRPFVIGNKNDAADARGIWHAVQQPGMRFVSVKTEDAQATLALHRMREQLVTMRTMQINALRGLLSEYGEVMAIKRAGLRKGIAQALQRLSERLPAMLIDTLREQWARIGMLDAEIATIEQRLQAWFAQSQACQTIAAIRGIGLLSATAVVATMGDPKAFKSGREFAAWLGLVPRQKGTGGRVQLLGISKRGDVYVRTMLIHAARAAYRHLKEDTGWAVDLRKRRPPNVAIVAMANKMARTIWALLAHDRQYDVNHVSRPPCEVVAA

SEQ ID NO: 184477 - protein, 343 aa, unidentified
MQTITTIGLDIAKSVFQVHGVDAAGQVIIRRQLKRRQVLAFFEKLPPCLVGIEACASSHHWSRELQALGHTVRLMPPAYVKPYVKRQKNDMADAEAICEAVARANMRFVPTKTPEQQSCLMLHRTRHLFIRQQTGVINSIRAHLAEFGIVAPVGRKGVTELLRVVADPNDKRVSEVARACLAALGSQLLALKQQILEFDRMILAWHRSNQTSKRLHYIPGVGPMLATALVASVADPSTFRSARNFSAWIGLVPKQHSSGGKERLGSISKQGDRYLRSLFVAGALAVIRYAKIHGTGHRPWLTALLARKPTKVAAIALANKIARMAWAMMARGERYKEPIALTR

SEQ ID NO: 184478 - protein, 346 aa, unidentified
MTHSTTVGVDLAKNVIQVSVVSARGKEVLNRSFTRRKFAEFLGKQKPALVALEACATAHYWARAAARHGHVARIIPAKFVAPFRQGHKTDSNDALAVAEAARRPSIKEAPMKTVEQQGLQAIHRSRQLLIQECTALSNHLRGLLMEFGVVIPQGFLSLLRAVPEVLEDGENELPDIYRPTLHRMYIRLLELREHIEAMTKEVEVLVKQHPICSRLTALEGIGPIGALLLYATLGSGNAFSGSREFAAYLGLAPRQYSSGGKTNIVGLSKKIGNSRLRSILILGARAYTYRLKEPKSSKDRWLKDVITRNGHSRAAIALANKNVRTAWAMVTQGTEYQRRGQLKVAA

SEQ ID NO: 184479 - protein, 283 aa, unidentified
MYYLGIDLHKDESHVAVLDNDAEVVEEIRVTNANLDEVAEEYAGAKAVTEATSNYYTVYDTLNEHLDVVVADPSQTKAIGYAEVKNDRLDAKLLAQLRRAGMIAESYVPSEELRQRRTLVRGRKRLVEKRTDFKNEVHALLDKHGITYDWDPFSVNGREILAGEDFSLGVVGDQLIESFLSIIDGLTAQIEELETLIEETAASLEETQLLMTIPGVSFYSPLLITSEIGEIDRFDEAKQVVSYAGLDPVVRESGDSRTEGSISKRGGGDLHWILVCSNSSSPV

SEQ ID NO: 184480 - protein, 342 aa, unidentified
MRIVVLGIDLGKNVCSLAGLDETGAVVLRRRMKRASVLPFTARLETCTVAMEACCGAHHLGRQLVAQGHVVRLMSPAYVQPYVKAQKNDERDAEAIAEAATRPTMRYVEIKSEAQLEVQSLHRVRARLVAERTALINQLRALMLERGIAVPQGRCKLAGYLPAILADERNGLGPRLRRLIEDMREEWRSIDRRIKGFNDELAERVRNEDTAKRLIRIPGIGVLTATALVAAVGNAQTFTSGRDLAAWLGLVPRQATTGGKPRLLHISKRGNGYLRMLLIHGARTALPGLAKKDTPLGRWVKALLARAHRNVVTVALANKLARIAWAVLARDRQYLTVQAIGK

SEQ ID NO: 184481 - protein, 456 aa, unidentified
MPGSTSTRGRSSGQLNTINPNAAGLDVGSTFHVVAVPADRDEQPVRTFRTFSGDLHRLADWLEEAGITTVAMESTSVYWIPVFEILEARGFEVLLVNARDVKHVPGRKTDVQDAQWLQQLHQYGLLRGSFRPRDGVVRLRAYLRHRERLVEYAASHIQHMQKALMQMNVQLHHVVSDITGATGMRIIRAIVSGNHAPERLAEFRDVRCAASEATIGAALTGNYRAEQVFALRHALELWDFHQAKIAECDAEIERVLRTLNEVRATPAEPLPAVRHAKAKNEPEFDTRPALYTLLGADLTQIHGFGAYTVLRLVAECGDDMRKWPTAKHFTSWLSLAPRNKISGGRLLSSKTRRSSNRAATLLRIAAVNVGRTQTALGAFYRRLAARIGKAKAVTATARKLAILFYQALRFGMTYVDPGASYYEERYRQRVIQHLQHRARHFGFALVADPSARGGVS

SEQ ID NO: 184482 - protein, 333 aa, unidentified
MNNYAVYVGVDVSKHSFTTTLLFNEIRKTFKVPSKPEQFESRLRPFLEELGVDKSNVLIIMESTSNYHLPLAEYLAKKEYNVGLANPFSMKRFMDAKMSRAKTDKVDSYFIAEYGRQIFKGPLFKPKTEAQKEIEARVKTLERFNKQLTMLKNQREALSLIPMKGLKKILAHYDRIIESIEKEIEVLEKEIRELCKKHFPEEYRLLKSIPGIGERAIAIVVSILRKFEGFKRAKDVGSFVGLCPSPVESGSSVRGKGSIKKRGNPYVRQVFYMCALSAVRSNPYCKDLYERLLERGKSKTEALVAVAHKLLRQCYGVLKSRTPFRVKEKEVTP

SEQ ID NO: 184483 - protein, 326 aa, unidentified
MTLSHSTDNTFVGIDVGGAGLDVAWHRGDSAHYANRPDAIATLVERLRTGPEVTRIVLEPTGGYEKALVKALRQARLPVEVIHTTRFNAYRALVGVKAKSDTSDAKLLASYAAAPDEVRGRKAGHVELPEDAVREELSELASRRDQLKHMIHAETCRLGTVRNDELRQMITTHLATLRAEDKQVHRMMLELVRQRDDLRRDQRLLKTIKGIGVKSALVLLASVPELGRIDNKAAAALIGVAPFVRKSGTMNAPARIHGGRAPVRSILYMAAVTASKHNPLLSPFYDRLIAKGKPPKVALIAVLRRLVVFANAVLRSGQPWKGASAT

SEQ ID NO: 184484 - protein, 347 aa, unidentified
MNFYNTTHPYYCGIDLHARSLYVCIINHDGETCLHKEIPASPERLLDLLQPYIGDIVVGVECMHCWYWVADFCADNHIAFILGHALYMKAIHGGKAKNDRIDSYKIAKLIRGGNFPLAYVYPRQMRATRDLLRRRTRIVQHGANLKAHVANTTSQYNLPPNRLNLKNQCARDQLRATFTNPAAQRNIDLDIDILDHYASVLCKVERFIEQQAKTHNPVHLQLLKSISGVGKILSLTILYEIGDIRRFATVQQFASYARLVKCKAESAGKIYGSQGNKIGNAHLKWAFSEAAVLYLRGNPPAQHYLQTLQKRMSKGKALSALAHKLGRCVYFMLKNETVFNEKRFLGG

SEQ ID NO: 184485 - protein, 401 aa, unidentified
MNAVGIDVSKGRSTVAIMRPLGEVVALPFDVNHTDSELSELAKRLKSLSGEVKVVMECTGSYYLPIAYALRNAGLTVCAVNAQLIHSFGNNTIRNIKTDKADAAKIANYALTYWAKLPEYIPEDDVRHMLKAFSRQYNKYTKIKTMLKNNLISLLDQTFPGVNELFKSVPRKSDGHEKWFDFAAHFWHCKCVCDLSQKTFATAYRKWCKQNGYMFNQAKAENIYMEAAGHVNVMPKNDTTKLLINHAVAQIRVISETLAAIAREMKHLAASLPEYSIVTAFSGVGEILGPQLMAEIGDVHRYPKKSSLVRFAGLEPVENRSGKFRRDEKISKQGSPHLRKTLFQVMDCLLKNAPRHDSIFQFLDRKRAEGKHYYCYMNAGAAKFLRVYFARVTQFLDNYFM

SEQ ID NO: 184486 - protein, 416 aa, unidentified
MKRNKPKKLGKVNGNTLIAAIDIGKKMNYGYFRAPDGRDIKPFGFYNLRDGFDKFWAKLVEFQKGHNLEEIVVGFESTGPYAEPMLHFLKKKEITLVQTNPVHTKRLKELTGNSPNKTDEKDPRVIADVIALGHALTLVIPMGPAAELRRLSQARERAIKSRTSMSNQLQHLLFVIFPELSWKTKSKSVLHLVESCPTPESIVRMGIEALCATLRKVSRGKLGQKRAKEIFEAAKKSVGISEGRESILKEIGHLVSNMRNHDGFIDGLEKEMKHYLEKIPYSHSILSIKGIGEVTAAGLIGEVGDFRKFSTISEITKLAGLDLYEISSGRKKGQRRISKRGRSYLRKVLFFAAINAVKSNGILHAKYQQMLCRGMAKIKALIAICRKLLRITFAIVRDDTVYVSNHQHMSDTKLAA

SEQ ID NO: 184487 - protein, 375 aa, unidentified
MGDHSEAFVAFDTSKLRNAVAIADAGRMGEIRYLGEFENTGSATAKLVRKLAAKYQRLTFCYEAGPTGYGLYRQITGLGHECIVVAPSLIPRKPGDRVKTNRRDALGLAKLLRAGELTAVWVPDGHHEAVRDLTRARGTAVFDLRRKRQQLSAFMLRLGLHYCAGKRTWTKAHLSWLVSQKLEHAEQRLVFEEMMLAMRQAQERIERLEQAIRAAVPDWSLAEVVTALMAMRGMDLVSATTFLAEIGDLSRFATPRALMDYLGLVPSEDSTGDTIKRGPITKAGNGRARRMLVECAWSYQHPPRVGKDKQEKVAAAPPAVREIAWKAQHRLNRRYRALVRRGKPKTVAITAVAREFAGFIWAVARAANAARAEAK

SEQ ID NO: 184488 - protein, 343 aa, unidentified
MNIDVLGIDIAKNTFQLHGVDHAGKVMLKKRLARAKLTAYIANLPICTIVMEACGGANYWARTFMQLGHKVKLISPQFVKPFVKTNKNDANDAQAIVDAASRPTMNFVPIKQVEQQDIQSIHRVRTRTVKNRTALINEIRGLCLEYGVVLAPGAATVKSSLSAAIADCTNELTPRSRESMQDLYDELLHIEDRLRGLNATIRQLCRDNEHCQRLLNVPGVGPLTATAVVAAVPNPKEFRNGRHMSAWLGLVPRQSSSGDKRVLLGISKRGDRYLRTLLIHGARAVLSRSKSVDTHYSHWVSNRRGSLSHNKAAVALANKNARIIWAILNTGEDFNPGMQSTAA

SEQ ID NO: 184489 - protein, 323 aa, unidentified
MKENRYPFSQFIGVDVSKAKLDFTFVDSTETVKIDNTAEQIVDHLIGRINDSRATIIVMEATGGYENLLVKVAGENNVAVAVVNPLRIRKFATGIGRDAKTDPIDAQAIAFYGQVVKPKPMLAKSDEETKLAALVARRRQLLDLINQEGNRLLQTTDPEIRDDIKESLETLKKQVKTIDGRLAKSVEASTVDRRKIEILQSVKGIGPVSISTFLAELPELGKLNRGQIAKLVGVAPMNNDSGQSSRRRRTFGGRSYVRRVLYMATLVATRSNPRIERFYQQLLARGKEKKVALIASMRKLLTIINTMVRNDELWRTEPKKTSV

SEQ ID NO: 184490 - protein, 389 aa, unidentified
MRPDATRPSESSIPPVSVPTLFVAFELGGSTWKLAATIGAGQAPRLRTVPARGLTRTLDELARAKARFQLDPAAPVVSCYEAGRDGFWLHHALTVHAVRNHVVDSSSIEVNRRQRRAKSDRLDARKLASMLVRYAEGERHVWHVVRVPSSEAEDQRQLHRELKTAQRERLAAMTRIESLLITQGLTLPLTGRESADTVQAALAALRRWDATALPAALQARLVREWGQVRALTSQLEALSRERRRLLRTTDSPALAQVRQLMQLKGVGVATAWIYVMELFAWRTFRNRRELGALTGLAPTPDQSGTGRHRELGMSKAGNRWVRAVAIEGAWCWLRYQPQSELSQWYQRRFASGGSRLRRIGIVAVAHKLMTGFERYLRTGTPPDGAVMRA

SEQ ID NO: 184491 - protein, 461 aa, unidentified
MRIIGLDLALTAEHKALIADARGQPLAPILRLRTTASDLERLFQRARAGTSPDEPVLLIMEPTGMAWFPVASFAQRHHVTPYLVNSQQVADLRRYYKKHAKSDRIDVRVLVKLPVVSPEKLHPLTLPHADAFACQRGCKELDYLMTLATALKNRIQAIDQFAWPGLDTVLAEPFSPLTRWFRQQWYQPQSVLTTGATGLEQAWQAAPAATEYAAPAAWAPALVRLAQHTQDLYGADAPHLNYAYLQAEVTRAQTLLTMVEAHHHAVQLKTVRPLYRRLHPSRNLETLKGVGQDGAAVYVSFIGDPHRFADHSHFRGWTGMVPDSQQSGAREAKGLHISQAGPDLIKKFAYLDAETARQWDPQIAAIYYDQMVEHGKHHNQAICACATHLLDRVWTVLKEDRPYELRDVDGTPVTVEQARAIIAERYTVPKHLRQRNNRRVRRERAERRAERKAERESRTSP

SEQ ID NO: 184492 - protein, 412 aa, unidentified
MEGETVIAGVDTHKDVHVLCLLDGLGRKIWSGGFRADPEGYDRLAEAIGDPGSCVVVGVEGTASYGAGLTRRLVELGYNVVEVLRPKRDKVRPGEGKSDPLDAERAARKAASGRGCSVPKSQDGWVEAVRQLYVARRLAVATSTSCVACAKSMLTTAPSALRERFRGRERPKDLMPLLARGRKAGDALEESVLASLRSVAAVWKEARSQVESLDERIRALLEANAPALLGVEGCGTTTAAALVVAAGDNPGRLKGEAAFSMLCGASPIPASSGKTERHRLNRGGNRQANWALYEIAIKRMAYDERTKRYVARRTSEGKSRREAIRCLKRYIAREVYRVLMDPNPDGAAPEGPELAKMRKAMRVTQKQAAAGLGMSAASLGHLEHGRRRSTKLERRYYELLCELKGALPQTAY

SEQ ID NO: 184493 - protein, 473 aa, unidentified
MRKPAEILDADHELVIERVCAIDVAKASGMVCTRLPQAGAAGRRVSRVWEVAATTRAITELADHLVAVGIEQVTVESTSDYWRIWFYLLEARGLDVQLVNARDVKNLPGRPKTDKLDAVWLAKLTEKGLLRPSFVPPMEIRQLRDYTRLRVDLTRERTRHWQRLEKLLEDALIKVSSVASKLDTRSVRDMLEALIAGDRDPRRLAELARGRMKTKRAALVEALSGRFDEHHAEIARILLDQIDGLSAAIDQLTTRAELLLQALLATRAGDQRAGGAVHAPGSGDPRQAPTEAPTEASVPADGTIAHRGGNGLSASQRLDEIAGIGPLAAQVIIAEIGLEMRRFPTAGHLVSWAKLCPRTIQSGATRRSGVAGKGNPYLKGVLGEAAAAAAKTNTFLGERYRRLVKRRGKLKALVAVARSILVIVWHLLSDPTARFYDLGPDYHTHRIDTTRKIRNHISGLTALGFRVTLEPAA

SEQ ID NO: 184494 - protein, 421 aa, unidentified
MARVLYVGVDWAADHHDIYVTDEAAGKLGAFRIGHDVAGVDELARRIAVLGVEPEAVRVAIERPDGLLVAALLERGYAVYPINPKAAERYRERHGTSGAKDDARDARVLAHILRTDGEHFRPLAAEGEVAAELRLTIRSYRELVTEGTRLVNQLHACLADYYPAAADLFGRLDQPITLDFLEAFPTPEAARTAGQEGILTWLKEHGYAQPKRAGGVAERATAKGLTAGAGVVRARRRQALGLVAALRAVVLAKREHERALDEILGRHPDGGLFLALPGAGTVTAAALLGELGEDRTSFSSADALRQAPTPAGRPWTAPVTIQSGKAKRVVRRRACDRHLRDALLQFARTSRMRAALGDARVAWVLEVYTARRKAGDTAPQADRVVANRWAAILWAMWTRREAYDHARYAKARAARALPKAG

SEQ ID NO: 184495 - protein, 286 aa, unidentified
MNNEKYIGLDVHQATVVVAVLDSTGKLVMESILETEAATLLQYFAGMRGTLAVTFEEGTGAAWLYDLLQPHVDRLVVCNPRKNALLKDGNKSDRIDARKLAELLRGNQLKPVYHGETGVRMLRELSRSYLTIVKDLSRVMNRLKAVYRSWAIPCAGRDVDYTRNRAQWLAKLREPGVRRRAERLYEQLDMLRHLRQQARRELLAESRKHAITAKLRQIPYLGPIRSALAVALIQTPHRFRTKRQLWAYSGLASETHISAEYRLVEGQVRRSKKVYTNHDPGGPQGT

SEQ ID NO: 184496 - protein, 350 aa, unidentified
MLTDLIDHVLGVDPDRDRITVAVVAARTQGAIASNDFPTTPRGYRAALHWADEHTERGRRVWAIEGAGGYGAGLAATLAAQNERVIEFDHPTARPSKDGAKTDALDAIRATRETLGRTSWAAPRSRGAREGLRTLITARDSAKIARVSAINVLKALIVTCPVKLREELRRLSLGQLVTRCQRLRLDTATDPELAATKLSLRSTATRIHHLTVECRDLEKAMEPLVDALCPRLLTEPGVGVLVAAQLLVSWSHPGRCRSEAAFARLAGVAPLPATSGQTQTRHRLSRGGDRQLNRVIHTAVLTRVKTDAQTREYLARRIAQGKTKREAMRCLKQYYSRHLFRLLESASVPS

SEQ ID NO: 184497 - protein, 431 aa, unidentified
MLKINPLSTLYVGIDVSSKSNYVCALDFFKNKYINSSFANNQPGAEELALKILECLKEHPDITTIVAALESTSVYSIHIANYLSSCEELMRFKPYVFVLNPKCTANYKKSYIGLGKSDPIDAFVIADYARAGNIESEPWRGSQFLALKRLTRHRLHLVECMTREKTYLVSNLYLKFSELQMLEGDDQPFCDIYGATSSSVLMEYFSPEEILDSSEEDLIAFLAEKSRNRIKDISKTADLLKKAARDSYRLDKALYEPLNVSIASSFNCIETFKREIKVIDNAIEKEIKGLNPNAFIILQSIDGIGPVFAGGIIAEIGDITAFHSSDALAKYAGLTWKSNQSGDFDGEDTPMIKAGNRYLRYYLGEAANSMRKHNVEYGTYYRKKYNEVPKHQHKRALALTSRKFVRLVYGLLARNQLYSGVSLDTSIKDSN

SEQ ID NO: 184498 - protein, 380 aa, unidentified
MIVVVKSGIDGVDGSSTGARAPWMWVLLGAYDSEEPDHANDYDHRSRYREVGFQVRGVDADGDVVLRRQLKRRYVLSFFQKLPPCLIGIEACASSHYWSRELQALGHTVRLMPPAYVKPYVKRQKNDAADAEAICEAVTRPNMRFVPTKTPEQQSCLMLHRTRHLFIRQQTALINSIRAHLAEFGIVAPVGRNGVEQLLEVVADANDARLPEIARACVAALGSQLQALKAQILAFDRCIMAWHRSNETSKRLDAIPGVGPALATALVASVADPKAFRSGRDFSAWIGLVPKQNSSGGKDKLGSISKQGDRYLRSLFTAGALAVIRYAKLHGTKRRPWLTALLARRPTKVAAIALANKMARMAWAMMTRGERYKEPVALAA

SEQ ID NO: 184499 - protein, 431 aa, unidentified
MDEVNRNRLEEFRQLRQEVRHSEKYLIVGIDIAKERHHAFFGTPTGRTLLKRLVFSNDHEGFRRLLDQTEALRVQQGLKKVVYGMEPTANYHKPLGEYLIGLGRMVVLVSGVTVKRNRESLDGRWDKHDVKDSANVADLISQGKCLYYEHPSAELRGLRGLLSLKRRLKKHEQSYRVRIRNQLIAQYFPELDRDYERLGAEGLSVVRWCLAPSQITRLDVEPFVQRVTSRRITKEKRRRLEAIWEKAGESIGCDGVPGLEHEAKVMVEGLRQIREVIKETEDKIGELCKGFPEYHCLLTIPGFGPDVSAKVLAAIGEADRFQNGKQVLKMGGLDLSADRSGKDSDRAIPEISKRGKADLRYALYQAALVASVKNRDIMVYYTHKIRGREKEKGIHTKMRVKLAAKLLVIAWTLMKKREAFNPAYLNAHNAE

SEQ ID NO: 184500 - protein, 395 aa, unidentified
MAIVDDRGQLVAKRRIGDNAAGLRSLLEMLAEHGDAAENLIPVAIETSRGLLVACLRATGRHVYAINPLAVSRYRERHTVARAKSDHADAVVLANILRTDAGHHRPLPSDTELVRAIAVLARSGQDAAWRRQQLTNQLRSVLREYFPAASEAFKDTKSGLASAEARVILAAAPTPALAAKLTKTRLRRLLIAAGRQRNIDVWVDRLHDLFAAEQLRQPPRIEAAFGEQARALIMQLDAACRAVEHLAQATEAAFTEHPDAEILTSFPGVGILTGARMLAEIGDDRSRFSDARGLRAYAGSAPVTRASGKSIAVMQRRVKNQRLAAVGYVWAFAALTASPPARALYDRRRAIGDGHAAALRNMFNRFLSQLHHCLATGQKFDPERAFPTHHDRVAA

SEQ ID NO: 184501 - protein, 368 aa, unidentified
MRTNTLEAAPAASAKELKNEKPAKAKRMLVGVDAHLRGYQAARKIDSGVIGVVENFRSEEELELYVAKQTTLAEQVVVVYEAGPLGYTLYRKLSALGVLCYVCAPDSSEQRKKRRKNNKIDARSLTSKLFNYLNGDQNALQLARVPTEAQEQLRMASRQHDQLVEERKRLGATGNAMLLSQGFGSWSNWWRPKAWAALSSKLPPWLLERLEVWVDVLKVLDEKIAQAKAAFARSCTGPRPKGVGALSQMQLQSEVLDWSLYSNRRKIACLAGMVPSEWSTGDKEWRGSITKVGVPALRRIIVEMVWRIIFFQPQYKPVQKWLEVLRGPNPARKKKAVIAIGRQLIVDLWRLQTGRVTAQELNLIMVTD

SEQ ID NO: 184502 - protein, 362 aa, unidentified
MSQAKWLVAAVVPGVERQPLKRLDADEAALLKLLHRWRNEAGQAGREIKRIVVAYEAGRDGFWLARWLRVRGVEAYVIHPASIAVSREHRRAKTDRLDTELLLRAFLGWLRGEKRHCSMVAIPTVEEEDARRPNRERGNLVTEQTRIVNQIKAILTRFGIRTFRPTLRKAEEHLEGLRTAEGLPLLENTRAELRRHLARLHVVREQIRAIEQSRLGKLAMTSEKGRHAMVRLIARVVGVGVETADMLVNEVFSRHLRDRKAVARYAGLTGSPDESGKRRRERGLARAGNARVRCGMIQLAWRFLRFQKDSALTQWFQARTADGRGSTRKTMIVALARKLLIALWRLVTMGELSDGIVLRPAS

SEQ ID NO: 184503 - protein, 392 aa, unidentified
MTVQAQVSDYTQVFVPRDYDVFAGLDVDHHSIAATFTDHDRLLQSLRLPYSAPQLLNYVRKHFAQQRLAFAYEAGPTGFGLYDELVAAGHPCLVVAPSMVPIAPGNRVKTNRLDSRKLSTALRGGELKSIHVPSPKYRELRHLVQLRDTHIGQLTATKCRIKALLLYEGISFPSDDGKEKQWSARVLDELLALPCSETVRFKLDQLIGTLHFHFNSAAAAQKQIRYYCQKDPELRQSITWLKSLPGIGEIVATHLAARLGDPALISNVRQIAGFLGLVSSEHSTGDKQNRGEITRAGDSRLRNKLIQSAWVSIRKDAELREFYDRVYLRHPKKVAARKAIVAVARKLTTRIYAVLKEQRPFVLREVSTAPLTTEETAGPRERLDGQQNEQAR

SEQ ID NO: 184504 - protein, 451 aa, unidentified
MEILSTNCAGLDVHKKTVKVCVMTHPSTGQPHKEFRTYFTTTEELLKLSDWLKEQGCTHIAFEATGVYWKPVFNLLEASFTVLVVNAQHIKAVPGRKTDVKDAEWIADLLQHGLLKASFIPSVPQRELRDLTRYRVRLTEEKAREVNRVQKTLEDTNLKSGDVGSSIMGKASRMILQAIADGESDAGRLAALAVGRVRADQQQLEAALKGHVTDHHRFLLQEHLTQIGHLEQAIERVTAEITRRFTPPSPPEEPTTSQKEEGATQEVSSDSAPRQEVPSSSQAVLSWAEAVVLLCSIPGISERTAIGILAEIGTNMQQFPTAAHLASWAGVCPGNHESAGKRLSGKTSKGNPWLRCLLVQAAHSASHQKNCYLAEQYRRIAKRRGSKRAAIAVAHSILVIIYHLLSQQTTYQEKGETFLEEQERQGAEKRLVRQLSRLGYHVELQPVALAG

SEQ ID NO: 184505 - protein, 368 aa, unidentified
MSHTESDLNKLVQLIKSLSGETKVVMEYTGAYYEPIANALHNQGIFVSVVNPLLIDDYGTKRVRKVKTDKQDSLKIASFAIDKWLDLREYIPANDIRKTLKILNRQYVQYNKILVMQKNNLISLLDSCFPNANTLFTSPRRESDGHEKWVDFVLKFPHIHSISKLSLSAFKVKYQSWCRKNNYNYSDKKVADIHSYCKTQISVLPMTDSVIKIITEAAVMLNSTLETLCMFRDEMDRLSSTLPEYNAVMGIYGVGKVLCSQLIAEIGDVRKLNNSKSLVAMAGIDPPPNQSGKVDTKSRSISKRGSPVLRKTLFQIMTIIIQNKPVDDPVYQFLNKKRSEGKPYRVYMIAAAHKFLRIYYARVMQALN

SEQ ID NO: 184506 - protein, 353 aa, unidentified
MKRPEEKLHAGIDLHSNNLMIGLVDQDGKRVSHRKLKCDLKEVEDFLKPHRAQIESMAVESTFNGYWLVDGLRKLKYPIDLANPAKIEQYSGLKHAGDKDDAYHLADLQRLKILPKAYVYDPQLRPVRDLLRRRINLVQQRTALYLSFKSLFARTTGQALDLKELKKMEPEQAPKLYEHPANQLIAQIQAEHMAGLDRSIGRIEKAVLACAREIPLYEKLLTIPGIGRILGMTITMEVGDISRFKTDGDFASYCRVVDAKRISNDKRKADNNQKCGNKYLAWAFVEAANFARRYDDNCRKWYDRKAGKTSKIIATKALACKLAKAAWHVMAGRCDYDPGRMFPVPANQAMRAK

SEQ ID NO: 184507 - protein, 425 aa, unidentified
MSKKKSSLAGLQALYARACGLDVHKKLVVACVRILDSKDGTVQSTLRKFGTMTADLVELREWLAELKVTHVAMESTGVYWQPVFNLLEGHFQGVWVVNAQHIKKVPGRKTDMKDAEWIAQLLQCGLLKPSFVPDRQQRELRDLTRQQTKLVQQRNAVDNRIQKVLETANIKLGSVASDVLGASGRKMIEALIAGEKDVTVLAELAKHKLRAKIPELQRALQGELTEHHCYLLRQLLGQYDFLEKEIASVSERLGAVAPPSFRAAVEKLDEIAGIAERGARAVLAETGTDMSRFPTHKHFASWAGRCPGNHESAGKRRSGKTPAANRHLDAALTEIAHAAVRTKNSYFKAQYHRLAGRRGKKRAIGAVKHSILVTIYFMLRDNKPYKDLGVDYFNKLNPQQRIRYHIHRLKELGQEVELSPVVNAA

SEQ ID NO: 184508 - protein, 381 aa, unidentified
MQSNHTVPTILVAIELSTATWLVAVRVPGSEKPHLHRVDGGDTAALLALIASVRARAAHQLNAEIGIVCCFEAGRDGFWLHRLLTTRGITNYVLEPTSVLVNRRARRAKTDRLDAEGMLRVLAAYLRGDHQVCSMVRVPTPDEEDAKRMHRARENLVQERLRIENRIEALLFTQGIRKRPSLRSWERDLAILSTGDGREIPRHLLAELDRLRRRLVMTLELIREVEAERDQATKTQPQDQACRKIAALCRIRGISDNFAAVLTREVFYRSFDNRRQIASYVGITPMPYQSGGIDRDRRISRAGNPRARTTMIQLAWLWLRYQPGSELARWFRERVGTLAGRTRRIAIVAMARKLLIALWRYTESGVIPAGAEIRAETPVAA

SEQ ID NO: 184509 - protein, 316 aa, unidentified
MDQTAQEQSAFVGIDVAKKHLDVHVLPAATSFRVGRDGAGLDDLRDRLQGLSPVLIVLEATGGYETVVLATLAGAGLPVLAVNPRQIRDFARACGQLAKTDQLDAAVIARFAERIRPELRPLPDAATQMLGEIAARRRQIIDMISAESMRLKQAAARKVQRRINAHLAWLQQELTDIDTDLDNAIQESAVWSHHEALLDAVPGVGKTVARTLLAELPELGTLDRRQISALAGLAPFNHDSGTHRGKRSIRGGRTVVRSALFMATWVATRCNPVIKPFYERLIASGKPRMVALVASMRKLLTILNAIIRDQKPWQAA

SEQ ID NO: 184510 - protein, 341 aa, unidentified
MDTMIGVDLAKNVFQIHAASVTGDVLFRKKVRRQQFLQFMASQPSALVVMEACGSAHYWAQELMTAGHEVKLIAPQYVRPFVKRQKNDAADAEAIVTAARQPEMRFVVPKTEDQQARAVLFRCRDRLVHQRTELVNALRATLYEFGLVVPKGIAHLRRIEEIVEDERILLPRLIRQECQDLLEQIKEQSARITEKTRALVGLSEESGVARRLETMPGIGPLTALAIEAFAPAMDNFRNGRDFAAWLGLVPRQFSSGGKQRLGRVSKAGQADIRRLLIIGAMSRVNWAGRKPPVPGTWLGRMLARKPRMLVAIALANKMARMIWAMLTNQKTYRDPVLTAAT

SEQ ID NO: 184511 - protein, 348 aa, unidentified
MIRNAPKSAAVYGVDLGKNLFHVVGLDGRGAVIQRVKFRRDTLLAFFERAERTIVGMEACPGSQWLARKLQAMGHQVRIVPAQFVKPYVKSQKNDTVDAEAIAEAVTRPTMRFTQVRTVEQVDLQALHRIRDQLVSSRTRLINQVRAFCLEYGVAIRQGAGVFRLDLPRVLADETNDLSPAMRRMLTALFEDVVGLDRRIAGASREIEGLAACDDRARRLMTIPGIGPLGATALLAAIGDGRQFRRARDLAWLGLVPREHSTGGKTTLLGISKRGNRYVRRLLIHGARSCVTHLDRTRDRLGRWLDALQSRMHVNKVTVALAAKMARMAWAILTKSGALYERRDPVVA

SEQ ID NO: 184512 - protein, 408 aa, unidentified
MELKPMHRRVIALDVHQAKITACAIVEHDDGRVEMIQREFGAFKRDRRELGQWALQIAPEIVVMESTGVYWKSPFAALEAVGIVAWVVNARHVKAVPGRKTDLCDAQWLATLARAGLLRASFIPCAQFRQLRLVARQRQKLVGARSAEKNRLHKVLVDAGVRLNVLVDDIHGQSARAMVKALIEDRPMHEILDRKGRLRASREELFDALSTEQFSAVHRFVADEIMQHIEYLEQRIARLDQYLLDGLQPWQAQLNLLQTIPGIDQIGAAMLLVEIGADMDAFGSAERFASWVGICPGNNESAGKRKSGRIRRGNAWVRRLLCEFAQAAARTRCAFKDKFKALTIRKGHNKSVVALAHKILRTIYAMLASGTHYKDRVVDYEALNVARNAPRWMKMLHKHGYIAAPATA

SEQ ID NO: 184513 - protein, 485 aa, unidentified
MAKRKQSNFERINLERMNRKQRRELGQRLEKSDPGLEIVHPHAAGIDVGNESHFVAVPGNRDPQPVREFGCWTGDLVKMAAWLKGCGIETVLVQATGVYWIALKDIVEQQGIEVVVANAQHTKNLPGRKSDVQECQWLMKLHTYGLVRGSFQLAEDMQGVRAVWRLRGRHVEEAARSVQHMQKSLTQMNVQLANALSDISGKSGQAIIGAILEGERDPGKLAELCDRRVQASTAEVAESLRGNWRDEMLFELSQARESYRFAQQQIQSCDRKLESYLKVLPTRQVEIMLPAPPVPSPATPVRARQAPRKQGNTPEIPGMRDELVRICGVDLTTIDGISIVTAQTILAEIGTDTSRFRTEQAFVSWLGLAPNRDISGGKVIRVVRRKVPSRASTALRLAATSLKSSDSYLGARYRHLQRQLPSKASAVKAMARYLGVLVYRLMTKGQAWVDQGAARFEQKRKALSLATLQARALANGYRLVPVTAS

SEQ ID NO: 184514 - protein, 481 aa, unidentified
MKPDPKKASLQGAKGRKRRDKASKTQHQINTQTHPDAGGIDIGAAEIVAAVPPDRCAEPVRTFTSFTTGLRELCDWLKECGVTTVAMESTGNYWVNCYDMVEQAGIRVFLVNAKHVKGVPGKKTDVCDAQWLQQLHAAGLLSGSFRPEQEVLQLRYLVRHRDGMVAESSRLMLRIQKVLTEMNLKLQHVFSDIDGQSARDIIRAILDGQRDPEVLAALRDRRCKASKEEVVAALDGDYRPEYLFVLRDLQEQLDEMRKRMARIDQEVTRQVALIGKAAQASRPTPEENDDGAAGGGKVKAKRLGKNAVMMDYKAESERFFGVDLTRIAGVNSGVIIALMSEIGTRESLLESFKSADGFCAWLAVCPNNRISGGRVLSCRTRKSNNRIAAALRLAAYGLQNAKCQMGQYSRRMKGRLGKAEGITATAHKLARIIYSMIRSGRAYDEKEAFKSNPGVERKREKNLKILAKQMGFELVPVTQAA

SEQ ID NO: 184515 - protein, 363 aa, unidentified
MFTERTSVGLDVHARSVAAAAIDGVTGELFQSKLTPSHEHIRLWLQGLPGPVAVTYEAGPTGFDLYRALTAEGIRCEVAAPSRLQKPSGERVKTDAKDALHLAKLLRLDAITSVAIPSVEQEAARDLVRAREDCRGDLMRARHRLSKLLLRRGIVYYDGDAWTGKHDAWLRHEALPRLSSRATRLAFDSDYETVLATRARRDRLDVSIEEMAADSEFTAMVRRLGCLRGVSTLTGFALAVEIGEWHRFTGNTIGSFVGLVPSEYSSGSSRVQGSITKTGNTHVRRLLVEAAWHHRPRYTVSKTMRDRWELAPAAARARGDEGNRRLHQRWVKFIERRKKPTIANVAIARELAGWCWSLAVLEE

SEQ ID NO: 184516 - protein, 454 aa, unidentified
MSLEDRPVEQPHAAGVDIGAREIFVAVPHDPEGQPVRKFATFTEDLWRLADWLQGCGVTTVAMESTGVFWIPLYELLEQRGLKPCVVNARHMKNVPGRRTDWHECQWIQFLHSVGLLRAAFRPEEQVCAVRAIVRHRQQLVEMAAQHVQHMQKAMTLMNLQLQHVLSDITGTTGLAIVDAIVAGERDPKELSKLRDPRVKASSDVIEKSLCGNWREEHLFTLGQSRQFHRFYQAQIVICETNIERLLQQFDPRVDPQQTPLPPDNKCNRSGAKRRKKAGHVESQFDLRTEAYKLFGVDVTQIPGLETNVLPLFGEVGRDLSRWPTASHFISWLSLCPDNDISGGRVLWRGMRKTNNRAGQIFRLAAQSLHRSPTPIGEYLRRLKAKLGPAGAITATARKIATLFYTLVTRQVEFDHTLWHANDAQRQQRIQARLTRQARRLGYQLVPLEVSSCT

SEQ ID NO: 184517 - protein, 402 aa, unidentified
MNSVGIDISKGRSMVAAMRPFGEVVISPFEVHHTDSELSELAKLLKSLDGETRVVMESTGNYHAPVAQLLHDAGLYVSVVNAKLVHGYGNNDLRRVKTDRKDAVKLANYGLDRWLTLPRYIPEENTRLLLKNCYRQYRQYSKVQTVLKNNLISLLDTVFPNANRLFNSPARADGSEKWVDFVAEFWHCKCVCERSEKAFVNKYQRWCRKHGYNFSEDKAHAIYDEASGHIGVMPKAETTKLLVEQAVSQLRTTSAALAALKQEMHSLASQLPEYPVVMEMFGIGPTLGPQLMAEIGDVRRFYSKKALVAYAGIDAPPNDSGDVIGRHKSMSKVGASSLRRTLFLVMSIYLQTSPPDEPIYQFMDRKRTEGKPYRVYMMASANKFLRIYYATVKAYLESLEQI

SEQ ID NO: 184518 - protein, 359 aa, unidentified
MQAKVKTISFQGQNIYIGIDAHLKNWTVTAMTENSLTKTLSQDPDAGILYTYLQRNFPGGNYFSAYEAGFCGFSVHRKLQKYGIQNIVVNPADIPTTDKERKQKEDRRDSRKIARSLKNGELNGIHVPDLETEELRSLVRYRKTLVKEISRNKSRIKSHLYCFGIDIPVTLAQASLHWSGRFTQWLETVQLSTCYGDIVLQSTLQTVKHLRSELLKINRQLRALEKESKYSFKIKLLRSIPGVALIVAVTLLSELETIIRFKRLDKLCSFVGLVPTTNSSGDDERVGHITRRSNKPLRSLIIEAAWIASRNDPTLAQCYIELCKRMKPNEAIVKIAKKLLNRIRYVMKNEKEYVHSVVQ

SEQ ID NO: 184519 - protein, 342 aa, unidentified
MHLWAGIDAGKAHHHCVVIDADGNRLLSQKIPNDEPALLELIAAVLKLGEGDEVIWATDLNHVGPALLIAILVAHGQNILYIPGRIVHHASKLYRGEGKTDAKDAAVIADQARMRRDLQPLRAGDEISTGLRILTARRADKSADRVRAINRLQAQLLEYFPALERAFDYSRSKAALLLLTKHRTPDGIRRTGQARLHAWLKKHGARSSAAVAQAAVDAAKSQHTTVPAQHLGERIVAALAQEILTLNEELAELDALIGEKVAEHRHTEVLLSMPGFGPVLAAEFLGATGGDLTVFQTADRFAGVAGLAPAPRDSGRITGNHHRPAATTAGSCGSSTSPASRH

SEQ ID NO: 184520 - protein, 317 aa, unidentified
MSEVTFPQLIQRACGIDVHLKVVVATIDGAGIQRETRSFKTFTSSLNELKEWLLSNGVTHVGMESTGVYWKPVYKVLEDSIPNVWIVNARHIKNVPGHKTDKMDSEWICKLLLAGLLKPSYIPPKEQRQLRDLTRYRNKLIQQIASEKNRMMRILEDCNIKLSSVVSNTSGTTATSLIDMLCEGKVLTLDDINSVYHGKLSASPEELLEACTGFVEEHHIYLLQMIRKDIDQTQTLVDDLSERIKRLLSKYENVLELLREIPGFSTKVVEDLVSEIGLDMSHFPSEKHLSSWAGLSPGNNESAGKKKAHESLTETNR

SEQ ID NO: 184521 - protein, 355 aa, unidentified
MDRTKYIGMDVHQASISIAVRDASGKLVMESLIETKAATILEFLQGLKGTLWVTFEEGTSAAWLYDLLKPHVFKVIVCDPRKNALLKTGNKNDRVDARKLSHLLHAGLLTPVYHGESGVRTLRELARSYLTLTKDLTRVMNRLKALYRSWAIPCAGEKVYSPRHRSAWLEQLSEAGVRRRAEQLYQQLDILLQIRREARRELLRESRKHPAHELLRQIPQLGPIRVALLIALVQTPHRFRTKRQLWAYCGLALQTRSSGEYRFTAGQLQHSNRLPALRGLNTNHNHDLKNVFKSAATHVSTSPDALGDFYRSLLAKGMKPAMARLTLARKMAAIVLTIWKKGERFDPGELKRQAA

SEQ ID NO: 184522 - protein, 347 aa, unidentified
MDKVTVIGMDLGDKNHKAVVLVADGTEIERAEVKNTPEQVQEFLARHPGALLAIETGTHCRWISRLAVGLGHEVLVGNARKLRMIWNSSRKNDWNDAEMLAKLARADRSLLVPVKLRDDESQELLRLVKARDILVKHRAGIVNMIRGFCKAEGGRMDGCTTEAFVRQEFDVPKVLRDVTKPLFAVLRELSKKVALFDKMLVQNLEKKHREAAASVMAINGVGPVTAAAFIATVGNPTTFGKPRDAGAYFGLVPRQDQSGQSDRQLRITKEGNTQVRALLVNCANYIMGPFGKDCDLRRHGLRIAERGGKNARKRAKVAVARKLAVVMLALLQNQKEYCPLMGESSLA

SEQ ID NO: 184523 - protein, 424 aa, unidentified
MTREMADYAALVGIDWADRKHDLCLQAAGSEKRERLVLEHRPEAIDEWACALRVRFSGQPVAICLEQHKGPLMAALSKYDHLVLYPINPLLVATRRRGLKPSGAKSDIADAEIILDLLTDNSAKLRPWHPDNARTRQIQALVEARRTLVENRVGTTNALTANLKLYFPQALGCFDDLASGLACDFLTQWPSLGQAQRAREATLTTFFHQHGVRGEDLIMRRIAALRAAMALTTDSGILVPALLRTKTLVAVLRAQLDGVSDYDTAITKAFDAHPDAALFASFPGAGPTFAPRLLAAFGADRERFASARAIQEYAGVAPVTEASGQSHWVHWRYACPRFVRQSIVEWAGMSIRYSFWARTYYQELRERGKAHNAAVRALAFKWLRIVFRCWQDRKPYDEAKYLLSLQKRQSPLLQAAAKPLGQPA

SEQ ID NO: 184524 - protein, 348 aa, unidentified
MNRTHYIGLDVHKKSVSYCIKLADGTVVAEGKVAARREDLRQWAKQLPQPWEGAMEATLFSGWIYDVLKPFAAKLEMGHPRMLKAITAAKKKSDGIDAGKLSDLQRANLLPSCYVATPQIRELRRMLRYRNLVVSQAVRMKNRISGLLMETGMEYNQQRLHGKGYFAELMKNLVEVPESVRQLLRLSRAALEMFEVTQLRLLKQLRTDAQLAKRVQRLTSIPGVGEVTALTWALEIADPSRFPSIHQAQSYCGLTAALNSSADKQKRGPISKQRNPHLQTVLIEAAKLAPRWNSALAAVHERELTHGHRNRATLEVARKLVAYLLAVDRSQQPFQMRAGATTAGAAPT

SEQ ID NO: 184525 - protein, 370 aa, unidentified
MSVRRILAKTINTDLEYEAIGIDLAKNCVSVALLTTDGEVVCIDRLDYSELEKSAQVLCPTTFAMEPCTEMNYLVQKLEAWGHRCLVIGGKNVQNYVENHYSGQKTDLNDAQALAFLAQDTQLRTIKAKDVEQQKYASLTTLREQYIKQYRQTIVSLKGICQAWGLNISKGISGKARLKDLIENHAAFPEELKESLVDMVTHAQTAQKALNKITKTLEELAKSDKVCQLIQTIPGLGSICSCRLRATVGDIKRFKSPKDFPAYYGLVPRSIATGHNERKGKITHRGDRTMRSLMVQAAGSLVNMATKGKLKSKQLTKWILKKQKEKMPWGKLVCAVAAKLLRIVRAVLISNKPYNSKIAGVAKCSLPKGS

SEQ ID NO: 184526 - protein, 367 aa, unidentified
MKKVSTVGTQQTRNVSQQKLTIGLDLGDRNSWYCVLDEAGQIQLEQRVRTTAKALGEVFGAMPRSRITLEIGTHSPWISRLLSELGHEVIVANARKVRLIGESRKKDDRLDARTLARLARIDPELLCPVKHRSAQAQADLTLIRARAGLVRARTALVNTARGLAKSYGERLRGCNVRNMSPEKAEGLSPELQAALQPLLAALESLSERIVEYNERIEKLAQQSYPQVALLKQVKGVGTLIALTFLLTLEDPHRFHKSRDVGCYLGLQPGRRNSGQSEPQMHISKEGDPYLRTLLVQGAQHILGPFGVDCDLRRWGLKLAERGGRNGKKRAIVATARKLAVLLHHLWVSGEVYEPLHNSSQTTVAAAA

SEQ ID NO: 184527 - protein, 412 aa, unidentified
MEVLYACCCGLDVHKKSITACVLWAEGKGKTRKEKRRFGTFTRELLQLADWLRACGVTHVAMESTGVYWKPVWNILEGQFEVLLVNAQHIKAVPGRKSDQKDCEWIADLLQHGLLHGSFVPPKEMRELRDLTRYRVSLAQEENRIANRVQKVLEDANLKLASVASDPLGVSGRAILTAILAGEEDTERLAEMSKGILRKKIPDLRLALEGRVTEHHRFLLQELLDHQEFLEKKMAEVEAEIGKRMRPFEAEVERLDTIPGVDRVTAWSLVAEVGVRMEQFPSAGHLASWAGLCPGSFESAGKRLSGRTRKGSASLRRCLCQVGSVVSHLRDNYLSAQYRRLAARRGGKRAVLAVAHTVLVMAYHILKRKQNYQELGADYFDRLNADAIRRSLVRRLERLGHRVTLEPLPQFA

SEQ ID NO: 184528 - protein, 397 aa, unidentified
MYSLFVGIDVSKDSFSVAALDEKAKTVFSLCPLMNAQGFDEFLKVLAAHHGDLGTIVAALESTGPYHLNLYSFLVAKGITTIIVNPLIIANFNKLSLRRTKTDKKDAATIARYLFLNREVLGKLSSCQTTTDLRDLARERESILKMIASMKNDIKRILQTTFPELEQLVDVLCVTMLRFLKVFPSARLINQAAPEAVAEGFNQADGRLRISMQYTSVIDLARKSVGTASPSKELILPGKIDTLFHLTQRADEITKMLVKLCKTARQEELSILMSIRGVASKTAAPFLAELGDHRNFNSYKKMIAFSGLDPTTHQSGKYEGLSMISRRGNRHLRKIIYNMTFCVIRYAGPFRDYFFRRKEEGLPFRKALLATAHKLMRTIFAMLNGGTLYRTEAVMEK

SEQ ID NO: 184529 - protein, 332 aa, unidentified
MSIFTNTIGIDVSKDKLDAHDYKLNKHHIFYNNKEGYKKLLAWIKTNHKQELATLLCCFEHTGIYSFGLCVLMEENKLAYKVLPGLEIKRPIGMTRGKNDQIDAFKIAQYAYYRRDELNPSKLPAAELLKLKDLLCLRERMVKQRSGYRAHLKELTRFSNRENNKLLFESQERMIKELCKEIKLVEKEMEQVTKENPAIQAQYKLARTVKGIELILGVSLLVYSDNFSNFKTWREFASYVGIAPFDYESGSSIKRSKQVSHMANKRLKALLSNAAMSCIVHSPEMRVYYEKRVKEGKNKMLVQNIIRNKILSRVFAVIKRRTPYVNTLSYAA

SEQ ID NO: 184530 - protein, 448 aa, unidentified
MSRFNGASREALEHFECAAVIGLDWADQKHFWSMLTAEGNTTRGQLNNTPEAVEVWAAELERRFGGKPVALALEQSRGAVIAMLSKYAHIVLYPVHSTTVANYRKSFVPSGAKNDPSDGDLILELLVKHPEHFRRLRPDTVETRQLQFLTEERRKMVNKHTAELQGLIAWLKQVFPQILAWFGEPGSPLVRDLLMRWPTLEKLQKVRPQTLVKFFHQHNCRREELIEKRLAEIREAITATSDPTLMAAGILCIQNSLRLLEQMQIAIATFDREIQVVYRAHPDRALMESFTGAGPALEPRLIAAVGSMRDRFESAASLATYAGIAPVTERSGKSYWVHWRWACPKFVRQTFHEWAGCSIRSCDWARAYYDQQRAKGKGHHAAVRALAFKWIRIFFRCWRDRVPYCESLCHQAQNIRQAVQQSSQPTAGAPQMQWESCGSFSKLKKLSS

SEQ ID NO: 184531 - protein, 310 aa, unidentified
MSQPIRGVGLDVSKERISVAVAEPDGTVIEYGAIPNDPSSVRRLVEKLSRDAQLRTAYEAGPTGYPLHRQLTGLGIENLVVAPSLIPRRPGDRVKTDQRDAVQLARLLRSGDLTPVWVPDEAHEALRDLVRARDDARAEGLRAKHHLSKLLLRQGVIAPARVGRAWSARHQAWLNTLTFHDRAAQVTFDDYLACVRAATERLRRLDAALLECGASSPHVELLRALQAVRGIGFLTAVTIVAEAGDLRRFRSAPAFMAYVGLVPSEHSSGGSRRRGHITKTGNRLLRHVLGEAAHHARLQPALSKELSHRQ

SEQ ID NO: 184532 - protein, 461 aa, unidentified
MTFSPCRSHGLGGGVTGSGGIDRPLIRGMTTGFFGGREALRNVDVAIGAVPRPGEYDRRLHVIDTSDIGAFLGLDVGKGEHHATAVTPTGKKAFDKRLPNSEPKLREVFGKLKAKHGTVLVVVDQPASIGALPIAVARDMGCAVAYLPGLTMRRIADLYPGEAKTDARDAFVIADAARSMPHTLRSIELEEETVAELEMVVGFDDDLAGEATRISNRLRGLLTQIHPHLERVVGPRIQHPAVLKLLDQFGSPAQIRKAGRRRLINLIRPKAPRMAERLIDDIFTALDEQTVVVPGTDAAALIVPSLANSLQAVLDQRKLLAVRIEELLENHPLSKVLTSMPGIGVRTGARILIDVGDGTAFTSAAHLAAYAGLAPATRSSGSSIRGEQPSRRGNKQLKRAFFLSAFAALADPVSRAYYDKKIAQGKHHTQALLCLARRRADVLFAMLRDGTFYDPQPSPTG

SEQ ID NO: 184533 - protein, 405 aa, unidentified
MNSVGIDISKGRSMVAAITMTKEVTVKPREFEHTELGLEQLLGVLAPLTLEGETRVIMEATGRYHEIVASTLYEAGIYVSVVNPLLIHDYGNNSIRCVKTDRKDAMKIARYGVDNWGELREYTPVDSARQLLKLLSRQYNQYMKVLVSQQSNLIALLEKTFPGANDLFKSPRRDDGHQKWVDFVQAFWHSDCVIRLKEREFIERYQKWCKRKGYNFSEDKAFDIYVYAACCGYTLPKNSSTKALISVAVEQVIACSKCVAAIKAEMLKISAQMPEHKVVLSMFGVGDITAAQLIAEIGDVRRFNNRGALVAFAGVDPSTFQSGKYASKSGKATKRGSAHLRKTLFQVVGAYLKRSPADEAVFQFLNRKRAEGKHFYVYMTAASNKFLRIYYDRVKAFLESLDHNN

SEQ ID NO: 184534 - protein, 334 aa, unidentified
MLYVGLDVHSRQSSLCILNSAGGTVNEIQIKGPRAGIVDRLRQLNEPFRVCYEASCGYGHLYEALRPLAQHVAVAHPGKLRLIYGSKRKNDRIDAQKLAKLLLLDMVPPVHVPSIDVRAWRSLILLRQRLLQQVVRAKNRIRGVLREHDIVGAKWLWSKKQIAWLESLELHPVAKLRLELAVEEFKALQMKVKRIERELQKYADAHPAVALLMTIPGVGVRTAETFIAWVDDVARFRNNRQLGSYFGLVPCQDASADRNRLGHITRDGPPVMRKLICEATWTAIKRCPRFKQFFERVSGGKSERKKIALVAAMHRMIKVMGAMLRSGESYDDAR

SEQ ID NO: 184535 - protein, 453 aa, unidentified
MPRKKLHKKNQRVAPPIMNPDAAGIDIGATEIYVAVPADRDPEPIRMFATFTQDLNRLADWLQQCGIRTVAMESTGVYWVPLIQILEVRGLESYLVNAKHVKNVPGRRTDVSDCQWLQYLHSVGLLRASFRPAPEVCALRSLLRHRNSLVEMATTHVQHVQKALDQMNLQIHHVISDITGTTGLAIIDAILAGNRDPQVLAALRDPRIRASNDTIAKSLVGDYRPEHLFTLRQSVDLYREYQQRIAACEEEMQRFMKGMESSATSSASLPVAKDSVRKCKVMLPAKALALREQAYRILGVDLTAIPAISVLHVQAILAELGDGISKFRSAGAFSSWMGLCPDNDISGGRVLWTGTRKVKNRVAVTLRMAAQSLQKSESALGAFYRRMRTRLGAPKAVTAAAHKLARIIYHMLKTREPYDESVFARAEIKYRQRAENRLRAMAQTLGYTIAPAK

SEQ ID NO: 184536 - protein, 359 aa, unidentified
MQYVGIDYHKRYSVLCATDERGQELKRRRINGNSASGFAQFFSELGEESKVVMEACWNWGWLYDLLAKIDQVEEVVLAHPYKTRLIAEAQIKTDRIDAQMLAKLLRGDLIAHSHAPSAGTRARKHLLRQRLFWVRLRTMLRNRIHAVLDRQHDLERPQLKNFFSRRGQTWLEEVRLPCAEDQPLLKQNLEVAELLEQKIKQLDRTIGQSQSQEEKLLESIPGIGPLFSSVIATEIDGIARFNSPAKLAAYAGVVPTTHASGGRVFNGRLLWQCNKWLRWALIEASWSAIQFSGYFGSIYRCARARGKNKNIAITMVAHRMVKIIRLLLTEKRPYTETLPDRSEDGMTVVVRRKAPALAS

SEQ ID NO: 184537 - protein, 352 aa, unidentified
MTAVMIGIDPHKASHTAVVISGAEEPLGELRVRASTAQAERLLAWAAAWPERTWAIEGAGGLGHLLAQQLLSAGERVLDVQPKLGARVRLLDTGNVNKNDPDDARSVAVAALRSPGVREARPDDHAAVLKVWSKRRRDLASSRTQVVCRLHAVLCELVPGGDPKKIIADRAARLLGSITPPDAVAAARRELAAALVEDLRRIDGQLRETRKKLDTAVRASGTSLTGLFGVGPVTAATIIGEVRDVSRFTNRDRFAACNGTAPIEVSSGGRKVHRLSRRGNRRINHAIHMAAITQIRQPHSEGRAYFDKKLAEGKTHREALRSLKRQISDAAFARLRTDARRAPAQVRDPGGH

SEQ ID NO: 184538 - protein, 346 aa, unidentified
MKVLIGVDPHKASLAVAVVDEATGELLERASFPQDRTGLRTLERWAKRFPERRWAVENAGGLGRHLAVRLAATGESVVDVPPKLSARVRVLSSGNARKNDRLDALATALAASRNDRLAVVDPEAASEVLRLLSERREDLVAERTRALNRLHGLLRDLVPGGVARTLSAHRAARILRGIRPQGASARLRRRLASEVLRDVRTLDRKIADLNERIEAEVKASGTSLTGIFGVGPILAARIIGTVGSVERFPTKAHFASYSGTAPLETSSGEVVRHRLSLAGNRKLNYALHMVATCQARSDDQGGAYYRKKIAEGKSRKEALRCLKRRISDAVFRSLMTDSRAPSRSAA

SEQ ID NO: 184539 - protein, 465 aa, unidentified
MAKKAQKMKKGKRSELLIVNINAAGIDIASTEYQVCVPEDRDAEPNRRFEAYTCDLHSIAQWLKQCSIDTVAMEATGIYWVQLFMVLQEYGIDVVLCNAKHIKNIAEKKTDYVDASWIQLLHSYGLLRESFQPENQIRQLKDLMRHHERIIQSISQDILRIQKALEMMNIKVHKVLSDIKGKSGLNILEAIIGGERNPSVLAALVHHSVKASKEEIIKSLEGNWNDAQLFILKQSFDSYRFALGQIEELDQSIKQLLIAYAHVAGEKKNNKPIERAIKRKLTQGNILHFDAEQYSYDILGVNLTRIPGISSLTAIKLISELGRDFTSKFPSVKQFCSWLNIVPNNKISAGKILSSKVPKRKNFAGQALRVAANKLSKSKGYLGDYFRRMQSKLGYNQAIIAVAHKLARIVYHMVKVKAEYDESIDRAKNVKLLDFKRKSLQKRLAKIENEIYLSNCNTSNLLLVR

SEQ ID NO: 184540 - protein, 349 aa, unidentified
MATACSVTLGVDTHKDLHVAVTLDQVGRRLGVATFGTDDAHHARLWAWASDFGQIVQAGVEGTGSFGYRLAQFLTGSGVQVFEVNRPNRVTRRRRGKSDPVDAEAAARAVLAGDATATPKDRSGPAGQLRALLVARRSAVKARTQTEQQLRSLILELDDDQRARVDRRRIVELTTACAALAGTDGTSLALRALARRWQHLDQEVRDNDQDVTIIVRRVVPGLLARPGIGPVCAAQLLVTAGDNPDRLRSQGAFAALCGASPVEHSSGKTQRHRLNRGGDRAANSALWVIANNRLMHDPQTRAYAARRTATGASRKEILRLLKRYVARQVFAEIRHALSPPAALPDSPLT

SEQ ID NO: 184541 - protein, 531 aa, unidentified
MGVELASAAVPDTVATAIHPMARRAPGSSPQPAVNNCAAPKMNRCEKPLRPRYHPAGRIAPDRTRSYVPRRAKATRSLPVGLAAPVPKSERTTAHEAPGIRLTADRATMHRRKTKMKEWKEITHYAGFDWARNHHVVVIVNQQGQIVADFEFEHSVEGWKSFGEKTAGFANLAVAIETSQGAAVDQMLQRDYTVYPVNPAAAASYRQRKAPSGTKTDHIDGWSLADALRVDGHGWKALQPADELSTQLRLLCRDEVALIAQRTLLVNQLQQALVEYYPAALEAFEDWVSAATWDFVLEFPTPEALVKAGKRRWEKFLHTHRLWRPETVEKRLAVFSQADQFKASAPVTKAKSQLALSLCKLLRTLQQQLDQYREQIEALFKNHPDHDLFGSLPGAKKMLAPRLLAAIGSDPGRYGTFQVLQSYAGTAPISFESGKIHKARIRWNCDKFMRHTVHLWADCFHRVSPWGQAYYRKKRQEGMTHACALRCLGQRLLKILFRMISDKKPYDAELHARNQKKHGSWVLALIEKPVV

SEQ ID NO: 184542 - protein, 298 aa, unidentified
MEFEFFIGIDVSKNELDFSVQQGKCFLFHREIINEPEAIKALLKEISKLKGFSLSNAVFCMEHTGIYSNHLLSCLYQKNANICLEAATQIKKSLGNLRGKNDKVDSMRIAAYAYKNRDELRLWAPRREQVQQLAHLASTRSRLIKAKKMLKTPLKEYGSFVKKNAVKQNTDVCNKALNGIETSLENVEKEIMTIINTDPELKRLFTLVTSVVGIGKVIAVQLIVTTNEFKDIDNAKSYACYAGLVPYLEESGIFKGKGRISHIANKKIKTLLHMAALVAIQYNDELRLYYERKVNIEK

SEQ ID NO: 184543 - protein, 344 aa, unidentified
MNYYAGIDVSLESSSVCIVDATGEIVKEARVESHPDALVKFFKASGLPLTVIGLEAGPLSQWLYAGLTKAGFVTTLMETRHVNAALSATTVKTDRRDARGISQLLRMGWFRPVHAKSTGSQEVRALLVARKQIQHKLKDIELSLRGILRGFGLKVGKVTEKTFEARIRELVTSHPMLEEIAEAMLAARAALLEQFKKLHKAVLKIVRHDEVCRRLMTTPSVGAIVAITYKSALDDPGRIKKSRNAGPLFGLTPKRYQSGETDITGGISRVGDEMVRTALYEAANVLLSRVTRFSALKRWGMEVAKRRGLKRAKVAVARKLAVILHRMWIDGSTFRWTKTEAAYA

SEQ ID NO: 184544 - protein, 351 aa, unidentified
MLYAGFDLSRKRLDYCLLDQEGLEVETGASPPDVDGLDALTRRLSRHGHPIRGAIESMTGARFVHDHLEQAGFAVEIADAAKVKGLAPLACKTDKIDAWVLAELARRDLVPAIWLPDPTVRAERERARFRLHLVRKRTSLKNRVHATLMTHGRACPLSDLFGVGGRELLARLALPEPWAGTVAASLRLIDELGREVQAIERELQALGAEHRYVPLLITVPGIAWVLGYTIAAEIGDITRFASPRKLCGYTGLCPRVYQSGESDRRGPLSKMGPRYLRWALIEATSHACRHPLYRERYERTRRRLGRQRGPKVAQVDLARRLSEAIWHMLTHNRPFAPAGAASGLASEKALG

SEQ ID NO: 184545 - protein, 419 aa, unidentified
MSFKILKNNCCGLDVHKTWIFACIGITDSHSRTEYKQARFSSFTKGLQELCDWLAKYNCTDVCMESTGKYWIPVFNILEKNNIWVTLSHPKYTKPQKGNKTDRKDAKWICDLYMCGMVKPSFIPPSDIRELRDLVRYRYKLTCMITGEKNRAQNCLTVSNLKLDDVFSDVFGKSSRSITEQILQHPGEKFDVAPFIDRRCKTTIEEIQAAVDGAISKEQAVKLRQCLNHIDELNKHISEIEREIFRLSDKYETALNLLRTVPGFDKNPLTAIQVLSEIGGDMSVFPTAKHLVSWAGCCPRNDQSNQKIKSTRISRAGSYFKPVLVQVANALIKSKKHPEFTNRYKRIKTRRGHKKAIIAICRMILTAIWHILSDLKPYTPEGFLESRPVKEEKILSTSQALNLLRQRGYVIKDEPLTAF

SEQ ID NO: 184546 - protein, 339 aa, unidentified
MQLLYAGIDLHSTNNYVGIIDEEDRRVLEKKLPNDLDTIFHYLNPFKEDLVGVVVESTFNWYWLVDGLMKNDYTVHLANPSAIKQYEGLKYTDDKWDSFWLAHMLRLNILPEGYIYPMQERPLRDLLRKRLKLVREKTAHILSLKSMFSRNLGITITSNNIEALKKEYVEGKLTQPHLIMAAQASICTMQTLMKHIQIIEKEVMSKISLRRPFQCLLSVPGIGNILALTIMLEVGDISRFKAVGQYSSYCRCVTTKRLSNGKRKGKGNVKNGNKHLAWAYTEAANFAKRHCPYARSFYQRKAKQGGTVLAVKALSNKLSRATYYIMRDHIEYDPKMLFG

SEQ ID NO: 184547 - protein, 460 aa, unidentified
MSLKGLVSQNNQEDVVVQGSGLSRGDKRRNGQLARLRELVPVDNAILGIDLADTKQAVVVTDHDSRVLARGRVKAKAWELGPVLDWARQVAHARGFTDVTVGCEPTGHRWRVLDQLAAQQNMALVCVQPLLVGQARQREDYTSDKRDDKDAVLIARLVSQLNCYAPERAEETWAQLRQLGARREELITQATRCVQQLRDLLECAWPAVLDAAASPFDSTNWCAALAVVLERCDGDPRRLARRGRDRFSGAVRRELPRWGGQRLWRPIVGAVFSALSDPAGVLAQRRGALQRARWVLDDWRLVKIRRAEVETHMVTLLDELGLTELVTSIPGVSAVGAAAILAETGDPTRFDSPRAMVKHAGLCPRENTSGTYTGRSRISGRGRPRLRAAAWRAVWGALPTNPVMATRYRHLTTRKANPLKDGQARAALAAALLRWIHVIVTQHVTWDAALAGAGALAAAA

SEQ ID NO: 184548 - protein, 380 aa, unidentified
MPDVSSTAPAQVDRWVALDVHKNSLVAGVLSASGGAPEVIRMENTERAVRRLVDRLGGPERLAVAYEAGPCGYDLFRLLARIGVACDVIAPSLVPVRPGDRVKTDRRDAKKLVRLYRAGELSFVEPPSPEHEGLRDLMRAREDIRGARTAARHRVQKALLRHGHIYREGKKAWTKQHAAWLHRQRLADPLAERALAHMRSHLEAIDAQLATIDAELARVATSEPWCDPVRWLASFRGIGAITALGLIAEIGDFRRFAHPRELMSYLGLTPTEYSSGDQQHRGHITKCGNRHARRLLVEAAWHYQHAPRRSERARALEPHVPEAVRIRAWQAQVRLNHRRRALIDHGKRSTVANVAIARELCGFLWAAMTHQPLREEELAA

SEQ ID NO: 184549 - protein, 390 aa, unidentified
MILVGIDVAKDKHDCYIINSDGNFPEEVFSILNNREGYETLYKRICSLAVDFTKVKVGLESTGHYSSNLLAFLLDKHLTAYVINPLRVNLFHKGQSLRRTKTDKIDSRNIAHLLMTDSSLKPYSLSSYHMEELKSLTRYRGTKVRERTKLKTSIARLVTILFPELEQLVSSIHIHSIYAMLEKFPGSAYIAATHLTRLTALLLKASRGRFGRETAIRIRDTARQSIGAVSPAKSMELQHTIAHLRVYDQEIGKIESEIEKIVDDVNSPITSVPGIGMQMGAVILAEIGSFRRFDSPDKILAYAGMSPSMYQSGKLTGSYSRMEKRGSRYLRYALFNVTRYVCHYDPGFTAYLSKKRKEGKHYYVAISHAVKRLVRVLYAMEISGNRYKTA

SEQ ID NO: 184550 - protein, 449 aa, unidentified
MGNGSGVSRGDRNRNARLERLRALVPVTNAIVGIDLAGSKQMVVVTDHDSKVIARRTFRCRAWDLGAALDWAAGRAAVAGWAGVTVSCEPTGHRWRVLGQLAADRSMPFVCVQPLVTSWARRTEDLTCDKTDEKDAVLIARLTAQLRCYVPEPADETWGRLRHLGARREQLITEAGSQVQQMRDLLECAWPAALDTARQPFRSGTWIAALSVIAGRDGGDLARTRRLGAARFERAVRREITRRGGQKPCLRIVRGLFTALADPAGVTAHRPGALERVQLLLEDWQHTQDRLAETERRMTAVLGELGLTGLVTSMTGLSAIGAAAILAETGDPRRFATGRAVVKHAGLAPREKLSGAFTGRTRLTGQGRPGLRLAAWRAVWGAQRANPVYRARYQHLTGREQNKLTPTQAQTIIAAAILRQLHAIISTGQGWDPVTAAHGTQRDNRALAA

SEQ ID NO: 184551 - protein, 449 aa, unidentified
MREPQEIPDEEHEQILERVAAVDVAKASGMVCTRAPHPSRPGKRLTRVWEVDATTNAVLELGEHLAAERIEKVTLEATSDYWRIWFYLLEAAGLEVQLVRARDVKQAPGRPKTDKLDAVWLAKLTERGMLRPSFVPPAQIRALRDYTRLRTDLTRERTRYYSRLEKLLEDALIKVSAVASTLTTLSARDMIEALIAGERDPQVLAGLARGRMRVKHAALVQALTGRFDAHHGELARMLLDQIDALTAQIGTLTIRIEELIAAIPAAQGVDPDGTTGPSAGREPGSPVLPAVDRLDEITGIGRDTAQEILAEVGLDMTSFPTPGHLVSWAKVSPQTIQSGARSRPGKTGKGNPYLKGALGEAAAAAARTDTFLGERYRRIVRRRGKLKALVAVARSILVIIWHLLTNRAARYRDLGPGYYTSRVDKNRKTRNHVRQLEALGYTVTLAPAA

SEQ ID NO: 184552 - protein, 408 aa, unidentified
MDVVYPACCGVDVHKQTVVACLLRTDAGSRRTKEVRTFGTTTEALLALGDWLESHGVTHVAMESTGVYWKPVWHILEGAFELVLGKARQMRNVPGRKSDQSDASWFSDLQAHGLIRNSFVPPQPIQDLRDLTRTRKQLVREKAQHVQRIQKVLEDANIKLTSVLSDIQGLSGRTILDAITNGITDPHQLAKLAHPQVKAPREKIVEALEGKVTEHHRFMLRLHLQQMDALQRAIGALESRIEEKLSSFREIAELISTIPGLAGTVTATIIAETGGDMSAFPSDDHLVSWAGLSPGLNETGGKRKSARTRPQRWLKTAMVQAAQAAVKKKDSYLRSKYHRIKARRGSKKAILAIAAALLRATYHVVTTRVPYRDLGPDYFDARDRQRSMRRLVRRLEALGYQVDLKAAA

SEQ ID NO: 184553 - protein, 407 aa, unidentified
MSTAPATPTRFIGLDLHKHYLIALAVNPAGEQTGGPWRVPLDRLDDWARQQLTPLDAVAVEITTNTYTVYDALVPRVHSVTVVHPPHLALITRVPVKTDNRAALVLAQFLAKGMLPALWIPPQPVREQRATVAQRAKFTRLSTQAQNRLHSVLHRHHLPLPESGSPFSTANRAWWQQLPVSVSEQARVQADLATLDFAEQQISRLTAALATDSAQDDRVPLLVQLPGFSVVTSLTVLAAIGDITRFADAKHLVGYAGLGASVHDSGQMHRTGRITKAGRRDLRTALVQAAQTAANTHPHWQTELARLEPRLGRNKAIVAIARKLLVAVWHVLTEQRADRFADPVRVARKLLNYTYQLGQANRRPGLSTAAYVREQLDRLHLGADLESIAHGKRAVPLPPSQQSTPGA

SEQ ID NO: 184554 - protein, 384 aa, unidentified
MKTNSDTTPKLYIGLDVHKAETVIALLESARDAEPRHYGRINTSQHALERVIRRIVKQQDLRLCDLHVCYEASGCGFWIARRLIQMGVRCDVIAPSLIPTRSGDRVKTDKRDAEKLAKSLRSNDLVAVNIPDSVDEAIRDLCRARTDAVDDLRRAKTRLLALLRRLGYHYDGKTHWTQGHQNYLRDLKLPDAAHNRVLEDNIATINFHEERINKLEDEMLHLLDDWQRKPLVKAMMAFKGFKLVAAMVTVSEIGTFSRFEHPKKLMAFLGLVPSEKSSGKSRRQGSISKCGNPHARWILVEQATHYRVPPKVSPQLSERQKDAPRWLREMSWKTQTRLSHRFSVLRKRQVHHNKIKVTIARELVGFLWELGTRIESQQNKMIII

SEQ ID NO: 184555 - protein, 403 aa, unidentified
MNAAGIDVSSRKSTVSVLRPFGEVVAKPFSVGHTGSELKALADYLKCLDGETRVVMEHTGRYYEPVARFLHEEGIFVSAVNPKLIKDYGNNTLRKVKTDKADARKIARYGLDNWVELRQYTPMDTIRMQLKTLNRQQGLYSKTKTMMKNNLIALLDQTYPGANSLFDSPVREDGSQKWVDFAMTFWHVDCVRDMSLAAFTERYRKWCKRHGYNFSQSRAIEIHMDAQNLIAMLPRNPLTKTMIRQAVDALNAVSKSLEQLKAEMRTLAAQLPEYPVVMAMRGVGDSLGPQILAELGDVTRFTHRNAITAFAGVDPGADQSGAHEAKSTRASKSGPPELRKALFLVMDCLLKTQPADDPVYRFMDKKRAEGKPYLVYMTAGANKFLRIYYGRVKEYLASLENSD

SEQ ID NO: 184556 - protein, 448 aa, unidentified
MKAEPEEIPDTEHELVLERVCAVDVAKDSGKVCVRVSSRAGRRVSKVWDVAARSGAVAELAEQLVDQGIEKVTVESTSDYWRIWFYLLEAAGLSVQLVNARDVKNVPGRPKSDKLDSVWLAKLTEKGMLRPSFVPPAPVRELRDYTRLRIDLTRERTRYWQRLEKLLEDALIKVSAVASTLDTLSVRDMLEALIAGERDPRRLADLARGRMRVKHGALVEALTGRFDDHHAELTRMLLDQIDALGTQIATLTARIDELLTAMEPHTRADEPDTPGGAGTVADGASESTTIERLDEIPGISPGLAQIILAEIGLDMSRFPTAAHLVSWAKLCPRTIQSGAIQRGGKTGKGNPYLKGALGEAAAAAAKTNTFLGERYRRIVKRRGKLKALVAVARSILVIIWNMLNDPTAWFRDLGADYHATRINTERRTRNYVTQLMAMGYRVTLEPAA

SEQ ID NO: 184557 - protein, 352 aa, unidentified
MARFIGFDAHKSYAYVVELREGKRQDYRVEIPGGLERFKERLDSTVQLVLEASTNSFRLADELRPHVGRLVVSDPAQTRGASSGAASTDRSAAEALAKLLASDFIREVWTPPQKIRSLRSLVELRVKLARMRVGATNRLRALSRQELVPDGKLVEEELKSSIPQDPTMQNYCSSLFRLSRSFQAESDALDAIFHEWCRTSKEARLLMSIPGVGPLVAACIVAQVGDIKRFGSPGKLCAYAGLVPRVHSSGQSYRSGGITKSGRRSLRWAMGLAAMSASRVDESLKQFKEKLSERRPKAVAMTACARKILVSVWHVWSRGVVYKGGEERHLLKLKRLDRKKRPKKEGQKADAP

SEQ ID NO: 184558 - protein, 345 aa, unidentified
MKKVMAGIDLHSNNVVIGIMDTDGKRVTSAKLPCELKEIAKFLAPFKKRLEQVAVESTYNWYWLVDGLQELKYPVVLANPAAMQQYSGIKHADDTNDAFFLAELLRLKILPTGQIYDAQLRPVRDLLRRRMTLVHQRTALMLSFKSLYTRTTGQEMTLSQLKELEIKEAQELYDHPANQIIAGRQIKHIEQLTESINKIERVVMASARELPAYGKLTTLPGIGIILGMTITREVGSIERFAEAGHFASYCRTVQAQRTSNSKKKGENNSKCGNKYLAWAFIEAANFARRYDPQCRKWYDRKAAKTSKVIATKALACKLAKAAWFLMSEGSDYDAQRMFGQPATVK

SEQ ID NO: 184559 - protein, 356 aa, unidentified
MKTYRLQEHVVKGKEIFVGLEDSKRTWKLAVRSEKMVIHQVSMEAKYPVLIGYLRNKFPECTIHLMYEAGFKGFNLYDQLTDDGIDCVVIPPHVVTEPKVNRVKTDKRDARRLAKVLENHDFKDSCHVPDKERREDRQVSRTLIAVQKDIIRTRNRIRKLLQFHGIEVPFPDRWGRGEFRALKKLELPEPLRISLAIFLAQLEELWAHQFSLRAALRKLCRKERYHKAFTIARSLPGIGWFTAIRLVLELGEDLSRFTSGKKIASFVGLTSSEYSTGETERKGRITGMGSGFIRATLIENSWTAIRKDPVLLAKFTRVWHASGSKKKAIVAVARVLIVRFRACVMSGTPYVIGVAA

SEQ ID NO: 184560 - protein, 342 aa, unidentified
MTIVAGFDVHRAQITFDALDTDTGELRRGRIDATPAAVESWVERFAGHEVHVALEACTGWLFASRALERAGAVAHLAEPVETHALRGRKRRAKTDREDARWLRQLLGEGRLPESWMPPEHVREWRSRSRLRKALLDERTRWLQRIRATLFHHGVDGAPERLRTGDGREFLEKLELPADALERIEIALEMVDSLERQLRPLEAELRKLARRQRGCRALMDLYGMGELTSLVTLTELGDVQRLSASRKAVRMAGIDIGVHRSDRRTRVGRLNRQGSPQLRWALYEAAQSACRPSSPDRKDYLALKARGLSHTRASLTIARKLARRSFHVLRALGPAALEPIPTA

SEQ ID NO: 184561 - protein, 451 aa, unidentified
MFSERTSVGLDVHARTTMAWALDGETGEVFSERLDAETHKVLAWVATLPQPAAVAYEAGPTGFVLARALDSIGLRCMVAAPSKMERPAGDRIKTDKRDAQRLAKLLRMDELPVVRVPTLAEEAARDLVRGRDDVRRDLARARNRISKLLLRQGRVWRGGSGWTYIHHEWLRKQRFDDADTEFAYDNGYEEVLALETMRDRFDQRITDAAARPEWCPVVRRLSCLRGIDTLSALGLAVEVGDWQRFTGATIGAYLGLVPSEHSSGPNRFQGPITKTGNSQARRLLVEASWHHYKPLPRSRRDPAPPDGTCLPAGTATGRPRQPAAPPAVGILPRPEEEHQRRRRRGGPRTRGLVLEFGGDGLTLRGPQNGRREAGRASARDDARGPYEPPLRRATLDCRPEAPSPTNIRSCGNQPADIRLTARRRTTRPRPPAGPTEPPPGPHRRAHTLLPT

SEQ ID NO: 184562 - protein, 407 aa, unidentified
MIFVGDDWAEDHHDVWVMDADGARLAFQRFDEGVEGLSGFHGLVADHVSDPSEVVVGIETDRGLWVHALIGAGYQVYAINPKAAARYRDRHSVSGAKSDRGDAKVLADLVRTDRHIHRPVAGDTPGVEGVKVVARAHQGLIWEKRRHANRLRSSLREYYPAALETFQSLTDRDTLAVLAIAGSPSQGSRLTIPQIRAALKKGGRRRNLDRRAAQIQEGLHRKQLGTSNAVEAAFAVTTRSTVAIITAINDEITRLEETLETSFGEHPDADIYLSMPGLGVVLGARVLGEFGDDPNRYTSTKSRRNYAATSPLTVASGKHKTVTARYVRNNHLYNATIRWAFSSITTSNGCRAFYDERRAKGDRHYQALRALANRLVGILHGCLKHQTIYNEDTAWAHRQPATETLAA

SEQ ID NO: 184563 - protein, 383 aa, unidentified
MNYKQNEKINQVKESTLVVGIDIGSTTQYARAFDWRGIELGKVLPFSNSREGFESLKAWMQHLQDKYKKLDAIVGIEPTGHYWFDLGAYLEDEGILLVMVNPYAVKQTKELDDNSQSKNDRKDPKVIAKLVTEGRYSAPYTPDGVYADLRIMVANRKRLIREMTQIKNRFARWFAIYFPEYTDVFGDYEAQSSMLLLKKVCTPEAIVELGAEKINQIWRDAKLRAVGMKRATTLCETAKRSIGLKKGSSAARYEMKLLLEDYEYKKAQLDAVMEEIEKLCRKIPESEQMLAIKGIGVITVAGFLAEVGDVRRFESPRQIQKLAGLSLRENSSGKHKGQTTISKRGRSKLRAVLFNAAIPLIAKNPEFKSYIFSFSFSTRCISR

SEQ ID NO: 184564 - protein, 347 aa, unidentified
MSEHTPTTMGIDISDQWSTVCVLDTDGEVMEESRFRSTRAGLGRYLEHRAPMRVVLEVGTHSPWMSRQIEELGHEVFVANPRQLRLIYQSDRKCDAVDAEALARLGRVDPKLLRPIRHRAADTQLARAQLRVRDMLVAARTRFILSVRGMAKSMGEVIPRASAESFHVGVPGAVSAPVWQVVEPLVEAVGGLTAKIKGCDAALEELSLTRYPETAALRQSSGVGPITALAFVTTVEDPHRFARNRSVGAYLGLCPRRDQSGASDPSLRITKAGDPYLRRLLVGCAHYILGPFGPDSDLRRWGLAYAGRGTNSKKRAVVAVARKLAVLLLSLWKTGETYEPTRHAAAA

SEQ ID NO: 184565 - protein, 423 aa, unidentified
MEVMHERVAGLDVHKETVVACVRIVAGGKVLRECRTFETTTAGLEALLAWLTESRCTHVAMEATGVYWKPVWNILSDGKFELILANAAHIKNVPGRKTDVNDATWIADLVAFGLIKASFVPGETIQELRSLMRTRKQLVREQTRHIQRMQKTLEEANIKLDSVISEIMGLSGRRMIEAMIAGVRDPRKLAELASKRIKASPKELYDALHGRLTEHHRFLLRLHLGQYDALASTIGEIDGQVDVAIAKIDEEAATGRGSFRDLTALVDTVPGIASLAATSILSETGTDMSRFASDGHLVSWAGLSPGQNESAGKRKSSRLRKGAPWLKTMLVQCAWAAIKKKDSYYKAQFNRLKARRGPKKAICAVAASMLTAIYHMLKDGVEYNDLGAGHFDRRPAGQKAKHLVAQLAKLGFKAELRPLAEAA

SEQ ID NO: 184566 - protein, 408 aa, unidentified
MNAVGIDVSKGKSMVAALRPMGEVALLPQEFLHTEVGLEQMAYAIIALGENTRVIMEATGRYHEPVAAALHEYGIYVCVLNPLFIKQSGGGSIRKVKTDKADAMKIAKYGLDNWVDLREYTPMDTVRQQLKLCSRQYNLYMKTVVSLQNNLISLTDKTFPGVNELFSSPERADGHQKWVDFVMTFWHCDCICRVSEKAFTDRYQKWCKRKGYHFSTEKALDLYAGSCGHFTTLPKNDNTKLLITTAAQQLLAGKTTLAALRTEMTRLAKQLPEYDTVRAMYGVGETTAAQLMAEIGDVRRFPRRSSIVGFAGVDPAVDQSGKHSAKSVPTTKRGSPHLRKTLYQIVCTYLKRSPADEPVYQFLDKKRAEGKPYFVYMTAAQNKFLRIYYARVKECLEDFDAQQNSAQS

SEQ ID NO: 184567 - protein, 325 aa, unidentified
MKTKFARVIGVDVASLQLDINDSAGKIKSSLPNSVDAVNKHLIQMIDDRPSTLVVCEATGSYEHVLVDACHLAGIAICIANPRQVRDFAKGHGFLEKTDTIDALMIRRFGEDVDVHLTPPRSPQQRAHQALVRRRMQVLELLSQEKNRLPQTHDALALEMVKESIGHLKTQLKRIDEQLSKLLKERAKEDPTVEILQSVPGVGAVTVSTLLSDLPELGKLSRGKIAKLVGVAPLARQSGRVDKKRSARGGRSQVRCVLYMATLVATRHNALIREFYQRLVERGKEKKVALVAAMRKLLTILNDMVRRGQSWQGAKKGAAAAPSLN

SEQ ID NO: 184568 - protein, 412 aa, unidentified
MSYRIAGIDVHKKVLMVVVIDAAGAEEKPERRRFGTMASELRRLSSWLREQGVEEAVMESTAQYWRSVWLELEPHMRLQLAQAFSNRAPRGGKHDFREAERLVRRVIANELILSFVPNGEQRTWRNLTRMKTQLTRDRVRLQNQMECLLEEMRIKLSLVVSDLLGVSGLRILHGLAEGETEVKKLAALGDKRLHCNEEQLVDALTGSPQLMHREMLALQLERLQLIDGQIAKLNRMIAQAMQPYQETVIRLAEVPGLGVDSAQQVIAEVGVQASTFASAGELTSWVGTCPGKEESAEQNHSSRSAKGNKYLRRVLNQAAHAAARKKGSHFQAVFRRLLPRLGYKSAIWAIANRLCRVVWKILHEGVRFIEQGTESDPKVRKQRVRILARALRKLGYNVTITAISPAALESGM

SEQ ID NO: 184569 - protein, 374 aa, unidentified
MRKTTAFVGMDVHAETIAVAVADGRGLVRSVGTIANRPEAVRRLVGKLGDPADLRVCYEAGPTGYVLFWQLTQLGVHCDVVAPSLIPTKAGERIKTDRRDAEKLARSYRSGDLTPVWVPDAKHEALRDLVRAREAAKEDQLRAKHRLGKYLLRYGQRAPDGCRAWTSAWWQWVRAVELPHADQKTTLLDYILEVDHQAQRIERLEGAIDRAIAAAPAQLRTIVDALQALRGVAKVTAVTLATEFGSFTRFERASQVMSYTGLVPSEHSSGAKNRRGAITKTGNSHLRRVLVEAAWHYRHRPRLCQRQKDLQRTLPAKVSAAAWRAQERLHRRYWLLSNKSKPKGKIVTALARELVGFVWAIGTETEQRLASATH

SEQ ID NO: 184570 - protein, 391 aa, unidentified
MLIVGIDIGKRNHEATIIDQKGSIIGKSFSFANSITGFNRLMDALRNTADNDVVFGMEATGHYWLALYTHLRKKGFAVHVINAIQSEALRAMYIRQQKNDSRDSFIIAEVIRFGRFCETAVSTPDLHALRELCRHRFYIVDSVSDIKRKVIALLDQIFPEYENLFTDTFGKTSLELLSEYTTPEEILNVDADKLVETINVASHGRFGPEKASEIQDAARNSFGILLATDTIALLIRQYIEQIRFVEKQIATLDAEIARLLSTFETRLNTITGIGPTLAAVILSEIGDVKRFSSAAKLAAFAGVDPTMKQSGDFSGSRNRMSKRGSPYLRRALWLAATVASFKDPSISAFYQRKRAEGKSHMTTLGHVVRKMVSIIFAVLRDNSPYSPATKN

SEQ ID NO: 184571 - protein, 350 aa, unidentified
MNATTVAVDLAKNVFELALADGRWKIIERARLTRAQFERWFDNRSVGLVVMEACGSAHHWARLIRSRGIEVRLLPAQYVRAYVKRNKTDRADAQALLEATRAGDIRPVAVKSIEQQGLQALHRTRSGWMSTRTRRINTLRGFCREFGLVVPEGAATGLAQIARYLADEHSGLPVLLRPSMRLVLEEIRLMEARIGELERQLSQLAKASPACQVLQSVPGIGLLTSTAMVAAVADPGSFASGRRYSSFLGLTPREYSSGNSRYLGRISKRGDRYIRMLLTHGARSILRAATVARRAGRQIDRLKSWALAVQARTNHNKAACALANKLARIAWAVWVKHEAYRSEPAPTTPL

SEQ ID NO: 184572 - protein, 311 aa, unidentified
MNIGIDVSKEHLDVAVRPSGERFRVTNDEDGFATLRKRLAKLRPERIVLEPTGGYEAGVVRALAAAKMPVVVVNARQVRDFAKAAGRLAKTDQIDADVLAHFGEALKPEIRALPDEAQRELEALVNRRRQLVDMRSAESKRKQTAPAVVHPSIDEVIEFLDRQIDEVDKDLHRLIRSTPSWRESDDLLQTVPGVGPVLSTTLTALVPELGKLNRKQIAALVGVAPYNDDSGKGERTRRTWGGRAPVRAVLYMAATVACRFNPAIRVFHARLTASGKPAKLVLVACMRKLLTLLNAVARNRLPWNPQVAPAG

SEQ ID NO: 184573 - protein, 341 aa, unidentified
MGEYIGLDVSLKETAISVRRDGKRIWRGKCPSDPSLIAEVVRKHAPEPKRVVFETGPLSVWFYHALRAEGLPAICIDARHAKAALDMAPNKTDANDADGLAHLAEVGFYREVRVKGYDSMLVRTLVAARSRLVQITTELSNQIRGLMKTFGLVVPRSKGGTFEAEVQRLLAGQEELARIILPVLEAWRSVRTRASGLGRQLLACARQSAACQQLMSIPGVGAITATSFTAAIEDPANFKTSRSVGAWLGLTTRRYQSGEVDYDGHISRRGDAHLRGLLYEAATVILTRTHADSDLRRWGLMLRERIGFKRAAVAVARKLAVIMHAMLKSGEVFNRAVSAPA

SEQ ID NO: 184574 - protein, 376 aa, unidentified
MGDYSEAFVGLDTSKLRNAVAIADGGRGGEVRFFGEIENTPAATAKLVRKLAGKYKRLTFCYEAGPTGYGLHRQIKDLGFECVVVAPSLIPKRPGDKVKTNRRDALSLAKLLRADELTAVWVPDGHHEAMRDLTRARETAMLDLRTKRQHVSAFLLRLGRPYPESKKTWTKAHVSWIASQKLDHPQQRLVLEEMMLAIRQAQERLARLEQAVAAAVPEWSLAPVVTALMAMRGIDMVSATTLLAEIGDLSRFRTPTELMAYLGLVPSENSTGDTVKRGPITKAGNRRARRMLVECSWSYQHPPRVGQAKQPKVDAAPPAVREIAWKAQCRLYRRYRALIRNGKLKTVAIVAIARELAGFIWAVARAVTTAGVAATA

SEQ ID NO: 184575 - protein, 315 aa, unidentified
MSEPDLFVGIDVSKDQVDVAVGSADPVRSFPNDESGRVNLVKLLRTRNASLIVMEATGGFELPVAAALASAHLPVAIVNPRQVREFARATGELAKTDRIDARILALFAERIRPQARALPDEDTRLLDALLTRRRQLIDMITAESNRLGFAPKALHPGLQKHIRWLQRELEGVDRDLDESIQHSPLWRARDDLLQSVPSVGPVTSRTMIGAVPELGTLNRRAITKLIGLAPFAHDSGKFRGKRRIRGGRADVRKVLYMSALVATRHNPVIRAFYQRLLAAGKPKKVAITACMRKLLTIMNAIVRSGSPWTNTGALT

SEQ ID NO: 184576 - protein, 323 aa, unidentified
MPSVVGIDIAKHTFDIATCQANGKYRTKAKLANREAGFETLHQWLLKHSEPQAWVLMEATGVYHEALAEWLHDKGYRVCALNPAQVAYYARSQLQRVKTDKVDAKLIAAYGERHQDELRAWQPESRALRRLRALVRRLEDLREIQQMERNRLEVADTSVYDSIQSVLQHVDRQIAETIRAIKQHIDDDPDLRGQRDLLTSIDGIGDKTAALLLAELGDPLRFAGSRALTAFAGLNPQLQESGLYRGQTRISRTGSSRLRAGLYMPAVCSLKRNPAISALRDRLKAKGKSGKQIVCAAMRKLLSIAYGVLKSGQPFDPRLAIAH

SEQ ID NO: 184577 - protein, 389 aa, unidentified
MLYLAIDQHKSQLTVNVRNEQGDVVQKSQVSTNRNDIDEFFAALVKKARKHRGYMAIVEVCGFNDWLLDKLRKTRCSEIVVIQPDNSAVHKTDKRDANALGELLWNNRNRLRGGQRPNGIRRIFPADPQDAQVRQLANFRQHLVRQRTRIINKIKGILNKHNMEQDAPSKLYHTNKFRQWIATVSLPVVDRIEVDMNIESWKLYDKQIVEVEVELVKRSEVKAADVFRLKAIPGISAMGAIILLSRIGDIKRFKNPDSLANYFGLTPGCHNTAGKHRVGGITKRGNATARQVLNFSVNHIVRKDPAMKAWYKKIKSRRGTKTARVAVMRRLATIIWHMLRWGKPYQFRYDPPKKDDLRSSREVLGGMDNKNHSRRKGRPPLKSRNKTRA

SEQ ID NO: 184578 - protein, 346 aa, unidentified
MLYAGLDLSRKRLDFHLLDADGATIEVGTAPPDVDGLRGLSERLARYSEPVRAAIESMNGARFVHDRLELADWQVEIADAQKVKGLAPLACKTDRIDAWVLAELCRRDLVPAIWLPDPLVRAERERARWRLHLVRHRSSLKQRVHAVLLTHGKPCPVSDLFGVRGRQLLARLGLPEPWQGTIEASLRLIDELDREIGDCERELRRLGADHRYVPLLCTVPGISWVLAYTIAAELGDINRFPTARKLAGYTGLCPRVYQSGERDLRGPLAKQGPRYLRWALVEAATHACTAPVYRDRYQQTKARIGKQRGAKVAQIDLARRLTEAIWHMLTRNQPFAPKGATDPLAA

SEQ ID NO: 184579 - protein, 313 aa, unidentified
MSIIGCDLHSRYQVIALVETETGEMVTRRLEHENGEARAFYTTLPKPSLIGTEATGYTQWFERLVAELGHELWVGDPAEIRARAVRRQKTDTRDAEHLLDLLLTKRFPRVWVPTPEERDVRQLLKHRDKLVRMQTSVRNQLHFLAMSQGVCRKQKLWSARGRAALDGLSLGPWASQRRKELLELLDGLRPRIAELDQAVKAEAERRPEAVELMKHKGVGPVTALAFVLTVGPVERFANSRKLVSYLGLNPGEDSSGGHQRLGHISKQGNEMLRWLLVEAGHSAAQKPESRNPNPDRPAHEAGGRESSGQRDRA

SEQ ID NO: 184580 - protein, 404 aa, unidentified
MELVYPCCAGLDVHQASVVACLNRGGGKEIRSFGTTRGELAEMCAWLRAGGCTLVAMESTGVYWHPVYFALEGQFELIVGNAQHIKNVPGRKTDVKDCDWISDLARHGLIAKSFVPPKPIRELRELTRYRRKLVQVQAAERNRLIKLLEGADIKLAGLIADVFGVSGRAILHALIEGEETPDEMAQHARGRMRRKIKALARALDGRLEEHHRFLMRLQFARIEAAECDLERLDERLSEKLAPYAEPLHRLMRIPGVDWIIAATIIAEIGIDMSAFGSAARLASWTAICPGNHQSGGKQRRGKIRKGNMHLKAALVTAAIAAAKTRGGYLAEKSRRLRARRGEMRAHVAIAHKILIAAYHVLAGAEYQELGADYLDGLNKKRTVSHLTRRLQAMGYDVQITPKAA

SEQ ID NO: 184581 - protein, 382 aa, unidentified
MRTVSGLDVHKDSIFMCILDEQGKIIEEKFGVSTREINRLREVMKSHYVTEVCMESTGIYWMPIWRLLEDDFYLRLVNPQFLKQLPGRKSDVKDAQWIATVVLKGLVRDSFVPDGNIQSLRQYGRRINEINKDLVRSEQRIDMILQRCNIRLSNCVSRTKNKSYRKVVEALIAGESSADVLVNLIHGRTVNRHGRSAVHDALEGFIRQSDRDLLKQYTQMLDALEIQKQECIDSMVQMCQELYPKTFSFLLSLPGIKLISAAIIISEIGDNMKLFATAAALVSWAGLRPRNDESAGKIKSRKITHGNKYLRKALMECAWGAARTKGSVFYSRFWHLRGMKKHHNAVIVAIARQLLTIIWTLLTKQENFDTQYHLKTYTCSYN

SEQ ID NO: 184582 - protein, 365 aa, unidentified
MREASVRNERTSVGLDVHARSVAGCAIDGWTGEIHRRRLTPDPNEILAWVGSLPGPARVVYEAGPTGFGLARFLLAAGVECLVAAPSKLQRPSGDRVKTDARDALHLARLLKLGEVVAVTIPSVAQEAARDLVRAREDARADLMRARHRLSKLLLRQGIVYSGGQAWTGKHDGWLRAQSFPEPGRQLAFDSAYEAMVLTGDRRDRLDTAITTMALASEFTDVVHKLSCLRGVSTLTAFALAVEIGDWHRFTGSTIGAYLGLVPTESSSGGSRSQGSITKTGNSHARRLLVEAAWHHRKTYRVPGAVMRARWDQAPAAARVRGHEGNRRLHQRWLAFNDRRKRPVIANVAIARELAGWCWSLAVLE

SEQ ID NO: 184583 - protein, 362 aa, unidentified
MAKVRSWAGLDVHARSVFAVTVDGDSGEMRMRRLPAATSEVVKFCCSLPGPTRVAYEAGPTGYGLARALHGAGIGCVVAAPGKIERPAQDRVKTDQRDAERVLRLLMIDGLHAVRVPSSHEEALRDLVRAREDLRGDLMRARQRLSKLLLRHDVRYEDTASAWTARHRAWLTGLDLGERGAQATLLDYLGAIDALVIRRDALETSIAELVGDSPWADTVARLRCLRGIDTLSAVGLCAEVGDFDRFDRAGQLMSYFGLVPSENSSGETRRQGAITKTGSRHARRLLVEAAWHYRKTPARGHALKRRQNGQSAHVLAIAWQAQQRLHRVWRRLDGERGKRRTIVAVAVARELAGFCWALARAD

SEQ ID NO: 184584 - protein, 373 aa, unidentified
MNYSTVYVGMDVHKESFSLCCYTNEKEQAEYPQKINAHYSKVINYLEAMRFHYGDDVLFICGYEAGCLGFTLYHELTAHNVKCVILAPTSMPVPGGKKRVKTDKRDAAMIARCLAHHDYSPVHIPTQKDEQVKEFIRMRDDHRLALKKIKQQILSFCLRHGCHYNGTQNHWTQTHLSWLRTLRVEELHQEILEEYLLTYDYLTAKLGRIEQRIEELASEEEYRENVHKLTCFLGIKTQTALSVITETGDFRRFPDACHYAAFLGLTPGEDSSGGDQNQLGITKAGNRHVRMLLVEAAQSFARGKIGYKSSVLAARQEGNSPTVIEYADKANERLRRKYYRMTLKNGKKSNVAKTAVARELACFIWGMMTEHYA

SEQ ID NO: 184585 - protein, 420 aa, unidentified
MDRRAESGSERTTFVGFDWASDHHDVVVVDGEGSIIEDFRFEDSADGWKSLRKKLSPYPNVAAAIETSSGATVERLLEAGCAVYPVNPHAAKRYRERKAPSGTKTDRFDAWSLADALRMDGRTWRPLKPNDPLTAELRLLCRDEIALIEQRTALICQLRAALGEYYPTALEAFEDWTLPSAWAFVEAFPTPDALLKAGKRKWEKFLHTHKLYRPDTYEKRLSLFVQAQTFCGSAPTTQAKSMLAVAVAAQLRVLESHLDKFRGRIRELFAQHPDHELFGSLPGAGEKLAPRLLAELGDDRERFDSPEALQCYAGTAPVTYQSGQIKKARFRRACQKVLRQTVHLWANLSRTKCPWAEAYYQKKREEGQSHACALRCLGQRWLKILWKMWQARKSYDAELHQRNQVRHGSWVIALMPAPTA

SEQ ID NO: 184586 - protein, 445 aa, unidentified
MHYKRLLALIDSVSSHLSVGLDVGADFTWMSIALPNGSFTGKPFKIVHSDPGSRDLAVAKIKEAQETYSLKSRCFLESTGIYHIPLLCFLRDKGFDCSVINPIITKNSTNINIRKLHNDKFDSKKAALVGLNVSLKTSIIPDDSVVDLRNLVRDYYYFKDLQSAVALKLTAELKVSFPAYAKVFSKITTQSSLKLLSAYPLAKDMLAASKDDIVEIIRSTARFGEAYALRKYNAIIAAAQDAAVFGRALPSNAVRIRLYIDTYQEYQKHLDALLKALHETVDRLQDTLVYDQICLLQSLRGIGFLSAVVLIAEMGDFKLFSSPKKLYAYFGLDPAVKQSGKLNGDKVHMSKRGSSLARRVLHMAALNNVKVAKGSGTPVNPVVYDYYTRKCSGKKKPVAMGAVMHKICNIIFAMLRDNKPFEVIPPEEHCRRFAAEHPDKIRKAA

SEQ ID NO: 184587 - protein, 366 aa, unidentified
MGKSSTAYVGMDVHKESIDIAIADAREARHYGCVGGDAAAVDRVVRKLRAVHRDPVFVYEAGPCGFWLYRRLKAQGLECMVVSPSMTPRNAADRVKTDRRDALKLARLARAGELEPIYVPDARDEAVRDLVRAREDAVAMQRQARQRLQALLLRNEIRYVGKSSWTQAHRRWIAHLKLPDPAQQIAFEEYVAAVEEAGARLERLSRAIAAQLEHWRWRALVQALQALRGVSAIHAVRIVAELGDLARFASARKLMGYLGMIPSEDSSGPRRRQGSITKAGNSSARRAFIEAAWAYAHPARVSWVIARRQSALPRSITDLAWRAQLRLCARFRKLSARGLNRNKIVVAIARELSGFVWAIGQSVKPA

SEQ ID NO: 184588 - protein, 388 aa, unidentified
MLPSIHHAPAEQTEIVGSDLTLYASLELSRATWLVTCLLPQRERMSKFSTPGGDGGALLSLLGRMQARAQQLTGRPIKIVVIQEAGLDGFWVHRLLEANGVESHVVDPASIAVPRRRRRAKTDAIDGETLLRTLLAWKRGEPRVCAMVVPPTPEEEDRRRVCRERAILLRERIRHTNRIKGLLAGQGITGFNPLHKDRRQLLDAARTGDGRPLPNQLKAEILREIELIELLLRQIADVETERDLLVGPKASKTPSPVIVLEQLKGIGPEIASVLYLEGLFRSFGNRRQLAAYAGLAPTPWRSGTVDQEQGISKAGNPRLRSTMIELAWLWQRHQPASTLSRWFHARVGKERGRIRRISIVALARKLLIAVWRFVTEGEVPEGAVLKAA

SEQ ID NO: 184589 - protein, 347 aa, unidentified
MRFYTGQHRYYCGIDLHARTMYLCILEHESGNIVLHRNLRCEPRLFLRIVEPYRDDLVVAAECIFCWYWLADLCMRENIPFVLGHALYMKAIHGGKAKNDRIDSRKIAVLLRGGAIPTAYVYPQGMRATRDLLRRRLFFVRKRSELFSHVRTTFHQLNIPAPAARLLDRRNRVGVAELIPDPIVRASVEADFAMAAGLDVVIRFLEQEIRRQAGGEDPDTLERLQTIPGVGPILSLTLLYELHDVARFPRVQDFLSYARLVKCQKGSAGKILGTSGAKIGNAHLKWAFSEAAVGFLQKNPRGQKLIHRLRSKHGKGKALSILAARLGRASYYMLRRSTPFDMDRFMN

SEQ ID NO: 184590 - protein, 419 aa, unidentified
MTETINWESITHYAGFDWAKDHHDVVVVDQQGKIVKDLTFEHTAEGWAKWKELVAAYPHLAVAIETNQGAAIEQLLESGVVVYPVNPKSAERYRDRKAPSGTKTDFLDAWSLADALRVDGHGWRALKPLDPLIQELRLLCRDEVDLIVKRTEMVNQLQAALHEYYPAALQAFEDWTATPSWNFVQQFPTPQLLHQAGRRKWEKFLHVHRLYRPELNEKRLAIFAKAHEFCGPPAVTRAKSRLALALVKLLHALENQLEDYRKEIRRLFNEHPDHELFGSLPGAGEKLAPRLLSELGSDRSLFDSAQALQCYVGTAPVSFESGQVRKVYVRFMCNKAFRHAVHLWADLSRKFCSWAQVYYQQLRAKGKTHATALRCLGQRWLKILWKMWQTKTCYSADFHMANQLKHGSWVLSVQPGKSK

SEQ ID NO: 184591 - protein, 347 aa, unidentified
MCAPTCRGRIVQGWACFRSTFIPSGGAAISKQVHIGIDVSSTDLIVATSTDSEVTPYSNDADGIMALVEYAASVKPSGVVLEATGGYETAVAVELQLAGLPVSLVNPRQVRNFARATGRSAKTDVIDAHVLAQFAAVIQPPVRPLPDEETRELRGLVDRRHQVLQMVTSERNRLRTASKRVRPQILRHIRWLKKQVEDLDNNIDKMIRQSPMWRARDELVQSVPGVGPVLSSMLLTHLPELGSLNRGQVAALVGVAPLNRDSGTYRGKRSVWGGRPTIRAALYMATLSASRYNAVIRAFYQRLLAAGKLPKVALTACMRKLLLILNIMVKRNTRWGPPNMQTTALLV

SEQ ID NO: 184592 - protein, 360 aa, unidentified
MVVVEQPSEGAPSMGKSITDLSSVTTVGLDLAKHVFQVHGVDASGRMIVARALRRKDVLAFFAQLPKCLVGMEACGSAHHWARELIKLGHDARMMPPAYVKPYVRRQKNDAADAAGICEAVTRPSMRFVGVRTLENQAALMHHKVREMLVAQRTQLINALRGHLAEIGVIAAQGLKNARDLARVILAEGDETIPACARAALAPLVRQLHVLDQEIACSDRTIAAMARDDEMARRLMTIPGLGPVTASAMATSVQDVSAFSGPREFAAFLGLTPRQNSSGGKERLGRVSKMGNRYLRKLLVVGAHAVLYHRKPHDDAPRSWAKKLMQTKPFKLVAVALANKMARIAFAIMRGKTTYSAAPA

SEQ ID NO: 184593 - protein, 337 aa, unidentified
MGSYVGVDLHRQRSVVVVLNEDGERVSWSRIDNTPANLAREVTSAGVDVDVAMEATWGWYWAADVIAETGVRLHLAHPLAIAGYANRRVKNDVADATLLADLLRMGRLPEAWISTPAVRELREEVRYRHKLVRLQTGLKCQVHQVLGKEGAIPATKGIWWTGGQAWLDQLELGDAYMNRIGSLRDLIELNGREIRQADARIHRRLRGDPGYEAIQQIAGVGCVLAAVFVAEIGDVHRFADPRRLCSWAGLTPRLRESDSHSHRGHITKQGSRLLRWAAIEAVSGAACDRRCNSIKARVGARRGHNIGRVAAARHLLTLVYYGLRDGEIRCLATADVA

SEQ ID NO: 184594 - protein, 412 aa, unidentified
METIFERVGALDVHKAQVTACVRVPDEAGRRVPHLAEFQTTVQGLMALHDWLAAHRVTHVAMEATGVYWQPVWHILEEDFELTLCNARHVKNVPGRKTDVCDAQWLCQLMEAGLLRGSFVPPKPQRRLRALTRYRKTQIAERKRETNRLHKALEDTGIKLDCVASDILGKSGRAMLDALVAGTTDPEVLANLAQGKLRAKMPALRQALQGRFEAHHALIIGAILEHLDFLEQQIGKLSEAIEQQLGSCGRAAVALASTITGVAARTAEVMVAEIGTDMAVFPSAGHLASWAGRCPGNDESAGKRRSGRTRKGSKWLGIALQEAALAAVRSKNTYLAAQYQRLKPRIGHGRALGAVKHSMLIAYWHMFTNGEVYRDPGGDYFQRRDPAKATKRLVAKLQALGHTVTLQPQAAT

SEQ ID NO: 184595 - protein, 346 aa, unidentified
MLYAGLDLSRKRLDVHVLREDGTTALVTAVSPDTDALRSLARRVAVEGEPVRATIESMNGARFVHDSLEFAGWEVLIADAQRVRGLAPLAAKTDKIDARVLAELTRRALVPEIWLPTPEVRAERERARFRLHLVRHRTALKNRIHAILIAFGHPCPMTDLFGVAGRELIDRLQLPEPWQTNLVESLALVDDLTARVDALEVELKELGADHPSMRLLMTVPGVGWVLAYTIASEIGDVRRFAGPKKLAGYTGLCPLVRQSGGKDRRGPLAKNGPAYLRWALIEAATHAARDPRYRERYERTKQRLGRQRGAKVARVDLARQLAEAIWYVLTKNEPFHPAGPAMGLVA

SEQ ID NO: 184596 - protein, 453 aa, unidentified
MAKVARKIKTSKGLRLKIVNPDAAGIDVADGEMQVCVPEDRDGENNRRFDSFTCDLHEICAWLKACRITTVAMEATGVYWLNIFLMLQEEGFDVVLANPLQVKNLMDEKTDEADAEWLMLLHSYGMVKPCFQPDNVARRIRNLTRHRSNLIATAGREVQHMQKAMEQMNVKLSTVISDILGKSGQAIIRAIVAGDHDPKSLAQLADGRCRKPKEVIAKSLEGTWDEDLLFILTQSVELYDTCQEKVAACEQEIEKLMMQYAAQVDMDGAGELVRTNKRSNYKNAPDIDTEKYAHALWGVNLMAVPGVAAGSLLQLVGELGHDFASKFDTCSKFCKWCNLSPNNKITGGKLISSRIPRRKNPVGQILRQCANTVKDEKGELGTYFRRMKSRNGHMQAIVATAHKIARIIYTMVKYKREYDPRMVGCDERELLERRVARTQRQLQKLNERLAKAG

SEQ ID NO: 184597 - protein, 315 aa, unidentified
MRDRQPQTALYVGIDVSKATLTIALYPTAQVWDIPNQPDQWQALAAQLQKPPVQRVLLESSGGYEQGVAQTLQQAGLPVMVVPAQRARHFAKSMRGNLKTDRVDAQLLAYFACCYPAPEATAMPEGQAQLRALWARREQLVQMLEAEKKRRQGAPETVRASLERLIAVLEEEIAQIEAEVAALIEADASLSQKAALLQTAVGVGAVVAYGLLAELPELGQVSREAIAALAGLAPVRRESGRWRGSARIGGGRWRVRRLLYLAAVVAVSHDARWRAVYAGLLAKGKPKKVALCAVARRLLVVLNAMVRDGRCYERV

SEQ ID NO: 184598 - protein, 472 aa, unidentified
MARAPRRQGGGQPRQRRSSRGRPAQLEQLNLNAAGIDVGATEHWVAVPADRDAQPVQRFGAFTADLYALAEWLRQCQIDTVVMESTGVYWIALFAVLEERGFDVKLVDAHYARQVPGRKTDVKDCQWLQELHTYGLLRGAFRPEDEVCVLRRYLRQRSMLVAMASRTVQHMQKALEQMNLKLTEVVSDITGKTGMTIIRAMLAGERAPQLLATYRDKRCKHDQATIAKALTGHWRAEHLFALQQAVEQYDFIAQQLRACDGHIEGCLQAFVPDVEIDAPQAPSARPWRSSRSNPLSFEVQAYLEAMTGVDLTQIDGIESLTALKVLSEIGRDMTRWPTSKHFAAWLGLCPGNKLSGGKRYRMRSKPSANRAATALRLAAQGVANSHSALGAYYRRRRARLGAPKAITATAHKLARLVYSMLRYGTAYVDAGQQAYEQKYRDRVLTNLQRKAKAFGYQLVHVEDIAGGVASTL

SEQ ID NO: 184599 - protein, 426 aa, unidentified
MGISKPAGLKSPCGEVKIVNPLFVGIDVSSKNNVAYLMKPDGSKHSSFSVQNNLGGAKLLSERIVSALGSMQLSDVIIGLEATSIYGDSLVYALREDGSLGRFQRKIHVLNPKQVRKFKDAYPDLPKNDWVDAFVIADHLRFGRIAKEVYMDDYRYQALRTLTRARFDVIQNLTREKQRFANYLFLKCSGMAQDKDIQNTSATTIALMERFETVDDLANADLEELTAFVTETGRGRFADPAATAKAVQAAARGSYRLPKTVNDTVNQAMSVSIASMRALKEQIKVLEKAIEQQFEIIPNTLTSIPGIGKVYSAGIIAEIGDIHRFNSQASVAKFAGLVWHKNQSGEFEAEHSQMIKSGNRYLRYYLLEAANSVRRCDSEFRRYYDLKFKEVNKYQHKRALALTARKLVRLVFRLLKDNRLYIPPEG

SEQ ID NO: 184600 - protein, 348 aa, unidentified
MDNNITIGMDLGDQNHVVVAMDVNGKEIEMKTIRNTELSLRKFFSRYKEATVAIEAGTHSPWISRLLKEIGCNVYVGNPRKLRIIWDCNDKSDLRDARILAMVCRVEPRLLWPIKHRDRQAYADLGIIKARDTLVQNRVRMINHIRSVTKTCGCRIPKCSTPSFSKRAPSHIPKELKDSLEPLIIAIDLLTQQVKEMDRQINKLCKKYPETEKLLQVLGVGPVTALAFVLTIEDPHRFTKSRQVGAYLGLTPKRDQSGKCDKQLRISKAGNTYLRSLLVSCGHYIIGPFGPECDLRNYGLSIVVRGGKNAKKRAAVALARKLAVLLHRLWISNQKYNPFYKSAAQDAA

SEQ ID NO: 184601 - protein, 364 aa, unidentified
MNINNEPIDQNSAVYIGIDVHRYQHTAVAANRFEEAMGELTFPNTPGGIKEFLHWTDVLADNSRTRIIGIEGANGNGKLLRNAVTPVFPAVYEINPIYTKQRRDHGTRGDKSDPVDARLMIEVLTRKLDELPRVTSQDTSDSMQALSELVAFHDDLTRSQTRLKNQLHRLFYDIDATSETSRSRTFSNKQLKYWLTKTAKTDLSINCTMQRFIIRNKIHQLLDLKKTRDIAYDQITQLVAQFNGNLLSLPGAGIITTAKIISAVKGIGRFGNIRQFVKYAGIAPVEHQSGKTRKHKQAKGGNRQLNTAIYTIALTQLRCNPKAKEYFEKKIAEGKTKKHALRCLMKRVACIVYGMMKGGEVYRG

SEQ ID NO: 184602 - protein, 346 aa, unidentified
MEHPTTIAVDLAKSVFEVSISREPGRVCQRKRLTRGQFARFLALQPSATVLMEACGTAHYWARLAQDAGHRSVLLPVQHVCPYRLRDKTDHTDTRALLEAFRNEKISPVPVKTPAQQAIASLHRIRSGWLATRTARLNTIRGLLRELGIVIPQGARLVLPRLAAALADPTTEIPQALHPVLLCAAAEIRQLEADIKEVERQLEELSKSLPACSSLCSVPGIGLLSSTALIASVGDPSRFKSGRRLASSLGLVPREHSSGSSRHLGSITKRGDSYLRTLLTHGARSVLWTAKGEKNPDPLKRWALCVQARRGHNRAAIALANKLARIAWAVWVRNTAYQPRTAKALS

SEQ ID NO: 184603 - protein, 374 aa, unidentified
MEKIAHAEGFASADGVVLGVDTHLDAHVAVALDGIGRRLGALTVPTTTRGYERLLRWAEGFGSVGCAGIEGTSSYGAGLARYLTAAGISVVEVERPKRRRHHLRGAGKSDPIDAEAAARAVLAGEAIGEPKAGDGKVEMIRALRSARSSAVKAKTQAANQLQSLLVTAPEALRHRLRGLPTKVLVATCARSRPGDAPEDIETATRFALRSVARRHEALSEEIARLDVQLERLVVEVAPGLISLPAIGTHHAATLLVVAGDNPERLRSEASFASLCGVSPVEASSGKIVRRRLNRGGNRDANRALHMICVVRMGSDERTREYVARRTAEGKSKWEIMRCLKRYIAREVYRILLSSTTMKSPSIETASRILEADIA

SEQ ID NO: 184604 - protein, 327 aa, unidentified
MRYIGIDVSKATFSVAYPLPKGGYKPREFKNTAKGVHEFIRTLEADDHCVMEATGNYSYLLLYLLNQANITTSMENALKVKNFARTMLSVTKTDKADAQLLSLYGERMRPAPFKMPSEAILLLKQKRAALRQFQKQLLSSTNLKKSLEVMPQKDAATFKAIDKIIETLEKQIRKIEEDLIVLTQKEFDRQMQRLTSIKGVGVSLAAAIILATGGFTYFDNAKQVSRYLGICPTYQQSGTSVHFKGHINRNGDAHLRSQLYVAAWSMSQHNAECNKLYMRMKEKGKSGKLIMIAVANKVMRQCFAVVKNDTDYVDGFVSQKPQSSNFS

SEQ ID NO: 184605 - protein, 429 aa, unidentified
MEEVDEQELHVERIAALDLGKAVLEACVRVPHESKPARRMQEVRTYPTTTAALLQMADWFRCWGVTRVVMESTGDYWKGVYYLLEAEGFECWLVNARDVKNVPGRAKTDKLDVVWQAKVAERGMCRPSLVQPPPIRQLRNLTRYRRSLIRDRTREMQRVEKLLEDAQIKLSAVVSKLFGVTGRLILDALVAGQRDPTVLARLAKGRLRPKTAQLQEALRGFFTDHHGAILAMMLTNIDRLSTQITTLDTMIEQAIAPYAHRAQQLAQITGAGPTSAQEIIAEVGVDMSRFPSAAHLVSWAKFCPQTHESAGTRKHKGRAKGNPWLAATLGNMAATAARTGEGFLGARHRRIARRGPQKAIVATGNAILVIVYHLLSDPTAQFRDLGADYFTTRIDKNRRARNLATALQAVTGQKITIRDGQAVIEAEAA

SEQ ID NO: 184606 - protein, 409 aa, unidentified
MDLTAMHKRVIALDVHQARITACAVVEHDDGQVEVTKREFGAFKRDRRALAQWSLQIRPEVVVMESTGVYWKSPFAALEAVGIVAWVVNARHVKAVPGRKTDMADAQWLATLARAGLLRASFIPPLDFRQLRLVARQRQKLVGMCSAEKNRLHKVLVDAGIRLNVLVSDIHGASARAMVKALIAGRPMHEVLDLQGRLRASREELCEALGTEQFSATHRFVAEEIMQHIEQIEARIARMDQYLLRGLEAWQPQLKLLQTIPGIDINGAAMLLVEIGADMGVFGSAERLASWVGICPGNNESAGKRKSGKIRKGNAWVRRLLCEFAQAAARTRCALKAKFESLAIRKGHKKSVVALAHKMLRTVYAMLASGAHYQDKSVDYEALSVAKNAPRWIKMLTKHGFMPKPVPAT

SEQ ID NO: 184607 - protein, 455 aa, unidentified
MKVKAVSALRSKRGLHRMNGAEPQVVGLTPQTTDIRKTDTMKTYILRPAKPVELQKSIRSPRPEPAVPVTAAGPLGRMEATTKGPVLFIGLDVHNDSIAVSLAPSDTTEVRRYGIIGGEHEDVLKLAKKLAEAHPGTTLKFCYEAGPRGFALCRCLQAHGLDCILVCPSKIPRKPGERVKTDRRDADDLARLYRAGELTGLYVPDPEDEAMRDLIRARFQVGRQQHRARQQLKMYLLRHNLRYGGQTSWTPAHLRYLAKLKMPFPVQQIVFQEMLEVITEATARLERYDQEIERAVPGWRWEPAVRALMSLRGMALLHAATLVAELGDFNRFEHPGQLMGYLGLVPSEHTTGKDRQQGGITKMGNAPARRALVEAAWQYRIPARLSPHLKKRQEGLPKAITDIAWEAQRRLHHRYTHLTRVGKKKSQVAVTAVARELTGFVWAIARQVKPKAAIS

SEQ ID NO: 184608 - protein, 389 aa, unidentified
MRSHPVGGKAGQEVRAFSTMMDGLLALSDWLVGEGVTHAVLEFTGVYWKPVWHVLEASVELILANATQVRNLPGRKTDVADAVWLADLLAHGLIRGSFVQPISIQELRDLTRTRTQFVREASRHTQRIQKTLEDANIKLASILTDVMGLSGRAILHALVAGTTDPATLAALRRGRHLKATEDQFVQALTGKIRDHHRFLLKLHLDQVGSIEASVSRVEQRIGELLLPFRIEIELLTTIPGVSGTVARTLVAEIGLDMSRFPSAPHLVSWAGLCPRSDESAGKRRSTKLRKGDTWLKTVLVQSAWAASRKKDSYLRALFLRLKARRGPQKAIVAVAASILTSVYYILRRHEPWSDLGINDFDTRDRTKLANRLVKRLENLGLRVQVSGAT

SEQ ID NO: 184609 - protein, 360 aa, unidentified
MQTKVNENLFSGQSIYVGIDCHKKNWTVTILGEHYEHKTMSQNPDPDVLASYLKRNFPGADYSAVYEAGFNGFYSCRKLRQLGINCSVIHAADVPTMNKEKIHKLDPVDSRKLARSLRSKEFKSIDIPEPSLEADRALVRQRFRVMKDVTRTKSRIRSLLFQFNINVPDRFTTCQTRSWSKVYINWLKELQIEQKSLKQTLDNYIRIGEIQRKELLSVNRQVRSLSQTDAYRGNYNLLISIPGIGFLTAMTFLVQIGDIRRFERIDDLCDYIGLVPMMKGSGPKLYTGKMINRGRKELKIMIIEAAWDAVRMDPALMARFNELTRRMNKNKAIIRIARKLVSRMRYVLLSHEPYKLGITE

SEQ ID NO: 184610 - protein, 343 aa, unidentified
MEHFAGLDVSVKETSVCIVDDTGRIVREVKVASEPEALLQVLTNPAYRFKRVGLEAGPLSQWLSSALAEAGLPVICVEARHMRAVLKAQINKTDRNDARGIAQMMRAGLYRPVYVKTIRSQKLRMLLTHRKLLQSKAIAIENDLRATLRNFGLKVGMVGTVKFDARIKELVENLPDLAVLVEPLLIVRRVLREQVGILHRRLLAIVRDDDVCRRLMTTPGVGPVVALTYRATVDVPARFRNSKAVGAVFGLTPSKHQSGEIDRMGGISKCGDAMMRTVLFEAAQSMLTRTIKWSWLKAWGMKIAKRRGLKRAIVAVARRMAVVMHRIWVDGTEFRWTKEFAAA

SEQ ID NO: 184611 - protein, 348 aa, unidentified
MTHVGIDLHKMESQICVIVETGEVLAETRVTTRRDTIELALAAWPGAQVLLEACGESEWVARHLEQRGYQVVVADPNYTPMYGHRHRAYKTDRRDARALASASVQGLFRRAHRTSEARRQVRAELVTRDALVRTRTRYISVIRARLRGEGYRLRSGDASTFVTRVEELALEPELRTQLQPLLRVMTLVNDEIEAADRRLVRTAKTDPIVQRLQSAPQVGPITALAFVAALDDVRRFRNAHQVESYLGLVPRERSSGEHQLRGRIAKTGDKRVRWLLVETAWRLMMRRSKTSVVPLQAWTTKISTRRGRTIAAVALARRLAGILYAMWRDDRDFDQQRIGRPRKLAEVA

SEQ ID NO: 184612 - protein, 341 aa, unidentified
MSEVSTIGLDLAKHVFQAHGADANGNVVFRKQLRRDKVLAFLARQPVCLVAMEACASAHYWAREIGKLGHAVRLVPPSYVKPFVKRQKNDMADAEAICEAVQRPTMRFAAVKSEDQQASAVVFRARDLLVRQRTQIINALRGHLAEYGLIVAKGPSHVAALIEQAKAAGSSVPAAALPALDILIKMLTVLAEQIKQLDIEIAKRAREEEIARRLMTVPGIGPITATALMALAPEPENFRRGRDFAAWLGLTPLQRSTGGKQKLGQISRMGERTLRRLLIIGASAVVQQARRRGAPQGTWLGRMLARKPPMLVAVALANKIARTVWALMANGGVYKAPVAAA

SEQ ID NO: 184613 - protein, 404 aa, unidentified
MKGPIVSIDVSKGKSDYQAFKNLNVKYTGSRSIKHTKEGFDEIVNLVREMEKKLETEVCVVYEATGVYHRVLKKVLEDNNIKQFIINPLLSAKTRKNDSLRSPKTDKLDPKSIAKTYYSHSLHNSHKPETIYHELRELSRYYEDILVHIRKDKVAFRAQLDVVFPGYDALFDDLYGPVALAVIEKYPHPEMLQKKKINTVSKVIQSKTCHRQAVSDTMADKAIEYSKTIYSGCDKDDIEVLILQRLIKKLNEDMAEAERTIGEMIKLAQELPDFSIIKSIPGIGDNLAARIIAELGDMTRFKKKNELVAFAGLDPRISESGKNDGDHMHITKKGNKRLRCLLYLAVTCSIRLKRDDNSIKEFYIKKKQQSNPMCSKAAKTACASKLVRIIYSMCKTGELYQYNK

SEQ ID NO: 184614 - protein, 320 aa, unidentified
METLHSHCAGLDIHQKEIVVCTYIGSSDEELIKEIRTFSTMTKNLYEMLQWLEELNITHLAMESTGIYWKPVFNILEDYFEITLANAQRIKNVPGRKTDVADAEWIAKLLRYGLIEKSFVPPVDIRELRDLTRLRKKMIGNMTAEKNRIQKTLECSNIKLGSVISDIFGVSGRKLLTRLVEQGYVNPNEVEEYIHVRMMPKASQITESLFGTINPHQIFLIRQSWNHILFLESSIQQLEDKIDEILLPYQEQVELLLTIPGVKKHSVACIIAEIGVEMNQFPSAHHLASWAGLSPGNHESAGKKKHPNNQRKPTHPINAL

SEQ ID NO: 184615 - protein, 326 aa, unidentified
MAGAPELIFVGIDVSKATLEVALNDRDKTQTFSNDEPGLKSLLAMLTEMRERVGVVLLEATGGLEQPAAAMLCAHGLAVMVINPRQAHDFAKAMGYLAKTDRTDAKMLSQFARTLHASDRRERLLYKLPTDAQETLLAMVTRRSQLVAMRVAEHNRLASMHASQRKSIRTILKMLDHQIGKIDDDAGGFLKEHFKDKLELLKGLKGVGPGTQAMLMAALPELGQLKRREIAKLVGVAPLNNDSGTFKGRRSTWGGRANVRSALYMASLSAVRYDPVLRSFYERLVQAGKPKKVALTACMHKLLTIINAVIKSGTAWQPSYPQRALT

SEQ ID NO: 184616 - protein, 353 aa, unidentified
MKQVYAEQLYYVGLDIHKRTISYCLKDPRGEIIGEGRIAANRGALEYWRTLLPAQWVGAMEATLFTGWIYDHLSERGEQVKVADPAKLKALLTAKNKNDRSDACKIADLLRCDMLPECYMAPREIRELRRILRYRQLLVRQCVQMKNRIAGFLMETGTEYASRRLHGRKYFQQLLEELEEAVPESVVGMLGLSRSSVEVLQKMERQLLRGLLTQPALEARVRRLLSIPGVGEVTALSWALEVGEPERFASVSQAISYCGLCSAQISSAEKNYRSPISKKRNGHLQHVLVEAAKLAPRWNVQLAAVHAQAVEHGNRNRATLAVARKLVAYLLAVDRSGKAFQMRVPERADSTAA

SEQ ID NO: 184617 - protein, 337 aa, unidentified
MKYSGIDLHSNNSVVTVTDEADRVVAEKRLPNDLDKIIEFLSPWREELAGVVVESTYNWYWLVDGLQQAGFEVKLANTYAIKKYDGLKYSGDQTDARHLAHLLRLGILPTGTILPPDHRAIRDLARKRMQLVRSRTSHILAIENILARQRAISMRSNQVKRLTHADVEQMGLPEDVALAVQSNRAVIATLGEQINLLEKRLQERLGERIEYALLTSVPGIGRILAATILLETGPIERFDAVGNYASYARCVDSRNMSNGKKKGQGNAKNGNKYLVWAFVEAANFALRFNAQAKRFYERKKAKTNNLVATKALAHKLARACYHILKERTAFDVNRCFA

SEQ ID NO: 184618 - protein, 347 aa, unidentified
MRFYIKQHNYYCGIDLHTNKMYVCIINHDGETVFHRNMKAEPEIFLRSIKSFRDDLVVSAECMFTWYWLADLCEDENIPFILGHALYMRAIHGGKSKNDRIDSHKIAALLKGGLMPMAYVYPRKMRATRDLMRRRNHFMRKRAELFAHIQNTASQYNLQDPLGRIAIPKNREGVIERFDIPCVQRSIGANMAMIETYDMVIDELERDIIKSAKSHDPVAYALLKTIPGVGKIIALNLLYEIENIKRFPRVQDFVSYCRLVKCAKESNGKKCGSAGKKIGNAHLRWAFSEASQLFLKCNEPGKKYLQKITNKHGKGKALSILAHKLGRSVYYVLKNQKAFDLNKFLAT

SEQ ID NO: 184619 - protein, 355 aa, unidentified
MKQQAIQYLALDVHQATTVASVRDEQGKIVMRATVATEARAILGLVRGLGRRVNVAFEEGTQAQWLHDVLQPVAERVVVCNVRGRSETSSKSDRIDADWLSEQLRLGALQSVYHGSPGVATLKELVRCYTNLVEDSTRVMLRVKAIFRGRAITASGEAVYRPSQRAAWLARLEGRGARARATSLLAQLDVLLELRAKARAAMIAEARRQPGWKVLRSLPFFGPVRVALLLAIMATPFRFRGKRQLWPYIGLAVVTRSSADQEIVEGKLRRRKRAPLTRGLNRNHNRVLKNVFKGAANAAAAKAGPLKEFYDRCVAGGVREEMAKLTLARKLASIVLRLWKKGELWDPTKLTMQGT

SEQ ID NO: 184620 - protein, 355 aa, unidentified
MNVNVNHYIGFDVHKKSISYCVKLADGRIVEEGKLAARRVTLCQWASKRAEPWHGAMEATLFSGWIYDTLKPFAAKLEMGHPGRMKAIGASKKKNDKLDARTICDLIRANLLPACWVAPSEMRELRRILRYRNLVLEQAVRMKNKISGLLMESGVEYNKKRLHGEKYFHELLENLAAEVPESVKDLLKLSRGWLESFQATQQQLLVKLQKHPILMERLKRLKSIRGVGEVTALTWALEIGDPHRFSSIGDAVSYCGLTSALVESADKQKRGPISKQRNAHLQTVLIEAAKVAPRWNPQLAELHQAEIDSGNHRNRATLEVARKLVAYLLAVDKSGKDFAVRTPSGKSEGEVKPAA

SEQ ID NO: 184621 - protein, 340 aa, unidentified
MTNTKHSAITPDLFLGIDVGKTELFCHIITGHDASSSRFNNSEKGIASLLTWLQKFATPSVISACLEQTGHYGIDIAKALHKLRIHSLFLVNPRQIKAFGQQKLRRNKSDTADAKLIARFLQSEHSELRPWQPKPIENERITELSRYSESIVQEVAKLKTKCEAAREPAVLRSLKRRIKVGEKEIADLRKLITKIIDSKTALQIDHALLGSIPGLGEISCQIMLAELPDIGHFKSARELAAWAGVTPCHYASGTSGRSTTPITKVGSVNLRRALFMPAMNARVFNPLLKTFGDRLKENGKKPKQIIVAIMRKLLHQIYGILKSREPYNPEKRGFQNPAKA

SEQ ID NO: 184622 - protein, 436 aa, unidentified
MTLINFVAANQKYYAFNLLSVFIMVFWSVQYLLQHLLVQTQVSHQLLQPLILILQLPQTPQFRHAWPGKFFLPVNGMDYLLPLRLTVRNVLTRRITMNIVFLGIDLAKNVFQLCGLNQAGKPVYTKRTGRKELLQTLANIPACLIGIEASTGAFYWQREFEKLGHKVKVISPQYVRPFVRGQKNDGNDAQAIAVALMQPTMQFVPPKSPEQQDIQALHRARQRIVNHRTATVCQIRGLLLDRGIPIGSAVSRARRAIPLILEDAENGLSSRMRRTIAELYDLFNDLGRRIHFFDKEIETVFRQSEACPRIAKVKGIGPKTATAVVAAIGKGTEFKNGRHFAAWLGLVPRQHSSGDRQVLMNMTKKGDKHLRTLFIHGARAVVRVATNNNDGHMNQWVNQLKERRGFNKTTVAVANKNARIIWSMLRNDTGYQVVCN

SEQ ID NO: 184623 - protein, 416 aa, unidentified
MLGVGIDWAEEFHLVALGRAADGIVEVVRVEHRPQAVSALVARIAGLEPDPAEVRVVIETRHGLLVEALVEAGYTVLPVNPELVSRRRGPARKKDDAEDARICCLLALDRHAGLRRLIPHGELAGELRSVARDDERACRDERRLLNRLRADLLATFPAALTIAGEDLGAPRVLRLLERWPAAEALAAASRQEIIDFARAQHSGYLQRFADLVQRALAEDHFTAPEHLVRAKADTIRLLARQLLLLNAQRKAWEKRMGQLLLGTPSAEDEQPGRAFPGGEIYLSFPGLGRRLAARIAGEIGEHIEQFTTPNSLQCYAGRAPVTRRSGKRDLVVAHRLACNRYLADAVHKWAFASLRRSDWAKEFYDGQRARGKSHHAALRALGNRWLEVLWHCLANHVPYDEATHVANRNRALGLAA

SEQ ID NO: 184624 - protein, 334 aa, unidentified
MLVLQKPLPADAVCVGIDVAKDKLDVHVDNARRPFSLSNTVAGRGKLIEKIRGLPLARIAVESSGGYERPLLHELMDAGLPVAHVNPRVVRDYAKGFNQLAKTDPIDARVLACYARERQPRVLGSEDRLRHMLADLNRCRRQLLQQILALKNQAEQALHPAAVKVLADSAQLLEEQLAVIDRDVQAEIDKHPAMKRRQELLLSVSGVGPVTSRTLVIEMPELGTLDRRRLAALAGVAPFDDQSGQRDGQKFIQGGRPHVRTALYMAALVGVRHNAVLKAHYERLTANGKPPKVALVACMRKLLTHLNAVLSKAAHTPAMDVAAAAQPRDGGEKE

SEQ ID NO: 184625 - protein, 407 aa, unidentified
MKLYVGIDWSQSKHDICLLNPAGVVQAQTVIEHSETGFFQLDRLLNRMGVNPQECAIGLETAHSILVDFLWDHNYSAIYVLPPTLVKGSRTRLRSSGARDDPSDAFLIADILRTDLGRLHCWQPDSPLTRQIRVRVRFFDFLTTQIVRLTNRQLAILLRYFPAAADLFSGLNTLIAQHFILQYPTPQAASQLDLPSFRAFAKQHRYPRPSKLAGILAKLDRPYPQAPQDLVEVYQSEAQELARMLLETIRLKRTTGTELAHLLTQHPDYEIYDSLPGAGDYLKAALLSKLGDDRQRIDRANHLQALAGTCPVTVSSGKRKFVRFRHACDRDFRRIAQQWAKSSLGGSVWANTYYSQVLPRCDSHSHAYRCLANRWLAILWRLWQDRVPYDESYHLQQRRRKSQPIYP

SEQ ID NO: 184626 - protein, 391 aa, unidentified
MIYVGIDVAKDKHDCFITNSDGEVLFKAFTITNNLDGFNDLYQKIETVMKDITKVKVGLEATGHYSYNLLGYLIDKGLPTYVINPLHTNLYRKSLSLRQTKTDKVDARTIASILMSDVNLKSYSDISYHNEELKSLTRYRFDKVKERAKLKSSVSRLICILFPELEKLVPTLHMASVYALLSEFPGAKQVANAHLTRLTNLLSEASKGRYSKDTAITFRDAARTSIGSNMPAKSLELKLTIKLIKELDSEIDEIENEIKIIMDEINSPILSIPGINYRMGAMIIAGIGDFSRFDSPDKILAYAGFSPSTYQSGHLYGAYAHMEKRGSRYLRYALYNAAKYVCHWDPTFTAYLAKKRAEGKHYNVAISHAVKKLIRVIYHLEKTNQQYIKAS

SEQ ID NO: 184627 - protein, 422 aa, unidentified
MNYKQNEKINQVKESTLVVGIDIGSTTQYARAFDWRGIELGKVFTFSNSREGFEAFKAWMQHLQDKYRKSDVIVGIEPTGHYWFDLGAYLEDEGILLVMVNPYAVKQTKELDDNSQSKNDRKDPKVIAKLVTEGRHSAPYTSDGVYADLRIMVVNRKRLIREMTQIKNRFARWFAIYFPEYTDVFGDYEAQSSMLLLKKVCTPEAIVELGAEKINQIWRDAKLRAVGMKRATTLCETAKRSIGLKKGSSAARYEMKLLLEDYEYKKAQLDAVMEEIEKLCRKIPESRQMLAIKGIGVIAVAGFLAEVGDVRRFESPRQIQKLAGLSLRENSSGKHKGQTTISKRGRSKLRAVLFNAAIPLIAKNPEFKSLHEYYTTRANNPLKKKQSVIAISCKLIRVFYAILAKGVTYDAQKLISDIHRQP

SEQ ID NO: 184628 - protein, 346 aa, unidentified
MTIVEDARAITGGVDTHAGAHVAAALDPLGELLGVREFPATAAGYAGLLGWLSGFGTVALVGVEGTGSYGAGLARHLAAAGVRVVEVDRPDRQDRRRAGKSDPLDAISAARAAQSGRAAGASKGRDGAVEAIRALMVARRSARSERTQAINQARALIVTGPDDLRARFAKSTAAGLVADLAALRPRPGDLPGYATRIALRELGRRARFLDAQIERLDELIVPLVAARAPGLLALHGVGPDTAALLLIAAGDHPGRLRSEAAWAHLCAAAPIPASSGKVTRRRLNPGGDRQANHALWRIVITRMSSHAPTRAYVARRSTEGLSKKEIIRCLKRYVAREVYHHLHAGA

SEQ ID NO: 184629 - protein, 355 aa, unidentified
MKKVDPTIWQDKPLYVGIDMHRKRWHISIRSADGQVLFSQSIEGRWPVLKHRLEKYPGAQFMAVYEAGYFGFWLYDELTAYGVTTCVTPPSLIPSASGNKVKTDRLDSDRLAQLLQAGLLTSVHVPTEEERAHRQVVRRRRQFIQDRIRVKNRIKAELRLYGLELSGETKGPWTQRLMTQLRAIRFADAFHQTSFIALLAHHDFLSSQIDLLAGQLKTLAESEIYQERVEILTSIPGIGWLSAMEILLELQDVARFQRAEQLAAYVGLTPGQHSSGEHVRLGRITRQGKSIVRTLLVLASWRLIDKDGAMREKYERIKARAGGKRAIVAIARTLLVRLRRLLLNREPYVLGLVSG

SEQ ID NO: 184630 - protein, 316 aa, unidentified
MKNYIGIDISKSSIDVYDGKKSYKFENNESGFKEIIALVENIKETVFIFEPTGIYSYDLTEFCDKNSIGCVIVSPKVSRDFARSLKVRSKTDKIDAKVLYKYQSHVESNMVKIPKINHHAIQIQEMLNSYELVKSTIQQHKNQLESISKNNKYLVRSTTRMIKFNETEADKLFAKIEKLLFKDESIKRKYEAMLTIPAIKNKSALYLISFFLKYPLANAKEMTALVGLDPVMRDSGTYRGKQRISKHGGQQLRNLLFLPTLCSLRFNDRIKVFYTRLTSNAKSKKLAVIASMRKLILMAFSIFKSEQNYQPLYVEN

SEQ ID NO: 184631 - protein, 430 aa, unidentified
MKNRTNQRLEEITVGTLIVGVDVAKEDQWARMVDYRGVEIGKAMLFKNNRQGFESILAKIGEICKLKTLKYPIDNILIGMEPTGHYWKAMANYLMKAGYRVVCVNPYHTKKAKELDDNSPTKSDKKDAITIARLVKDGRFFDPYLPREEYGELRNLTNARVSVMKRNNAVKNTITAILDEYFPEICTVFKNPLKGKASRQILKSCPFPAFIIAMGEETVLEEIKKAVKKTVGLKKARQLISVAETSVGVDYGLESAKMRICFLLEELELIEKQLAKVEQAMADMLTQTGYSEQILGIKGIGIVTAASFLGATGDPLRFQNARQIANYAGYNLVEDSSGKSKSGTCISKRGRKQFRSVLYQMAFTMVGQNDEMKKLYRHLTTRKDNPLKKKQALVVVSKKIITVIYSLLKKQEAYKPELVLGTVRKEMMAA

SEQ ID NO: 184632 - protein, 347 aa, unidentified
MDTIGLDLHKRESQLCILAEDGTVVERRIVTSRERFCAVLGNRAKARILLEASTESEWVAQHLESLGHEVVVADPNYAPMYATRSRRVKTDKRDARTLAEALKLGAYRPAHRVSAGRQHIRAELAVREALVRTRTRYISLAKALVRRDGLRVAGSEAEKVARRIAELDLSDALASELTPLFKVLAPINEQIDAADRRITHLSKNDPEVALLTTAPSIGPVTASAVVATVDDISRFQSAHQFEAFLGLVPGERSSGEKRRVGKITKAGNSRVRYLLVEAAWRILRSKSEETAALRAWALLIAARRGRRIAIVALARRLAGILYAMWRDNSPYNATNLRMPRPILAKAG

SEQ ID NO: 184633 - protein, 416 aa, unidentified
MDAIVERCAGLDVHLDTVVACVLYGKLDIKPKKEVKTFSTTTKGLLELLDFINQKECTHVAMESTGIYWKPVWNILESGAFDLIVANAKKIKNVPGRKTDVKDAEWIASLLRCGLIEKSFVPPERIRDLRDLTRLRKELLGEVNRNKNRIHKVLQDANIKISSVLSDVFGETGKSILNQIIDNQCITEEFIYSLYEGRGKSKLKSTPMEMYEALNGKIRWHHVILLGMHNSNIVFLEKQINELEKEIDILLQKERDSLELLETIPGISKISASSIIAEIGTSMDVFKTEKHISSWAGLCPKNNESAGKKKRSGIKSGNNWLRSMLCECAWSATKKKDSRFKNKYWSMVPRMGRKKALIAIANMMLRLIYHLLKTKSTYKELEIQYFIDKDKRREDRIIKELKSKGYLVEKDSLQMA

SEQ ID NO: 184634 - protein, 345 aa, unidentified
MEAYAGIDLHSSSNFTAVIDETDKKIYGKQLPNKIDAVLSALRPFRENLKGVVVESTYNWYWLLDGLQEHGYRTHLANPSAIKQYEGLKHTDDRWDSFWLAHMLRLNILPEGYIYPKKDRPVRDLLRRRLLFVRHRTAHILSLQSMITRNLGTKMSCRAIKRFSGEDAESLFDSPYLVLAAKNSISTIGFLTERIKKIEREVKMTLDFKKEFKCLLTIPGIGLILGLTIMLEVGDIRRFAKVGDYSSYCRCVRSERLSSGKKKGENNKRNGNRYLAWAYVEAANFAIRFSPDAQRFYQRKMARSNRIVAIKALSNKLARASYFIMRDQVPYNGNKLFKQSARVQQ

SEQ ID NO: 184635 - protein, 387 aa, unidentified
MSPTIAARRPAAVDYERTLILSIEVSNQNWVLAAQVPGLPHTKAKRTVDPEAEALMAAIAGYRSRAAAMGRSIERVIAVYEAGWSGFWLARWLTRHQVEVYVIQPSSVPVDRRMRRAKSDGIDAELLLRTLLAWLRGEPRVCSMVPVPDEADEDARRCIRERTELISERVGLTNRIGAVLATLGVTDYNPLLRNRHHRLAELRTGLGEPLPPNAHAKIARLLARLELVLAQIAELERERDAVVETETPDHASKMIQQLISLRGIGVQSATVLVREAFVRRFANGKALGSYAGLTSSPYSSGGIDREQGIGKGGNRRLRTVMVELAWLWTRYQPAAAQVCWFRERVGSTGRRVRKIMVVALARKLLIALWRFVIDGVVPEGAVLKPAA

SEQ ID NO: 184636 - protein, 317 aa, unidentified
MASEVYFEQVVAKGCGLDVHKDTVVATVSGTAIKTETRTYSTFTCSLTELREWLLSLGITHVSMESTGVYWKPVFNILEGYGMTILIVNARHIKYVPGHKTDKKDSAWICKLLLAGLLKVSFVPPAEIRNLRDRTRYRRKLEGAITAEKNRMIRILEDANIKLSTVLSKVHGTSGTKIINAMLAGETNPEVLVKLCHWRVKTDREEIKLALEGKLTDHHKFMLRMIKKDIDQTEALINDLDKEIANQLQPYAEELSLIKQIPGVGEQTAGALIAEIGVNMEAFPDEKHLASWAGMSPGNNESAGKKKVAGPRMATKA

SEQ ID NO: 184637 - protein, 369 aa, unidentified
MSNAHNRLTVTAPARCPLELREQARARARSGAVAVKALSKPERLAGSKSRIEHKEGSNNMEQFVGIDVSKAWLDGEAVPQPRPMRHGNDSAGIATLVSALVADPPALVVLEATGGFETEVASALAAAGVPTVVVNPKQVRDFAKAMGILAKSDRLDARVLALFGQRIRPQVRPLPSPEQRDLAELLDRRAQLVNMRAQERTRLATALAVAKPSLREHIQWLDARIRELEIELTARLRSSAAWKVKVDLLKPVPGVGKVLLFTLLARLPELGHLNRCDIAALAGLAPFADDSGERRGQRFIRGGRSEVRKALYMATLSATQHNPAIKAFFARLTAAGKPFKVAMTACMRKLLTILNAMVKTNQPWQPRVA

SEQ ID NO: 184638 - protein, 337 aa, unidentified
MNFSFHFFQDQFMKKITIGIDISSKTLDICLQKDGKTSVVKIANDVKAINSFFKKLAKEEVVIAMENTGRYNWQLYEALPRFNFEVYVISALHLKKSMGLIRGKNDKIDAERICKFIQKNQDECAAWKPVATNIQKMKVLLTERTSRIKIKRQLLGQQPDYKLMDTIGLEKQLAEMNRNLIDAIQQQIEKLESEIEEIIKSDNSLKEQAKQIQSVPGVGPVTCWTMIAKTEGFTTITEPRKMACYCGIVPFDHQSGTSIKRQSRVSNYADKSMKSVLHMAAMSAIRFDNKFREYYLRKVAEGKNKMSVLNAVRNKIVHTVFALIKNQATYKDHLVLS

SEQ ID NO: 184639 - protein, 412 aa, unidentified
MTQLQSEYLYRVGIDWASQHHQVCIVDREGHRTEDIVPHTSAGLAALAEKLAALSPGAPERVAVAIEVPRGPVVETLLERGVHVFALNPKQLDRFRDRHSVAGAKDDRRDAWVLADSLRTDQPSFRRVHVDDPLIIELRELSRLDDDLREELSRLSNRLREQLQRFGPDLLALCPAADEPWFWALLDLTLARRPQPVAIKAVSAVLKAHRIRRLTAETVHAALQVPPLRVAPGTLAAVGAHIAVLLPRLRLVHDQRHRTVGTRIDRVLAELANEEVPGEHRDVTILRSLPGVGRLVAATVLAEAARPLAERDYQTLRTHAGAAPITRQSGKKAAVMMRWACNGRLRNAIYHWARVSVQVDARCRAHYDRLRQRGHEHARALRGVVDRSLAVLMAMLTSRTLYDPERRCAKPA

SEQ ID NO: 184640 - protein, 328 aa, unidentified
MKRQIVRTVTETDAPGVATDTVQQLVRKEHQKPQPPSVVVMEACYTAHYWARVCEAHGHTVRLIPAQHVKPFTRGNKTDANDAIAIIEAAQRPNIIDVPVKTQHQQDIQSLHRIRERLVGNRTGLMNQVRGLLAEYGLISAKGNKGFVVLMELALNSDELSSLIKDEVQRSLDELQLLRDRTEAIEATLREYLKSDRHCQIISTIPGIGVINATALVCKFGNGSQFRQGRSLAVNLGLTPKLSASGLRSQMQGISKRGDPYLRKQLIHGARALLGVCDKRPDDALCRWANRIKQRRGGQIATVAIANRLARLVWVLLHKQEVYRPMTA

SEQ ID NO: 184641 - protein, 418 aa, unidentified
MRSGYMVAGIDVHKKMLAVVIGRVGATGDGLSFEHRRFTTTASGLQELKLWLSECNTDEVVMESTAQYWRPVWLTLEGTFKLHLAQARSNAGPAGRKNDFRDAERAVRRLLSGDLRLSYVPDAEQRLWRLLSRTKRQLGCDRVRLHSQIESLLEEAQIKLSSVITDLLGVSGRRILRALVNGERDPEQLAALGHERLHASKQQLQDALTGSMHRLQAIVLGQYLDRVETIERQIAELDAELMAVLEPHQDVIRRLCAVPGIGISAAQQLIAEIGPTAAVFPSGAQLSSWVGVCPGREESAGVSASDRSPKGNRVLRGLLTQVAHAAIAAKGSYFQERYRRMVSRLGPGKAIWAIAHRILRLVWKILHQGVEYVEHGTRSGDPRATLIRGQRMLAALRRMGYNLQVLASPNTQNPAPTV

SEQ ID NO: 184642 - protein, 428 aa, unidentified
MSNQEIIRRKKYCQIVKEITGSDQYLVVGIDMAKENHHAFMGTATGKSVLRRLIFKNDMAGFSRLLTTADAIKSQNCLSKVVYGMEPTGNYHKPLARRFIRCDCDVVLVTGKAVKNNRELINGRWDKNDTKDAANIADLVSRGKCLFYDCPSPSIIELRSLLSLRRRLKREEHGLRMRIRNNLLAQYFPELDRFYSACESESLAIVKWCLNPDTLAAMAFGEFFQLVTTTRRGIAQTLRLRKIHGLATESVGCHMGAAAEYEAELLVEKLKQVRNQIKKTADLIEDFCLEFPEYSYLLTIPGFGPYVSARVLASIGNPFRFENRKQLVKMSGYDLCANRSGKKSDDAVPVISKRGNGELRYALYQAANVATAKVDLFRKYFTKLLRGRERERGIKTKMRVKLAAKMLVIGWTLMKKKESFDPTYLNTD

SEQ ID NO: 184643 - protein, 399 aa, unidentified
MFVGWDWASTTHDVTVLNDAGAVVDRWAFRHTEQDLVAALDRLARLAEPAALPVIIERASGLVVERLLAAGHPVVPVHPTAFWAARPRWGASGAKSDPGDSYKLADYLRTDGHRLRRLDPPDLGLQELQALVRLREDHVRARTAASNQLGALLEAHWPGPKAVFFRLASPIALAFLTDYPTPQAAARLGQARMASFCRRHSYRGGKTPAELLARLQSAPTAPVGIPAATLAILVGAQVQLLRTLLGTIAELDVAIAKRVVLHPRAKLLASLPGVGIINLAQLLAEVGPVLDRVANAEQAAAECGAAPVTRASGKTSGVYFRWAANRRARKALTAFAHNARMQSPWAGRLYADARARGKRNPHATRIVARAWLRVIWTCWHTSTPYDPGAHLAEQRLVAT

SEQ ID NO: 184644 - protein, 408 aa, unidentified
MKRYYVGVDWADREHQLYVGDEQGGKIAEMKVQEIPEGMAQLGRWLDESRAAGIELWAAIEKPHGRIVDFLLDHTVVVYPVNPKALDRVRDRYRMSQSKSDPFDARVLSEFLRTDHAHLRPLRPSSEQAQELKLLTRDQHRVVRHNTRLLNQLKITIKEYYPRPLEVFGDLDTQIAQDFLKAYPTPAALSELKRKQWNRFATHDHHLGKARCDELWEKVNKPQLMVPQHVVRAKAQLVEVLLEQLKPSLRAVKTYNERVECFFASMPAAEIAQTLPGGKSGTLVPTIWAELGDAQDRWESFPHLQAEAGVVPVTRSSGKSHVVQFRFACNKHLRHAAYLFAFASLNRSEWANRYYRDQRAAGHSHPQALRALGAKWLKIIFVMWRDHKPYDENYHLANIARQRMRQAA

SEQ ID NO: 184645 - protein, 430 aa, unidentified
MAFLVILRISYEVVALISSEEHKHYLILIRIGVYTMLYLGIDIAKHKHYASIMDSNGNPVEKPFPVYNHRKGGQALLKKIYQHIDAPTEIKIGMEATGHYWLALYSFLLDHGFSVIVLNPIQTNAWRKGTEIRKRKTDAIDATMIADIIRFGNFLETPLVDEKMFALKQLSRFRNSLVSSMGDLKRKSLVVLDPTFPEYQKMFSDVFGKTSTQLLLEYASPSDYEQVSIDDLTQIIEQASRNRLGKEKAHQIIESASHSFGITFGKEAFSFQLKMLMEQIHFIEIQLKQCEEQMDQLLIELDTPITTVPGIGPILGATILGEIGDIKRFDKPSKLVAYAGIDASVSQSGQYNSTSMSISKRGSSHLRRALFQAAVTGYKYDPILKSFYEKKKQQGKHYYVCICAVARKLCHIIYAILKNNKPYKVPIPIA

SEQ ID NO: 184646 - protein, 470 aa, unidentified
MIRHRSDSVLLGPLASVRKPVSQPVIAAVRFMQVELPLHVRLIPQEIESAMRNAGIHADSLLEVRRMYNAVGIDVSKGKSTIAVLQPGGTVIRKPFDVSHTSQSLIELAHYLGSLEGSTKIVMECTGRYHEPMLKALYEAGLFVSVVNPHLIKNFGNNSLRRVKSDPADARRIARYTLDNWAELRQYSGMDNTRTQLKTLNSQFSFFMKQKVAAKANLIALLDNTYPGVNKRFDSPPREDGSEKWVDYAYSFWHVDCVRRIGLKTFTERYRAFCRKHHYIFQPDKPEKLFHASKELVAVFPKEKTYKLLIQQSIQQLNLASGHVERLRQEMNALASTLPEYSTVMGIYGVGKTYGPQLIAEIGDVSRFTHREALTAFAGVDPGVDESGQHKSKSNRASKVGSARLRKTLFQIMTTLLQNAPEDDPVYRFLDKKRAQGKPYYVYMTAGANKFLRIYYGKVKECLRNLEQAE

SEQ ID NO: 184647 - protein, 361 aa, unidentified
MKKRTQHLIAEVPRKRGQVELTIGIDLGDVWSHYCTLNQQGEVIDRGRFRTTPKAIDKWFTDVPHARVAMEAGVHSIWISEQLEQLGHEVIVANVRELRAISHSDRKSDDVDAEKLARYARIDPEILRPISHRTVEQQEALTLIRARELLVRLRTAAVNAVRGLTKACGHRMPASSTKCFAQRGEAALPPGLKLSLGPILAQIAEMTLKIKQYDRDIQRLTQTEYAETQAMMTIHGIGHITALTFVLTLGDKTRFGRSRDVGCYLGLRPKRSQSGERDPQLGITKAGNAYLRSLLIECSNHILRPRGRDSALRQWGLHLAARGGKQAKNKSVVAVARKLAVLLHHLWTTQQPYVPFYQQAA

SEQ ID NO: 184648 - protein, 299 aa, unidentified
MLDIFDDAVGRPERIANTLQAITERVAGWRCGNVFVVFEATGVYDRELAEALRQADIRFARINPARARDFARADGRLAKTDAIDARMLAIFARKMMPAVEPAPEPARSALASLAKRRDQLVQIRAQEKNRRSEATDRTTIEGIQRHLDFLNGEIKAIEASIKTLIKAEPDISEQARLMRSAPGIGPVACMQLLAKMPELGCLGSKQVAALAGLAPFNVDSGSYRGKRAIGGGRKRVRDALYMAALNAVRRDLTMKAFYQKLRTVGKPAKLALIAVARKLLTTLNAMPRDRKAYVRPQPT

SEQ ID NO: 184649 - protein, 344 aa, unidentified
MEEGGVVYQLYVGVDVAAETFVAAWLAPGGQPGTPVTHEQTPAGFAALQRHLRATASPPAATLVVLEATGNYWVALAVALHETGYRVAVVNPRQAHHFAKAQLRRAKTDALDARDLARLAAALRPAPWSPPPAVYHEVRQRLVARDGLLAMRTQARNQRHALAQWPVVVAAVRQHLDELIADLDRRIAALEAEIAAVLKASAWAESLACLTSAPGIGLVTASWLLVGTLNFALCAGPEALTAYAGLAPVPRESGRSIRGRAAIGHDGNGRLRTALYMATLSAARYNPAITAFYQRLRAAGKPKKVARCAAARKLLHQAWALGSKLQRFDPGYQQQHEASPDLAA

SEQ ID NO: 184650 - protein, 368 aa, unidentified
MLKQSHYTVGCDAHKHYSLFAVFDRQGKPVKRTRVNHTPGAIRAFLSRFPPGTPVALETVGNWYWIVDEIEAAGCLPQMAHAAKAKMMMGNVHKTDKLDADGLATLLHNGTLPSIWIAPGSLRDERELPRTRMAFSKMRTALKNRMHSTLAKYALSLETQSDIYAPKWRPQLMKLLRSLPDETQRCMEQELELLDLIQAHIQRLEARILERVKITPTLQLIQSVPGPAEILSIVIDREVGSIDRFPSPHHFASYSGLVPKVKASGGKVHYGRMIKQANNYLKWAFIEAANVVVRQRHHPAWQSKHVVQIYERTRQRKGHAVAVGAVARYLAEATYWILKKDEPYREPISRQPAGSTSAASSKQGQAPA

SEQ ID NO: 184651 - protein, 351 aa, unidentified
MNYLGIDHHRQYSHLTLMDEKGNILQSGNVINSRSELEAFLEGVKDCRAVIEAGRSSYTLVDMLTELGVDVRLAHPKEVKSIARAKVKTDKRDSRILAHLLRTDLVPEVYQRSKENRETQKILRQRAFYVGAMTRVKNRIHAFVVQQKEEIQQEAAREKNIFSERGQKMLLGLACPEPEKKMLGSLVKTVRHLEDRLRETTALVEEVYQGNRNAQLIQTAPGFGTFLSVLAATEVADVGRFADAAHLHAYAGVIPSTHSSGERSYHGKITKEGNRWLRWAAVEAVWPAIRADFDLRIFYERIKKRKGANSAKVATARRLLTIIYRMLKENRPYIPYKRNQSAAFGKFLTGR

SEQ ID NO: 184652 - protein, 359 aa, unidentified
MPDRIEGRKSLYVQGRHRPLDPPSLPKPEEETMAPTAWIGIDIAKQDFVAAQRSEAGFETECFPMTEEGFQDFQQWLPQASKLGIVFEATGPYWLPLARWLDALERPIPYACMNPRRLRDFAKASPERSKTDAIDAALLVHFAETFPPALEPPRSRRAQTLRALWRHHLELQGLLDRARDRQEKALADPQLPTQLATRLQSLLDGLKTELDQVELEAHELVQQDPPMQQSYKLLVSIPGVGPKTALTLMAEYGPQLLLANPKQLTSYAGLEPILFESGSSVRKRPRISKQGNWRLRRALYMAALVGVRWNPILKSFYERKLQQGLPKKSALVAAMRKLLHLVYGVLLHQQPFNPHYEKA

SEQ ID NO: 184653 - protein, 344 aa, unidentified
MLYVGMDLSRKRLDIAALDRSGETVWVGACPPDRDGLRTLADRFAGESVQAAIESMNGARFVHDQLELAGWDVQIADAAKTKGLAPLACKTDRIDARVLAQLCWRDLVPAVWLPGPDTRAERERARFRLHLVRHRTSLKNRVHATLLAHGVPCPVSDLFGASGRQLLARLQLPEPWAGTVTASLRLIDELDHDIDACETELRRLGADHPYVPLLTTVPGIAWVLAYTIAAEIGNITRFASPSKLTGYTGLCPRVYQSGQSDRRGSLSKQGPRYLRWALIEATNHACRDPRYKPRYERTKQRLGKQRGPKVARVELARTLSQAIWHMLTRNQPFAPARATGPLAA

SEQ ID NO: 184654 - protein, 410 aa, unidentified
MYQQFCGIDISKDSFDITVLSVNGEVKLQDKLSMDRDGFDTLLKYLSSYPKEELLVAMEATGIYHLPLLSFLLENSFKSVVVNPILIKSFIGSTTLRKTKNDKKDSSSIALFSLKSYQSLHLASTDAIENIRPIMRERETLSKEVAKLKTEIKANLTQLFPELLKNTNIFTKSILNLLSQAPSRKAIRNLKKQKIQKILDSTSGNKVKITAKEIHSLAKTSIAVSDKYLEKVLSSKIRRLITIQDELSFLDKELQNSLEDTGINDDIEILQSIPGVGPITSKNFMIEVSSLKKFKSVKQLCAFIGIDPSVRQSGTSINYRGKISKRGNAYLRRTIWRPSEATTPHEGGQMAIGAIRSCDKFKSYYSKKREEGKKYKQAVIAVANKLLKIIFILLKNKTKFDENLATGVSK

SEQ ID NO: 184655 - protein, 346 aa, unidentified
MYMIGCDFHSRYQQISMVDTETGEYTGRRLEHENGEARKFYAELPASALVGIESTGYATWFVEMLEEQGHQVVVGDAAQIRAREVRKQKYDQRDADLLLELLSRGEFPRVWIPRRRERSLRTLLAHRHFLVAMRTRAKNGLQALALGQGLCRGRKLWSRAGQAALKELKLGEGLGRRRQDLGQLIQQLNGWIGELDQRLGQEAEASAPARRLMTHPGVGPLTALATVVVLGPVERFASGKKVASYLGLIPSEYSSGGRQHFGHLTKQGNRLLRFLLIEAAQSACRYEAELKQDYGRLAFKHGWAKARVAVARKLAVRLYTMLRDQIDYAEFVRRGSLAGMPGLRLV

SEQ ID NO: 184656 - protein, 374 aa, unidentified
MQLDEVDGPRPRRHRIVPRWCCQSDHQRRGAVPLQVSTVGLDIAKHVFQVHGVDEQGRTVLRRRVSRGQLLKLFAGLDPCLVGIEACATAHHWGRELAALGHEVRLMPPAYVRAYVKRNKNDAADAEAICEAVTRPTMRFVPIKSAEAQSVLMLHRARHLLVRQRTAQATALRAHLAEYGVVAARGISRLRDLLPALETGAGLIPELARQTLLLIAQLIEALTIQIRKIDTELLHWHRTNPVSQRLESIPGVGVITATALAATVLDAKAFRSGRQFAAWLGLVPRQNSSGGKDRLGGISKMGDRYLRHLLVVGATAVVRYTRRKTTAVSLWANRLLQRKPARLVTVAVANKMARIIWAVMARNEIYRSRTPITV

SEQ ID NO: 184657 - protein, 363 aa, unidentified
MDESTTVSVGLDVHARSVRLAAVRADELLEERTLPYDEEAVERTLRRWPGVRCCYEAGPTGFGLYRHLVERGIDCAVVAPGLVPQRPGDRVKTDPRDARKLARLLAGGLLEPIHVPSPELEAARDLVRAREDARLDRMRDRQRLSKFCLRHGRLLPTSAWTVVRRKWLGEQQFAYAAEQQTFDTYLHAVDLVDARIARLEQAIRETAEQGPWRELVARLRCFRGIDSLTALALVAEIGDFSRFRRAEELMAFVGLVPSEHSSGERRRQGSITKVGNAHVRRLLVEAAWHARRRPKVGYELSRRQRGQDARVIERAWRCQQRLYQRWQRMAGRGKPQQKIVVACARELAGFVWAIATNQPLRTT

SEQ ID NO: 184658 - protein, 357 aa, unidentified
MPTIAPRPQQLLDVTGGVDTHLDTHTAAVIDPIGRVLGTRQFPADPAGYAALLDWMHTFGRPARVGVEGTGAYGAGLTRLLRHEQVEVIEVDRPTRKTRRFQGKSDPIDAIAAATTALAAERTTTPKQRDGRVEALRALRVARRSAVEQRADTQRQIRALIVTAPDPLRGQLRGLKVPALIATCAAWRPDRSDTASPTTATRLALRSLARRHQQLTTEITDLDQLLTPLVAAINPRLLTVPGVGTDVAGQLLVTAGENHDRLKSEAAFAMLCGAAPIPASSGKTTRHRLNRGGDRQANAALYRVVLTRLRWDPRTRAYLERRTTQGLTKKEIIRCLKRYIARELYQLIAPNDLETAA

SEQ ID NO: 184659 - protein, 362 aa, unidentified
MKINPTLIKYVSDSKTGITYYVIGVDLSKSKLDVMLDRHRVFANDEKGCAKLCQIIQGLHKPAIVVYEATGYISLNFAQMLDQNGIRHCQVSPRCVRYHAKAGETEAKTDKLDCALIANYGVKYWENLRINPPMHENHVEMMELNRVRNLYTESIRRTKQVLSTCSYASARSELEAELEALKEKQKKIDTQIHELMVKDEMKKRLLVLLEQQIGVGKETAKTLVLELPELGYVNRREIAALVGVAPFNYDSGTHKGKRITRGGRKNVRNLLFMCVRAALNSKTENDYIKKFNELSAKSNLKGGRSYQQVMVACMRKMIVRLNAVVRDWIKAGCPDLTPIKSASSKSVKKQPSQNKAKHQKTA

SEQ ID NO: 184660 - protein, 392 aa, unidentified
MVVSVGIDVSKDKHDCFIVSSEDEVLADVFTIPNNMDGFRFLLQRIQDYTHAQDKIKVGLEATGHYSYNLLGFLLDNGLTTYVLNPLRTNLYRKSLSLRKTKTDRVDARTIASMLLSDVGLKPYTDTAYHNEELKSLTRYRFDKVKERAKLKSSIARLVCILFPELEKLVPTLHMVSVYALLEEFPGAKQIAAAHLTRLKALLETTSKGRYKRDMALEIRGAARNSIGFPMPAKSLELQHTIRHIRELDNEIAEIEEQIQAIMDELNSPITTIPGLGFRMAAMILAEVGDFTRFDSPDKLLAYAGMSPSTYQSGQLKNCYPHMEKRGSRYLRYAIYNATKYVCHWEPTFAAYLAKKRAEGKHYNVALSHAAKKLVRLIFAMEKSRQPYCSAA

SEQ ID NO: 184661 - protein, 444 aa, unidentified
MAMRKRDDEVFPNAAGIDVGASSHWVAVPRHLAEQAGCESVREVGAMTDDLNALADWLLALGVDTVALESTGVYWIPLYEVLEQRGLKVWLVDARQMKYVPGRKSDVQDCQWLQKLMSLGLLRAAWRPDGEVCVVRAVARQREVLITEQASWVQRMQKSLVQMNIQLTEVLTDVMGMTGQAIIRAIVAGERDPKVLARHRHSRVKASAEEITKALTGNWREEHLFVLRQALAMYDDIAKHLLECEAKLQALLSQRGQAKVDLGKAPKAGSKSRVEFDVRQALANWAGVDLTRINGLGVTVVMKLLSEIGPDVSRFASVKHFCSWLGLCPGTKISGGKVLSSGTKRSANRARQALKMAAMNLSHSDSALGAFYRRLCGRMDKPRANTATAHKLARMVYFMLTRGEAFVDQGQHRYEEQQRQRSIAALKRRAAALGYRINPLEVAA

SEQ ID NO: 184662 - protein, 359 aa, unidentified
MIVIGIDPHMKTHTAVAVEAASGRTLAEKTVAADAQGHEQLLLWARGLGPERCFALEDCRHLTGRLERHLLPRGERLVRVPPKLMAGARSSARSYGKSDPIDAAAVARAALREPDLPVAVLAGPEQEVRLLADHRDDLVGERGRIQKRLRWHLHDLELGLELPPRVLGRYVWLERVEAALRGLPPSTRRRIALEQVRRCRELTAEVRALEREIRSLMRSLVPELLALPGCSALLAAQLVGQVAGAGRFSGEAAFAMHAGTAPLPVSSGKSTRHRLSRCGNRRVNAAIHMIAITQARMHPPAIAFMERKQGEGMSSREARRCLKRYIARTVYRAMLRSEQARAGDVVQAEFGAEELAVAV

SEQ ID NO: 184663 - protein, 345 aa, unidentified
MTDLNIKKNNHEAKLSLQAGIDVGSEELILVISKNSKSFNPQKFSNTPADRARLVKKLVKLPGIIVCLEATGIYHFDLSIALHDAGVSLMVVNPKASHNFAKVLMRNSKTDAVDANTLAEYAERMDFVAWTRPSDEKIALRCFSRRINALTHQKAAAKNHLHALTATQATPKAVLRDAKLAITHLQKRIDRLKAEALVLIGKHSELERVLELLTGINGIAETSAIALMGELLLLPPDLSHREWVKFAGLDPRAFDSGKSVHKKTRIAKAGNRYIRAALYMPALSAHQHDPHVGAYFQHLVVDNGKEKMQALCAVMRKLLHAIHGMLKHDKPFDNTRFYAIPAVVG

SEQ ID NO: 184664 - protein, 340 aa, unidentified
MTNNTQFFMGIDVSKPYFDAALLSVIEHKKGEMICERFDNSHEGIKSFEKWLKSHKVSFDSNTLLVIENTGIYHRLLWSFCSKKNLPIHIGNAAHIKWSFGIARGKNDKIDSQRLCHYAYKEAEELKASPALNPVLLQLKDLMTARTKLLSQINAIKVYIKELKNVSDKSIQKTLEQGYKQALDGMSASIKNFESEIKKIIANNKAIQDNYNLLITVPGIGHLTAVYLICCTNNFAGKITGKQLACYAGVVPFGHRSGISIKGRDKVHPMANKDLKKALHLCALTAIQFYPEFKQYYERKKAEGKHSMCVLNAIRNKIVLRAVAVVSKQKAYVDNTKIAA

SEQ ID NO: 184665 - protein, 363 aa, unidentified
MSELTTVAVGLDVHAHSIRLAAVRADELLEERTLAYDEEAVERVLRRWPSVRCCYEAGPTGFGLHRFLVGRGIDCAVVAPGLVPQRPGDRVKTDSRDARKLARLLAGGLLEPIHVPSPEFEAARDLVRAREDARLDRMRDRHRLSKFCLRHGLRLPTSSWTVARRTWLSEQRFEFVAQQQTFDSYVHAVDLVDARIEQLEQAIRETAEQEPWRALVGRLRCLRGIDTLTALALVAEIGDFNRFKTAAEFMAFVGLVASERSSGEQRRQGSITKVGNAHIRRLLVESAWHARRRPTVGYQLARRQRGQDPADIERAWRCQQRLYRRWQRMAGRGKPQQKIVVACARELAGFVWAIATEQPLRNS

SEQ ID NO: 184666 - protein, 319 aa, unidentified
MTSKGTEKMNSSTIGIDLSKDMLDVYRLSDGAARRFTNDKAGYKALIKWIGGQATRVVFEPTGPYHRAFEQALAKAGLPLVKVNPRQARRFAEATGKLAKTDRLDAALLARMGALLELDVRPIHSNILAELKELRIAREALIKDRTAAKNRAKIRTLPLLKQQNAQRLDEIKLQIAAIDAAILTLIKTDAQSAERFRILTSIPGLSRITACALLIEMPELGTLDARQAASLAGLAPVTRQSGRWTGRAFIRGGRASVRRALYMPALVAARFNPDLKTNYAKLIAAGKPAKLALTALMRKLLVLANALIKSQRTWTPKLA

SEQ ID NO: 184667 - protein, 352 aa, unidentified
MEVTTIGLDLAKSIFRVHGVDTTGQVVVRRPLRRAQMLPFFARLPSCLVGMEACGTSHYWARELIKLGHEVRLMPPAYVKPYVKRGKTDAADAEAVCEAVRRPTMRFVPVKSPEQQAVLSMHRARDLLVKQRTQLVNMIRSLLAEFGLNIPKGLERALLMARRIVDGKAPDVPMEAAKIVSTLSQQALDIHVRLRQIDRDLLVWQRGNDVARRLMTIPGIGPVGATALAASVTDPHQFHSGRQFAAWLGLTPLQKSSGGKERLGRITKMGDKYLRKLLIVGMTSLVCRAKHNPETIEPRLANLLARKPVRVATVAMANKTARTIWAIMTRGETYRAGHQPALAHKNNVTRIS

SEQ ID NO: 184668 - protein, 366 aa, unidentified
MSSISRADLVWVGLDVHKDAIHVGLIRAGSDAVESSVVFNDETAIRKAFERSMGPRTKLRVCYEAGPTGFGLARQLQAMGISCGVAAPSLIPKASGDRVKTDKRDARQLARLHRAGVLVMIRIPTPLEEAVRDLCRARADMVEDLTRARNRLGKFLLRHSVIWRGGSTWTLEHRRWLETRRFDDVALQLTYSHYRAVLASREAALDATSADLAQFYDRAPFADTVLRLACYRGVDRLGALTIASEVCDFRRFSRAEQFCGFTGLVPGEHSSGKSRHQRPLTKSGNAHLRTQLVESAWAYQHQPAIGATLRRRHDAAPPETIARAWAAQLRLCGRFRHLASRKNVRSVVTAAVARELAGFLWAEMTS

SEQ ID NO: 184669 - protein, 378 aa, unidentified
MGGDQLHIGGGRAAAFRELVGALDPRKVVLVGIDVAKASWFVLGCDLHGSVVIDGTKVAADRAGLGQLTGLLDQARIRVGAQLVVVGVEAAGHYHQTLAAHLADRDDLLLRLVNPAAVAAVRKTQLNRRRKTDWLDAAAICDLLVHGEGSRLLLGDDAATALRPLWSGRKDLVDARVRLRLQVLALVDCLWPGLTAHDTALGVRPVLRNLFTTKAGRILLGLLAQGWSPERIGTHDMARLKALFARHGCQLKVTVAARILARAHESLPPHPAATVGKPALLAALLATLETLDRQVTELEATMAGLLPHTEGAKLTQINGISTVVASGFVAFVGSARRWGDWSKVWRGAGLDPARCQSGPTDVNFSISREGSAWGGGRA

SEQ ID NO: 184670 - protein, 423 aa, unidentified
MLGVGIDWAESFHDVALGVPGKGVIEQFRVDHGPAGVQRLISRCAELEPDPAEVRVVLETRHGLLVEALADAGFTVLPVNPDLVARRRGPAKKKDDSEDARICCLMALDAYLDLRQLIPHGEAGTELRAIARDDERAARDERRIGNRLRADLLAVFPAAIDISDGDLGAPVFLKLLERWPSAEALAAASRQEVEALARSARHGWPGRFADRVAGAMAAPRLAPRAALARAKEGSIRLAAAQLLAIRAQRRAWERRMGELLLGAPRYGRSKTPKDPDPGKAFPGGEIYLSMPGLGDRLAARVAGEIGEHYEQFATPNALQCYAGRAPVTRRSGRSEFTVARRLAYNRPLGEAVQQWAFCSLTRSAWAREFYDEKIAAGDSRNGALRKLGNRWLEVLWHCLHKGACYDEAVHAANRKRNRPPAAA

SEQ ID NO: 184671 - protein, 316 aa, unidentified
MSQPNPLCVGIDVSKAFLDIAANCDIAQFTTSNDADGFDAIITELMVLMEATGGLESSVVLSLQAEGFDVAVINPRQAKDFARAMEYLAKTDRIDARVLAQMAEVINRYPDRQRFIRDIPDAERQILTAMVVRRRQLTAMIVAERYCLYPSHPQNRKSINIVLKTLVDEMARIDNEMAAHVRRHFHDLSELFISIKDVGANAVAVMLAEVPELGKLSRREISTLVGVAPVNRDSGAMRGRRTIFGGRADVRSALYMAALVTARHNPVISAFYQRLVHAGKAKKVALVACMRKLLTIMNAMLRKDEGWDESYHLIAS

SEQ ID NO: 184672 - protein, 385 aa, unidentified
MDQTSSSTLSANILHCALELSKKSWLLAIQFPDREQPSLYSIEGGNTEKLMAKLIAARDSWAKVSGAPPTITLCYEVGHDAFWLARFLKAHGIECLVIDPGSLQVNRRGRRVKTDRVDVKMLLRALIAWCRGERHVWSLVRIPSVDEEDLRRSHRERSRLVRERTAHINRIKGLLFAQGIRGINIKSQYKTLAVDKLVTGDGHRLPPRLSCEVAREIQRLAMVQEQIAEIEHERDTAPTPCEATERKRHLLLQLKSIGPAISALLSREVYYRQFANRRQVGSFLGLTPSPYSSGEEERCQGISRAGSGHVRAIMIEAAWLWIRHQPKSALTRWFVERTAGQSTRLRKIMIVAVARKLAIALWRYVEHGLVPQGAILNPPATGNAR

SEQ ID NO: 184673 - protein, 352 aa, unidentified
MTEHSKEQRITVIGIDLAKRSFHLCGMDAQGRRVFSKQVSRAKLAQELANRPPCRVAMEACGSAHYWARRFQSYGHEVKLIAPQFVKPFVKSNKNDAADAEAIAEAAQRPTMRFVPIKSVEQQDLQAIHRLRSQAVAQRTAQVNQIRGLLAEYGVIIPQGRAHVGPCLAEILENAENGLSALFRASLQGLADELRHLDARVAHYDAQIAALARESEPAQRLMTIPGIGPLVATALLAAIGSDPRWFHNGRSLAAFLGLVPRQHSTGGHDRLLGISKRGDTYLRQLLIHGARAVMRWVERKTDALSRWATALRARRHTNIAVVALANKLARIAYAVLTSGQPYDPARGAVSNA

SEQ ID NO: 184674 - protein, 419 aa, unidentified
MRSIGLDVHRDFCEVAILDSGGRRRRGRVASTSENLRLFAQSLAPDDKVALEVTGNAWEIARILEPHVARVIVVSPGDTGIRQARAKTDRLDALALAKLLAAGSLDAIWVPDERTRVMRRRLARRGQLVVARTRVKNEVHAVLMRRLKGRPPASDLFGVKGRKWLAEQILPAEERETVDAGLRQIGFLDSEIAEVERLIALDALAWPDVKRLMTVPGVNVIVAATFLAAVGDIGRFASSRKLVGYLGLDPKVRQSGESAAKHGHISKQGSATGRHALVEASWSAVRQPGPLRAFYQRVRARRGHQIAIVAAARKLACLFWCMLTRGQDYAYGQPSLTRKKMRRLEITAGAPRYQGKTGIWSTNKAMAQAERALVQQAELAYKNTVRDWAASAPVKVGASATPGRASQRPSRSKAARQTP

SEQ ID NO: 184675 - protein, 343 aa, unidentified
MQVSTIGLDIAKNVFQVHGVDAAGKTVITRQLRRGQVIGYFAKLPPCLIGMEACATAHHWARELTKLGHIVRLMPASYVKAYVKRSKHDAADAAAACEAVTRPSMRFVPVKTIDQQAALMLHRCRDLLIRQRTQLINALRAHLAELGMIAAKGKEGVKDLVAIITDAVKATALPEPMRQALQALVNQFAALQQQIGKLERNIHAQHRASDRSRRLETIPGIGVLGATAIAATISDPSAFKSGRECAAWIGLVPRQNSTGGKERLGGISKQGDRYLRRLLVMGATAVIRHARTHPDKHPWVTKLLAKKPYKVVAVALANKMARIAWAILAKGETYRAPTLAAAV

SEQ ID NO: 184676 - protein, 458 aa, unidentified
MKTPSRAKRKRQNQPAPEFLQKLNLNAAGIDIGATEHYVCVPADRDPKPVRVFATFTADLHALAHWLKACRVDTVVMESTGVYWIPLFQILERAGLAVKLVNARHVKNLPGRKTDMRDCQWLQQLHTYGLLTASFRPSDDICVLRSYLRLRDNHSRAAARHVLHLQKALQQMNLPLHHVISDVTGVTGLAILQAILAGERDPHKLAALKQYQIKSSRDQIAKALVGDWRPEHLFALRQALEGYKFYQSQIAACDQAIENVLAAFKPKVDPVQYPLAPAKPSQKKASDPLAQMRSPLYQMCGVDLTVVPGLGVLSAQVIVSEIGLDMSKWKSEKHFASWLGLCPEHRITGGAILKRHTRIVINRASIMLRRAAATLHRSPTALGAFFRRVSARRGAAKAVTATAHKLAKIIYRLLKFGQPYVETGQEQYEEKYRARLLKHLQKSADTLRLQLVPKQPST

SEQ ID NO: 184677 - protein, 404 aa, unidentified
MKGPIVSIDVSKGKSDYQAFKDLNVKYTGSRSIKHNKEGFDEIVNLVREMEKKLETEVCVVYEATGVYHRVLKKVLEDNNIKQFIINPLLSAKTRKNDSLRSPKTDKLDPKSIAKTYYSHSLHNSHKQETIYHELRELSRYYEDILVHIRKDKVAFRAQLDIVFPGYDTLYDDLYGPVALAIIEKYPHPEMLQKKKINTVSKVIQNKTCHRQAVSDTMADKAIEYSKTIYSGCDKDDIEVLILQRFIKKLNEDMAEAERTIGEMIKLAQELPDFNIIKSIPGIGDNLAARIIAELGDMTRFKKKNELVAFAGLDPRISESGQNDGDHMHITKKGNKRLRCLLYLAVTCSIRLKIDDNSIKDFYIKKKQQSNPMCSKAAKTACASKLVRIIYSMCKTGELYQYNK

SEQ ID NO: 184678 - protein, 338 aa, unidentified
MKLYGAIDLHSNNNVTVLIDEQDQVVYQKRLPNDLSLIAQQLSGYQDALQGIVVESTYNWYWLVDGLMDQGHRVHLANTAAIQQYEGLKYTDDHSDARWLAHILRLGVLPQGYIYPKEERAVRDLLRKRGQMVRQRTTNLLSIQNLITRNTGSSIRSNRIKTLDAEQVDDLLPNPDLALAVKANLAMIKCAAEQIEILERTVTDRIKLREEFSFLKTVPGIGQVLALTIMLETGQVQRFPTVGDYASYCRCVGSQKLSNGKKKGSGNTKNGNKYLAWAFVEAANFAIRYNARIKSFYQRKKAKSHGVVAIKAVAHKLCRACYYIVKDQVAFDVAKAFA

SEQ ID NO: 184679 - protein, 312 aa, unidentified
MTHLSHAGIDVASDRLDVMLLPDGQCFWVANNTAGWAELVTRLRGLHIAAIGIEASGGYERGVIRALLAEGISVRQINPFKLRQFAKASGVLAKNDRLDARMIALFVATMPTRPAQRNQAAERVGEVVTARRQLSDQKVAAENASRLFEDASLRRLYRRRVARLALDIALLDKRLAEMVSADVVLAKRYRLLTSMPGVGPVLAFTLIAFLPELGQMSRKQVAAIVGVAPYDFDSGKMKGIRCIWGGRAPVRRVLYMAALTACRFNPALKTFHERLAAAGKKSKVAIVAVMRKIITTLNAMIRDNVAWDVRSA

SEQ ID NO: 184680 - protein, 482 aa, unidentified
MKKRNIFQNQSQEILSLFESAQDRSKVMCIPIDYAKKDHVVMFCNGNGKIIRKPFSIKNSPEGKDYLIDQVRKSCSHHGINPRHVFYGGEDCGSYADNFITTLRLEKCLVAGVNALDAKKHRENVQASTDRLDLLGISKVLLNCRGNCSPAQSGIYWNLRALVRERRKLVNIATGVRNRIHNIVNRIFPEFLNEKKSGISPFSKGSLALMENRFSVNQIRRRRRSTLAKFLARNLVHHSDRCAEKLQQYASQVLQPPTDRIATLQISLKQQVKLFNCLQESILHLNKEIAEHLAQTPGAVLTSIRGIGITLAAGVSAEIGEPNKQGSLSNLVSYAGIIPRIKQTGGTQGKTLVKKVGKRCNRILKNYVVQSANHLGLYGPDDLKMDYKRRDAQGQHADFGMARRYLRMAMCLMKTEQTYLPKNLRSTQSNMKERAEYYIACWPTLHAKWKRSGALDIAFDKAMRLGRWRNMIQELYGIELTL

SEQ ID NO: 184681 - protein, 346 aa, unidentified
MKITTIGIDLAKTTLSVHAVDAHGKTVMNKSLSRSKLLEFMSNLEPCLVGIEACGGAHDLARRLISMGHDARLMAACFVQPYRKNQKNDGNDAEAICEAVARPNMRFVPVKTAEQQALLSVHRVRLELIAGRTALINQLRGLLTEFGIVMPKGRYQMRAHVSVALEHPDLPELARTVLKELYQRIGAMDQDILAQERRIEAFARDSVLIQRIMGITGIGPVTASAIVASVGDAKLFKNGRQFCAWLGLVPRQYSTGGKPRLGRITKRGDVYLRTLLVHGARAALTVLTKRTDRLSTWVQALVARRGYKKAIVALAAKNARLVWAVLATGQPYDPRRARSSDLTSVN

SEQ ID NO: 184682 - protein, 420 aa, unidentified
MDRVVADIIHPIACGLDVHSAVIAACLVRPGPQGGPHYEERSFSTNLRGLRELRDWLVGHGCQAVGMEATGVYWIPVFAVLEGHVPMVVGNPNHMRNLRGHKTDRKDAKWIAGLIRHGLIRPSFVPTAEFREARELTRCRRQLINARTGIRNEVTRLLAHQGIPLGADGLLANIFGVSGMGILEALAGGRDIQKELPKLLHRSVKHKQELLSAALEAGLGAVARKLLAIHLGRLEAAEEDLQKVEALIAAQLAPYKDRLDLLMTIPGISYLSACVILAELGVDMTRWPTHRHLAAWGGVAPGCRESGGKAHRAATRKGNPFVCTTMVECAGAAVMKKDCHLAGKYRHLCARTGSKMKARVAIARKLLVIVYHVLSTLKPYEEPKPQMASKQAKQRAIKKHVRELQKLGQDVQISPILTSA

SEQ ID NO: 184683 - protein, 424 aa, unidentified
MKVTYQTCCGVDVHKSFLVATIVKTTGGIEPSYQKKRFSTFNNSILEFKQWLLDNDCHDVCMESTGKYWVPVFNLLEDDINVVIANPKWVKAVKGNKDDTKDSKWIGDLFRLGLVKGSYIPCKKVRILREYTRYRYKLVSCRSSEKNRYQNALTVCNAALDSVVSDIFGKSSTSIIDYLLEQSGSSINHEEIASKLLRSLKSKEDAVIESVEGYQMTDAQKYRMRLVRAHMDYITAEINDVDKMIENMISSNTDFENAVQFLCTIPGVKRDSAITIISEIGTDMSQFSSSRRLCCWAGLTPGSNESAGKKKSVRFTRAGVYLKPALVQCAHAAVKSDKSPYYKKKYESLVKRRGKKRAIIAIARMILTAIYQMLSTGEQWNPSDLYKIDMPVALVEKQKAKAIKQAKKLLQREGLLPPDEPLAS

SEQ ID NO: 184684 - protein, 320 aa, unidentified
MAQQGRIVGIDVAKLKADACIRSLQLRLSQPSTAQGQQDMITWLRRNEVGLAVMEASGGYERLWAEALRAAAIAVRIVDPKRVRYFAKSAGRLAKNDPIDAEMIAWFAETFAAAAEPAHDADRDALNRLVTARSLLVRLATPIRQLGEHGQPRVVENAQRAILKTIKAQLAKLEAAIEAKIAANAQFLARRAIIASVPGFGDHFVAGALAWLPELGRISNKAAAGLVGVAPYDDDSGQHRGERHIKGGRRDIRTLLYMATLGAATRHNPIVKAYYQRLRAKGKPAKVALIACMRKLIVILNTMLARGQIWNPSPCPTAVV

SEQ ID NO: 184685 - protein, 342 aa, unidentified
MQITTIGLDIAKNVFQVHGIDATEKVVVRKQLRRSKVIAFFEALPPCLVGMEACASAHYWARELRKLGHEVRLMPAKDVKAYVKRNKNDAVDAEASCEAVRRPTMRFVGVKSAEQQGRLMQHRTRDLLLRQRTQVINALRAHLAELGVVAAQGREGLKELLAIIADEKDDRLPVDARASLMVLAAQLQALQTLIGSIEKRLVVQHRANEASKRLETIPGIGVLGASAIAATVSDPNVFRSGRDFAAWIGLVPRQDSTGGKQKLGPISKQGDRYLRRILVVGAIAVLRYAKQNPEKYPWLTQLLARRPFKVVAVALANKMARMAWALLAKGGTYRAPALAAAA

SEQ ID NO: 184686 - protein, 390 aa, unidentified
MTNDMLYVGLDTDKKYIDVGVAEPLPGGEVRYFGKIANEAAALDRVIKRLQRGSRQLMLCYEAGPCGYGIYRRLNDKPGVACQVVAPSMTPRRPGVRVKTNRRDCLMLAKLLRAEELTPTWVPDAANEAMRDLIRARAAVGADLQRCRQRIGSFLLRQEIRYAGKPWTQKHRVWLGRLEFDALSHRLMFGEMLDALDQAVARRKRLEDDITELVPNWSLAWLADAIQALRGYRLINAVTVVAEIGDPRRFDSPRKLMAYLGLVPSEASTGDNVRRGGLTKAGNRCARKALIEAAWTYRRPAKTPPQRAQARSAAVRAIAAKASHRLSARYRRLVARGKPATVAVAAIARESLGFIWAIAHAAFPPTVPQSTSIAPGSRRQGRCASPMAMA

SEQ ID NO: 184687 - protein, 331 aa, unidentified
MKFKSFIGIDVSKSTLDAYLKINQSHAVFQNDEKGYEELVEWVMENSGLVLARDLLFGFESTGIYSSELALFLEKHALPFYIMSGLELKRSLGIRRGKSDKADSKDIAQYLYEKQEKIELTVLPSQTIQDLKKLFNYREGLVKERAAFKTRLKEYEEIVSKNRLKVYEKSHATVIACLDKQIETIEKEMEKLITTEKSLLNQYKLINSIKGVGPQTALALIILTEGFTRFSSWRKFASYAGTAPFPNQSGTFNGRTKTSQLANKRIKTLLFMCAGTAIQHSTEMKNYYQKRIGEGKSKMSTLNVIRNKLLSRVFAVINRNSNYVDTLKYAA

SEQ ID NO: 184688 - protein, 352 aa, unidentified
MERAEAARFSKPPPLSSRLRPALWIAGEIAASRATRREVKVASEPKALLAVLKNPAYRFKRIGLEAGPLSQWLFSALAEAELAVVCVETRHMQAVLKAQINKTDRNDARGIAQMMRVGLYRPVHVKTLRSQKLRMLLTHRKLLQSKAIAIENDLRGTLRNFGLKVGMIGKVKFEARINELVESLPDLAGLVEPLLVVRRALREQIVVLHRRLLAIVRDDEVCRRLMTTPGVGPVVALTYRATVDVPARFHKSKAVGAVFGLTCSKYQSGEIDRSGRISRCGDQMMRVMLYEAAQSILRSKKWCWLKAWAMQIARRRGMKKAIVALARRLAVIMHRIWVDGTEFRWTREAVAA

SEQ ID NO: 184689 - protein, 353 aa, unidentified
MVVVKDHQQRQPSMGDIITIGLDLAKNVFQVHGVDEAGSVVVRKRLRRGQVLAFFAGIPPCLIGLEACATAHHWARELIALGHEARLMPPNYVKAYVKRNKHDVADAEAICEAVKRPSMRFVPLKTAEQQSVLMMHRARDLLIRQRTMLVNALRGHLAEFGLIEAQGLHKVARLITIVMDEMDGRVPDIARQVLKVIVSQIEDIRRGIAELETQVLAWHKNNPVSQRLATIPGIGPIIATAIAATVADPNTFRSGREFAAWLGLVPRQNSTGGKARLGGISKRGDSYLRRLLVNSAHTVLLCSKAAKTDPWLISLLRRKPRLVAAVALANKTARVAWAIMSRRETYRHVAAAA

SEQ ID NO: 184690 - protein, 312 aa, unidentified
MSSPLVYVGIDVSSQRLDVAIGDDPLESYDNDDAGVIALCQRLRAVHCELIVLEATGGYEALAVATLAGEGLPVRVINPRQVRDFAKATGLLAKTDALDARLLQQFAERIRPVVLPHKSEATRELAALVARRRELVQMLTAEKNRLKLATRRVGRDITAHIRFLEKRIHDSDDELKRRIETDDDFRITDELLRSVPSVGRVSSSTLIALLPELGALPHRRIVALVGLAPLNDDSGKRIGRRHIWGGRSEFRSVLYMATISALRSNPVIRTTYQRLVAAGKPKKVAIVACMRKLLTILNAIVRDQTPWNPAIA

SEQ ID NO: 184691 - protein, 409 aa, unidentified
MHRRCAGIDISKKDAKVCVRVQGSGRRATTASVTTWGAMSNEILALREHLVAEKVTCVVMESTGDYWKPFYYLLEDAVNVMLVNPRDARNRPGRKTDVSDAAWLADLGAHGLLRASLVPPPPIRRLRDLTRARTDLNRDRVRQIHRLEKILQDAGIKLSSVATDIMGQSSRAMLEALIEGKTDPAELADLAKRRLRSKIPALTEALTGRFTAHHGYLIRMHLNLIDSYTTALRDLDTKIIDALSPSLAAARDRLCSIPGWSTTVAEVFLAETGGDMTAFPTAGHLASWAGVCPGANESAGRVKSTKTREGNRNLKGALGIAALSATRSRDTYFAAKYRRICAHRGPMKALVAVERAMVVAAHGMLTNGDFYRDPGANYFTARRPGSIKANAIRQLQALGYAVTLEPATA

SEQ ID NO: 184692 - protein, 316 aa, unidentified
MSVETWFVGIDVAKDRLDVALHPTDERWTGSNDPAGIEALSEQLVRLAPQLVVLEATGGFEVPLVGALGARGLPVVVVNPRHVRDFAKALGRLAKTDRIDATVLAECAARVRPVVRPLPDEEARELHAWLARRRQWVEMITAEENRRQQAAAPIRRQIEGHLRWRRCQLAALERELTTRVRRSPVWRESETLRRSTPAVGPVLARTLLADVPDLGRLTGQQIAALVGVAPFNRDSGPRQGHRSLWGGRAPVRGVLDLAALVATPHNPVIRAFSQRRVAAGKPWKVVLTACMRKLLTILNARMKHRTAWKPVPALGA

SEQ ID NO: 184693 - protein, 276 aa, unidentified
MNNISIVGIDLAKHVFQLHAVDNRGHQVFSKKVKRDQLSTVIGNLPPCLVAMEACGSAHYWAREIRQLGHEAHLLPPQAVKPFIQGHKNDARDAAGIAEAAARPATRRVAVKTQEQQSLQALHRVRSRLVRARTAVGNELRGLLNEFGIIVAQGHRVIRQGDIRRLLDERHTQLGTALCDVMHDLLDEWQALDTRIAEYDKRLGAYVQATPSMKQLMSVPGIGPVNATLLFSHMGDPKRFPNGRQFSASIGLVPRQYSSGGKNILKSITPPHSRGL

SEQ ID NO: 184694 - protein, 318 aa, unidentified
MNSYYKVETTEPVRYVSLDISKARLDYAIAGQKCRKVPNTAAGIATLITAIQPLPGVRVVCEATGGYERRLLEQLHQAQVPVCRLQPGRVRSFARAEGTLAKTDRIDVGVIYRYACSMHPRVEKPLLPEVTALRELMDYRRQLVEQSTQTGNRLETAGATLQALLLVQYEQQQAALAKADELIAQHLRAHPALQAKSARLQQVQGVGPVLATTLLAYLPELGEEDDKRIAALVGVAPFAHDSGESAKPRHARGGRVEVRNVLYMAAVSASQHNPVLAPFYERLRAAGKPANVCLLAVMRKLVVVLNRMLKDPHFTLVS

SEQ ID NO: 184695 - protein, 521 aa, unidentified
MVEREGLCLGPRARHRVSSFPPGLSRGLTWCTTPDNHKDDDAWHPAVLNKGGNAMKSFYLGVDVSKGYADFVIINQQKQPVIKGFQLDDTFDGHSRLHEIVSRFLTDHPQAVMCAAVESTGGYENNWYNTLIRLDASLNIKTARLNPLGVMHNSKADLKKNTTDKISAQNIAEYLIAHPEKVVYQQQDQLASLRKQWGFVQMLTKQCTQLLNQLHSLLYTANPEILNYCRDGMPAWALKLLLKYPTAAKLKKARDKTVAKIPYVSLGRAKQLIAGAKHSVASATDPVTAQLITATAEQILQLKKTIAAQIDLMAAQCDVPEVKLLKTFTGIGDISAIGLILEIQSVARFKTAKKLASFWGLHPVYKISGDGSGAFKMSKQGRVNPRKILYTVTLSAIEHNPVIKPIYEYHLQQGKHKMNAIGICMHKILRIIYGMLKNNTAFDPKVDAANRQRSLPDMTAYPKKTKNRRFQSYDSKAPVSRRQRKKRLERERSHSVITDTKCGISAPVPIGDIISDMLSNI

SEQ ID NO: 184696 - protein, 446 aa, unidentified
MAQRTRVKLEIANPNAAGIDVGSASHFVAVPPNRDDEPVREFKSFTEELERLADWLIACGIDTVAMESTGVYWIPLFELLESRGLSVYLVNAQHVKNVSGRKSDVLDCQWLQQLMSYGLLSGAFRPKEEICALRSIMRQRGMLLSYQGQHVQHMQKALAQMNVQLANVIADVVGETGQRILRAIVAGERDPMKLAELKHGRIRASKEQIAMSLHGNWREEHLFELTQAVELFDAYSQALQRCDLKLEAMLARLSRNQDQPGPSKRRRYSKVKNAPKFDVRTYLFRICGVDLTAIDGIDTTTALKVIAEVGPDLSRFKSAKHFASWLGLCPGTKISGGKLLSGTTKRTANRVAQALKMAAISLRASQSALGAYFRRMCARLDKGKAVTAVAHKLARLIYAMLTKGAAYVDQGQDYYEERYRQRVLFHLKRKAAALGLDLVPVQTHPA

SEQ ID NO: 184697 - protein, 338 aa, unidentified
MPTYAAIDLHSNNGVLAIIDETDRVLRQRRISNNIEEFLKELEPFRATLQGVAVESTFNWYWLVDGLRSKKFPVMLVNTAAIQQYEGLKRSDDQYDAWWLAHMMRLGILPKGYIYPPEERAVRDLLRKRATLVQQRTANILSVQNLEARNRGTKISSNEVKHLTNASIAALYDNEDLALALTTTLTVIDTLTKQTSLLEKAVLKKARLRSEWELLLTVWGVGKILGLTIMYEAGEMSRFAGPGHFASYCRCVDATRLSNGKKKHDNNAKNGNKYLAWAFVEAAHFAVRFYPEAKRFYDRKTAKSNKIVAIKALAHKLARAAFHVLHDQKPFDPKKVFV

SEQ ID NO: 184698 - protein, 386 aa, unidentified
MDMSRVAQMGLDAHRTFSNVTGRDADGHIVCRHRLDHRNRPALLERLQGWPEGTPVILEGTFGWGWLTDTLKFAGLEPHLASSQKVAAWRTARGIAKSNRTDADLLSELWLQKPRWWEVWLAPPEVRDRREWMRYRMSLVQTQTRLKNQIHAIMHRHGIVHGFSDLFGRDGRRFLNLLVAPKDATLRASAKAALKGYLQLLDHVRRQIAGATREIRRQISKNPDGERLRTIPGISWILAYTILAEIGHIDRFKTGKHLASYSLLVPRSDDSGEESDDPPKGRHVGFIGRRTLKWAFIEAAHGAVRKGGRFREIFDRRTDGGKKDRNRGYITVGHELARLVHVLWKKEVDYTDQPPERPGARWNNKRGDSESRPGTGQPEDPMVVAV

SEQ ID NO: 184699 - protein, 345 aa, unidentified
MGVDVSKRKCRAAVVDGDGVLVDEFNFSNDFEGIRRFVSRLSEGDAVVMESTGNLWVNLYEAVEANGVKAVLANPLKMRAIASAKIKNDKVDARVLASLLRGGLVAECYVPPRDVRELRALVRHRVQLVKSASMVKNRVHSLLDRYGFRREFSDLFGKAGLEWLKRLELKPLDRLLLDGFIEQIECLERLTRNVDVEIGRRASVDEDVRLLLSLTGVGVYSALLIKSEIGDVRRFPNYKKLVSWAGLAPSLYQSGNVERRGHITKQGSKLLRWVIVECARIAVQYDARLGEFYERVKRRRGEQKALVAVACKMLKIIWFILTRREPYQSRNARLYEEKIYRLSRY

SEQ ID NO: 184700 - protein, 413 aa, unidentified
MEAAYYVAGIDVHKKMLAVVVANAGDSELQFECHRLGTTVSELQALSTWLREHGVQEVVMESTAQYWKPVWLALEGHFQLWLAQARSNRGPRGRKTDFRDAKRSVRRLLSDDLILSYVPGMEQRGWRTLTRTKYQLTRDRVRLQNQLESVLEECQIKLSSVVSDLLGASARRILDAIAAGETDPTRLRELGSSRLRATDAELTDALNGQPQPLHRKLLRLYLQRLDLIEAQITELESMIAEAMKAHQDAIMRLAELPGLGVDSAQQIIAEIGPRASAFPSAAQLASWVGVCPGRQESAGESSSDRSAKGNRAMRRLLNQLAHAAVRKRDCHLQIIFNRLAVRLGYAKAVWAIAHRLCRLIWKVLHEGVRYVERGPSVSSLTLKRRSQRLVTQLKKLGYQVQLTPMGSAASLIA

SEQ ID NO: 184701 - protein, 421 aa, unidentified
MEEITEEPVALVERVAALDIGKRALTACVRVPHETKPGARLQQVRTCTTTTRSLLGLRDWLVCQGVTRVVMEATSAYWKPPFYLLEDDIAECWVVNARDVKNAPGRPKTDKLDAVWLAKLAERGMVRPSFIPPRPQRQLRDLTRYRRTLTHERTREMQRAEKLLEDAQVKLSSVISNIFGKSGRDMLAGLIAGQRDPYALAALARGKMRAKTSLLQEALTGHFTEHHAFLLTMMLARIDALTAQIDTLTTRIEQAIAPFAHQVAQLDEIPGIGIIGAQEIIAEIGTQMSRFPTAGHLVSWAKFAPRARQSAGRAKAATTGEGNPWLGGTLGEAAISATRTSTFLAARYRRIVKRRGKKRALVAVGNSILTIAWHLLSDPGTRFTDLGPYWHDHLAPLRCKRQLIAELERLSGMKVTLQQSA

SEQ ID NO: 184702 - protein, 354 aa, unidentified
MSQTPNTVIAVIGIDIGKNSFHVVGHDARGAIVLRQKWSRGQVEARLANMPPCLIGMEACVGAHHLSRKLASLGHDARLMPAKYVRPYSKGQKNDFNDAEAIAEAVQRPTMKFVATKTAEQLDLQALHRVRERLVAQRTSIVNQIRAFMLERGIAVRQGIGFLRTELPTILATRADVLSPRMLRVIEELAGDWRRLDQRIDDLSGEIEALARQDQACSRLMTVPGIGPIISSAMVAAIGTGDVFSKGRDFGAWLGLVPKQISTGDRTILGKISRRGNRYLRVLFVQAAWVVLVRIKNWERYGLKSWIEAAKRRLHQNVLAIALANKLARIAWAVLAKGRAFELTSIDDAGVRPA

SEQ ID NO: 184703 - protein, 387 aa, unidentified
MQKPHDNSKASPAAFMQDNTLIAVIELSLSNWLVAGLIPGVSREPLKKLEPNPEDLLKLLHGWRDEAIKAGRPITRIAVAYETGRDSFWLARWLRERGIDAHVIHATSVTVSREHRRAKTDRLDTAMLKRGFLGWLRGERGHCTVAIVPTMEEEDAKRPHREREGLVHEQTRVVNRMKSALIQFGVRNFNPKLRKARVKLETVRTPEGKSLPPNTIAALRRDMERLKIIKEQIKAIEQARLQQFEQKPEALANRMVYLLVRIYGLGLETADLLAHELLSRTLRDRKAVARYAGLTGSPDESGSKRREKGLSHSGNARVRKIMIQLAWRMVKFQPDSALVQWFKQRTENAKGSRKPMIVALARKLIIALWRYANDGVIPEGFRLHSAA

SEQ ID NO: 184704 - protein, 318 aa, unidentified
MGNVTSVFVGIDVAKLKLDVVVLPTGEHFQILNSREGFGQLLEKLQAQPPACIVLEASGGYERPCVAALVEAGLPVAVINPRRARDLARGLGKRAKTDRIDAGVLAYCAQHCELHKAVKTPEKQVQLEALVTRRRQLVSMRSIEQTRLEQATIARTRTDIQESLRFLGRHIENIEKQIADLIDSDDYWSGLAARLQSVPGIGKATAAVLLAELPELGTLNRQEIAALAGVAPYHRDSGTRKGKRAIAGGRPALRNCLYMAVLTARTWNDTIRTFHQRLTAAGKPFKVAQVACIRKLLTILNQIAKTGLHWKQHLPKTV

SEQ ID NO: 184705 - protein, 354 aa, unidentified
MSEEKYVGLDVHQSTTVAAVHDEHGRSVMESIVETDARAIRDLLRGLSGRVHVTFEEGTQAAWLYEVIRPIVAEVIVCDPRRNKLMGDGNKADKIDANKLAELMRGGHLKAVYHGSQAIRTLKELVHNYDALVDDSTRVMNRIKAVYRGRGVRSSGRDVYYKRDRDSWLKKLPEGGLRQRTQFLYQELDMLKQLRQGAKREMLREARRHSAYRVLKTIPGLGPIRVAQILAAIAWPERFRTKRQLWTYCGLAVVTRSSAEYEFVGGKAQRRKTKSETRGLNWNFNRRMKEVFKAAALDGTRREPFRTYYAGLIASGMREEIARVALARKIVAITLRVWKKGEAFDAAKLKVATT

SEQ ID NO: 184706 - protein, 358 aa, unidentified
MQIIGVDLHTRQQTIAMLDTETGELIEKTLKHDGEEVRKFYSALPGQVLVGIEATGSMHWFLELLEELGIDHQVGHPAEIRKAETRKQKHDRRDAALLLKLQVEDRFPSIWMPSTELRDLRTLLLHRHQWVRMRTRVQNALQAIALGHGLRRGRSLWSQLGQHTIESLPLAPHAAHRRTELLALYRKLSTQIDELDERVMDHARHRPGATLLMTHPGVGPVTALATDVFLGDPARFDNGKALVSYVGMIPSEYSSAGRQRLGGLSKQGNPFLRFLWCEAAVHAVRRDPDLQRFYRRKLQQKGLGKARVAAARKLGIRLYIMLRDQIDYQEFCRRGQMRQKSGGACAGMPEVGHSPAIQ

SEQ ID NO: 184707 - protein, 388 aa, unidentified
MNRIIKIGMDVHSTNYTLCAMEPTIGAEERIFGEVQVAPDYKEIIAFITSLKKKLGLNNDYSIECGYEAGCLGYTLYHQLTAAGIKCVILAPTTMLTQQGKRVKTDKRDAYLIAQCLCYGGYHPVYIPTGKDDSVKEYLRMRDDHKIALKKLKQQINAFVLRHGYQYVGTKWTIRHITWLKKLQLDPIYRETLNEYMASYDEQEAKVERFDKRIEEIASEACYKDNVKKLGCLLGMRTHTALSLIVETGDFARFAKGNIYGAFLGMAPGEHSSSTNLNRLSISKAGNSHLRRLLVEASKGLCKGVVGYKSKELRSRQKGQPTEVIAYADKANIRLRSKYYKMIRHGKKKNVAVAAVARELACFVWGMMTGNIHPATTAGSSAPAVSQG

SEQ ID NO: 184708 - protein, 313 aa, unidentified
MHSPPYVGIDVAKARLAVAVRPSSEQWVSATDAASLEDLVGRLHARQPELIVLAATGGREGPTVAALAAAGLPVAVVNPRQVRNFARAIGQLAKTDALDAQVLAHFAQLVHPRPRPLPDVQAHALAALLARRRQLIQMLTAERQRLDTALPAVQVHIQRHLTWLEGELADLDRTLSQQVQASPVWRERENLLRSVPGIGPPTAVTLLAELPELGQLDRKAIAALVGVAPLSCERGAWRGRRIVWGGRARVRTALYMATLVASRHNPTIAAFYARLCRVGKPKKVALVACMHKLLTILNAMVRRGTLWSVHLAP

SEQ ID NO: 184709 - protein, 402 aa, unidentified
MAAKTAGIDWASEAHEVCVSEEGGVAERFSAAHDERGIAELTARLTRAEVDRVAIERPDGILVERLLAAGLEVLAIHPNQVKAARARFAVAHGKSDRFDAYVLAELARTDAHRFRALVPDGDETKALRALTRAREDLVGVRVELANQLRAQLQAFWPGALIFREVDSPISLAFLARYPSPADAQGLGAKRMAAFLGRSSYSGRTDPVELVARMKAAPVGTVAQAEGGARRAVVAGLVAALGPIVAEIAALDVRIRERLAAHPDAAIFTPLFRDRKTTICPATLVAEIGDCRQRYPSEAALAADAGMSPVALESGKLRVATFRRACDKRLRFAVSTLADSTRHWHPWAKEVYRRARARGQDHPHAIRTLGRAWIRVLWRCWHDRVPYDPIRHGNFNRLQTVEG

SEQ ID NO: 184710 - protein, 315 aa, unidentified
MCGEYVGIDLHRRRSVVVRIGPGGARLSVVRIDNSPAALAEAVTAAGDHPQVVLEATYGWYWAVDVLQELGASVHLANPNALNWGERRVKNDVVDATDLADMLRLGRLPEAWIAPPALRELRELVRYRAKLVQLRSGLKAQVHAVMAKEGVLPTLDGMFGPGGQVQLDEMGLSHNYRVRVESLRDLIEVYDREIGMLERDIHRHLCHHRGYQAVQAINGVGRTIAAIFVTEIGDVARFPTPRHLCSWAGLTPGRRESDVKGHDQGITKHGSKLLRWSLIEGISRYHGGPHLTPTFHRLAERRAATRPAWRSPVAC

SEQ ID NO: 184711 - protein, 296 aa, unidentified
MNVPGKTVLKPLTFSNNKAGFELLDLSLRQLNQDCLIALENTGHYAFNLLNFLHEQGYKVYTYTPLLIKEFAKSLSLRKTKTNKKDAHGIALKLLSDPNREQFQHDNRQVELKILARHIHRLKKKQSDWKVQYTRCLDIIFPELDKIVEKHSEYTYQLLTCYPNPQKRLEAGFDKLIEIKRLTASKIQDILSVAPRSIGTTSPAREFEIIKHYKRLIDKAETCVNDLMAEFNSVITTVTGIGNRLEAVILAEIRNIHAFDNPAQLQAFAGLDSSIYQSGQIDLAGRMIKRGSPHLR

SEQ ID NO: 184712 - protein, 389 aa, unidentified
MIYVGIDVAKDKHDCCILGSEADKLYPTFTIPNNKAGLDELYEKIFSVTDDKAEIKVGLEATGHYSLNLLGSLIDRGLTTCVINPLHTNLYRKGLSLRKTKTDKVDAGSIALMLMTDKTLKPYSDTSYHSEELKSLTRYRFDKVQERAKLKTSVARLVNILFPELEKLVPTLHIASVYTLLSELPGASYIAECHLTHLKSLLETASRGHYGRDMAIAIRDAAKDSIGSVMPAKSMELKHTIHLIEVMSDEINEIESSIKSIMDTSGSPIMTIPGINYRMGAMILAEVGDFSRFSNADQILAFAGLSPTTYQSGQLDSCYSHMEKRGSRYLRYALFNATKFVCQRDEEFAKYLAKKIGEGKHYNVAVSHAAKKLIRTIYRMELTGEAFRR

SEQ ID NO: 184713 - protein, 392 aa, unidentified
MNPCALGWDNHRKFSKVSLMEQVPDGEIRVVERARLEHDDKEAMRTWLSHLDPEIPVALEATFGWPWVADLLEELGHPVHLGHPPVIRALAKHEAKTDRCDGDRLGKFQLRGILPESYLAPPEVRQRRERTRYRMALSLLRTGVKNRVQAILHRFGILHDFSDLFGKAGRCFLEGLELPEGSRQALKGYLDVLDMLTRLIGEVEQWMKENLEEDQLVRLLMSIPGIGLILAHVIRAEIGEIERFPTFRHLASYDGLAPMSNDTAGREGPRHCSMACNHVLRWAFIEAVHGVQLTKGPHGLRLRWLYARLCGQGRQKGRKSSAKVAVAHELSKLVYVVWTKRVPYTDTPPPRPGSRKGRRQPKDSPTVKTTLRSDQPRHPMVRRRATVGQTRV

SEQ ID NO: 184714 - protein, 413 aa, unidentified
MLLFIGDDWAEDHHDLEVEDETGRRLAKARLPEGLEGITKLHALVAEHAPAEWAELPSEEVASRVYVGIETDRGPWVTALQAAGYQVFAINPLSSARYRERYSTSGAKSDAGDAHVLAEIVRLDRDHHRQIAGDTDLVDAVKLVARAHQTAIWERTRQVLRLRSTLREYFPAAIEAFEDLAAKDSLLLLARAPSPARAAKLTRSQVVSALRAARRHHVEAKADVVLAVLRAPGLRQPPTTEAAYAAVVIGQVGIIGALNEQITQLQEVVAEHFGRHPAADIYLSQPGFGVVLAARALGEFGDDKKRFHDARARKNYSGQSPITRASGKKTVVLARYATNRRLGAALHAQAFSALVASPGARAYYDALRARKIGHHAALRQLANRLVGILHGCLKTGTNYDENTAWHHQITAAA

SEQ ID NO: 184715 - protein, 386 aa, unidentified
MQAPTVSTPITGHISTIFVAIELSQKSWLVTLHSPDRDKISRHKVQGGDHASLLALINRVRDRAVQRLGSVPAVVSCYEAGYDGFWLHRLLIAAGITNYVFDPSSIAVDQRARSVKTDRIDGEKMLRTLMAYLRGEPRVVRIVRVPTPEQEDARRDTRERGRLTKEQTAHTNRIKALLRLHGFAVGQPRRRDWLTWLAAQRDWQGQRVPPRVLSEIENEHARLMLVRKQLDALARTPAAADPAPAVAEMVRRSELLQRLKSLGPAFATTLTQEAFYKDFRNRREVGSYFGLAPSPWQSGGTDRDQGISKAGNPRARCSAVELSWLWLRHQPDSELSRWFRQRTLNAGKRTKRIAIVALARKLVVALWRYLTTGLVPAGAVLKSAKA

SEQ ID NO: 184716 - protein, 346 aa, unidentified
MGKSITDLSSVTTVGLDLAKHVFQVHGVDASGRVVVAKAIRRNKLLEFFASLPPCLVGLEASGSAHHWARELIKLGHDARIMPPAYVKPYIRRQKNDAADAAAICEAVTRPSMRFVGVRSLENQAALMRHKAREMLVSQRTQLLNGLRGHLTEVGVIAPQGPRHARELAELIEACDETIPFEVCEALAPLVVQLRNLDEAIARLDRIIAKLAQKDETARRLMSIPGFGPITASAMAATIQDTSSFAGPREFAAFLGLTPKQNSSGGKPKLGRISKMGNRYLRKLLVVGAHAVLFHRKPHTDPLRMWAKKLIDKKPFKLVAVALANKMARIAFAILRGKTVYREIPA

SEQ ID NO: 184717 - protein, 345 aa, unidentified
MNITTVGIDLAKTVFQVHGVNERGKAVLRKQLKRDQVAAFFANVPPCLVGMEACSSAHHWARKLRGLGHDVRLMAPQFVKPYVKTNKNDKADAEAICEAVSRPNMRFVPIKSIEQQAVLTLHRVRQGFVKARTAQANQIRGLLGEFGLVIPQGIAHIANRAPELIEDASNELPGSVRQLVERLLEHLKALESQVNEIETQIVAWHRMNDDSRKLARMPGIGPITASAMVASMGDAKSFKNGRQVSAWLGLVPKQNSSGGKAVLLGMSKRGDSYLRTLLIQGARSVIYATERKKEAVDSWLSRLLRRRNANVAAVALANKNARVIWALLSGNREFGADYATANAAA

SEQ ID NO: 184718 - protein, 335 aa, unidentified
MYTHFIGVDVSKDTLDIAVVSPTNALLYERRIANKKTAIVSFFKQLARVVPGFSPLTALCCLEHTGLYNRPLLEAVQGLALPTWVEHAPQLTASTGLSRGKTDQVDARRIAAYAARFGDRARLWTAPRPVLAELDRLSARRARLVKVQKMLQTPLTGSETFFSAAEQRAEERGCAASLEALAADLDAVDKAIAVLVAGDETLARHYERITSVPGVGPVTAVEVLLTTNEFRTSTDPRQYACYAGVVPFERSSGQRKGRPGVSHRANKRVKTLLHLAALSAVRYCQQTKTYYERKVAEGKNKMLVLNNVRNKLVHRIFACVQNDLNYDKNYAPALV

SEQ ID NO: 184719 - protein, 317 aa, unidentified
MSQHNTCYAGIDVSKHNLDVALDNLSSVKTFDYSTAGLQRLCEFLEEHAPQRVCLEATGGLERPLVEHLQARGFHVAVVNPRQIRDFARARNQLAKTDAIDARLIAQFAERMQPRVTPPLDEFRRKLLDLTSRRRQVRHMLVQEQNRLGTTVDQDARRMIRQALRLYEKQRLSLDERIATLIERNAQLQSQAKLLRSVPGIGPATVGTLLAELPELGQLNRQQIARLVGVAPTNRDSGTLRGKRTTGGGRVALRNALFMPTIVATQYNPRIREFYQQLLRRGKTKMVALIAAMRKLLTILNVIARTQQPWRNSPKNT

SEQ ID NO: 184720 - protein, 411 aa, unidentified
MDQIHDRVAGLDVHRDAIAACVRAPGPRGGTVTEKARFKTTSAGLLELRGWLADRAVVLVAMEATGVYWKPVYYALEDHFTCWLCNAHHVKNVPGRKTDMSDAEWLADVAAHGMVRPSFVPPRPIRELRELTRYRQTQVVARSSEIARLEKVLQNAGVKLTSVASRVLTQSGRAMVEALISGVRDSGALANLAKGKLRPRIAELEEALAGHFGAHHAVAARRILDHIDFLDDTVAALNEQIGVRMNAYQSVIDLLLPIPGIDRRTIEVLVAETGADMNRFPTPGHLASWAGLCPGNHESAGRRRQVGTTAGNPWLVRALVQSARAAVRTKGSYFGAHYRQIARRRGPNKAAIATAHSLLCLVWHLLTTGECFSDLGADYYERRRDPERQTRRLVRQLESLGHVVTLSQPAA

SEQ ID NO: 184721 - protein, 480 aa, unidentified
MNEKDCTTRPMSHNYTRRRGSALPKELTVLHPDAAGIDVGSREHYVSVPEGRDEETVRSFGCCTPDLEAMAQWLKQCRVKTVVMESTGVYWVPLFRVLESHGLEVLLVNPRHVKYVPGRKTDVADCQWLRQLYTYGLLRGAFVPSERVEVMRVYWRQRKELVESSSREVLHMQKALTQMNVQLHVALSDITGVSGMRILRAIVAGQRDPNELAKLAVAQVKRSKEEIAAALTGHYTEHHLFVLKQALEIYDFYQTKIQACDEQLAHYLSRFETKAAPDTLPPHPKRSKGSRRKNEPYFDLRAELWRITGIDFSRIDGVDSMVAFTVLSEIGFTVDAFPTEDEFASWLGLCPNNSITGGKVKRRRTKHVYNRAADALRIAAQTLWHSKSYLGADYRRKAARMGAPKAITASAHKLARIIYRALKFGQQYVDKGEQHLEKQHRERSLKALIKHAKELGCMLVNIETGEWITLENTPLTEVVS

SEQ ID NO: 184722 - protein, 380 aa, unidentified
MKKGSTSDTMFGDEATFHQKGGTPMNYVGIDYHKKYSHVTAIDEEGRVIRSKRLENKPEPFQEFFKRLEGPSEAVLEASRTWGVMYDLLEELEGVESVELAHSLKVRAIAEAKIKTDKIDSHILAQLLRADLIPAAYIPGKETRSFKEMIRQRIFLVRMRTRLKNRIHVLLDRLHIPLPSVTDIFGKRGTDYMRRLNLPGVDGEILRENLTLLETLNTLIKEAEREIGMLLGEDPRVKLLRTVPGVGPILAAVAALEIDRIERFISPSKLASYTGLVPSTYASGGKSFHGKLIPMSNKWLRWALVEAAWASIRTSPYCRVYFENHKRHKGPHTAAIALARRLCEIIWHVLKENRVYEERPFQKQQRTSITATSPAALALS

SEQ ID NO: 184723 - protein, 458 aa, unidentified
MSKRSKKTKSQSFKAPSLPRHLQHINLNAAGIDIGSERHLVAVPEGRDEISVREFGTFTADLEVLAAWLKQCGVTTVAMESTGVYWIPLFELLERRGFEVKLVDARHVKNVSGRKSDVLDCQWIQQLHTYGLLAGAFRPPDEVCVLRSYLRQREMLIQTASMHIQHMQKALQQMNLLLHNVVSDITGLTGMKIIKAILAGERDPRVLAGNRHERCQNDAATIAKSLVGNYREEHLFALRQAVDLYETYQAKIADCDQAIIKQVEKQPDISDDEPPTPEKQVQARDRIRDGVDVRDLLFKKSGVDLFAIPGLAADTLLTLVSEVGFDMKPWKTEKHFASWLGLCPGTKKSGGKVLNNKTKRNPNRATQAFRMAAASLYRSQTALGAFYRRIKSRAGGQQAVTATAHKIARIYYAMLTKGTIYVELGQQAYEQRYKQRRIDHIMTQAKSLGFQLVPCVTS

SEQ ID NO: 184724 - protein, 348 aa, unidentified
MTIVEDARAITGGVDTHADVHVAAALDPIGGLLGVGEFPATAAGYARLLGWLGEFGTVCLVGIEGTGSYGAGLARHITAAGVRIVEVDRSDRQDRRRQGKSDPLDAVSAARAAQSGRARGASKGRDGSVEAIRTLMVAKRSAAGERTRSINQARALVLTGPDDLRARFAAHTPAALVAGLASLRPRPGGDVAGHATRVALRELGRRAQFLDSQLDRLDELIVPLVTAHAPGLLALYGVGPNTAALLLIAAGDHPGRLRSEAAWAHLCGAAPIPASSGKVARHRLNPGGDRQAGHALWRIVFTRLGSDPATRAYAERRTAEGKSKAEIIRCLKRYVAREVYRYLRPAAR

SEQ ID NO: 184725 - protein, 401 aa, unidentified
MSISVLAPAAAVIAVDVGKTSAVVSVTDAARRRLFGPVDFPMTGPGVGRVVSQVRAVLPAGLVRVGVGAAGHYHRPLLSASVWPGWEVVELNPAQVSEQRRVMGRRRVKTDAIDLEAITELLLAGRGYRVGAPAVAVGELAAWAAHRHRRVLTRTATKNQLLGQLDRCFPGLTLALPDVLGTKVGRLVAAHFSDPHRLAALGVTRFVRFAAARGVQVRTPLAERCVAAARDVLPRRDAEVARQVLAEDLVLLAGLEAQTATAETQLARLLPMTPFASLTTVPGWGTIRAGNYGAAVGDPDRWPSHHQLYRAAGLSPMQYESASRRRDGSISREGSVELRRALIDLGVGLWLSEPAAKRYGQQLRARGKKGGVIACAMAHRANKIAYALVRDQTGYDPDRWA

SEQ ID NO: 184726 - protein, 441 aa, unidentified
MSDPTVVNPEPAWAAFIGLDWGSQKHAWILEPAGGGKREQGVVDNTPEAIADWAVDLNLRFGGQPIAVALEQKRGPVVNLLLPYTHLALFPVPGSMSASYRKTFVPSGAKDDPTDAAWILDLLLRHRDRLRRLQPDDANTRLLLMLVEDRRQLVDDKTRLTLRLQDCLKQYFPQLVKWFQVDTPLVADLLKRWPDLQHLQRCHDGTLRTFFRQHHNGEDRIVTRIDAIRAAVPATNDPAVLEGCSTKARHLTESIATLRDQIARVERRRDELVAVHPDAPIFASFPGAGRATVPRLIAAFGTMRERYPSAFEVECDSGIAPVHIRSGKIDLVSIRRACQEFTRQTFHEFAGQSILQCQWAKDCYQAHCHKPHQHHAAVRALAFKWIRILFRCWKDRKPYDEELYLTSRRRRSALVGPALASVTELKWNTVVGFSKLSENHA

SEQ ID NO: 184727 - protein, 346 aa, unidentified
MLYAGLDLSRQRLDVHVLDEEGRTVEVLAVHPDADALRTLANRVLRHGQEVSAVIESMTGSRFVHDTLERFGWDVMIADAVKAKGVAPLAAKTDKIDAHVLAELGRRDLVPEIWLPDPAVRAERERARFRLHLVHHRSALKCRIHATLMTFGHTVPVTDLFGTSGRALLAGLALPEPWAGTMATSLAMVDELDQRIDECGRELARLGADHPYIPLLLTVPGVGPLLAYTIASEIGDITRFASPKKLTGYTGLCPIVRQSGNRDVRGPLAKNGPKYLRWALVEAATHAARDVRYRDRYERNKKRLGRQRGAKVARVDIARLLAEAIWHVLTKKEPFAPAGPAIQLVA

SEQ ID NO: 184728 - protein, 320 aa, unidentified
MMAQNDVVVAGIDVAKDKVDVCIRSLGARQVFPNTAQGHRKLVAWLRKHQVGKAVMEASGGYERVWAKVLREAGIEVRIVDPKRVRSFALSAGRLAKNDTIDAEMIAWFAETFSDAPSQTYDAAREELQALVKARLDLIDSRIRLVGQSEHAAPGLAQKTHARILKSLASEIAKLEAAIRAKIKSTPDFAERVEIIESVPGFAETSAANLVAGMPELGEVSNQIVAALIGVAPYDDDSGKRRGERHIKGGRRWVRNAIYMPCVGAATLNNPVLKAYYRRLIAKGKEPKVAIIACMRKLIVILNTMIARRQKWDPSRYALK

SEQ ID NO: 184729 - protein, 477 aa, unidentified
MELVEFKFDVDWKTNPFFCGLDVHKHELSVSICSIEYREAKIVSRSVFSVDSEGLERFWNYVKKYQPSGFAMEATGIFHHVIHKILMEKLKTVIWRSEVVVSNPANVKGIPGRQKNDKVDSENLAIYLAKGMLKKGKPIIEVLEDLKAIFRMVMRIEKDRTALKNRIKKTLDRAGIRPRRLDLNNDWVERFLYYFTQFQGTLGAFLDEILIDEHPLEPYRNVIKKNIGSFEIFSSFSLTSVQRALIRQDLVELDFKTGRKATLTIEVGRVIEQYSTLRMHASNLASIPGISKTTAVWILAEIGNIKQYPTSRMFAAYCGCCPRIVSSAGKVYSAHITRHSNTYLRTIFYNASVVVCNLLKQDSELKRYAIRAIQRKSKRAFKLAACNVATKLTKIVYAILRDGVPFNPEYLQKNESMSKHIDEQIFSLVDKKLIRHARNVLLRVTQMEDTQKLGILGKDIDNLAENLDSLLKGKKIK

SEQ ID NO: 184730 - protein, 312 aa, unidentified
MSELYVGIDVSKDRLDIAFSDGRSLQVSNDEGGHASFCEQLAANPPQLVVMEATGGLERGLAVELAARGLPLRIVNARLVRHFAKATGLLAKTDKIDARVLVHFGQAMKLEGREPVSEQQRELQALLTRRRQLVEMLGMERNRLPGAHKAVRPQVNRTIEWLQKQISDTDRDTDEALKACGIWREKVELLESVPGIGHVISLNLLATLPELGTLNRRQISALAGVAPFNRDSGRLKGRRSVYGGRAAPRTALYMAALVGARHNPVLREFYQRLRAAGKPGKVALVACMRKLLTIINVMIREGAPWNPQLKAA

SEQ ID NO: 184731 - protein, 364 aa, unidentified
MEVLYPRCAGLDVHQQTVVACARLASSSTVQQEVRTFGTATADLLALTDWLTAHGCTHVAMESTGVYWKPIWHVLDGQFELILANALQIRSVPGRKSDVNDAMWTADLLAHGLIRSSFVPPAAIHELRDLTRTRKQLVREVAQHTLRIQKVLEDANLKLTSVISDVMGMSGRAMIEAIIRGEQDAERLVDLSQGRLKASRPAVIAALQGRVTPHHRFLVRLHLTQIDALDVAVREVEARLGEALAPFQAAIDRLMTIPAVGRTVARVVVAEIGFDMSRFPSAGHLVSWAGLCPRQQESAGKRLSMRTRPGNPWLKTTLVQVAWVAARTRNTYVRAQFLRLRVGADPRRRSSPSPRPSWRPRTTF

SEQ ID NO: 184732 - protein, 323 aa, unidentified
MNKYNEIFGVDISKDVFDVYGSKSGHNQFKNAASGFMFFLKNLPKKSLVVMEATGYYHYRLAQFLFKQGVLVSVVNPLSVKRFIQMKLAKVKTDKSDAKAICEYGQINQVPLYSALSDVQSECLQLFRLLDSYLKKRTMTKNKLHGEDVLGIPSKHVYRSLKRNRKHLDTEIASIETKLLSLVKQDQQAQLTLLKSIPGLGVKTALFLIVITDGFTKFETAAQLCSYVGITPTIRQSGSSVRGRSSISKVGNKKLRNLLFLCSFSACKHNKSCREIYERIVNKGKSKKLALIAVSNKLLKQAFAIAKSGNPYDETFVSVLMAK

SEQ ID NO: 184733 - protein, 319 aa, unidentified
MAQNGLVVAGIDIAKDKVDVCIRAVSQLQTFPSTAEGRRQLISWLRKHKVTKAVMEASGGYERDWAKALRVKDIEVRIVDPKRVRHFAKSAGRLAKNDVIDADTIAWFAEIFGEAPGQAHDAARETLRQMVNARLGLMDMRTMVSNKDEHDVPEPVRKSHAQLLKSIAVEIANLEAAIAAMVKATPHFAARAEIIESVPGLAGTTSAGLIAMMPELGEASNEAVSALLGVAPYDDDSGKRQGGRQINGGRRKARNLFYMACMGAATRHNPALKAFYQRLIAKGKLAKVALVACMRKLIVILNIMLARGEKWDASRYAVS

SEQ ID NO: 184734 - protein, 408 aa, unidentified
MQRRENYLYVGMDLHKETHTAVLVNCWNEELDVVKIENKPSEYKKLAEKVDRKAGRLGLSSVYGLENACGYGRSLSVWLVEKGYHVKDVNPSLAYDQRKSAPMMRKNDEYDEYCVATVLINQLHTLPDARPRDNHWTLSQLVNRRDLLVRDGTRFKNGLHEQVSIAYPSYRRFFSEIDGKSAMYFWKAYSSPLHLQGKTAEELTVEIREISKIFKKEKAEFILECVGNDGNTFREYQESRDFITQSLVRDLEHQKEELAGIDQEIEKLLLTFDYKLTSMPGIGTAFASKLIAEIGDIHRFRNADKLARYAGVAPVKFRSAGKGKEQSSRQGNRQLHGLFYMLAVTMVAVPKSGRPNHPVFHSYYMRKINEGKTKSQALFCVMRRLVNIIYGMMKNKTEYRKPEMQEEQ

SEQ ID NO: 184735 - protein, 305 aa, unidentified
MSVPQPVGVDVAKDTLHTDDGHRHRVVPNQPAALRRWLRNLPPGTQLICEPSGGYERRLLACARQTGVSACLVNARQVRAFARGLGRLEKTDRLDAAMLRHYGACVQPRPLPPPDPALLRLQQLVRTRAHYAGQLQRERNRRELLEDPLLDRLNRQQCAHWEQVLAQLDTEVLAHVEAHPLLRDRMQTLCLVCGVGAQTALTLVAEFPELGRLNARAAAKLAGLAPLAQESGQWQGSRHIAHGRANVRRALFQAALVAARHNEHLRPFYLRLRSNAKPPKLALIAVARKLLIFLNRLLMVDSPPP

SEQ ID NO: 184736 - protein, 358 aa, unidentified
MAKSKHTTPVVGGVDTHKDLHVAAVVDDNDQVLGTQSFATTRQGYKLMLTWMRSFGDLQRIGVECTGSYGAGLLRYMQVAGVDVLEVTAPDKQDRRRRGKNDDFDAQCAAHAAYARRRTVTPRSRDGMVESLRVLKVCRKTAVQARRIALQIIQTTIVCAPDRLRELLRNMTRMKLIRTLAAWRPDLTGYRDVEEAYKVALKSLARRYLELHDEVADLDDMIEAIVTDLAPELIARNGVGLNSAAQLLLTAGDNPERLRSEASFAALCGVSPVPASSGKTTRHRLNRGGDRAANSALHIIAIGRLRLDPKTQEYVSRRIAEGHSKLEAIRCVKRYIAREIFNVIVRRHKQINQAQIAA

SEQ ID NO: 184737 - protein, 352 aa, unidentified
MLRSYIIALDVHCRSCQVVATTPGGRIIDRRPVATAIPELTEAIKSVRRPRTVVLEEGPLADWLYRSLAPAADAIIVCDPRRNALIAKDGDKDDPIDAEKLAQLARGGYLRPVHHSASQARALFKQRVALYHQRVGHRVAQANRVIWYLRRFGIMIREPVLAEAEKRAALLERLPKDTTVREDLPVLLESYNLAAEHVHQLRQRLIKQARGIDQIRRFTLLPGVKWIRAATFYAYVDTPWRFKSKSALWKYLGIGLERRHSGSGYERLGVPRHCHRPLKSMILGAAKSAVASRSNPFADRYERDLHAGCSPRIARRNVARSMAAVMWGMWKNERDYQPQWVGVPAGELMVGS

SEQ ID NO: 184738 - protein, 346 aa, unidentified
MKHSIRCGIDIAKLVFQIHGVNANSGETTMVKKLARGEMLRYFANKPLMLIGIEACGGAHYWARELTKLGHTVKLMTPQYVTPYRRGGKNDANDAEAICEALARPNMRFVAVKSESQQAVLVMHRMRDQWVRERTSLMNQIRSYLHEFGIVINQGRSALGKVLPLVAEDETLPLLFRQSMTDLADRLTDLETRIDALNKRIESWSKQDSTAKALLELCGVGSITASAAVATAGDVSVFKNGRQFAAWLGLVPKQNSSGGKTVLGAITKRGDRYLRTLLVQGARTVMLAASRAKKSTQTNSMFDWIYKLQERRPNNVVAVAIAAKQARMLWAIMAKQQRQAQTGLAI

SEQ ID NO: 184739 - protein, 357 aa, unidentified
MKINEKKFIGKAFVGIDVHKSNWKICVLGELKFKKEFSCDPYPKALQTSLKNLLPDFEFECAYEAGFCGFWIHDALNEMEGINCIVVNAADIPTSDKERAQKEDKRDARKIAILLKAGVLNGIHVPDKDFVALREIQRLHFTVTKDLTRSKNRVKSFLFRHGIEICKEQFKKPNTHWSNKFIKWINSLELCPKLKFALDELMANVLRLRNQKLRILKIIRNEIQSNEELESIYNKLIKINGIGLISCITIITEVGNIKRFKTYEKFHSFAGLIPSTNSSADIEKIRGITNRANKRLRSILVEVAWISMSKEPTLLHYYNELKQRMSSNKAIIRVAKKIATKIRYELLKDDQELKVAA

SEQ ID NO: 184740 - protein, 350 aa, unidentified
MPRKVGTAIVTIGIDPGKNILHLVGLDARGEIVLREKVARTKIVSRLANMPPCLIGIEAGMGTHYMTRDLLALDHDVRQVPPAYAKPFRQTHKNDFRDAHAVAEAVQRPTTRCVPPKTDEQLDLQALHRVRYRLVGQRTAIINQIRCFLLEHGITVRQRLHWLRHALPDILAQRTDVLSPRMVRILEDLAQDWRRLDDRIEAVSGEIDALSKNTELCRHLMTIPGIGPIISSAVVAAIGDGAAFARGRDFAAWLGLVPKQISTGDRTILGRITKRGNRYLRTLFLQAARVVLLRPRNWMQHGFGPWLAAAAQRLHHNVLATALANKLARIAWSVLAQHRVYEARLSPAAV

SEQ ID NO: 184741 - protein, 504 aa, unidentified
MTTPPWEPAFRLVKPPIKSVSPFGGDLCFGWLGSPRLYLYKPLGCVSAFWKWIPARKDKTMQYQKVLKMLESIPYLSVGLDVGADFTWMSIMLPNGTLAGKPFKIVHSDPQSRELAVAKIKEAQEAYSLKSRCFLESTGIYHIPLLCFLRDKGFDCSVINPIITKNSTNMNVRKLHNDKFDSKKAARVGLDASLKVSIIPDDEVIDLRNLVRDYYYFKDLQSAVVLKLTAELKVSFPAYRKVFSKVTTKTSLKLLDAYPLAEDLLAAPKETVVETIRSTARFGEKYALARYDALRTAAEDAAIFGRALKSNSVRIRLYIDSYREYQKRLDTIMEAIHATVDGLKDSPVYGRILLLQSLRGVGFMSAVVLVAEMGSFDLFPSPKKLYAYFGLDPAVKQSGKFNGDKVHMSKRGSSLARRILHMVALNNLKVDKGSGMPVNPVIHSYYADKCKAKKKNVAVGAVMHKICNIIFAMLRDNKPFEVITPQEHCKRYLAAHPDKVQSAA

SEQ ID NO: 184742 - protein, 313 aa, unidentified
MTFQSVIGIDVAKQKLDVTDRPQSFQRTIDNNPKGHRQLLKLLPDIEQCLIVLEATGGYETAVARTLNDAGHLVAVVNPKRVRDFAKGLGILAKTDAIDAQVIARFGEQAKPITMGKTSEKQRELNEIVTRRRQLVGIQTAESNRLENLTTKFVQRNIQQSLNRLKTELERIDAEIAKRIDADDEWAAKAKLIKSTPGIGEVNATTLIAEVPELGILNRQKIAALVGLAPFNDDSGPREGKRTIKGGRINVRSALFMAALSARQHNPAIKAFADRLEAKGKRKKVILTACMRKLLITLNTMVKTNTPWTNKNS

SEQ ID NO: 184743 - protein, 344 aa, unidentified
MDHFAGLDVSVKETSICIVDDTGKIVREVKAASEPQALLKVLGNPTYRFKRIGLEAGPLSQWLFSGLAEAGLPVVCVETRHMQAVLKAQINKTDRNDARGIAQMMRAGLYRPVHVKTLRSQKLRMLLTHRKLLQSKAIAIENDLRGTLRNFGLKVGMVGKVRFEARIKELAESLPDLAELVEPLLIVRRTLREQIVILHRRLLAIVRDDEVCQRLMTTPGVGPVVALTYRATVDVPARFRKSKAVGAVFGLTCARYQSGEIDWSGRISRCGDEMMRVMLYEAAQSMMRSKKWSWLKAWAMQIARRRGMKKAIVALARRLAVIMHRIWVDGTEFRWTREQAAAAA

SEQ ID NO: 184744 - protein, 376 aa, unidentified
MSESITYVALDTHKKEHTVAWVAPETGVIEVFKVLNKAQEIKKMVKRLQRKAPSGVGFCYEAGVCGFTLKRQIEASGSACMVIAPSLVPTKPGDRIKTDRRDARKLLGQFAAGQLTEVHAPNPEQEAVREITRCREAARDDLMRARHRLAKFLTRHGYIYTQGSQWTQKHRLWLRSLSFAGLDLRDICDTYVTELEHCEQRVATLTKEVEALATRPAYRELVALLCCFRGIQTLTAMTFVAELFEFGRFDSPRKLMAYLGLVPSEASSGEKRRPGSITKTGNRRVRRSLIETSWHYRHGPQVSRLLQKRRVGQPQWAIDIADRAMHRLCKRYRRLIARGKRSQKAVVAIARELAGFLWALLQEHHRRRPEAVTPSS

SEQ ID NO: 184745 - protein, 339 aa, unidentified
MSIVMGLDQHRGQVTGEWIDTDTGEVQRTRVAPADRAAVRRFVERFGGRELEVALEATTGWRFVVEELRRVGAVVHLAEPAETAARRGTKKRPKNDRADARHLRELLMIERLPESWVAPDHILDLRARVRLRHTLSEQRGEWQQRIQATLYHHGCPQRRQLMTVAGREWLACQPLSAAAREQVTIALAMIDALDRQMAPLEKELRAFARRQVGCKALMAHYGIGELTAVTILAELGDCTRFSSSRQAVRYAGMDITVYESDRRRVPGHLSRQGPPALRWALFEAAQTTRRRTTSPDRDYYEQAAERIGGNRACLSVARKLLKRSYHTLRELGEEALAPA

SEQ ID NO: 184746 - protein, 318 aa, unidentified
MLNESFVGIDVSKDWLDVGWEPARQTERLAHDEVAMVGLCERLLQERPCLIVLEATGGLETHLASALGAAGLPVAVVNPRQVRDYARACGRLAKTDRIDALVLATFARAIRPQVRAPKDDETLELGALLARRRQLIDMRVQEKLRLERASPVQRDSIKEHIAWLTERIARFDTDLTHRLHTSTLWRDKEDLLKAIPGVGTITRVTLIALLPELGKLNRREIAALVGLAPFNRDSGQHRGERVIWGGRAQVRRVLYMAAVAAIRSNPVIRTFYQRLRAQGKPGKVALVACMRKLLTIMNAMLKHNTPWNPNALDLEHSC

SEQ ID NO: 184747 - protein, 369 aa, unidentified
MISVGVDVSKEESTVCVMKPYGEIISKPFEVTHTEKDLSELANMLLRLDGEVRVIMEVTGVYHLPILMYLKEQGFFVSVVNPYEMKKYRSQGLRRVKTDKQDAITICKGLDYWYQLKNYEANGAIYEELKLLGRQYRNYMKMHIEGVQNLAHLLDCVMPGIKLLLGGWNESSGKNKLSDFASEYWHFDNITKKSERQFSANYIKWAKKNGYHQNQDKAEKIYLLAKSGITTISSGNPTTKMLMQEAVKVLKEVDNTLKKILTQMQLLAKSLPEYAVVRAMGGVGEVLAAKLIAEIGDVRRFHHGKSLIAYDGIDSPPYQSGQFTAQNRRISKHGSAYLRKVGYEVMQSLKTHDAPTDDCVYQFILKKRT

SEQ ID NO: 184748 - protein, 343 aa, unidentified
MQAERVNQTAWIGIDVAKGSVDAALHLDGPLGSVATFERTPAGMAELARWARREVGEEAALRAVIEATGRYSLEAIGWLLEADAAIAPACVNPLHAKRFAQSLGLRNKTDEVDARMLARLGAERSPAPYEPPAPVFLELRALVRERRQLVDEHVRLSNRIGEGTDSTFVRRQRSRRLNTLERDIERLDAEIARVAASDESLRADLARMTTIPGVGIVTAITVLAELGDLRRFASGRQLAAFAGVSPRRHESGSSVRGRTSMCKKGNPTVRSVLYMSAVTTKRLPNGMATIYERLIANGKAPKAALGALMRKQLLLMRALLVRGEDYKNPVEKSRRGRLETLAC

SEQ ID NO: 184749 - protein, 314 aa, unidentified
MTFPATAGIDAGQRHLDVGLPSGTIFRTENRPEAFPALLARLKREGVERVVLEAIGSYTHALVQALAAAGFAVGLVNPRRIKAFRVAEGKRAKTDRLDAGLITRFADRMRDAFRPLPDADQVALKALSTRRRQLTEMIAMEKTRLKQALDPLVSESHKATILALAEACRRIEDEIESRIAKDEQRAKNRRILLTIPGIGARVAQVLLTELPELGRSDRKAIASLAGLAPHVSQSGQAPPRAAIAGGRPCVRTALYMSALVAARHDPNLRAHYQTMRAAGKPAKVALVAIARRILVTANALIRQQAQYKPDPNLA

SEQ ID NO: 184750 - protein, 378 aa, unidentified
MMKNTRYVGLDVHGETIAAAVGEGHGKARSLGQFPNRPEAVRRFIEQLGGPEGLKICYEAGPTGYALYWQLTKMGIECEVVAPSLIPRKPGDKIKTDRRDAEKLALCYQSGTLTRVWVPDAAHEALRDLVRARAATKRDESRAKHRLVKYLLRNGLRHPEDCRAWTHPWWRWVQSIKFEFETQQVTLGDCVAEVLHQTERLGRLDLAIDRAIEAAPPEKRAVVEALQAMRGVAKLTAVTIVTEVGTFQRFRKPTELMGYTGLVPSEYSSGGREAKGRITRTGNAHLRHVLGEAAWHARHRPWLNKRLRKTLPTLPAGVSEIAWKAQERLHRKFARLTFHRKPPAKVATAVAREFVGFIWAIGRLAESHAASGTTESRR

SEQ ID NO: 184751 - protein, 402 aa, unidentified
MNCVGIDVSKGKSMIAVMRPFGEVVVSPFEVRHTASELSELARLLKSLDGETRVVMESTGNYHAPVARLLHDAGLYVSVVNAMLVHDYGNNSLRRAKTDKKDAVKLANYGLDRWLTLPRYVPEEDTRLMLKTCYRQYQQYSKVQTMLKNNLISLLDTAFPDVNRLFTSPPRADGSEKWVDFVATFWHCECVCGLSEKAFTAKYQRWCRKHRYNFSEEKALDIYASACGHFGVIPKTDTAKLLVEQAIFQLRATSAALAALKQEMQSLAASLPEYPVVMEMFGVGPTLGPQLMAEIGDVRRFHSKKALVAFAGIDAPPYQSGQIDVRSRSISKRGSASLRRALFLVMGVILQCAPGDEPVYQFMNKKRSEGKPYRVYMMASANKFLRIYYASVKAFLDSLEHA

SEQ ID NO: 184752 - protein, 358 aa, unidentified
MKKGSRKAQRMDKPEITVGLDLGDRFSSYCTLNEDGEEVERGRVQTTEPALRRHFEGKGEYRIVMECGTHSPWVSRLLKRLGHQVIVANARKLEAITGNESKNDDNDAEGLAHLGYCDPLLLFPIRHRSVERQQDLNLLRARDTLVRARTMIVNAVRGLVKSAGARLPKCSTNAFAEKVKDAIPEPLRELTAPLLQQVQQLSQQIGGLDPKIEGLVRRYPEIKLLRTAPGVGPIVAAGYVLTIDGPEALAHSRQAGPFLGLRPRQGQSGDSDPQHRISKTGNQYLRRLLVQSAQYILGRFGPDSQLRRWGLKLASSGGKRGKKRAVVAVARKLAVILHSMWRHGTAFEAFPLAATVTA

SEQ ID NO: 184753 - protein, 332 aa, unidentified
MSVYVGIDVHRKRSQVAVIDQGGEVLANRNVPNGVEPILRVIGGLPSGTPAAFEAAFGWGWLVELLEGYGFEPHLVHPLQCKAIASARLKNDKVDAAILAQLLRADLLPEAWIAPPAVRQLRALLRHRAQLVRLRTLLRNRIHAVLADHGHGRPEGCWSGPGREWLASLKLPAVSREVIEDALALTGALQQPIDRLDWEVHQRARSEPAVKVLTQLPGVGPFTALVLLAEIGDITRFGSARKLASWAGLTPTVRGSDRTVRHGHISKQGSVWVRWVLCEAAQTAKRHPDFAASYQAIAARRGKKIATTAIARKLLTRAYHLLTDASSAGEPQ

SEQ ID NO: 184754 - protein, 337 aa, unidentified
MTQVVLIGLDVAKHVFQLHAVAADGRVVFRRQVRRPQLVKLLMSIPPCKVAMEACGTAHYWGRQLEELGHQVFLIPPDYVRPFVKRKKNDAADAEAIAEAAQRPDMRFVRVKSEASQAASIVFRARDLVVRQKTQLLNAIRSHLAEFGLIFPQGAAASAQMQEAIESSDDLPPAAQAILRSLWQHLSSCEAQLAEFDKEIQKRAREDLEARRLTSVPGIGPVTAAAIAALAPDPNTFRRGRDFAAWVGLTPLERSTGGKQRFGRISKMGERTLRRLLIMGASAVVSWVRRGKIQPSAWLASILHRKPPMLAIVALANKMARVAWAILKHGGSYMQPA

SEQ ID NO: 184755 - protein, 342 aa, unidentified
MEEYVGFDVSKEETSFCVMDKVGNILAQGKVFSDPKSLFEALREHTLCPKRIVLETGTLSNWLARGLHEYGLPVDVIDARKAHAVMKLQHNKTDANDAILLAEIARTGFCHPVSVNSEDAYKQRILIKARRHLVCQRHDTQNAIRGFLCALGIRFPKGSGKLATRVQVALVKRPDLIAMIEPLLASAEALKTQIRHLDKEVLKQAKASKASQLLMTVPGVGPITALAFAATIDDATRFEKSRAVGAYLGLTSRRYQSGEMDYSGRISKYGDGLLRSLLYESANSLLTIVRKSHPLKDWARRIRKRSSHKKACVALARKLAVIMHRMLITGEAFRWPEKEATA

SEQ ID NO: 184756 - protein, 321 aa, unidentified
MSPANVYVGIDVAKDWLDVAQRPGGEAWRVSSDETGVVALVERLKGVRPTLVVLEATGGLQIPAVAALAAAGLRTVVVNPRQVRQFAGATGRLAKTDAIDAQVLAQFGEAVRPEVRPLPDAATQELSALVARRRQLIEMLTAEKNRLRLATKKVRPNIEAHIRWLEGELLDLEGGLGDVIRSSPVWRERDNLLRSVPGVGPVLSSVLLADLPELGRLNRKEIAALAGVAPLNRDSGQFRGRRTVWGGRSQVRAALYMAALVAARFNPVIRAFYQRLLSTGKPKKVALTACMRKLLTMLNAMARDQTSWQIVPSPLASQDSC

SEQ ID NO: 184757 - protein, 353 aa, unidentified
MKPKIDPNAAPLTSIGIDIGKEIFHVVGLGTDGKIAFRRKIKRLALKEAFEKLPPCIVGMEACLSAHFVSRMLKALGHEPRIIPAIYVKPFLKGQKNDYNDAEAICEAALRPNLRTVQEKSQDQLDLQACHRVRSRLVSRRTAAINQIRAFLIEQGIAVRAGTSALRKSLFEILKNREDEVSPRMASLIVGLYEDWLWLDKRIETITSEIKQLSQSEPNCRRLMSVPGIGPLISTGLVAAIGTGEAFERGRDFGAWLGLVPRQYSTGGRSILGRISKRGSKYLRTLFIQAAKVLLIRPQNWPGYSFGAWLKTAAERLHRNKLAVALANKLARIAWSVLRHGRAFDTHIEAGAI

SEQ ID NO: 184758 - protein, 350 aa, unidentified
MSKIETGGHEPKFAVFVGIDWGDQKHVWCLQSRDSTKRETGELKHTPEAVEAWVAQLCQRFGNRPIAVALEQSRGSLVFMLAKYEPLHLFPVPSTMSASMRKALYPSGSKDDPRDADVLLDLLLQHRNKLRRLSPDTEATRRIQNLVEERRKLVDEKTEHSNRLTSHLKIYFPQMLNWFEHLDTELVCALLERWPTLEELQRVPPAKLRAFFAKHHCRNHELIEWRILAIRQSIPAIHDRAVIEAKSAAVKVIVQLIRILLEGIADLDERIEEAAATHPDFFIFKSLPGAGPALAPRLLAAFGSQRERYRNAGEVQTYTGIAPVMEKSGKKQWIHFRWACPKFLRQSFHE

SEQ ID NO: 184759 - protein, 398 aa, unidentified
MTIMEVVVAQQVWAGVDAGKFEHHVVVIDGEGQRLLSRRLVNDETALLELIDTVTALADGGETTWATNLNHGGAALLIAALITREQQLLYIPDRTVYHASAGYRGDGKTDAKDAAIIADQARMRRDLQPLRPGDELAVELRILISRRTDLVADRTRAINRLRAQLLEYFPALERAFDYGHSKAALVLLTGYQTPDALRRIGAARLGAWLRKRKAYNANAIAATAIEAANAQHILVPGQQVAAAVVALDTEISDTESMIEDRFRRHRHAEIIVSMPGFGVLLGAEFLAATGGDMAAFDSVDRLAGVSGLAPVPRDSGRVRSNLRRPRRYDRRLLRACYLAAQIAVRTDPISRAYYDRKRTEGKTHTQAVIALARRRLNVMWAMLRDHAAYQPATTATAA

SEQ ID NO: 184760 - protein, 319 aa, unidentified
MSNSPAQVVVGLDISKKQLDIAVRPQGLSFTAPNTEAGIARLLRRLQKLNPQLIVLEATGGYEFLLVAALAGEDLPVAVVNPHQVREFARAAGRQAKTDKLDAQVLAHFGEAMRPEPRPLPTPEQQQLTALMRRRGQILGMILREKNRLEQTHIDAVRRDIRENLTWLERRLKQMEKDIQALIHQSPLWREKDCLLQSVPGIGPVIARTLITYVPELGALSGREVASLIGVAPFNRDSGRFKGKRMIRGGRGHVRCLLYMGALVATRFNEIIRDFYQRLLAAGKPKKLALTACIRKLLLILNAMLKKQQPWQPFATQKA

SEQ ID NO: 184761 - protein, 352 aa, unidentified
MVVIEVDPHKSSHTAAVLDSDTHSTLGTVRVDATLVEYRRLLTWARRFGERRWAVENARGLGRHLAQWLIARGETVVDVPPTATARVRELSRGGRRKNDVLDAAAAAAGVAALRGDTAPVAAEDATTMLAMLDERRGNLTQQRTRTVNQLHALLRDLLPGGVSTDLTADRACAALTGIRPASPVERARKEFARELITDIRALDARLKANTQRMRDAVADSGSSLTDIVGVGPMVAARLLGRTGRASRFPTSAAFAVYAGVAPIEIASANKARHRLSREGDRKLNNALHTIALTQIRMPDSRGRSYYDRKTAEGKTHNEAMRCLKRRLADHVWRLMLADKHGKRAREDIRVRL

SEQ ID NO: 184762 - protein, 366 aa, unidentified
MFYLGIDVGKFTHSLCLIDESGHHDIWQINNDKSGFESLRKKINSLNLLIESRLLVGMEATGHYFLNIYDFLLHLGLSTEQIALLNPLQVKSFRNTNLRGAKSDNVDAEQIAVLLQFGNFDRCNVSTDHIMNLRELTRLKSDLTANLGNLKRKMIAVVDRIFPEFAKIFANKFGLTVVTLLTDYQTPEEFAALSLEELTALIKGLSKRGVNRDKIQRLHEAARNSIGISFGREGFKIELSILLTQLKSIEEQIDFLEGKIAEMVNELNSPLFTIPGIGKTTGAAILAEIGDINHFASAVKLIAFAGLDPKLKSSGTYQGRTPISKRGSKYLRSALWYSAMVLCRVDEKFHKQYQDRKNLANLTATR

SEQ ID NO: 184763 - protein, 353 aa, unidentified
MKYVGLDWAYRSAQWCALSAGGELAGEGRVAADRDGLARLVLELGDEVKACLEMMSGALWVRDELIACGWQVEVADARKVKTVAPLAAKTDKVDARLLAELSRRQLVPALWLPSLDERALRERLRRRMHLVRLRTSAKGRIFGLQTQWGVRVSLARLRRGDGLMLLERAGVPEVWRRSVSECLALIDFLDARIAPLEAELRPFAKADPRAVLLDTIPGVGELLALTIAAEIGEISRFASPEKLVSYGRLAPRVHQSGQGRPRSGPLSKSGSRLLGWAAVEAAQQAWRESNPWHDLYLDVGRRSGHSNSAKAAVARKILIAVWHMLSRNQPFKPAPRSTGGTSVPASSRLALAA

SEQ ID NO: 184764 - protein, 368 aa, unidentified
MTTTDFIFVGCDLHEKTLVNRIAVNREPAEKRTFGNTVSGRAKLMAMLKQKAEDLGGARIVYVYEASGQGFILCDQLKAAGIECYVLAPTKIERSSQEKRNKNDDRDADRLLDIVRAHELAGTKLPAVWVPDRQTRDDRETVRTRLDLSEKQTGLKAQIQTLLKRQGLEKPEGIKGTGTKRYRQWLEGLSQAGSLGTGFRNVMGSLLRQLEFNEQEMARVDQAVEQLCEMPHLKPIVDPLDAETGVGRLAAVAYATEVGDFARFRRRQQIGAYWGLTPSSNESGEIQDRKGHITRQGSPRMRRILCQAAWSRVRHHEAEREAYQRLVTRNPKRKKIALVAAMRRLAVRLWHVGRKAQQEMAGLKPAER

SEQ ID NO: 184765 - protein, 368 aa, unidentified
MRTNTLKAAPAASAKELKNEKTAKAKRMLVGVDTHLRGYQAARKIDSGVIGVVENFRSEEELELYVAKQTTLAEEVVVVYEAGPLGYTLYRKLSARGVLCYVCAPDSSEQRKKRRKNNKIDARSLTSKLFNYLNGDQNALQLARVPTEAQEQLRMASRQHDQLVEERKRLGATGNAMLLSQGFGSWSNWWRPKAWAALSSKLPPWLLERLEVWVDVLKVLDEKIARAKAAFVRSCKGPRPKGVGALSQMQLQSEVLDWSLYSNRRKIACLAGMVPSEWSTGDKEWRGSITKVGVPALRRIIVEMVWRIIFFQPQYKPVQKWLEVLRGPNPARKKKAVIAIGRQLIVDLWRLQTGRVTAQELNLIMVTD

SEQ ID NO: 184766 - protein, 512 aa, unidentified
MFFIFLMSFYSMTSNLHKTNYYSEELNMLMPLKNHEKSSTPKKKELSRNELKRRKKKIKTKGKKKKVSLKKMKRLNTDAAGIDVGAKEMYVCVPEDRDSKNVQIFKTFTADLYDLADWLESCSIKTVAMESTGVYWIPIYQILEDRGFDVNLVNARHIKNVPGKKTDVQDCQWIQELHTYGLLSSSFRPDEDICALRSLTRHREMLNKHRSIHIQHMQKNLELMNLKLCSVLKDITGVTGMKIIRAIVSGERDCVKLAQFRDPNCHHTEEEIAKSLEGFYRSEHLFALTQALNLYDHYTNLIKSCDLEIKKNYTAHKSYKGEKTLPTPQKRMRKQKNAPSYDLRTELYKLCGVDLCRIDGINVLTAQTILTEIGIDMSKWSSSKHFASWLGLSPVNKISGGVVLKRGSKKTTNPVTLALRKAATSLSRSKSALGSFYRRIRAKSGALKANKATAHKLARIIYNMLKNKTEYNDPGDEKYLKEYRRRNIKNLERKAAFFGLKLVEVEAEAEAK

SEQ ID NO: 184767 - protein, 458 aa, unidentified
MRIIGIDLATTAQHRAIVVDGRSEFITPLLKFETRLADLERLRARALSGAKPDEELVVVMEATDINWYPIAVYFCQRGTRVHVVNPRMSADLARFYKRHAQSDRLSAKILARLPLVSPESLYPLVLSSADHLALQRTCKELDRLTVRISAHKNRLQAIDRLAWPGLKARVFKTPNSPLGRWFREQFYEPQQVLAAGVAGLRQAWRAAGCYDEDESWIEPLLELAEELLQLYGSQGTYLDYAALAGEVQREQHRLAEVEADARHVRLRLMRPRYRRLHASRHLETMPGVGQDGAAVYVGFVGTSSRFANGRSFRGWSGMVPRSRQSGESESKGLKISQAGPDLIKKYAYLDADSARHRDPQIAAIYYDQMVNRGQHHTQAVCACATHLLDRVRVILTEDRAYELRDVDGSPVTPEQAEAIIAERYTVPKEVRERNNRRARRERAEEKSERKDERRSRAR

SEQ ID NO: 184768 - protein, 345 aa, unidentified
MEQLIRIGMDTSKRVFQLHGVNAAEDVVLRKKLRRKEMVALFADLAPSVVGIEACGGAHHWARLLQSFGHEVKLLPPEYVKAYRKRGKNDAADAAALCEAMSRPTMRFVPVKSAEAQAALMLAGLRERLVRQRTQLSNAIRGYAAEFGHVAAKGLDKIEPLLARLAADEDLPELAHELFALHAKEYAELQAKLAAIEAKLMAWHRTNACSQRLDKIPGIGPISAAMLTMKVPQPQLFRSGRDFAAWIGLTPKNHSTAGKTRLGVITRAGDETLRSLLVVGATAVIQQVQRGRGRPSPWLAALLKRKPPKLVAVALANKLARIAWKLMVSGESYRAAPIPAMPVAA

SEQ ID NO: 184769 - protein, 402 aa, unidentified
MTDGSTRFFGLDIHKEYFVAVAVNRERETVFGPQRVSNYQLDDWAGRVLTPQDAIVLEMTTNTYLFHDTLLPLVHSVIAVHPPNVPLVTNVHVKTDKKAAETLAQLLAAGMLTGVWIPPHEVRDLRSLISRREKMVHLSTMAKNRLHALEHRNHLVLPDNPFSPDQRTWWENLELSTTEKLLVRSDLDTLQFAQKQVERIEECLKQKSIQDERIPLLIQLPGVAMLTATTILAAIGDITRFPTAKKLVGYAGLGTRVHDSGMTHSSGRITKAGRKDLRRAMVNAANHAVLDNPHWKAEMERLEPHLGRSKVIVAIARKLLVAVWHVLSRQLADRFADPQNVARSFLSHAYQVRVRNLPKGQSAPAFTRQQLDRLGLGKNLQKISFGSKLIKLPPSKLLIEKK

SEQ ID NO: 184770 - protein, 411 aa, unidentified
MMRVVYEICCGLDVHAKTVVACLVSHGKKEVRTFSTMTDDLLTLLDWLTAAGCTHVAIESTGVYWKPVFNILEGSMEVILVNARHMKAVPGRKTDVRDCEWLADLLRHGLLKASFIPPLEIRELRELTRYRQSLKGELARIANRVQKVIESGNIKLGQVASNALGLSARGMLKLLAAGETNVERMANLAQRQLKQKKPELRRALVGRLTESQRWVLTELLTRYEEVESAITRVNERIDKELAEHPFVKEAVQMLDEIPGLGKQTTEDVISEIGVDMSAFPSHHHIASWAAVCPGNNESAGKHRSGKTGKGNAYLRTALVQAAWAASHTKNTYLSAQYHRLVKRLGKKKALIAVAHSMLVIIYHILSRKEHFHELGGDYFDRHNQQTLRHHLIRRLESLGLKVTVQELNQAA

SEQ ID NO: 184771 - protein, 384 aa, unidentified
MNKHTILFIGLDTHKVFTEVAYIEDQRGAKGVHFGRITSTKAAIKKLIRQFESKYPQATLHFVYEAGPCGYWIYRLITSLGHCCYVVAPSLIPKKPGDKVKTDKRDALRLAKLLKTEDLTPIYVPEPEDESIRDLSRARETAMKDLNDARFQLKALLLRNNIGYQGTANWSKKHLRWLSELVLPHPAQQIVLQEYLQTVNERIARLERLSNELQHQVHHWRYYPVVKALQAMRGVRLIVAVGVIAELGDLTRFDHPRKLMSYLGLVPSEHSSGGKRHLGSITKCGNSRARRLLIEGAHAYRYAANISTELQKRQESLPKDIIDIAWKAQLRLCRRYQRLMQRGKHYNLVVAAIAREMIAYIWAIAKEVVLTPVDPKLRLSRVPA

SEQ ID NO: 184772 - protein, 381 aa, unidentified
MTTTVTHNGHDTTPARVLFVAFELSEKTWKLGFTTGHGQKPRERSFAAGHQARLLQEMAQAKRRFGLPETAPVVSCYEAGREGFWLHRFLEAQGITNSVVDSSSIEVNRRKRRAKSDGLDVRKLLSMLMRFHQGERDVWRVVHVPSGEAEDQRHLHRDLETLKQERASTTARIKGLLSSQGLRLTTLNKLPEQLDVLRLWDGAPIPSGLRHRLLRVYAHHQFLSEQIAALEAERRALLETAHEASLEKIRQLMQLKGIGINGAWLLVMEFFGWRDFKNRREVGGLAGVTPTPYQSGESVRERGITKAGNRHVRWMTTELAWSWLRYQPESALSGWFRERFGSGGKRLRRIGIVAVARKLLIVLWRFLKSGVLPEGVILKEA

SEQ ID NO: 184773 - protein, 371 aa, unidentified
MADIDGVAGIDAHKHVFTVAVLDARGGRCAIESFPTSPEGLAEVLALLDSFGFAIGRIGVEGSAGLGRHVAGFLVAAGYDVREVQANRTAERRRRRRRHKTDREDAEAIARETLADPGLPPAGKQRRPDPCWDELVAVRNRRKSLIGQRVRLLNEAEAVLTGLPLTIRAALPQTSRVHPRLRALDRGAASSVQVAAADRVNLAWLVEAAGDIARLDTRVTELDRQIPALLGRLGCTLTEEYGIAAVGAMDLLVEVGDPARFATEAQFARWCGAAPVAISSGEGDQAPTHHRLDLAGNRQVNSTLHLMHVTQVRSYPPARDYIAKKHAEHKTKREARRAHKRHLANIVIRRMWADHGQRFETPANLTTPAAA

SEQ ID NO: 184774 - protein, 420 aa, unidentified
MNNTIAYKLAQLPPGTLFVGIDPHKHQHTICVMDQRAQILAKFRIANIRPGFNDLLQRCETLRQHAGAATCLFAIESGAHYWRNLAYFLTQQKYTFRLINPFTLKRQRDGDDLMRRKNDYRDAQKAAELLREGKYTWTAMPEGPYAQLRQLHLTYQGLVANGARVKVQITTAIDQLFPEFTSVFKAVDGETALTILRTCPDPAQIAAQSEAEFVTNIRQHHTGRRLMTKKVCALYRLAPTSVSVQAGTEAQVDNIYLLARQLLFVHGQRQWAEDQLVAAFAGFTESKYLLSIHGLGSVNAAALLADIGDIRHFSNCKQLSKLAGVVPSENQSADNASSSTPMSKHGRPILRMVAHRAVVSLIRHNDVFKQYVQRLKERPAGEHPLRTRAAMGAAMNKLLRIVYALLSKRQMFDAKIALAA

SEQ ID NO: 184775 - protein, 382 aa, unidentified
MQASTVDTPTAGHCGTIFVSIELSQKSWLVTLHSPDRDRISRHKFEGGDHAGLLGLLEGVRVRAALKLGASPKVVSCYEAGYDGFWLHRLLTAAGITNLVFDPASIAVDQRARRAKTDRIDGELLLRTLMAHLRGEPRVVRIVRIPSVEQEDARRASRERDRLVKEQTAHTNRIKALLRLLGVAVGYPRRRDWLNWLEQQRDRQQHPVPPHLLAEVKREHARLMLVREQLAALEAVQAAQAPAVPAPMAERRDALRRLKALGPAFTATLVNELFYKDFCNRREVASYCGLTPSPWRSGGIDREQGISKSGNRRARQKAVELAWLWLRHQPDSALSCWFRARTASAGKRAKRVAIVALARKLIVALWRYLTTGLIPEQAMMKA

SEQ ID NO: 184776 - protein, 319 aa, unidentified
MFVGIDVAKAELVVAVRPSGERWTVANDERGVRTLVDGLRTARPELIVLEATGGYELLCVGALASAGLPVVVVNPRQVRDFAKATGQLAKTDRIDADVLALFADRVRPEVRALPDAAAQELEAMLARRRQLLEMLQAERNRLGQVFGRGKQPVKKSLKGHIAFLERELRITDSDLGAMIRESPAWRERDDLLQSVPGVGPILSRTLLADLPELGRLSRRAIAKLVGVAPLSRDSGTMRGRRFVQGGRATVRAVLYMAALVATKRNAVIRTFYQRLLRGGKPKKLALVACMRKLLTILNTMVRTAQRWSTTTADCTLIPA

SEQ ID NO: 184777 - protein, 408 aa, unidentified
MEVLHARCAGLDVHKDTVVACVRLAAGDEVQQEVRSFSTTTQGLLALADWLVASGVTHAAMEATGVYWKPVWHVLESACELVLANSAHVRNVPGRKTDVNDAVWIADLLAHGLVRASFVPPTPVLELRDLTRTRKQLVREIAQHTLRIQKVLEDANIKITGLISDLLGLSGRAILEALANGETDPERLVDLTRGRLKATRAALVQALQGHVTEHHRFLIHLHLGQIEALQRAVGEIEARLGEVLVPFRWATRLLITMPGVSDIVAQVLVAEIGTEMGRFPTAGHLVSWAGLCPRMDQSAGKRRSTRIRHGAPWLKTVLVQAAWAGSRKRDSYLRAQFLRLKGRRGAKKAIMAVAASMLTAAYYMLRDGVEYHDLGVDHFDRRDRTKVATRLIRRLEELGLKVQVEAAA

SEQ ID NO: 184778 - protein, 336 aa, unidentified
MKPMPVGIDIAKNVMQVHFVNTDTGEIFNKAIKRAKFIEFFTNRSPCLIGMEACGGAHHWARQLSRLGHQVKLMPGEFVKAFNIRNKNDTADAQAIWRAVQQPGKAVAVKTEDQQAMLALHRIRSQLMKFRLMQTNALHGLLSEYGEVMRKGHVSLVRNVPEILARLSGRLPAVLIDSLREQLGEVKRTDTRITDIERRIRELNKNDPGVKAISEIPGVGLLTATAAVASMGDADTFHSGREFASWVGLVPRQTGTGGKIQLLGIRKRGDKYLRKLLVNGAHSVIQNAREPDPWVTDLLKRRPINVVSVALANKMARIIWAVLAHGRPYWKEAAHN

SEQ ID NO: 184779 - protein, 369 aa, unidentified
MNNGSTVIGLDVHKETVVAAVLPPDAERARETVTIENHPKAVERLVTRLAARGPVAFVYEAGPCGYEVQRQLTGLGQPCAVVAPALTPVRPGDRVKTDRRDAEKLARLYRAGELTPIRIPTRAEEAARDVVRVREDVLADRLRARHRLGKFLLRQGRVARETKAWGVAHRAWLRSQRFEWPALQQTFAAYLRALEEVEAHLAVLDQQVVDLAQQAPYRLLVQALRCLKGIDTLSAVTLAVEAQEFRRFPRARAFMSYTGAVSMERSSGGTVRRGSITKAGNAHLRRILVEAAWSARHGTGVSPALTARRKGCPAEVVRIAKKAQTRLHRTFWRLTSRTKPAQVAVVAVARELAGFVWAIAHQVPEGGSA

SEQ ID NO: 184780 - protein, 325 aa, unidentified
MPHFRSVGIDVSKNSLDICVFASDNKFLSSKFTNDLQGINEISEYLISLKVNKKSPIVIESTGDYHLLVSYNLGKSFNVQIINPLISKGFIDSNVRKIKSDKADALALAKIGTRAVLTNHLFNNNELHKRKLISQIDNLEKHKAALNLSLKNLKKTMNDFNMESESFVIIDNAIDEIEKAIQVLQKELKPLIGQTKLLKTIEKQKGIGSNSAAVVLALLEDRTFKSKGSLVAYCGLDISVRESGKWRGKTRLTKRGNSFLRKYLIRIGWGLYMHNESFQLYAKKYKEKGRRYLEVLVILARKFVRMLYGALKSNGNFNIEYLTKV

SEQ ID NO: 184781 - protein, 400 aa, unidentified
MAIVMGLDQHRAQITAEWLDTESGEIGRARVSPADRDHVRRFATRFAGRRVEAALEATTGWRFVVEELRAVGAEVHLAEPAETAARRGNKKRAKTDRADARHLRELLMIGRLPESWIPPDHLLELRAKVRLRHTLVDQRGEWQQRIQAALYHHGFPQRAGLLRASNRAWLETLELPASAREQIAVALQMIDALDAQSAPMTRELRLYARRQRGCRALMGHYGIGELTAVTILAELGDARRFSSSRHAVRYAGLDITVHQSDQRRAPGHLSRQGPPALRWALFEAAQAARRPGSPDRGYYDQAAERLGGNRACLALARKLLSAAFTPCANSARTPSRPPDGHRCAPCPQSHRCAAAGSPHAAAATTGWTASKDRAAATPFAGTPHPPSRHRPAARHGRGPR

SEQ ID NO: 184782 - protein, 401 aa, unidentified
MNSVAVLGKAVVAGTRWTLEWIRHQSAQGVIDHGLHKHHRGSEMNRTAGMSAGQIIGMVGGWQVVGLDIAKSVFQLHMVDMVTGEIVNKQLKRAKVLEHFANKAPCLIGIEACGGAHHWARGFKALGHEVRLIHAKAVRPFVSGNKTDATDARAIWLAVQQPGTKFVGVKTLEQQATLVLHRQRELLMKMKAMQSNALRGLLYEFGATFARGKNALFGEIEAALEALVNDIPQYVADSLREQVQRIKQLSADIKAIELRLAQRLRSDVDMKRVAKIPGVGLLTATAAIATMGEAQAFKSGREFCAWLGLVPKQSGTGGKVKLLGISKRGDTYLRTLLIHGARSVLTHAKEPGPWLEQIKTRRPANVVIVAQAAKMARTIWAVVAKQQDYQRGYQSVRPQVA

SEQ ID NO: 184783 - protein, 360 aa, unidentified
MHRTNWNTRLPEPVKGNSLCDIILIVKYKSMKNFEEVVGIDVSKKTIDASCHLAQQHRVFSNDIKGYQSMLNWVTKQTKGVSVFYCFENTGNYSLKLASYLSYKGIAYVEESPIKIKRSSGLVREKTDKIDSEIIARYAWIHREELVSSELKSVVYQELGRLIGLRDQLVRNRAGLLGTLKEIEQLLSSPSTDTSCIVLRRSIENLSKQIKSIESRMDSLLKEDESLSSNYKLLLSIRGIGFVVACQLLYHTENFKRFSSWRKFSSYCGLAPYEYSSGTSIHRRKKCHYLGDRKMKSLLSMASISAIQHDPELRLYYKRKVKEGKPKMIALNNVRNKLLARVFSVVKRGTPYVALNQYAA

SEQ ID NO: 184784 - protein, 372 aa, unidentified
MEQYNEVFVGMDVSKSRIAVGLALGGSAGEASFLGEIEANEVAVTKLVRRLSGKHGKLTFCYEAGPTGYGLYRLLGELGHECRVVAPSLIPRKPGDRVKTNRRDALSLARLLRAGELTAVWAPDERHEAMRDLVRGRSAAAFDLRVKRQQTGAFLLRLGRVYPGKTSWGGAHRKWLAKQTFAHLEQRIAFAELLAAMDEVRARVARLEKAIEEAVPDWSLAAMVTALMAMRGIDLVAATTILAEVGDLGRFRTPRELMAWLGLVPSEASTGDRVRRFGITKAGNGRARKALIESAWCYRFPARIGQAKLARVEAAPPAARRLAWKAQTRLTARYRALVRKGKPKAVAVTAVARELAGFIWAMRRALEQQPGA

SEQ ID NO: 184785 - protein, 403 aa, unidentified
MTSNDLTSIDVFCALDVGKSEHHGTALLRDGRTTFDKPLPNAEPQLRELFARLGRKGKVLVVVDQPASIGTLAVTVARACGCEVAYLPGLSMRRLADLHPGTGKTDARDAYVIADAARTMPHLLHNIDPDESVRAELTMVLGHDDDLAQDATRTSNRLRGLLTSIHPALERVLGPRLRHPAVLALLQTFGSPSQLAQAGTEQITQVMLQAAPRMRSAHHLADQITTALAEQTVTVPGTASAGEIISGLAEALAVLLKRRENLEMRVAALLEAHPLAKVLTSMPGVAVRTGARILAEVGDASAFPTAAHLASYAGLTPTTRCSGTSIRGEGPPRGGNKMLKRALFLASFASLSSPESRAYYDRKRAEKKRHNAALICLTRRRVDVLHAMLKHRTLYQPEHEQTA

SEQ ID NO: 184786 - protein, 347 aa, unidentified
MGEQGSSRRLNPIIPNSCLDSKSASYKAGRGKQMAEPIFVGIDVSKLTLDIALSSGEYWSCANREGDFQALIERLKSLKVELIVLEASGGYEGAVTGSLAAANLPVVVVNPRQVRDFAKATGKLAKTDRIDAQVLARFAQTIRPELRPLKDEQTQELDALLTRRGQIMNMLVAERHRLAMAAVNVRQDLREHIHFLVKRLKDTNRALDELMRQSPLWREREELFKPVKGVGPGLLRTLCAALPELGTLSRQKIAALAGVAPYACDSGTLRGKRICWGGRATVRSALYMGVISAIRYNPVIKVFYERLLKAGKPKKVALMACMRKLLTILNAMARDKAPWDEKRHAIA

SEQ ID NO: 184787 - protein, 342 aa, unidentified
MEIATIGIDLSKNVFQIHGVDHRGKTALKKQLKREQMLPYFANFPSCLIGIEACGSAHYWARKLTALGHTVKLIAPQFVKPYVKTNKNDAADAEAICEAVSRPNMRFVPIKNGEQQAILAQHRARQGFVKARTAQANQIRGLLAEYGIVIPKGIVHIGKRLPEILEDGENELPGIFRQLIDRLGSNLKELDRQVKELEVQIQTWHRNSVDSKKLAQIPGIGPISASALVASIGDAKNFKDGRQLAAWLGLVPRQHSTGGKPTLLGISKRGDCYLRTLLIHGARSVVRVVEQQANHANQWLAGIMRRRNKNVAAVALANKNARIIWALLTQNREYSAAYRLAV

SEQ ID NO: 184788 - protein, 352 aa, unidentified
MERRNNDLAWGEAIYIGVDLHRGSWHITIRTQEQVLHTETLPPQWAAFQKVLLRYGTMRCSVVYEAGYFGYGLHDLIVESGAQCIVTPPSLIPQESGNRVKTDKKDSDKMARLLARGDLKSVWVPDEELRCDRGVLRHRSQLIGARTRIQLQIKSHLYFHGVAFEPCCGKWSARFVDSLREIIWDSDYARAVFGEMLDMYEYLNQKVLSATKALRAMSLLPRYRERYLLLRSIPGVGLLTAMEVLLELGDVSRFSNAEKLAAYVGLTPTQHSSGDKIRLGHITGVGKGNLRGVLTEAAWTLIKKDGVMAAKYERIKARAGGKKAIVAVAHNLLLRIRRILLDGVPYSPGVIS

SEQ ID NO: 184789 - protein, 456 aa, unidentified
MAIPVSHARMCIHCYGMDAYRKGLIKMSNNLFISVGIDVGADFSFMSIALPNQTFVGKPFKITHSNLNSLEKAVLTIKEAEELNSMKARIFLESTGIYHYPLFCYLRDKGFSVSIINPIITKSSTNINIRKVHNDKFDSKKLALIALKPDLKVSIIPSDLVLDLRNLTREYYNLVDCRSAYINKLQGELRVAFPQYIGIFSKLTVETSLALLEKYTSPQAFLSARKSSVIKLIMATARFGLTYAEDKYQKIIDAAKAARIFGYAVPSNFALIKLHISFIRKYNEEIEAVLNSMHELVDSNSGETFVKQINFLESIKGAGFLSAVTLMCEIGDFSVFKSPKQLFAYFGLDPAVKQSGKFTGTDVKMSKRGSRLARRAIHTIALVSIGLTRIGDANNPVLRDYYVSKCQAKPKMVALGAVMHKVCNIIFAVLRDEKEFTIISPEQHRVDYISNINFVA

SEQ ID NO: 184790 - protein, 408 aa, unidentified
MKTLHKRCAGLDVHKAEVVACVRLISKRKVEREVRRFPTTTQGLLALAEWLESAGCTDVAMEATGVYWKPVWHILEGRFALILANAAHVRNVPGRKSDVNDATWLADLLAHGLIRSSFVPPPAIQELRDLTRTRRQLTREIVQHVQRIQAVLEEANIKLCSVITDIMGASGRRMLKAMIAGETDAEKLAALGHERLGCTRAELVEVLTGRVREHHRFLLGQHLRTIEQLKDSVAAFDARIEAALSPFHDIVERLEEVPGLAATSTETVIAEIGTDMSLFPTAGHLLSWAGFAPRLDESAGKHRSTRIRKGAPWLKPVLVQAAWGAARKKNSYFQAQFLRLKARHGAKKAAIAVAASILTTVYHMLRDGTCYQDLGPEYFTRRNPAQAAARLANRIRNLGYHVEIRAAA

SEQ ID NO: 184791 - protein, 357 aa, unidentified
MPSSDVKYIGLDVHKEAIAIAVLNGAGKLVMESIVETKSRTLLDFLDGLRGELHVTLEEGTWAAWLYDVLKPHVREVVVCNPRRNALLKEGSKGDKVDARKLAELLRTGMLRAVYHGENRLRTLRELARGYEAVSKDLSRVMNRLKALYRGWGIPCTGTQVYSRRHREPWLNKIMEPGVRRRAELFYQQLDGLQTLRRTVRGELLAESRKHQAVKVLRQIPFIGPLRAAQLVALMQTPHRFRSRRQLWTYSGLAVVTHDSAQYRYVDGQLQRSKKPQQVRGLNQNHNHAMKEIFKSAALSATGRAGPFQDFYEGLLARGMKPELARVTLARKIAAITLTLWKKGECFDAGYVKRQAA

SEQ ID NO: 184792 - protein, 494 aa, unidentified
MATRRATTDTQTQPRSAYRRRKARARAKAARAHEAEERRVEGLPVTQAHAAGIDVGSRSHWVCVGAGAGDPAACVREFPAHTAGLHQLLDYLRQHHVTTVALESTGVYWIPLYELLESNGFEVLLVDPSYTKQVKGRPKTDRLDCQWIYRLHSVGLLAAAFRPDEKTCQLRSYLRQRANVIRYAGQHIQHMEKALEQMNLKLREIISDITGVTGQAILRAILKGTRDPQKLARLRNQKCKASEAEIAQALHGSYRDEHLFALRQAYEAWQFYQKQLDQVEEQIQQQLARMKQDRALPPLKPRPRTSGRKPNQPRFDVRTALYYVVGIDLTEIEGIAELTALTIISEIGPDVSKFATVKHFCSWLGLCPQLKKTGGRVKSSRTRPGVNRAAVAFRLAANSLYASKGALGAFLRRQKGRLGAPQAVTATAHKLARIVYLALKHGLAYVRQNQQEYAAKVREQQIKGVQRRARQLGLEVIEKQPSTSTAAQTAAVPC

SEQ ID NO: 184793 - protein, 410 aa, unidentified
MLRIVYPICCGIDVHKNFIVACIASTDDKGVTSYRSSRFPTFTNGLRKLSDWLYSNYCTNVCMESTGKYWIPVYNILEDTCQVTLAHPKYVKAIRGKKTDKKDARWIADLFKHDLVAASFMPPLRIRQLRDLMRYRFKLTSFASSEKNRIQNCLTVSNIQLANVVSDTFGKSSMKIIDCLLENPDDKDFDFATLLHGSMLHKTDDIRLAMDGILTHEQQQKMNIILCHYNEVKKCKVNLESLILSLSEPYASKCSLVSTVPGIKNPFSVIAIISEIGADMSVFTTAKHLCSWAGLTPQNNESAGKKHSVRISRAGVYIKPLLVQCANAVVRSEKHPEIKGRYLSIRKRRGHKRAIIAIARMLLTAIYHILLKDEPYNSELYKKAEILPKTRNITVDQAILLARRYGYSVA

SEQ ID NO: 184794 - protein, 313 aa, unidentified
MEAPPTFVGIDVSKARLDMALCPSGVPQSFSNDETGIKTLIERLCEAKPVLIVLEATGGVERAVVRALVAAEMPVTVANPRQVRDFAKATGQLAKTDILDAQILARFAEAVRPVLRPLPDEMTLELRALIGRRRQITEMLTAEKNRLSRAPRGVHKRIEAHIHWLEAELKRYNKDLDQTIHQSPIWCEQEDLLKSVPGIGSVISRTMLAELPELGSLNRKQIAAPVGVAPLNWDSGLLRGRRVIWGGRAHVRTALYMAALTASRRNPVIRDFYRRLRAAGKAPNVALVACMRKLLVILNAILRHRVPWRPVVT

SEQ ID NO: 184795 - protein, 340 aa, unidentified
MKKILFIGIDFSKSKFDASLLKSMSDEEVVSGSFENNRGGYVLFLKWVSDHTRIKKEDWLFCGEHTGLYSRDLAEFLSKKNLTVWLENPYQIKCSCGIKRAKTDKIDALEIARYAYRFQDKCTPYQPVDKAIESLSLLLSYRGRLIKEKVLLEVSAKETRRVISRDTTSRFVFENSMRNIERIKKEIKAVEEKMHQILMDSPLKENYLLTVSVKGIGLVTAVALIVHTNNFSTFNTARQLACYCGVVPFEKSSGTSLNRGKHISHLANRELKTLLTLCARCAIEHDKELNVYYHKKLSEGKEYKVIINNVRNKLIHRIYAVVTHKMPYLENYLNPFRKCA

SEQ ID NO: 184796 - protein, 309 aa, unidentified
MKEELVYLGVDIAKSYLDAAIGAENRRFSNDTIGHRELIKWVKQLSAAVQVICESSGGYERGLVRALVRARVKISLVQANRVRQFARAAGILAKTDCIDAQVLCEFGKAMRPPTVTAATLEQEHLRELENQRRHLTHLLVMEQNRAARVSDASVVRLNRSLINQIKKQIEKLDLLIKEHIEQSPRLSAKAEKLISIKGVGLRTAALLLAQMPELGQLNRREVAALVGVAPFNRDSGRMRGKRAIYGGRKPVRHGLYMAALVAAHHNPILRNFYLRLRAAGKPAKLALTATMRKLLIVLNSALKTDLSYA

SEQ ID NO: 184797 - protein, 341 aa, unidentified
MKCNLVSIDLAKNVFQLCALDEQNNVIFNKQIRRDKLLHELRQIEPTLVVMEACYSANPWGRRFKALGHTVKCIPAHVVKPFVRGNKNDANDALAIAEAARRPNVRFVEIKSVEQQDVQSLQRIRERLLKNRIGDSNQLRGLLAEYGIVLPVKHGALKKYVPDILEDAENELSITARHFIERLHNNVQALTTQIEEVDGILISLLKDNKAYQRILNVPGVGAKVAATFLASVNDIHVFKNGRQFAAWIGLTPAQYASGDKSRMGGITKRGNQSLRKMLILGARAVLNWCDKTNDNLRRWAQHIKKRMHGCKAVVALANKLARIIWVVMAKEVEFDVKKACA

SEQ ID NO: 184798 - protein, 318 aa, unidentified
MPESIVVGIDIAKKTFDAAIGVAGHTETFSNDDAGHDALLAQLAQRPVELVVMEATGGLERDLACALDAAGFAVAIINPRQARSFARAMGYLAKTDRIDAKALAELAQVISHHAERERFITPLPSPDQQALQALVARRRQLVAMHVAEHQRLSVCHAAAQKSIEAIILAIRAQIDDVEAELARHIQTHHADLAKRLESVRGVGPATVASLIADLPELGHLSRRQISALVGVAPFNRDSGQMRGKRAVFGGRGQIRRHLYMAALAAIRFNEVIKCFYNRLVAVGKPKKVAIVACMRKLLTILNAMVRTGKSWDSSYHLA

SEQ ID NO: 184799 - protein, 316 aa, unidentified
MKNYIGIDISKSSIDVYDGKKSYKFENNDNGFKKIVALSENIKETIFIFEPTGIYSYALTNFCSKKNISVVMVGPKESRDFARSLKVRSKTDKIDAKVLFKYQSHVEPSMVKIPKINHHAIKIQEMLNVYEGIQASKQRFKNQLESTNKMHRDLVRTLNRIISDLDTEATKLFNKIELFLLKDKETKERYDAISTIPSIGQKSALYLTAFFFKYSTANAKQMTALLGLDPVMRDSGLFRGKQRISKHGGQQLRNLLYLPTLCSIQHNSRIKAFYERLTAQAKTKKLAVIASMRKLILMAFSIFKSKQSYQPLKAII

SEQ ID NO: 184800 - protein, 344 aa, unidentified
MTIATLGIDLGKSVFHLVGQDAQGRTVLRRRMTRQRLITLTATLPACRIGMEACCGAHYLGRILAGQGHDVRLMPAQYVRPFVKSHKNDYVDAEAIAEAVQRPSMHFVPLKSEAQLDQQALHRVRDRLVRRRTAVINQIRAFLLERGVTVAQRRRNLELALPRILADEVLQLSPRLRLLLAELREEWRDLDGRVEALTQEIEKAAKADPACRRLQTIPGVGPMIASALVAAIGDGSAFKRGRDLAAWLGIVPHQYSTGGKTRLLGISKRGNSYLRRLIIHGARAVIGSLATKPTSLGRWVGALLTRVHGNVAVVALANKLTRIAWAVLRGTKPFETMHRVAPAA

SEQ ID NO: 184801 - protein, 351 aa, unidentified
MKRDKYMGMDVHQATTVVSVIDAEGKIVWETIIATETGGIRRLIESISGPIHVTLEETTQAEWLYDLLQGFVAEVVVCDPRRNKLLVEGSKGDKADARKLADLLRTGMVGSVWHARQTTRGLKELVRAYETFVVDTSRTMLRIKALYRSRGIATKGSAVYQKRESDHWLKQWTEVGMQQRAAWLYEQLDQVRELRKRAKAAVLNEGKRHKAVQLLRTIPQVGPIRAAQIVASAGTPHRFRTKRQFWSYSGLAVVTHTSAEYEMRDGRVVRRNKPVATRGLNTNCNRRLKSVFISAATSGGASWQPYLNHLQEKGMKADMARLTLARKIAALALAIWKKGESFDPKKLNWTK

SEQ ID NO: 184802 - protein, 347 aa, unidentified
MNLSRAGVDIAKSVFHVHAVDRHGQPKWRAKLKRNEWLDALCQRLAPGAEVGMEACASAHHWARELQARGFRVKLIGAQFVKPYVKSNKNDQVDAEAICEAMSRPGMRFVAVKSVAQQDTQAAHRIREELVGQRTAKANQIRGLVGEYGIVAPKGIQQLRRALPDWLEDAENALTVDFRSLLADLAEDLRYLDDRIALLDEQIAQRVKEDPVARRLLALRGIGPLTASALAGALGNAQAFNKGRDFAVSLGLTPRQHSTGGKDRLLGISKRGDAYLRKLLVHGARSVLRHAKDRDDALSQWLKALIARKHPNVVVVALANKTARVAWAIVHNATDYDPRLVAGKGTN

SEQ ID NO: 184803 - protein, 425 aa, unidentified
MNYKQNEKINQVKESTLVVGIDIGSTTQYARAFDWRGIELGKVFTFSNSRDGFEAFKAWMQHLQDKYRKSDVIVGIEPTGHYWFDLGAYLEDEGILLVMVNPYAVKQTKELDDNSQSKNDRKDPKVIAKLVTEGRYSAPYTPDGVYADLRIMVANRKRLIREMTQIKNRFARWFAIYFPEYTDVFGDYEAQSSMLLLKKVCTPEAIVELGAEKINQIWRDAKLRAVGMKRATTLCETAKRSIGLKKGSSAARYEMKLLLEDYEYKKAQLDAVMEEIEKLCRKIPESEQMLAIKGIGVITVAGFLAEVGDVRRFESPRQIQKLAGLSLRENSSGKHKGQTTISKRGRSKLRAVLFNAAIPLIAKNPEFKSLHEYYTTRANNPLKKKQSVIAISCKLIRVFYAILANGVTYDAQKMLSDIHRQPQAA

SEQ ID NO: 184804 - protein, 373 aa, unidentified
MNNNTTVYIGMDVHKESFTLCCFALGEKEPGHVQTVPSEHILVVKYVNRLRKLYGEETEFICGYEAGCLGYTLYHQLKGCGLECVILAPTTMMEQKGKKRVKTDKRDAKNIAKCLAYHTYSPVHIPTEEDEQVKEYIRMRDDIKANLKRTKQQILSFCLRHGLVYTQTKTTWTQAHLKWLHDQKLDSLYQEILDEYILQLTKLMETVERLDKRIEALSNRETYRESVDHLTCFIGIKRPTALATVVEVGDFKRFASACQFSSYLGLTPGEDSSGDDQNRLGITKAGNTHVRKLLVEAAQSYGRGKAGYKSKALKERQEGNPPQVIAYADRGNERLRRKYYNMLFRGKKVNVAKTALARELACFIWGMMNEKLA

SEQ ID NO: 184805 - protein, 346 aa, unidentified
MEHYAGIDVSLELSSVCIVDTQGKIVKEAKVASEPEALVDFFGSLHFAVKRIGLEAGPLSQWLHAGLRRAGFETVLLETRHVKAALSAMTVKTDRKDARGLAQLIRMGWFRPVHAKSMGSQEVRALLVARKQLLGRLIDVELSIRGILRGFGLKVGAVTRKGFEARIRELATGQATLERIAGAMLSARATLRAEYEKLHKAVLAIVREDAVCRRLMTVPGVGPLVAVTYKSAMDDPSRITKSKAAGALFGLTPKKYQSGEKDVTGGITRTGDEMVRTALYEAANVLLSRITRFSKLKRWGMDVAKRRGSKRAKVALARKIAVILHRMWVDGATYRWTAAEQIAAQA

SEQ ID NO: 184806 - protein, 310 aa, unidentified
MDALYVGIDVSKDRLDVCVRPTGEAFAVARDGKGLEELVRRMKALAPALIAVEATGGYETVVAAALAGAGFPLAVVNPAQIRHFARAIGKRAKTDPIDAQVIAHFAEAAKPDPRPVPDEQAQMLCDLVARRRQIIEMIVAEKQREKRATNRRMRKSIARLIGVLEKEISNVDNDIDGLVRSSPVWREKEDLLTSVPGIANKTARTLLAELPELGTLDRRRIASLAGLAPFTRQSGAWKGKSMIGGGRAPVRSALFICAMVGTRYNPLLKAFYQRLRDAGKPKMVALIAVARKLLTILNAVLRDNKPWQPA

SEQ ID NO: 184807 - protein, 348 aa, unidentified
MRYYAGLDVSLAETSVCVVEEDGKILREAKVASEPEALATWLGALGLPLTRVSLETGALAGWLCEEMTELGVPNVVGMDARHARAAMVAMTHKTDRNDARGLAQMLRTGWFRQVHVKARRTMELRTLLTSRNTLVLKIGDVENQIRGSLCLFGIKLGTAKRRTFPERVRELTADLPRVAAILDVLLQAHAAMLLSLDRLNRMVLEIAREHAVCRRLMTVPGVGAVVGLTFIAAIEDPVRFAKSRSVGAILGLVPRKHQSGEVDRNGRITKTGDTEARAALFEAAHVMLHRVKKWSGLKAWATKVAQRQGNKRATVALARKMAVVMHRMWVDGTTFRFSVAEPSATAAA

SEQ ID NO: 184808 - protein, 314 aa, unidentified
MEFVIGVDPHPQTHTASALDRNGEVSGTIEVENTEEGLEVLGEWAERFPERRWAIEGATNPFVAPWVAKLLADGEEVTNVAPSLTSQYRSRRGAKKNDAVDAQNVARALLANPRLPAHLPHPGQRRLQVLSRTRARLSRQLKANRMAMAELPEDSEERAILEGVAGFLAEKVKRLGEMLAEAVAEVMPEVMEIRGVGPVLGATILAEVGDVGRFADADCFVSYCGGPVERSSGKSARVRVNPGGNRTMNWVVHMIAQVRLRTDGGRSRALVERKVREGKTLRAALRVLKTYVARELYRTLEAIRGRREGGLAVT

SEQ ID NO: 184809 - protein, 401 aa, unidentified
MPELWAGTDAGKSAHHCVVLDADGKRRLSRRMDNDETVMLKLIADVLELSDGDPVTWAIDLNAGGAALMIALLTDNGQQVLYIPGRTVHHASGSYRGDGKSDAKDAFVIADQARMRRDLEPMHRGDDIAVDLRILTSRRLDLAADRTRTINRLRAQMLEYFPALERAFDYKTSKAALVLLTQYQTPAALRRIGKVRLATWLKNRKARNYQLVAATAVQAAEAQHTSVAGEKLAATVVAKLAREVMALDEEIAETDALIEGRFRDHPHAEVILSMPGIGPVLGAEFIAHTGGDLSIFASADRLAGIAGLAPVPKDSGRISGNMRRPRRYCRRLLRVFYMSAMVAARSCPVSKAFYERKRAEGKGHKQAIIALARRRLNVLWALIRDGRPFELTAPQTPVALG

SEQ ID NO: 184810 - protein, 413 aa, unidentified
MPVLFARCAGLDVHKKTVVACLMLTLLSGEVRKQVRTFATTTQGVLAVADWLTSQQVSHVAMESTGLYWRPVFTILEGAFTVILVNAQHIKAVPGRKTDVKDSQWLAELLRPGLLKASFIPPQPIRDLRDLVRYRKSLIEERSREINRVQKGLATANIQLSSVVSDVMGASGRAMFQALITGEQSPEVLAELAQGSVHKKIPQLREALLGRVDAHHQILLSPLLAHISFLDQTIFQLFFQIQQYLTPYEEAVELLVSIPGVAAETAACILGEIGVDMRCFPTAAHLASWAGVCPGNRESAGKRLSGQTTKGNKRLKAALAEVVWVLSHMKDNYLSAQYHRLARRLGKPKAVMAVAHSLLVIIYHLLRDKQPYRDLGATFFEAREKERVVKGALRRLENLGYTVTLQSPEEVSA

SEQ ID NO: 184811 - protein, 342 aa, unidentified
MAEYVGFDVSKEETSFCVMDEAGKILGQGKALSDPEALFAMLKEHTLCPERIVLETGTLSNWLARGLHEYGLPVDVIDARQAHAVMKLQHNKTDANDAILLAEIARTGFCRSVAVSSEAAQEHRILIKARKLLVSQRTATQNAIRGFLSSLGLRFPKGSGKLGERVLTVLTARPDLSPLIEPLLSSAENLAQEIARFDQEIKARAGEMVACRLLMTVPGIAHNTALAFVATIDEPSRFTDSRAVGAYLGLTSRRYQSGEMDYTGRISKNGDGLLRSLLYEAANVLLTVVRKSHPIKDWARRIRKRSSHKKACVALARKLAVIMHRMLITGETFRWPEMEAIA

SEQ ID NO: 184812 - protein, 344 aa, unidentified
MTYYAALDVGLRTTAVCIVDGDGEIQLEKSLPSEVDEIVTCLRGFGAEIASVGLEAGTLTQWLTYGLRDAGFSAVVMEARHVKAALGAMRNKTDRNDARGIAQILRTGWYREVYVKSLESHYVRTLLASRKALLRKCIDLENEVRGLLKVFGIRLRTGIRHGAFDAATREPIEANAALAHALIPLLDARLELYHAFLELDARVRAQAGRDEVCLLLMTTPGVGYITALTFRAAVDDPRRFRRSKNVAAHFGLTPRRYQSGERDNPGRISKAGDTQVRSALYAAANIILTRSAKWSSLKAWGVRLARSKGRKRALVAIARKLAVILHAMWIDGTPFSYQAPEGAS

SEQ ID NO: 184813 - protein, 369 aa, unidentified
MDKDTTYVALDDSKRKIVAGILRPSDTQPELREIANDARQIRRLFERLKREGPVAACYEAGVSGYDLHRQITGLGVACAVIAPALTPRRPGQRIKTDRRDAAKLVRLFRAGELTAIHVLDESEEAVRDLVRCRDDIRRDVLRWRHRVLKLLARHGHAYLTGKNWSHAHWRWIREQRFDLPPLQRAVEATVFALEQALARQAELDKELEALAATAPYREPVGWLRCFRGIDTLSAIILLAEVVDFQRFRRPRELMAYLGLVPSEYSSGETQRRGALTKAGNSHARRVLVEAAWHYRHRPTIGRALANRSQGQPDEIVSHAWRAQQRLHRRYRHLLGHGKRTPVAVAAVARELVGFIWAAMTRHESRRQAA

SEQ ID NO: 184814 - protein, 397 aa, unidentified
MYIVGIDIAKRKHEAAVIDGEGTVIIKPFSFTNNCSGYNRLLAMLAKAKLPLDEVSFAMEATGHYWLALFTRLQKEGFRVQVINPVQTNSIRSFYIRQAKTDPRDALLIAEVIRFGHFSESTLHPENIYELRELCRGRHAIVSMQADVKRKVVALLDQVFPEYETAFTNMFSDTSMAILQTCPTPKELSEMPLEELCHLIEVSSRKRFRMSKARELQALARNSFGFAMAGDVFSTMIRLYAKHLDFLKQQVKEMDRKITEIMDTLDTPITTITGIGPTLGAYILSEIGDISRFSSAAKLAAYAGIDPTMRQSGEYNGVRNRMSKRGSPYLRHAIWLAASSAVLHDPALKLYFQKKRDEGKPYMASVGHACRKMVSIIYAVMRDNKAYTPYIPNEISA

SEQ ID NO: 184815 - protein, 337 aa, unidentified
MTFHWFVGIDISKVTLDVALCHRDSPDRFTHQQFANTTAGFKQLLRWVKKQKVAIGDSFFCMEHTGHYTLALCCFLQEEGLSYTLLSPLHLKKSLGITRGKNDRVDARRIAQFACLHQRTLKPMQLPSACLLKLKNLMAFRDRLTKTKVSLKQTLQDLKDTSKLVDNNFIIKQSEKQLKLIEQQIKHTDKQMEAVIQEDEQVQNHFRLISSVVGIGMITAVAFLIYTQDFTAFNNGRQFACYAGTAPFEYSSGSSIRGRTKVNPLANRKMKALLSNCASAAVQHDPELKVYYERKLKEGKAKLAVLNAVKSKLINRVFATVNRGTEYVVLKQYGQAA

SEQ ID NO: 184816 - protein, 339 aa, unidentified
MTEVSTVGLDLAKKVFQVHGIDAFGAVVVRRTLRRSQMLAWFAKLPRCLVGMEACATAHYWARELAKLGHEVRLIPPAYAKAYVRRNKNDPADAEAICEAVGRPSMRFVAVKTEQQQAAVGIHRVRELLMKQHTMLRNQLRGLMAEFGVVAAKGRVGVGELSAILADPEDRRIPSPLRDGLMMIVETLRGIDRKLEVIERQLAAAGREDTRYRHLITAPGYGVILSSAMAAIVVNPAAFRRSSDFAASLGIVPRQEGTGGKVWLGPISKRGNGYLRRLLVNGATSLLNSKRAKQDPWLVKLLATKPRKVAAVALANKMARIGWALMMRQEDYRNMPAAA

SEQ ID NO: 184817 - protein, 442 aa, unidentified
MTRRCIGLDVHRDFAQVAIWQHGVVRHAGQIAMTPEALRVFADSLAPTDQVALEATGNTHAIVRLLQGRVARVVVSNPQKTRAIAEAKVKTDRVDAEILAQLLAADYLPGVWVADEETQARRRQVARRAHLVRQRTRLKNQVQSILHRNLVPRCPAADLFGLKGRRWLAEQELPADERRAVQALLRQLDFHAQELGLIDAELARVALGCGDTRRLMTIPGVDVTVAMSITAAVGDFSRFGSPNKLVRYLGLNPRVKQSGGQPASHGRVTKQGRAHARGMLVEAAWVAVKTPGPLRAFFERVRARRGMQIAVVATARKLAVLCWHMIIRGEDYAFARPSLTAKKLRALELKAGKPSRRGQKGSAAAYSLKDVRAREKQLAEQAERAYAQMVADWQAKAPAKSVGVAAANGARLSRPSAGQAARQDSAPDPALRSGVDHAHPGA

SEQ ID NO: 184818 - protein, 395 aa, unidentified
MDAYYIGIDWADAAHAACVVDAAGEVVWTGAIVHTAAGLAAWRERLEGWRVPGREIAVAIERPDGLLVEQMLAQGVPVYPVNPKALDRARDRFRVSGAKSDPFDAAVLAQWLRTDHAQWVPLQPQSAPAQELRLLTEDHQRLVRERTRLVNQVTATLKAYYPRALELWPDLTPDALTAGTRAQWERFTRRQRMASRTRSELWARLRVPQIPVPPHLVRAKASLLGALLDQLDAVIRHLADYQRRIEDFFGSLPAAAWARTLPASQSGTTVATLWAQMGDAPGRWASWHHLQAHAGTVPITRTSGQQHSVRFRRACDHLFRAAMDRYAFLSIRQSEWARAYYRQQRARGHRHHRALRALAAKWLKILFVLWQRQEGYDETRHLAMIARQHLRAAAA

SEQ ID NO: 184819 - protein, 316 aa, unidentified
MESLIGIDVSKTCLDVHILPGGEVFQVGRNADGIDDLARRLRVHWPRIVAIEATGGFETVVAAGLAAAKLPVVVVNPAQVRAFAVALGKRAKTDPIDAWVIARFAEATRPEVRPLADEQTRQLADLVARRRQIVQMLTAERARERRAASRKTAKSCQRLIKALERELADVDDEIDEAVRGSPAWREKEALLRSVPGVGPVASRTLLAELPELGTLDRRRIAALCGLAPWTRQSGRWRGASFIGGGRSSVRTALYMAALVASRHNPVLRRFYARLIAKGKPKLVALVAVARRLLVILNAVLRTGETWDEAKHARPSN

SEQ ID NO: 184820 - protein, 392 aa, unidentified
MVVSVGIDVSKDKHDCFIVSSEGEVLADVFTIPNNIDGFHFLLQRIQDCTHAQDKIKVGLEATGHYSYNLLGFLLDNGLTTYVMNPLRTNIYRKSLSLRKTKTDRVDARTIASMLLSDMGLKPYTDTAYHNEELKSLTRYRFDKVNERAKLKSSIARLVCILFPELEKLVPSLHIASVYALLAEFPGAKQIAAAHLTRLKALLETASKGRYKRDMALEIRDASRNSIGSWMPAKSLELQHTIRLIRELDNEIAEIEEQIQAIMDELNSPITTIPGLGFRMAAMIFAEVGDFTRFDSPDKLLAYAGMSPSTYQSGQLRNCYPHMEKRGSRYLRYALYNATKYVCHWDPTFAAYLAKKRAEGKHYNVALSHAAKKLVRLIFAMEKSRQPYCLAA

SEQ ID NO: 184821 - protein, 370 aa, unidentified
MAKSTTLFVGLDTHKEFNTVAYAEGATTDPPVYVGPIGTRHADIDKLIRRLHSKASHLVFAYEAGPTGYGLYRYLAGKGEECHVVAPSLIPKRSGVRVKTNRRDAVELARLLRSGDLVSVWVPRIEDEAIRDVCRARDAARITLKAAKLRLKSFLLRLGLQYTGRATWNDAHRRYLARVVCPTPAQQIVFQESLHAVDEQVERLARLERELVELAPSWRLSPVVEAVQALRGVQFLVAITVVAELGDLTRFTNPRQLAAFVGLIPSEHSSGTTRRQGGITKTGNGRARRVLVEAAWAYRFKAKVSEEIRMRLEKLPAPIQAISWKAQVRLCARFRRLVSRGKDANVAVTAIARELLAFMWAIAKEVPLEA

SEQ ID NO: 184822 - protein, 410 aa, unidentified
MHHKLKYLYIGVDLHKRHHTAVMMTCFHEKRDEIQFENKPSAFPKFLQQVEKLAKKEGLTPMFGLEDVGGYGRGLAMFLIENKYEVKSVNPALTVSMRRSSPNNKKTDAWDAECVARILISNLDTLPTANPHDLYYAISQLVTRRENIVSVVTGIKLQLHQLLGYHYPSYKKFFSQVDGKTALAFWLKYPSPSCLRGVSVDELATFLYKKSNRYMSTKKAKDILSLVQQDGDTSKDYQGVNDFLVKNVVRDLIARDHQLSQIDTELAKHLALLDYKLETMHGISTVTAAELIAEIGDISRFSNADKLANFAGIAPVQHSSGNKQKSKKSKLGNRSLYDIFYNLAIRQLGVSRAKKPNHPVYHAYYERKLAEGKTKWQAIICVMRKLVKVIYSMMKNKTEYKMPVLTEQAA

SEQ ID NO: 184823 - protein, 344 aa, unidentified
MDYFAGLDISVKETSVCILDDAGRIVKEVKVASEPQALLKVLGNPTYRFKRIGLEAGPLSQWLFSALAEAELPVICVETRHMQAVLKAQINKTDRNDARGIAQMMRVGMYRPVHVKTLRSQKLRMLLTHRKLLQSKAIDIENDLRGTLRNFGLKVGMVGAARFEARIRELVEGLPDLAVLVEPLLVVRQVLRQQLAVLHRRLLAVVRDDEVCRRLMTTPGVGPLVALTYRTTVDVPARFRKSKSVGAVFGLTCSRYQSGEIDWSGRISRCGDEMMRVMLYEAAQSLLTRSTRWSWLKAWAMQVARRRGKKKAIVALARRLAVILHRIWVDGTEFRWTREAIPAA

SEQ ID NO: 184824 - protein, 350 aa, unidentified
MIIIGVDFHPEFQQIAWVDTDTGELQEKRLAHPEEAGKFYRGLAVGSQKVRVGMEASGHARWFERLLAELQMELWIGDAAEIHAKRARKQKTDRQDAEHILKLMLKDDFPQIWVPSWENRDLRQLLWHRHRMVQARTRIMNQLQAVALNEGLRCKKRLWREKGRQQLESFRLAPWASRRRHDLLELLDRLTPTIRELTQAIEQEAEKCAAAQRLMTHPGVGALTALAFVLIIGKAERFRCGKQIASYLGLVPLENSSGNRRRLGHITKQGSSMVRFLLVEAAQVTVRSVPEWRNQYFHLMMRRGRKTAKVAMARRLAIRLYWMWRQEWNYEQFVSFGSYAGQPGHRDGVR

SEQ ID NO: 184825 - protein, 367 aa, unidentified
MMVIGVDAHKRTHTLVALDAGTGAGRGELTVAASNDGVLRALRFAVGLDEDRVWAVEDCRHVTSRLERALLGAGERVLRVPPTLTGESRKASRTPGKSDPIDAKAIGLAAIREGIETLPVAFLDEQAHEIRVLCDYRDQLVHERVRLINRLRWHLVRIAPELEAQLGDAALKGPRIRARLARQLGQLPASPELRVAKAQLRRINEITKEQKELFAELTNLIKAHAPQLLDQRSIGTVTAAVIIGRTAGARRFRNEACFARHAGTAPIPASSGKTIRHRLHRGGDRQLNRAIHIIALGRVAWDPETQAYIQRRVSDGKTKREAIRCLKRHIARQIWQLLYNTQPAPAIAPRPATPVKVGAPALMPCTG

SEQ ID NO: 184826 - protein, 428 aa, unidentified
MEEKTLIVGCDVHQKTICFCLLDKATGQPVAAPFTLPNDRFGAEQAIQTLQRLLSHHRYTRLEVGMEATGFFWLPFYRAIERSDLLAPFHPRLVLFNPKLVAHFKKGLDLSPNKTDNRDARAVAERLRFGRLPVTHVPDDFWQGLRRLTRYRYHLAHDLAREKVRFVTYLFLKLSAWAQVQPTSDLLGATSAALLTEFTADDLVQMPLTALADFIARRGRHQFDDPEATAQKVQEALRRSYPVTPELDGAVTFSLSLMRDHIRHLEQLLKRLDREIARWIEGVPNPLETVVGLGPVVCAGILAEVGDIRRFPGHPQLAAYMGLVWKRRQSGSFRAEDTPRVSGGNPYLRYYITLGANNLRQHNLEYKAYYWRKYRETPHHKHKRALVLTGRKLTRLVYTLLAKNTAYAIPQTVLKNGEEVALLMAEVG

SEQ ID NO: 184827 - protein, 324 aa, unidentified
MIMETSLGLDMAAASFAACLWFGPHRHAKAVFPNTKVGFRQLDRWLKSHGVGLLRVGIECTNTYGQAVAQWLFERGHKVYLLNPECTSNYAKARGQRNKTDAADSVTIAAFIAKHDDLTPWTPPSPEQAVLCALTRARADLVSQRLQLANQLRTAHSIAQPYLKSAWKHLGLQIAAIEKKLREHLKEHPTLSQKVQLLRSIKGIGWLTAVIAIAELPNIDQHTDARSICAWAGLTPKRWQTGKTELPARLSKRGNRHLRQALFMPALVAKKFNPLLRAFADKLRAKGKRPGAIAGAVAHKLLRIIVGLLKSNSTFDPNWSFSKT

SEQ ID NO: 184828 - protein, 421 aa, unidentified
MRKADTRKVKAIGDDTLIVAVDIGMEMNRGYCTTPDGRSSKTFKFDNTRAGMDTLWDMITINKNRFKCNEVIVGYESTGPYGEPMLHYLMKKPVRIVQVNPMHTKKVKEINDNSPLKTDDKDPRVIADIIRWGRALSIVIPEGDAAYLRRLNNSRERHVRERTALVNQLQQLVFLLFPEFRTVIKDIKCKTPLYLLRKYPTPETLSVLDKDVLGEEMRKRSRGKLKEHHADMLINLARNTVGIREGAAGLSMDIRHILIQLEMLTNLIAELESEMEIALGRIPYSSKLLSIKGLGVVSVAGIIGEIGNFKKFNTRSEIMKLAGLDLYEISSGKMKGQRRISKRGRSLIRKILYYTAIQTIRKDGILHDYYTRLTDGGMKRMKALIAVSRKLLGIIYAIVRDDSEYSANFESMKRQVIKKAA

SEQ ID NO: 184829 - protein, 318 aa, unidentified
MAMQAGKLIVGTDVAKAELVIHHDASDEVIKLKNSKPDIKRWLKQQPLNTAIAVEATNVYHLDLVELAHGAGLEVYVIDGFQLSNYRKSVGGRVKTDPSDARLLSRFLRNEGEDLRPWSPPPAVYGKVQSLLRRRAALVTARTAMTQSWANESLLKSAFEVFVKSIDRLDLLIQKKLKDVLREAGLQEQVARCQAVEGIGFLTAAALVMAFVRGEFKNSDSFIAFLGMDLRVNDSGQTNGRRRLTKRGCSEIRRLLHNAAMSASRSAAWRDLYEQHRNSGKATTQALVILARKLARVAFALMKNQGEYITRAMKLACP

SEQ ID NO: 184830 - protein, 352 aa, unidentified
MNLLKYIGMDVHKATTVIAVVSDVGKVVADAIIETKAQAILDFIKGQRGTLHVAFEEGTQAAWLFDLMQSHVASVVVCDPRKIPSQGRKADKPDAKRLAELLRSDSLSPVYHGERSTRALKELAQSYVAVVGDCTRVKNRLKAMFRGRGIDCDGSAVYSADEREKWLGKLDTAAVRARADRLCKELDCLVPLYEEAENELVAEGRKHAATKIFRSIPGIGPVRAAVILGVAGTPYRFRTKRQFWAYCGLGIVTKTSSEYEVVNGQVRRSKKRPLVRGLNRNYNRALKAVFKGAAKTAASGPWKSQFEAMVAEGTSESLVRLTLARKIASITLALWKKGERYDPKKVKMMHAA

SEQ ID NO: 184831 - protein, 349 aa, unidentified
MANLTIGVDLGDRYSELYVVDAAGACVETGRIRTTVAGLEQWFGGRPPARVVLEAGTHSPWASRVLQRLGHEVLVANPRKLRGLYENDSKDDRVDAEYLARVGRLDPALLKPITHRGEAAQADLAVLSSRDVLVRARTLLINHTRGVVKALGGRLPRCSAEAFARRVGPHVPPAVRPALAPVLEQLQQLTTTIRGFDRAVEHRCAQSYPETARLRQVTGVGPVTALAYVVVLDDPTRFRRSRAVGAYLGLRPRRSQSGEQDPQLRITKAGNPFLRRLVVQAAHYILGPHGPDCDLRRHGERIAARGGKNAKKRAVIAVARKLAVLLHHLWISGAVYEPLRHRPALAQAS

SEQ ID NO: 184832 - protein, 477 aa, unidentified
MRPTCRGRLTVVCFNPSTKLTRVRPAELIVARSKELSTRRKFVSYFAPLVGRGSDEERLLREVGTGMQVVHERCCGLDVHKKTVVTCILITLANGEVQRHIRTFSTMTAGLLALSDWLESLAVTVIAMESTGIYWRPVFNLLEEGRSVILVNAQHMKAIPGRKTDIKDSEWLADLLRHGLLKASFIPPAPIRELRDLTRSRKSLVQERAREVNRVHKVLETANVKLSSVATDVLGKSGRDMLSALIEGTTDAQILADLARGKLRKQLPQLQQALDGRVQAHHRLLLKHILAHIIFLEETLEQLQQEIEQHLGPLEEAMTLLMSIPGIAALAAAAILAEVGDDMTRFPSAKHLASWAGVCPGNKQSGGKRLSGKTTQGNATLRAMLAEVVWVISHMKDTYLSAQYHRLARRLGKKKAVVAVSHSLLVIIYHVLSTKQPYSDLGADYFEQRDSTRLTQRSVRQLEALGYTVTLVPKEVA

SEQ ID NO: 184833 - protein, 437 aa, unidentified
MTSMTTTAAAVIGGVDTHADTHYAAALDQVGRLLGTRQFAADAAGYRQLLGWLESFGSVQRVGVEGTGCYGAGLTRFLRGRDVTVVEVNRPDRRARRLRGKSDPLDAEIAARRAMAAYDTAVPKDTATAVESIRVLRLARDGAVKARTAALNQLKDLITTAPDQLRSSLRGKTLRKVAAEAARFRPDMTRLANPVQVTKIALRSVGARVVALNGEVAALDRQLGALVGATAPRTMALFAVSTQHAAQLLVTAGGNPHRLRSEAAFAALCAANPIPASSGKTTRHRLNPAGDRDANATLHMIAVLRMRWDPATRDYVTRRTEDGLSKREIIRCLKRYIARQAYHAVTADLAEPATCDDTPKLARVSSEPVELIALDEPAQGLISARRNGEPTFTHVQGIADAMMAALSRGVDRVIPKQLYPDLRESLPPELPPWVKVR

SEQ ID NO: 184834 - protein, 350 aa, unidentified
MMIGVDYHPSFQHIAFLMEETGEYSERRLNHSDGEAEKFYRDLKLRGAHVRVGIEATGYSRWFERLLAELGFEVWIGDPAEIKAKRVKKQKTDRKDAQLLLKLMLEDRFPRIWVPSPENRDVRQLLWHRHRLVQMRTRIMNQLQALAMNEGRRWKSKLWSEQGRAELEKLALAPWASRRRHELLELLDRMNPTIEELTAAAEQEARKRPEVLRLMTHPGVGPLTALAYVLIIGTPSRFHRGKQIGNYVGMIPSEDSSGGKQRLGHISKQGNSLLRFLLVEAAQAAARNNPDWRRRYIHLAMRRHKSIAKVAMGRRLGIRLYWMWRNGCEYSPSMEFGSYAGQLGTGHGVK

SEQ ID NO: 184835 - protein, 401 aa, unidentified
MPQLWAGTDAGKSEHHCTVIDAEGERRLSRRLANDETTLLELIGDVLELSEGEPVTWAVDLNAGGAALLIALSAAHGQKVLYIPGRTVHHASGSYRGDGKTDAKDAYVIADRARMRRDLHPLQEQDEIAVDLRILTARRYDLTADRTRAINRLRAQLLEYFPALERAFNYSTSKAALVLLAGYRTPTALRRIGRTRLAGRLSNRKVRNARTVAATALEAAQAQHTAIPGERTAAAMVRTLAAAVMALDEEIARTDALIEARFREHAHAAAITSMPGMGGLLGAEFIACTGGDLDAIGSSRRLAGIAGLAPLPKDSGRISGNMRRPRRYHRRRLCVFCLSAQVAARYCPTSRTFYGRKRSEGKSHKQAVLALARRRLDVLWALIRDRRTFTVEPPQRGLAAA

SEQ ID NO: 184836 - protein, 402 aa, unidentified
MEQLISCGLDVHKETIFCALYQEGQKSEVMQYPAFTSDLKQMAQFLKDHGVNRVAMESTGIYWVPVWNVLEKEGFELMLVNPYLIKQMPGRKSDVKDSQWIAQLLYKGMLKGSLIPTHRIRELRCYSREYVKIQRYLTRVTNKMERVLETANIRICSLVSKNNSKTVIDIIRAVVEGKTEIEDLLPLVHGRIKNAKGEEVKKSLEGFIQPEHQFILGLSMQQYELYTKQSEELTMKMKALCDTYYKEEMTLLESIPGIKQQASMQIIAETGADMSQFENSSKITSWVGFRPRNDESAGKIKSKAITKGNTYLRTIMVQVAWAASRTKGSHCKEKYEQLAARKSPKKALIAIARKQLSVVWNVLSKKQVYDPTKQPVVSSDRLEKKMKYHQKQLDKLQKTKAN

SEQ ID NO: 184837 - protein, 329 aa, unidentified
MKKDWYVGIDVSKKWLDVAIFAEDSDLKGYIHTQVDNDKHGYKELLRWLKEHDVDVSSCMYGMEHTGFYSDGLQHFLDKKGYKYTMLEPAVIKHYPIQPREKNDRLDAAKIADYLFRFNDTIKLSTLPDKTMEELRNLHRERKFYVEDRVCYMNRKQAVGKEEAKRLDKMIENLDRMVDSIEEKIRNIIQENELLMESYLYLTSITGIGFVNAVNAIVITQNFTAFKTARDYASYLGVAPHTKTSGTTVRWKPKPRKHCDLTAKADISQAAKIAVVHDIELKRFYERKCNGKNDADTIRKAMNAVKFKLVLRMFAVVKQKHTYKQLDTI

SEQ ID NO: 184838 - protein, 342 aa, unidentified
MYYIGLDVHKKTISYCVKDVSGGMQQEGTIPATRTNLDGWMKTLPQPWMVAMEATIFTGWIYDYLLPHAAQVKVAHPLMLRAIAASKKKNDRIDAGKIADCLRCDFLPECHMVSTEIRDRRRTLRYRHLLVRQMVQMKNRVSGLLLETGVTHNKQRLHKVKYFRELLATNPEVDESIRPLLKLSRESIERLQKTDYALVSSLERDPLLAQRLQNLRTVPGVGPITALTWALEIGDVSRFHSVKQAISYCGLCGDEKSSAEKVLRTPLSKQRNKHIQHVLVEAAKLAPKQSHELALVYERAKEKGNVNRATIAVARKMVTYLLAVDRANRPFVPAEKRGTAAA

SEQ ID NO: 184839 - protein, 348 aa, unidentified
MTLVAEYYDYVVGIDTHARTHTYAIVNTRTGARDGCQTFPVSAAGIHRAIAWIQRNTSGAILAAVEGTRSYGATITHALTVQNITVVEVKPPRKRQRAGVGKSDDIDATTAAMTVLPHEVSALLQPRSDGLRAALSVLVASRERIDAQRTRNRNALNALLRQIDLGIDARRALTDRQLKEIRNWCVRSTDTIQQRYARAEAVLLATAIMDADQALHDNKQQLAQLNEQLAPTMQHQFGFGAVTVAWILIAYSHPGRVHSEAAFAALAGVAPLQASSGNTIRHRLNRHGDRLLNKALDVIAKTRMRFDEITKQYVEKRTAQGLSYREIKRALKRYLARSIFRQLQVLMH

SEQ ID NO: 184840 - protein, 297 aa, unidentified
MAGDSQKLNEGELALYSMHLSSGYIPVGVDLAARVFQVCYLNEKQKIKNKALSREAFLDFLKSPPFSQPLMVGFEACGGCNYWARFIEELGHKYKIMPPSAIKSFLGKNKTDKIDAFGIFKGTICPSVRCIRARSEENQTLMNLLATREQLIKQQTQSLNAQRAMLYELGEICGEGAAKIDAATDKLKESLEKSQSEAISNFRMIAEPFKANRDSLEAQIKQIDLYLKQYAKNNRTVQNLMTIPGIGVLSAVTLHAVLGDPDDFPNSRHFASFAGFAPTVKGSETRNFVFPCKHDIL

SEQ ID NO: 184841 - protein, 335 aa, unidentified
MKHYAGLDLSMESTQVCIVDDNGRKVVSEKVESSPEAIAMMLERYGPIERAVIETGRMSPAICLGLRELGVPVVCIDARQAHQSLKAMKANKTDPHDAAGLAQLARTGFYKEVHVKSPAAHGVRSVITARSHLVEARVRLDNTIRGLCATFGYRPGAGQGKAFLERIMQAAHIPGLGDAIASLLSVRAELVEQIKEMDRRLRVIASQSQACEILMTIPGVGVQTSAAFAAAVDEAGRFRQSRNAGAYFGLVPRRHQSGELDWTGRITKQGDSTVRKLLYEAANSILTRSRETFALKTWAMKIAKRRGLKKARVALARRLAVIMHAMLRDGTLFQA

SEQ ID NO: 184842 - protein, 342 aa, unidentified
MKKIVKQIVGIDVAQKELVVCLGRMHDDWSPELYANKTFANAEKGMEALVLWVKKQTDHRIAVRFVMEATGVYHEGLAYFLEEKGHEVSIMLPNKISNYMRTLEVRTITDKTASQAIATFGLERKLDNWKRPKEIYRKLRQLTRERDQLVQERTIVKNQLHAEQTEAYPNKSSVKRIKDRITMLNKQEKEIRGEVTALIAQDEEIKKIVVIICSLPGIGLLTAAIVLAETNGFDLIRNKRQLASYAGFDVKEKQSGTSVRGKPRISKRGNKYLRKAMHLPALAAIRHNERFKAIFARLVSKHGIKMKAAVAIQRRLLEMIYTLYKTNKLFDKNYLMRKVEVA

SEQ ID NO: 184843 - protein, 411 aa, unidentified
MDAIYPCVAGLDVHKQTVVACVRRWDGRGRVSKQVKTFGTMTRDLLELGDWLSRQGVTHVAMESTGVYWKPVFHLLEGRFTEILLVNAQHIKNVPGRKSDVKDCEWIAQLLQCGLLRGSFVPPVAIRQLRDLTRQRSQLVADRARVANRIQKVLEDANIKLASVATDILGVSGRAMLEAMIGGEGDPELLADMAQRRLRAKLPQLRQALLGKVTNHHRFLLRTLLEQVDFVERLIASYCERIEEEMAPFASARDRLQTIPGVDQRTAECMVAELGINMDQFPSEGHLASWAGLCSGMNESAGKKRSSRTRKGSRWLRQTMVQVAWAASHSKTTYLGAQYRRLAFRRGRKRALVALAHTILGIVYHVLKQGTVFIDLGPDYFEQRQVERLTHHLVQRLERLGHKVVLEPKVA

SEQ ID NO: 184844 - protein, 342 aa, unidentified
MYYIGLDVHKKTISYCVKDASGRIQQEGKVGSTRRELDCWMKTLPRPWTVAMEATIFSGWIYDHLLPHATQIKVAHPLMLRAIAAAKKKNDRIDASKLADCLRCDFLPECHMMPAAIRDRRRTLRYRHLLVRQMVQMKNRVSGLLMETGVEYNKQRLHKVSYFRELVSGNEEVHPSIRPLLKLSRETIERCQRTEYALVSSLQRDPMLADRIKRLRTVPGVGPITALTWALEIGDVSRFRTIKNAISYCGLCGDERSSADKMMRMPLSKQRNKHIQRVLVEAAKLAPRQSHELAVIYDREKQKGNGNRATLAVARKMVAYLLAVDRQQRDFTPAEERRTAAA

SEQ ID NO: 184845 - protein, 380 aa, unidentified
MKKCTVGIDAHKESNVLALAFSDMQPSTIYGKVSADLNRTVDAIRKIQKKHDLNKEDLQICYEAGPTGFVLARRLIKLGYDCQVIAPSLIPTKPGEKKKTDKRDARKLAEMHRSGHLTAVHIPDVDDEVVRDVCRGRTDAVNDLKASKKQLLSFLLRNGYRYPEKVRWTEAHMRYLRELVMAHPTQKILLEEYIRRIDNAVEQIKRLEDQMDKILQPWKRRPLVEALMGFRGFKMVAAMVMVSEIGHFGRFKHPKQLMAYLGLIPSEESSGETRRMGSITKCGNGHARWMLIECAGHYRMPAKVSKALSVRQEGLSREVKKVSWHAQNRLSKRWYQLSLRNLHPNKIRTAIARELSSYIWDIAMIIEQQDAPCPSNARPA

SEQ ID NO: 184846 - protein, 346 aa, unidentified
MMIIGCDFHPSWQQVSWLDTETGDTGERKLVQASGDAERFYRQLPVPSLIGMEATGNCHWLVDLLAEIGHELWVGDAAQIRASCVRQQKTDQRDAEHILKLLVEGRFPRIWMPSSEVRDLRQLLLHRHKLVTIRTRVKNELQHLCLNQGVQRKHKLWSKAGQQVLRELPLKPWAARRREDLLGLLAMLDQQMEPLDRAVKEEAHRDKMALLLQTQPGVGAVTALAYVLTMGDVSRFARGKQVASYLGLIPREHSSGGRQKLGAITKQGNRMLRMLLVEAAQMAVRCDPGMRREYLHRCHQKPKAVAKIAAARKLAVRLYWMLRTQKPYPEVVRIESSSTEALVSES

SEQ ID NO: 184847 - protein, 418 aa, unidentified
MSYKVAGIDIHKKVLMVVVATAGNEVADAAGEALEFECRRFGAGASERKHLCSWLRERNVSEVVMESTAQYWKPVWMDLEPHFGKLHLAQAHSNRAPKGRKNDFRDGKRLTRRLLADELMLSFVPASEQRAWRTMTRGKQQLVRDRVRLQNQLEALLEEARIKLSSVISDLLGVSGRRILQAMAAGQTDPERLAALGDDRLRCSQQELMDALNGSLEPIHCQVLKLYLKRLELLDEQIGTLDQMIATTLKQHQDAVIRVAEIPGFGVDSAQQLIAEMGIDAEAFPSAGQFTSWAGLCPGTEVSAEQNHSSRSAKGNRFVRRILTQAAQAAVKKKGSHFQSLFRRFLPRLHYNGAIWAIAHRLGRLVWKVLHDGIRYIEQGQETNPKAKNRRAQKLAQALRKLGYAVVLTAIAPRPATA

SEQ ID NO: 184848 - protein, 338 aa, unidentified
MVIIGIDPHKGSHTAVAIDGDEVTLGEVTVRSDRNQLERLLKWAVEFPERSWAIESANGLGALLSQQLVAAGEDVFDVPPTLSARVRVLASGKSQKNDENDALSAAIAALRSSRLRSVVAEDHLAVLRLLCNRHKNLTSLHTQAVGRLHALLAGIVPGGARRRLSADQANAILSGFRPATAVERARKAQARELVGDVRRLDTQMKASKAAIAEALVGVPTGLGELSGVGPVATCIILAHTGDVARFPTEGDYASYNGTAPIEASSGPRKRHRFNPRGNRQLNHAMHIIAFSQLSHAGPGRDYYERKIAEGKSQKEATRALKRRISTAVYRQLVADAQG

SEQ ID NO: 184849 - protein, 347 aa, unidentified
MTVSMIGLDTAKLVFQVHGVDEGGKAQLVRKLRRSELIAFFERQPRCTVVMEACGAAHHWARVLGGLGHEVKLIASEAVRPFVKRGKKNDATDAAAICAAACHPDARFVAVKSAAQQGILVLHSARTLLVKQQTMVANAMRSLATEFGIVVPKGSSKLEELQKLVEADPDCPEGAQAAFAGLMHQYRAAAERICSLESEIVSHARRDDTARRLATVPGIGPITASLMAATVGAGIESFSSARHFASWLGLVPRQHSTGGKTRLGRITKAGNREIRRLLVLGATSMAYRSERWKGAAGAWTRALLERRPFRLVTVALANKMARIAWALMTRHEVYQAKGGGAAANAAA

SEQ ID NO: 184850 - protein, 405 aa, unidentified
MLKVFVGHDWAETHHDVFIEDREGRRIGGGRVPDGVEGVARFHEMVADLVDDPSEVVIATETDRGLFVAALIATGYSVIAVNPMSTARYRERHQTSGAKSDPGDARALAELARTDSHSHRGVAGDSVLAEAVKVLARAHQSLIWTRQRQVNQLRSMLREFYPAALEAFDELAHRDALAVLVIAPTPTLGRQLSQAKIAAALRRGGRQRRIDQRAVEIQSVLRRDHLAAPAVVADAMGSAVAALVSVIAEIGAQIDRLEADLADHFEQHPDAGIIRSLPGLGMVLGARVLAEFGDDPNRYADAKSRKNYAGTSPVTRASGKSHLVVARWTRNARLADTSYRWAFAAISASAGARSFYDQHRAKGDSHNQALRALANRLVGILHGCLRHHTTYDEHTAWGHRSTIAA

SEQ ID NO: 184851 - protein, 401 aa, unidentified
MKVSGLDVHKDSIFCGIYNGKKHNEVKEFLTFTESIREMGCFLQDQGVRKIAMESTSIYWIPVWNILEDMGFELMLVNPYLIKQMPGRKSDIKDAQWIATLLHKGLLRGSLVPDKRIRELRSYSRRYVKLKEMITHSFQEMERILEMCNIRITSLVSKNNSITVKKVIQGIIEGKDSPEELACFVHGRIINSKKEKVRLTLGGFITEHHRFNLNLVWQQYKLYEEQLIKVEKEMSQICHKYYKDEIKLLQTIPDIKKQSAMQLIAETGNNMSAFENSGKITGWAGLRPKNDESAGKFKSTSITKGNKYLRRILVQCAWAASRTKGSYYKSKFEQLCIRKSRKKALIAIARKLLTVTWNILKEKQEYNPILEPVLSPEKIKNKMNYHTKEIQKLKQLGYSIS

SEQ ID NO: 184852 - protein, 331 aa, unidentified
MINCIGLDISKKLIAVHIPINKANIEIENNVKGLKGLYSKLNKLYKKDIDNLVFIFEPTGNYSFALTKFCNEKNIKCFLINPKQFSNFSKALGQRNKTDLIDAQVLSQAIPLAKDDEIKVPYIDTIVEELKELISYYKFTTKSSSKLINQLEAVTVKDGSKYMINDLKKSLKISKNKEIEILNKIKDIINSDNKLLKGYNNIKSVYGIGEVGAIVLLYLFIKYPKANQRQIVSLSGLDPIEKTSGTSVHKKSKISKAGSRVYRGSLFMGVMTAIRYDENFKNFFERLKSNGKHTTLAQIAVMRKMIIIAYSLYKNDTQYDKEFYKKACGSV

SEQ ID NO: 184853 - protein, 467 aa, unidentified
MAARKQKQKRMSAQVVEDEDYQLRYDVAAGVDVAKDSAVVCVRMPPAKGKKHRTSHLQTVPATVPAIGELAAELKAAGVQMVSMEATSDYWRIWFAVLEEAGLAVQLVSSSQARNLPGRPKTDKEDARWIARLTEMGMLRSSFVPPPQIRALRVYTRHIWDLTADRTRYWQRLEKLLEDALCKLTSVISRLAGHQTARAIVEAMIAGERDPRVLAALGQGRMRNEKLPALAEALSGMRFGPQHAHAAASLLRSIDLLDAELRDLQERVTEHLAAIPASWGVDAGGVTGPQAGRADGAAALPAAERLDEIPGLGREAAMALIAEIGLDMSRFPTPQALVSWAGLTPTARQSGPRKGRGKKGHGNTYAKRIAVLAAYAAANTDTFLGERFRRLSSRPGGGGRKKAGCAVGRSILIIVWHLLNDPAARYRDLGPDWHARHTDRSRKARNARRQLEALGYDVIITLREDAA

SEQ ID NO: 184854 - protein, 457 aa, unidentified
MRKPQVVPDEDHEVIYERVAAVDVAKASGVVCMRTPDPQRPGRFVNRIWDNVAATRAGIAELGRELLSCQVQKVTLESTSDYWRIWYYVLESVGLAVQLVSASQAKNLKGRPKTDRLDAMWLARLTQLGLLRPSFVPPAAIRAVRDFTRARQDLVRERTRVLQRLEKLLEDAMIKITSVISDGMKAKSAVAMVQALIDGERDPHVLAELAIGRLRGKRDQLAQALDGMFSSHHGVIARALLGQAAFLDQQITEMEFGAMAALAEVSESWGVDADGQAGPGCGTSPGSPVLAAAWRLAEIPGISVWLATVIIAETGLDMAVFPTPGHLVSWLGLCRSARQSGTRHGKGAQKKGNSYARAAAGQAAIGASGTATFLGDRYRRISRRRGKGGAAIAQVAVARSIMIIVWHLLSDPQARYRDLGPDWHASRASRDKKIRTHIKGLQALGLTVTITGDEQAA

SEQ ID NO: 184855 - protein, 460 aa, unidentified
MSRKRKNNQKKPGAPMLHSLNANAAGVDIGATQIYIAVPADRDPQPVRQFSTFTEDLHAAAAWLKACQIETVAMESTGVYWIPFFQILEARGFQVLLVNARHVKNVPGRKSDVSDCQWLQYLHSVGLLNGSFRPAQAVCTVRSILRHRNDLVQMAASHVQHMQKALDQMNVQLHHVISDLTGLTGLTIIEAILAGERNPQVLAKLRDRRIKASEQTIAKSLIGDYRREHLFTLRQSLESFRHYQKLISACDTEIEQYLEAFESKDSKLNSPAGSTPASPEEQKPQGSEPGFDLKSHLHRIFGVDLTTIPGISVLTAQTIFTEIGPDFSKFDCGGAFTSWLGVCPDNRVSGGKVLSAKTRQVNNRATTALHLAAQSLHHSQSYLGDFYRRMRAKLGAPKAITATAHKLARIIYYLIRTGKAYDETICATNEAHNRRRLEAKLTRQARELGFELIAPKPAAL

SEQ ID NO: 184856 - protein, 333 aa, unidentified
MEKKWFIGIDISKKTLDVVIYVPTQKHADETNYERFLNKEEGYKSLLCWLKKKNMAKKRLVISMENTGIYSFDLCLFLEAASIDYCSFNPLHLKRSLGLVRGKNDRVDAERIAYFAYLHRDELSYSKLSGSSIIRLRDFAAERKRFVKQQAEYKGFLTDRKDCEMTSTIERAAHMVKILDEEIASVEEEMLQIINSDPSILRNYELLNSIKGIGTINAMNTIIHTNNFQAFETARQYACYLGIAPFEHSSGTSIKGKTRVYPTGAKLLKADLSQAANSAIVWDKEMKEYYERKRKEGKAYGVVLNAVKFKLVGRMFAVVKRGTPFVELMTYKK

SEQ ID NO: 184857 - protein, 343 aa, unidentified
MSTVVTIGLDLAKSVFQLHGVDAGGRTVLRRRLSRHEVVSFFAKLPACLIGMEACSAAHHWARELTRLGHSVRLIPPQYVKPYVKRNKTDAADAEGICEAVARPNMRFVQVKTLDQQSVLTLHRVRSAFVRQRTSAINTVRGLLTEFGIVAGKGIPRLAELRQRMDETDCDLLPDEARAAITEEFEHIDALTARIESVEARIVAWHKTSEASRRLASAPGVGPITASALVASVGDGRQFQSARHFAAWLGLTPRVHASGGKEHIGKISKGGDRYLRALLIHGARAIVGTSFRKGVTPRLWLKQLLERRSVNVVAVAVAHKTARALWAMITRGEEYRRVAAQAA

SEQ ID NO: 184858 - protein, 381 aa, unidentified
MQRIDPHQIRTAAEGYDTTIYVALELSKASWLVAINAPGGDKVSKYTVAAGATTALSAILTRARAQAERWCGESVRIVAIHEAGMDGFWVHRWLEAQGIESHVVDPASIAVDRRKRRVKTDRIDVEKLLRTLMGWARGERRICSMVRPPHPEQEDERRLTREREILVGERTRHVNRIKGLLMTQGISYFQPLRRDRRARFEALRLWNGLTLPGRLKAELLRELDRLELVMNQIQVIEAERDRALQTRSRDNIGALLVRLRGIGPEIASVLCGEMFHRDFMNRREVASYAGLAPSPWKSGTIDIDQGISKAGNPRLRKTTIQLAWLWLRHQPGSSLSRWFHARVGDRRGRIRRITIVAVARKLLIALWRYVTLGLVPEGALA

SEQ ID NO: 184859 - protein, 359 aa, unidentified
MREQRNKISFRVQKIYVGIDVHLKSWSVTVLSETSVLKKFSQHPSPEALYGFLTRSYPGAEYHSVYEAGFCGFWIHERLTALGIDNIVVNPADVPTKSSEKLRKTDTVDSGKLARSLRANELKGIYTPDSVSLEMRSLIRLKNSITKDTTRQKNRLKSQLRYLGIEIPQEFLTPFSNWSKRFFAWLKEIETLTPSGRQALDIHIRHLEELRRQKLEMTRALRTLAKTDRFREPLRLIMSVPGFGQATGMAFLSEICDITRFRNAEQLAAYIGMIPMCHSSGEKDGTGDITIRKHAVMRCNLIEAAWVAVRQDPAMNLFYTEQCKRMPKSKAIVKVARKLVNRLFFVLKHQTEYVNSIVS

SEQ ID NO: 184860 - protein, 341 aa, unidentified
MTMTMIGIDPHKATHTAVAIDDDENVIGEFTLDASRGQVERLTGWASMFTKREWAVESASGLGYLVARQLVSAGETVFDVPPVLASRVRLMGSGRSQKNDPNDARSIAIAALRSDRLAVVAPDDHVTVLRLLVKRHRDIAQLRNKHCSRLHALIGELKAGGIGTEISVTKASQLLDGIGIGDETTRYRALVAREVADDIAHLDEKLTISKKRIALAISASGTSLTDIVGVGPVGAATIIGYTKDVTRFPTRGHYATYNATAPIEASSGSRNRHRLNPRGNRILNHAIHIAAITQLRHDTNGRAYYDKKIAEGKTPKEAIRALKRRISDAVYRALTLDASQT

SEQ ID NO: 184861 - protein, 371 aa, unidentified
MEYGAIDLHKKESQIRIVTESGQIIDQRIATTRDRFTHVFWGHPRMRILIEASTESEWVAQHLEQLGHEVIVADPNYGPMYGRRSRRIKTDRRDVAALTEACQHGTYRVAHRRSARQHTVQCQLNVRQELTQTRTRAISLARAITRGAGLRIRSGRTETFLARLAALELPDSMKGTLTPLRSVIEILDDELTTADEQFEAMVAADPIVKRLTTLPGIGPITASAFVAALDTVSRFEGAGQVTSYLGLVPREYSSGEKQRRGRIVRSAHPHLQSLLVQAAWRMSRSASAETAGLRAWAQAITQRRGKRIAMVALARRLARILFAMWRDDTEYQANRIRTGGEASAKRALAPRESRPTESAASPSVSLTMVGT

SEQ ID NO: 184862 - protein, 386 aa, unidentified
MNNPPDQESGGWLGNRGFGGLDWASQKHSVVVVDPQGKVVEDFEIEHSALGWKKFRERIKPYGSIPFAIETSQGAAVEQLLEAGMQVYPLNPKSAQAYRQRKAPSGVKDDRLDAWSFADALRVDGHGWKPLRPEDPLIKELRLLCRDEVGLIEQRTAFINQLRHALAEYYPTALEAFEDWGAVSAWMFLQRFPTPQLLEKAGKRQWEKFLHSRRLWRTESGPRRMELFAKATEFGSSEPTANAKSMLALSLVEMLFAVEKQLGLYRKRIEELFESHPDHDLFGSLPGAGPKLAPRLLAEIGDDRERFEGDAQNLQCFAGTAPVTKRSGQHRECHQRWACDKYLRHAVHLFSEQSLTRCAWAETYYKAHRAKDHSHARSTLPRTALA

SEQ ID NO: 184863 - protein, 330 aa, unidentified
MKNVREVVGIDVSKNTLDATLYHVKQHAVFTNDDKGYAQLLSWVSDQLEVSSYFFIFENTGNYSLKLSVFLSSKDLVYVEESPMRIKRSTGLTREKTDKLDSYMIARYGWMYREELEPSKIKPKEFQELGRLLSLRDQLVRDRSGLKSTLKEQKHLLSSPSTDSCCKLLERSIKHIDKQVQHIERRMKELLETDDSIQTNYNLLRSVKGVGLILSCQLLYHTNNFMKFNNWRSFSSYCGIAPFEYSSGSSIRRRKQSHYIGDRKMKTLLSMAAVSAIQSDQELRNYYHRKLEEGKHKMIALNNVRNKILARSFAVIKRGTPFVNIAATNY

SEQ ID NO: 184864 - protein, 241 aa, unidentified
MNYLCISAEQFVLPVLGLDVAKASVQAELRTKERKVRFDFANNAKGFAQLARVLDQQGAPKIWAGLEATGAYSQALALWLHAQGHRVSLLNPRRVKQYAQSAGRRNKTDLLDAAIIADFVCAMKPAPWQPPTLEVAQLQALVRRREELSVMLQAEKNRLEGLLAEMARPGQVERARQAAAHAGLVPRREQSGSSVRRNRGLGREGNRYLRKALYMPALVAIKYNAPLSHFASRLRSAGKPR

SEQ ID NO: 184865 - protein, 552 aa, unidentified
MSAHPIHLGVDFAKEKFDYHGADLRGTLPNTPAGHRRFLSMLPEGAQLVCESTGACHRALVAAAHAAGVAVTVANPRQVRDFARGLGRQAKTDPIDAQSLYDFGRLTVPKADLAPSPAQTALQELVVARQQAVLERSTVLLQAAGHQLPLVKALHRARLKLLTAQIGKLEVAIAKTLAAEAALAARAARLAEVQGVGPLTAATALALCPELGTLSRGQAAALLGVAPFNHDSGALQGQRHIAGGRLRLRGAIYMAALSAARANPILRVFYQRLRAAGKPAKSTVRLSAEQVGDRIILEISDDGRGMRADVLRRKAFEKGLIDLEASNSMDDKQSLHLIFLPGFSTKDKISDVSGRGVGMDVVKTNIQKLNGRIEIVSAPGQGTTISIVLPLTLAILPVLVVRLGEQGFALPLSMVREMIPIDPNQVQSVNGRATMNLRNEVLPVTTLAELLDWPVEASPKYGVLLQAAERSLVLAVDGFVGRDEVVIKPLHGVKPKGVAGATMNGDGSVVLVLDMEALLAEARFLTRADLFAVQAKPVTGNSELPSQESGNV

SEQ ID NO: 184866 - protein, 400 aa, unidentified
MDNTTGVYGVFLGLDVGKGAHHAVGLDPAGKRLHDAPLPNSEPKLREVFDRLAQHGPLLVVVDQPATIGALPVAVARACGHQVAYLPGLAMRRIADLYPGNAKTDARDAYVIADAARTLPHALRPVDVGDDTLAELDVLVGYDDDLAAEATRVSNRIRGLLTGIHPALERVLGPRVTHAAVLEILSRCGGPTGIAKAGRRKLTTIATKHAPRMGTKLVADILTALEQQTVVVPGTTAADTILPRLAESLKTVLAQRKTVAAEVEEILDAHPLARVLTSMPGIGVRTAARILLEIGDTSSFKSSAHLAAYAGIAPVTHRSGTSIKGEHPARTGNRRLKRAFFLAAFAALSDPVSRTYYDRKRAEGKKHNAALICLARRRCDVLFAMLRNKTFYRAPEAQPA

SEQ ID NO: 184867 - protein, 436 aa, unidentified
MRGCRCSMIMGFTKPIEHFNLQRKKVITMNTLYVGIDVSSKSNVVYLMLPNGDKHSNFSVANSHEGSTLLVKKIYSALTSHSLDTVLIGLEATSIYGYNLVYFLREDATLAPFNRKIHVLNPKQVKKFHDTYNDLPKNDYVDSFVIADCLRFGRINKEVYMGEYRYKALQNLTRARFFAVQNLVKEKQRFMNVLFKKYSTMTQEKVFSDAFSTTALAVYDEFESAEALANMDLHELTDFIIEKGKNRFPDPDAVAKAIQKAARSSYRLPKTVNDSVNQVLSISITSMKALESQIKEFDKAIKALMELLPNVLISIPGIGPVYSAGIMAEIGDINRFDNQASLAKYAGLAWKQHQSGGFEAEVTRLIPSGNRFLKYYLCEAAFSLVRCDKEYSDFYHLKYKEVNRCQHKRALALTARKFVRLVFRLLKDNRLYCPAK

SEQ ID NO: 184868 - protein, 350 aa, unidentified
MDIVGGFDVHRKQITFDYIEMESGEVHRGKIRPATRESFREWLDEFTERFSGKQIALAVEATTGWRYVVEEMKRAGIEPHLAEPAETKSLQGRKKRAKTDRIDAGHLRDLMVIDRLPESWIPPDHIQEIRTLMRLRHSLIEERTTHKQRIHAQLFHNGYPQQSNLDSIEGRAHLADMELPAAARKVVDLSLAMIDHINEELAPIEKELRAYARSQAGCQALMAHYGVGELTSVALLSELGDTRRFSSSRKAVRYAGMDVTVHSSDDKRAAGKLSRQGPPVLRWAAFEVAKRAWRKSSPDHEYYLRNKERIGANRAALSIARKLIRRAHHTLRELGEEAISEPVLTSSSSV

SEQ ID NO: 184869 - protein, 317 aa, unidentified
MGHFPERTWAGIDVSKRHWDVVVDGNKRVYHFDADRCGSDQLLALLNEQGVTHVCLEATGGWEQGLMAAVDEHGLRVSVVNPRQVRDFARARGQLAKTDRIDAQMIAQFGAMMQPAPSEKPPEKQQKLRSLRARRRQVSGTLVQEKNRLATQRDQDARRSIEDAIDFYQKQLESLDAQIKRLIQMDPEFQQRLALLVSVPGIGDTTAAALMADLPELGTLNRRQAARLAGLAPINRDSGTLRGKRMIGGGRATVRQGLYMATLVATKHNPVIRDFYQQLVRRGKAKMTALTACMRKLLLILNAILKDKHPWKSTHPT

SEQ ID NO: 184870 - protein, 413 aa, unidentified
MRLLNANANEHPLRIKLSAHIRTGIIMEPQRNKVCGIDVHKRFLIATIFSRDGDRDTQRFSVTLEDLLKFRDWVIENGCEQVAIESTGIYWHPVHAVLEGKIDLIVANAYKIKHTPGRKTDISDSEWIAELCLNGMIEPSRIFPKDDRELRRLTRAREGYVKQMTQEKNKIHQSLDSACIKLASVISDIFGKSGMYLLNCVLEGRDLEEIIEGIPSGRLKKKADQIKESIKSRLEISQVILIRGSLSLMRSIQERIDELDGEISARIQYRKNDLAIAMSIPGTGFISATAILAEIGNCTDFKKPEQLAAWCGLVPSLYQSAEKTILGGITKQGSKHIRRMLIQVAYAISRTKDSKLKKFFLRIQAKKGSKVAAVALARKVLCILHHLLMNQEMYGKKRIRGIRGRSGQYHHPP

SEQ ID NO: 184871 - protein, 387 aa, unidentified
MSEMFNPHAPATTYDHNTTIVAVLELSGKNWLLGVVAPGLSVRMKRSFEARNVEAVVRALEQAKEKSAKAGFEVARIVVGFESGPDGFWIARALQQRGFEVCVMHAASIAVEQRGKRAKTDRLDVDLLLTTLMGWLRGEPGRCTMAPVPSEEEEDLREAGRRRETLVHARLRVENQIASLLIRQGIAGFKPRLKNAETKLGELRTFDGRPLPVNMMNSLRLLLAQHRLLSAQLKAIEEARQRVVTIADPDRLQRMIQALARVVGVGVETATVLVHEVFSRSFKDRRAVGAFVGLTGTPYNSGGSKTEQGISKNGNARVRRMLSQLAWRWLGHQPDSVLAQWFKARLGGAKGRMKKVLIVALMRKLVIALWRLAETGEVPAGARLAAR

SEQ ID NO: 184872 - protein, 364 aa, unidentified
MKIIGCDFHPSFQQIAMVDTETGEMVERRLFHADGEARRFYESLSRPVLVGIESSGSMLWFERLLTGLGHSYRIGDATAIRSSAPRKQKNDKRDAQHLLTLLLEDRFPAIWVPSMAERDLRQLLKHRHTLVQMRTRTKNQLQHIVLNQGLQRKKKLWTQAGLEELKQLELEPWTKRRRDDLLKILAEMDTHIAELSTAVEVEAERWPEAKLLMSHPGVGPILALATVVTLGQVERFRDGKHVASYLGLIPREDSSGERRRLGAISKQGNSFMRFLLVQAGLSAARGDAGLGRMYKRLVQKKHHGVAKVAIARKLVVRLYWMLRTQKQYPEVVRMQGSPSRAVAVEVAVDRLSGHPASRKRAGKK

SEQ ID NO: 184873 - protein, 313 aa, unidentified
MNDLCVGIDVSKARLDVAVEGGEPFSVTNDLAGHVQLSERLAAVKLRLIVMEATGGLERAVAAHLTAQALPIRVVNPRQVRQFAQAAGILAKTDQLDAAVLVRFAQAMQLPPRALPSEEVQALQALIARRNELTEMLTMERNRLRLAHQSVRRHLKKSIEWLERQIGSTDHDIDGMLRECGIWRDKVELLESVPGIARVTSLRLVTTLPELGTLNRRQISALAGVAPFNQDSGQWRGKRKIYGGRAAARTALYMAALVGSQHNPVLRAFYQRLRAAGKPAKVALTACMRKLLTIINTMLREGCVWSPRLAAAA

SEQ ID NO: 184874 - protein, 352 aa, unidentified
MSSNEIFPNLTIGLDLGDKVSRVCEINAAGKIVNRASIATTAGAIERYFGGREPCRVVLEVGTHSPWITRELKKLGHETVVSQPSKVYGKGHKQRRNDWMDAEYLARQGRADPELLHPMEHRSAEAQQDLALLRARDQLVQARTKLINHVRGAVKSLGGRIGKCDAAAFHRQAAGQLPEPLRPSLVPLLEVIGDLTKRIRAMDDAVEQIAEAHPEAVHLQQPSGVGVLTAVAFVRALEDPKRLKRSREAGAFFGLVPKLDESSNSSPQLHISKAGDPLVRRYLVGAARYILGPFGPECDLRRYGEAIAARGGKNAKKRAAVAVARKLAVLLHRLWITNATYDPNWSQRERAA

SEQ ID NO: 184875 - protein, 380 aa, unidentified
MQASTVDTPTAGHCGTIFVAIELSQKSWLVTLHSPDRDRISRHKLEGGDHAGLLALIEKVRSRAEPKLGGRLRVASCYEAGYDGFWLHRLLLSAGIENFVFDAASIPVEQRGRRAKTDRIDGELLLRTLMAHLRGEPRVVRIVKVPNVEQEDARRASRERERLVKEQTAHTNRIKALLRLQGMAVGYPRRRDWLKWLAQQRDWQGQPVSPHLLAEVTREHARLMLVRQQLAALEQADAAAPIPQAMSERRDRLQRLKALGPSFATTLTSELFYKDFDNRRQVAAYCGLPPSPWRSGGIDREQGISKAGNPRARVKAIELAWLWLRHQPESELSRWFNTRIANAGTRARRVAIVALARKLMVALWRYLTTGLVPAGATMKA

SEQ ID NO: 184876 - protein, 350 aa, unidentified
MIIIGCDYHPGFQQIAFVDTETGDCEEQRLEHCEGAQKFYRDLASQGKKVGVGMEASGHARWFERLLEELKIELWMGDAEVIRAKRGRKPKTDREDALHILKLLRTGDFPKIWVASWENRDLRQLLWHRHRMVQARTRAMNQLQAVALNEGLRCKKKLWREQGREQLESFGLAPWASRRREDLLQLLDRLSPTIAELTQAIEQEAEKCPQARRLMTHPGVGALTALAFVLIIGTTERFQCGKQVGSYLGLVPLEDSSGERRRLGHITKQGNSLLRFLLVEAAQVTSRTLPEWRSKYMHLTMRRGRKIAKVAMARKLAVRLFWMMRQGWDYQQVMKFGSHVEQPEPGDGVR

SEQ ID NO: 184877 - protein, 370 aa, unidentified
MSVRRILAKTIDTDLEYEAIGIDLAKNCVSAALLTTDGEVVCIDRLDYSELEKSAQALSSTTFAMEPCTEMNYLVQKLEAWGHRCLVIGGKNVQNYVENHFSGQKTDLNDAQALAFLAQDTQLRTIKAKDVEQQKYASLTTLREQYIKQYRQTIVSLKGICQAWGLNISKGISGKARLKDLIENHAAFPEELKESLVDMVTHAQTAQKALNKITKTLEELAKNDKLCQLIRTIPGLGSICSCRLRATVGDIKRFKSPKDFPAYYGLVPRSIATGHNERKGKITHRGDRTMRSLMVQAAGSLVNMATKGKLKSKQLTKWILKKQKEKMPWGKLVCAVAAKLLRIVRAVLISNKPYNSKIAGVAKCSLPKGS

SEQ ID NO: 184878 - protein, 353 aa, unidentified
MRKMRQSVVEGKRIFIGLEDSKKTWRVNVRYDGMEVHQASMPSDYGDLKVYLANRFPGCDITVMYEAGFKGFDLHDRLVADGIRCVVTPPNKVTQAKDTRVKTDTRDARRLAKNLENGDYVACHVPDRERREDREVSRAHEQVKKDIARTKNRIRGMLKFHGIEGCRSKGAWSDREYLSVVNMDVPRSIKFSIRIKVKHLTVLFELRNELRKELQELSCKERYRVAVKAKKSVPGIGWLTAIRLTLEWGDMGRFASGKHIASFSGLTACEYSTGDTQHRGRITGQSAEFVRSWLIECAWRAIKKDPVLFDKFHRVWQNSGSKKKAIVAVARKLAVRMRALEVNNDTYQIGLIA

SEQ ID NO: 184879 - protein, 318 aa, unidentified
MQISGCVIGVDVGKFELQVAGYEGAILSGIVPNNRSGIVGWLKRLPAGSVIAMEATGGYQELLARLAHERGFVVYVLNPTHVHHYAISLGNRGKTDRLDAQVIAQYIAQRHAKLHRYEPISPELQQVRALQALRSTVVRVGTSLRLSAQRHGCASKHQKQALASLGAWAEQLERELIAKIKAQSEWAKTYGLLTSICGIGPINGAALTTLFNRIHFASSDAAVAFCGLDPRPNESGRKVGRRRLSKQGDKAARTLLYNAASSAARTAHFKDYYAMLRARGLASTAALVVIARKLLRIAYGVWRTGQAFDPGRLNLKAA

SEQ ID NO: 184880 - protein, 411 aa, unidentified
MKEIGRAIGLDVHLDFCEIAICEDGRVRSAGRVASTPEALEVLAESLLATDRVALEVTGSSWEILRILEPHVAKVIVVSPDDTGIRQARAKTDRLDARTLAKLLWGGELDGVWTPDELTRVLRRRLGRREQLVRSRSRAKNEVHAVLMRRLKGRPPVSDLFGVKGRQWLRQLELPVEECETVGGCMRHVEFLDSEIAEVERLIARQMLSCSDARRLMSVPGVNVICAASFLAAIGDIRRFKTARQRAAYLGLDPKVRQSGSEPARSGRISKQGSASARWAMVEAAFSVVRQPGPLHAFYERLRARRGHQIAVVAAARKLACLFWCLLTREEQYAHQQPSPTAKKLRRLELTAAAKRYDTKAAGVWSTNQAMRDAERKLAEQAEASYVRMVRDWQATAPRRGVGASVTPGRA

SEQ ID NO: 184881 - protein, 350 aa, unidentified
MSSASVPSTIATIGVDLGKNTFHLVGLDRRGAIVFQLKLSRSQLERRLANVPRCLIGMEACSGAHYIGRRLTELGHEVRLMPAQYVKPFLKGHKNDYRDAEAIAEAVQRPTMRFVSIKTPDQMDLLALHRVRSRLVGQRTGLINQIRGFLIERGITVRQGVLPLRKALPDILSLSTGTLSPRVVRLIADLAQDWRRLDERIETVSAEIEALAQQDDSCQRLMSVPGVGPIISSAVVAAIGNGLGFKQGRDFGAWLGLVPKQESTGDRTILGKISKRGNKYLRTLFVQAAHVVLARRPATAKRGLWPWIEQASRRLHRNMLAIALANKLARIAWAVLARGRAYEPRVPAHA

SEQ ID NO: 184882 - protein, 353 aa, unidentified
MGDQSIQSEVILGVDTHLDTHVGAVISDTGKLLGTLAVATDAAGYLKLLTWANSFGRLRRAGVEGTGTYGAGLARLLCDHEIDVLEVNRPDRANRRLQGKSDPTDAESAARAVLSGSAAAIPKAQSGAAEAMRAISVARRSAVKAKTQAINQVRALLVSAPQDIRVRLWKVKPSECIDGCAHLRSLGTTPLLHTLGATLRMLARRWLMLAEELKELDAILERLTSQHAKRLRAQFGVGPQTAAVLIAVAGDNPERLRNEAALAALCGASPLKASSGKTTRHRLNRGGDRSANNALWTIAMVRMRSDQRTRAYVARRTAEGMSNKEIHRCLKRYIVRALYPLILADLADSARST

SEQ ID NO: 184883 - protein, 462 aa, unidentified
MMNVQEQREMVEKANRILSEMKSFTWRDLETQGKFSKNDKLSFISDDMLILGCDIGSETHYVRAIDTRGRELSRKALAFDNNAEGFQKAHDWAVQLAAASDKKQIVLGLEPTGHYWFCLAAWMVSNGISVVQVNPYAVKQTKELEDNSQQKDDRKDPKLIANLVKDGNYGMPYLPEKVYAELRRLSMFREQLTEDRNRSMNRLHREMKIYFPEYKDAFGKIDGAFCMAVLKEAPFPEDILKLGGEGIREIWHQAKLRGRGYSRAAEIVKYAETSIGLKDGTAAGREAVRWFAEKIMELDEELAEVENKLNEKCREIPHAENVLEIPGIGGKILSGILAEMGDISRFDDAKELQKLSGLGLVSCSSGKHKGETRISHRGRKRLRYWLFQAARSAVAHGEEYKWIHAHYTTRAGNALQKMQSLIVIACKLLRVIYTMLKTGKPYDPEKLLKDIRYPENVQTAAA

SEQ ID NO: 184884 - protein, 315 aa, unidentified
MEAEVFVGIDVSKARLDVALGAAGELLSVEHEPRAIAALVKRLLQVRPARVVLEATGGLETTAVAELGAAGLPVVVVNPRQVRDFARATGQLAKTDALDARMLALFAERIRPEPRPLPSEQERELKALLARRRDLVEMLSAERNRYANAPKLLRKELAAHIRWLEARLKERDRDLDRMLRGSPLWREREDLLRGVPGIGPVLCATLLAELPELGRLGRREIAKLVGVAPLNRDSGAMRGKRTVWGGRAPVRAALYMATLSATRCNPPLAAFYRRLRERGKPAKVALTAAMRKLLITLNAMLKHRSTWSPPCPTAA

SEQ ID NO: 184885 - protein, 417 aa, unidentified
MRIVRPICCGADIHKDLIVATIATTNQDGITEYIQSSFSSQNFDLNRLKAWLKEHHCFEIAMESTGKYWIPVFNVLEDEIKVFVVHPKYTKAIKGKKTDKKDSKWIADLFKHDLLKFSFIPPKEIRELRELSRYRIKLIAMRSSERNRYQNSMTISNIGLASILSDPFGKSSRAVMKEVIRSSSVTEEKISKLLERNARKKVKEVLQSLDGSHIESDQRLKMNIASQHMDQIDSHVRRLETEMAIRCIPHATLINLLLDIPGISYLSAMTIIAEIGTDMSVFETSKQLSCWAGLAPSNNESASKKKSVRISKAGSYLKPLLVQCALAAINSKSNPYYRIKYNRIKKRRGHKKAIIAIARMILVNIYHILSTGEVYSPCDMEQIINPKPVKKVMTIQNAIEFLQSQGFDTSKLISSSS

SEQ ID NO: 184886 - protein, 465 aa, unidentified
MSKLRNPILPRQAKGAPAQPKPPKLDALAQINHHAAGLDIGDAEIYAAVPESAADPAVRVFPTFTANLESLADWLTACHVNTMAMESTGVYWIPIYELLEERGFQVYLVNARQLKNVSGKKTDILDCQWIQQLHTYGLLQPSFRPPAEICAVRAMVRQRARLLQSCSAEIQHMQKALQQMNLKLTNVLTDITGVTGLQIIRDIVAGARDPHKLAAHRDPHCKKSAAESAASLTGNYKREHLFALKQALSAYDFYQEQLVVCDTETASLYAELDSQVDPVAQPLPAPKRPHSRRRNEAHYDLRRELYRIAGVDLTTVDGLDALTVQAVLTETGVDMSPWRTSKHFASWLCLCPEHAKTGGKIIQRGTKPSANRAALARRLAAHSLHHSNSALGAFYRRMASKLGKPQAITATAHKLARIIYAMLKTKTPYQDPGADHVEAEVQERKLKNLKRQAKDLGFELVPTAA

SEQ ID NO: 184887 - protein, 387 aa, unidentified
MEVRIENTPSARTNNDPVHCFVAIELSKSSWVVGFQTPLSKQTSRYQVKACDAEPLLELIERIRTRVAREVGRPVEVTSCYEAGYDGFWLHRVLEAHGIHNHVLDPASLQVSRRARRPKTDRIDADRMGRALIRHLRGEPEACSVVRVPSPEQEDARRLHRERRRLITERVGHVNRIKGLCATQGIYNYEPLRSDRLERLDKLRTGDGRALPARLKTEIVREIKRLEVVLEMISTVEAERDAILKDKKSTHLNADKIKMLAKLKAIGAEFSTTLVGEVFYREFANRRQLGSYVGLASSPFCSGSLDRDQGISKAGNSKARAMMIELAWTWLRYQPDSALSRWFQARVGNLKGRPRRIAIVAMARKLLVALWRYLQTGVIPTGAELKA

SEQ ID NO: 184888 - protein, 367 aa, unidentified
MTKSITVARRQTSNFAEKKYTVGLDLGDRWSWYCVLDERGEVVFERKVSTTPKALREVFGAMPHSRVALETGTHSPWISRLMKELGHEVIVAQARKVRLIGESRKKDDRLDARTLARLARIDPELLGPIQHRSARAQADLIMIRARAGLVRARTALVNAARGLTKSYGERLQGCNPRNMDAEKRKGLSAELQLALEPLLRAIESLSQQILDYNERIEQMARDSYPEVARLKQVKGVGTLIALAYVLTLEDPQRFTKSREAGCYVGLQPGRRNSGSSTPQLYISKEGDPYLRTLLVQGAQHILGPFGADSDLRRWGLKLAERGGKNGKKRAVIAVARKLAVLLHRLWVSGEAYEPLRNSRAIELPTAA

SEQ ID NO: 184889 - protein, 383 aa, unidentified
MQPTLKQDCTLDAAVLAVSLELAKGSWKVALHDGRRAKPAVHSVAHEQAAGRLVEAVQLVEATKRKWQLGAATRVVVIYEAGQDGFWIERALAALGYEVKVVDPASLPVTRRARRAKTDRLDAIGLVLSLLAWLRGERDRMQVVRVPAVAAEAQRHGVRERGALQKEIGQHRDRIRKLLRTVGCWEEVKSDFAQRLARGAVVCHDDSELPAQLRTRLERECERLALAVGQLKTLEAALMEALPEAVRERIGRLMQIKGVGQVGATRLVLELFWRDFANRRQVGACVGLVPQPYDSGESRVDQGISKQGNRRVRALLIEMAWLWLRYQPDSTLTQWFAYRTQGSGPSKRGKRIAIVAVARKLVIALWRYLEQGVIPEGAALKAA

SEQ ID NO: 184890 - protein, 410 aa, unidentified
MIKENYMYVGIDLHKETHTAVIIDCYNQKLGEITFPNRPADFPKLVTKVKKCNTDGKEVVYGLENAYGYGRALAVWLIDKGYFVKDVNTAISHRQAKHRGAMYRKSDSDDAKAIALATLNMLDKLPDACPNDAYWSLGQLVHRRDNIMKQRTRLVNQLHEQLCIAYPSYKQFFNDISRPTALYFWEHYPSRKYLKGKSVEDLRAELVPVSHNKCSTKTCEKILDAIAGDKVKNNAYQDARDMVTLSIVSDLQHYDKQLAEVDKMLEQMYKMLGCTLTTIPGVNVITAVKILAEIGDIKRFSNANKLAQFAGIAPLHLSSSGKGKDVATKQGNRRLQATIYFLAIQMVQVSSKGTPRNSVVRAYYEKRKAEGKTSQQALICISRRLISIIYGMLKHGTEYRMPVVESAGEK

SEQ ID NO: 184891 - protein, 410 aa, unidentified
MTKEDFIYVGIDLHKETHTAVMIDCYNQKLGEITFPNRPADFPKLVTKVKKCNTDAKEVVYGLENAYGYGRALAVWLIDKGYFVKDVNTAISHRQAKHRGAMYRKSDSDDAEAIALATLNMLDKLPDACPNDAYWSLGQLVHRRDNIMKQRTRLVNQLHEQLCIAYPSYKSFFNDISRPTALYFWEHYPSKKYLKGKSVEDLRAELVPVSHNKCSTKTCEKILDAVASDKVKNNAYQDARDMVTLSIVSDLQHYDSQLTEVDKMLEQMYKMLGCTLTTIPGVNVITAVKILAEIGDIKRFANANKLAQFAGIAPLHLSSSGKGKDLATKQGNRRLQATIYFLAIQMVQVSSKGTPRNSVVRAYYEKRKAEGKTSQQALICISRRLISIIYGMLKHGTEYRMPVVESAGEK

SEQ ID NO: 184892 - protein, 355 aa, unidentified
MNSEEYIGLDVHQASIVVAVMDSTGKLVMESILETKAATILQFFAGLRGTLAVTFEEGTWSAWLYDLLHSRVEQLVVCNPRKNALLKDGNKSDRIDARKLAELLRGNQLKPAYHGETGVRILRELSRSYLTIVKDLSRVMNRLKAVYRSWAIPCAGRDVYYRRHRTQWLAKIREAGVRRRAERLYEQLDMLQHLRQQAHRELLAESRKHAITAKLRQIPCLGPIRVALAVALIQTPHRFRTKRQLWAYSGLGLETRTSAEYRFVEGQVRRSKKLLSIRGLNKDHNHDLKGLFKGAATMASVRPGPFQDFYTAALAKGIKPTMARLTLARKIAAITLTLWKKGENFDAEKLKSQAA

SEQ ID NO: 184893 - protein, 256 aa, unidentified
MPLVDVPCFVGMDVAKAQWDMALRPAGERWAVPNDARGIAPLVDRLQALHPTLSVLEAPGGLERAATAAWAAAGLPVVVVHPRPAREVARATGPWAKTEALEARALAHWAAVIRPTPRPRPDAQTHAWRALLGRRQPLMVMRTAAQHRLAGTSWRLQTDMAAPITWRNARLATLDDDLETTLRASPRWRENDERWQSAPGLGPVCARTLRRELPELGPLTRQQIAAWVGVAPLHGASGTLRGRRTMWGGRAPVRTV

SEQ ID NO: 184894 - protein, 427 aa, unidentified
MKKADLLSTLFVGIDISSRENVVALLDFESTKPITSFAVANNQPGAVELAQKLADFLSSHRDLSGLMIALESTSFYGIHIANYLSTCQLLLPFNPAVYCLNPKMIANYKKSFIDLGKNDYIDAFVIADFARVGRITIKPWRGSQFLALQRLTRHRLHLAKSLTREKAYMLSNIFLKFSEFSLLDEDKQPFSNNFGAAASSVLTDFLSTEEIADMPIEALINYICAKGHNRFSNPEKTASLLQLAARNSYRLDKCLYEPLTISIASSFNLITTYTAEMKSVNKAIEKTLKGLDPNAYQSLLSIPGIGPVMAAGILAEIGYIEAFKSQDALAKYAGLVWRENQSGQFTADDTRLSKAGNSYLRYYLIEAVSHVKNHCGEFAAFYQKKYDETKTHQHKRALALTARKFVRLIFGLLAKHQLYSQSGVNQT

SEQ ID NO: 184895 - protein, 341 aa, unidentified
MDITTIGLDLAKNVFQVHGINGRGDVIVRRRLRRAQVCAFFSALPPCLVGMEACGTAHFWSRELVSLGHEVKIIPPSYVKAYVRRGKSDAVDAAAICEAVTRPNMRFVPIKSEDQQAALMLHKSRELLMRQQTMVVNALRGHMAELGMVAPLGRGKVEDIISVIEDGEDESIPALAKAALKPLVAQLRGNEDATAALDGEIKAWHKGNAASQRLATIPSIGILTASAIAATVPDPSYFRSGREFSAWLGLVPRQNSTGGKDRLGRISKQGNRYIRRLLVLGSTSMLRYARANTAPGSDWVNGLLERRPARLVTVAMANKTARIAWAVMVREENYRARATAS

SEQ ID NO: 184896 - protein, 340 aa, unidentified
MGEVTTIGLDLAKHVFQVHGVDAEGATVLRKQLRRAQVLAFFSRLPPCLVGLEACATAHYWARELRALGHEVRLMPAQYVKAYVKRNKHDAADAEAICEAVVRPTMRFVPVKTADQQAAVLLHRGRERLVRQRTGLVNALRGHLAEFGVIAPQGLRNVGELIAIIRDERDARLPDLARQVLQVLAAQIEQLEAAVAAIEKQLMAWHKSNPVSQRLASVPGIGPIIATAIAATVVEPSGFRSGREFAAWLGLVPRQNSTGGKHRLGGISKRGNQYLRRLLINGASANLLRSKATNADPWVIGLRQRRPSLVVAVALANKTARIAWAVMHRHENYQRVAAAA

SEQ ID NO: 184897 - protein, 343 aa, unidentified
MNAYVGLDISLKRTSICVVDEDGGIRLEGTVASDPDAIANFVQARAPATRRVGMESGPTSVWLWRELTERGLPVICIDARHAKAALSMQINKSDRNDAAGIARIMQTGWYREVQAKSPDSHATRALLNSRALLVKIQRDLENQVRGLLKMSGLIVGRAKDGVFAQRTQALLASHPVLAEVALPLLVARESVHKQLMTIECRVRRLARANLQARAFMTVPGIGPVTALAFLAAIDDPTRFRRSRAVGAYLGLTPRRYASGEVDWSGRISKCGDTMVRTYLFEAAGVLLTRVQKWCALKAWGLRLAKRAGMKKARTALARKLAVVLHRMWRDGTQFRWTAQPAAS

SEQ ID NO: 184898 - protein, 419 aa, unidentified
MEQWEKITHYAGLDWASDHHDLVAVDRQGQIVSQFRIAHTAEGWKDLAARLRELGTVAVAVETNQGFAIEQLLTAGLTVYPINPKSAQRYRERKAPSGTKNDQLDAWSLADALRLDGHAWKSLTSEDPLIAELRLLTRDEVALIEQRTALVNQLIAALRDYYPAALEAFDEWTLPGAWVFIERFPTPQLLAKAGKRAWEKFLHTHRLYRPQTYERRLEIFARADQFTGSAAVTSARSLLATTLAAMLQTLEAQLKLYRKRIEELFGQHPDHDLFGSLPGAAAKLAPRLLAELGSDRSRFESAESLQCYAGTAPVTIQSGQMIKRMIRHACQHGLRTTVHLWANTSRYACAWAQAYYQAHRDKGKSHACALRCLGQRWLKILWKMWQTKTSYDADLHARNQQKHGSWVLKLEPTNALKTV

SEQ ID NO: 184899 - protein, 339 aa, unidentified
MKEVTTIGLDLAKKVFQVHAVDRAGAVVVRRALRRSQVLAWFAKLPPCLVGMEACATAHYWGRELRKLGHEVRLIPPAYAKAYVRRNKNDAADAAAICEAVGRPAMRFVTIKTEPQQAMAGIHRVRDLLIKQRTMLRNQLRGMMAEFGVVAAQGRRGLNELLAILSDPEDRCIPSPLHEGLMMIMETWRGIERKLEEIDRQMVAAGRADATCRHLVTAPGYGPILSSAMAALVIDPGAFKRGCDFAASLGLVPRQDGTGGKVRLGPISKRGNGYLRRLLVNGATSLIKCQRVRQDPWVAKLLASKPRKVVAVALANKLARIGWALMTRQEDFRSRLAAA

SEQ ID NO: 184900 - protein, 427 aa, unidentified
MTSKLQKIHAQGAGIDVGSRQFFVGIENQEVKSFDTFTSGCHQVVEYLQQHSVTSVAMEATGVYWVTLHDMLRDVGIEVAVVNGRHVKHVPGRKTDVKDCMWISELHSYGLLKKSFIPEAQVKEMRHYMRLRENHIEQKVKAVQRMDKALVMMNIRLSSVVSDVQGGSSLRIIQAILKGERNSEVLLNLCDSRILKHKKEQMQQCLKGFYKPEQLFALKQSWEQYGFIEKQIAGCDVCIEKLLESLTINKPEPVLNEKPKRIYHNKPNVKNLHKMVQQLYDGKDLTVLPGITSYSLLKFFSVTGSDLKNWKTENHFTAWLGLAPNQYQSGKIKKYKRVKTNTEAGQILKECVQPLLRSKHLALGVFGKRISSRRGPSIAIKAMARKLACWIYRMINNGLDFVENGIKQYEERQKKDTLKGWRKKLKN

SEQ ID NO: 184901 - protein, 366 aa, unidentified
MKKISTVAKRGNEIFNEPKLTIGLDLGDRSSHYCILDEAGNVLLEHRLPTTPKGIHQVFSRIPRSRIALETGTHSPWVSRQLSELGHEVIVAHARNVRLIGESSRKDDQLDARTLARLARIDPGLLSPVRHRSAKAQIHLTVIRARAALVSTRTALVNAARGLTKSYGERLRKCGTGQMNREIAKGLSQELRDALEPLLQEIESLNERIAEYDRRIEQIAKEAHPEVALLQQVKGVGTLIALTYVLTLDDPHRFRRSRDAGCFLGLRPGRRNSGMSEPQMHISKEGDRYLRTLIVQGAHYILGPFGEDSDLRRWGLKLAERGGKNAKKRAVVAVARKLAVLLHKLWVSGEVYEPLRNNHKVVSAVA

SEQ ID NO: 184902 - protein, 411 aa, unidentified
MQVVHQVCCGLDVHKRTVVACLLIAAQGENTKQWRTFGTTTGDLRQLADWLEEHGCRQTAIESTGVYWKPVFNVLESRGIGVLLANAQHIRNVPGRKTDVKDAEWIAQLLQYGLLSASFVPPKEIRELRELTRYRKTLIQQRANQCNRIQKLLETCNIKLASVATDILGVSGREMLQALTEGDVAPEQLAQLARGRLRKKIPQLVSALEGVLSDTQRWLLGEELAEITRLEQAIGRLDVKVEELCRPFGPLLVKLREIPGISQRVAEVIVAEIGIDMSRFPTAAHLASWAGICPGNRQSAGKRQSGKSRPGNRWLRSVLTEAGWAAARTRDTALSALYQRIARRRGAKRACRAVGHHILARVHLLLSQPNLQYRDPGPDYYQQRHTEQLKQHLLRKLRELGVDVTLKEQVA

SEQ ID NO: 184903 - protein, 363 aa, unidentified
MFTERTSVGLDVHARSVAAAAIDSVTGEVFQTKLTPSFEHIRAWIADLPGSTAATYEAGPTGFGLYRSLTTAGIRCEVAAPSKLQKAAGDRVKTDARDALHPARLLRLDEITAVAIPTVEQEAARDLVRAREDCRGDLMRARHRLSKLLLRHGIVYYGGQAWSGAHDRWLRTEAAPQLTWPATRMAFDADYDPVLTMQARRRRLDAAIEEMAAASEFTPVVRRMCCLRGVSTLTGFGLAVEIGDWTRFTGNTIGSFVGLVPSEYSSGSSRVQGSITKTGNTHARRLLVEAAWHHRARYHVGAVMRSRWDRAPAAARARGDEGNRRLHERWVGFLERRKRPVVANAAIARELAGWCWSLAVMDC

SEQ ID NO: 184904 - protein, 445 aa, unidentified
MAMRKREDEVYPNAAGIDVGGSSHWVAVPRHLAEAAGEAAVREVGTMTDDLAELARWLVRLGVDTVALESTGVYWIPVFEVLEQHGLKVWLVDARQLKYVPGRKSDVQDCQWLHKLMSLGLLRAAWRPAAEVCVVRAVARQREVLVAEQTSWVQRMQKALVQMNIQLTEVLSDVMGQSGQAIIRDIVSGQRDARVLARHRHRRVKASEADIVKALTGNWREEHLFVLAQALAMYDDIARHLAQCDAKLEQLLGQRHAHNVDLGLAPRAGSKARQEFEVRQRLANWAGVDLTRINGLGVTVVMKLLTEIGPDVTRFATVKHFCSWLGLCPGTKISGGKVLSSGTKRSANRARQALKMAAMTLSHSDSALGAFYRRLCSRMDKPRANTATAHKLARMVYFMLTRGQAFVDQGQQHYEEQQRQRSIAALKRRAAALGFQINPLMAAAA

SEQ ID NO: 184905 - protein, 355 aa, unidentified
MTNRNTVAIHQVVGLDLGDRYSQIVTLEHDSGEIVECSRVRTTQSALRDRFAGVAPLRIALEVGTHSPWISRLLNGLGHEVIVANPRKLRLIYENRNKDDSVDAEYLARLARVDPKLLVPVQHAGAQAQADLAVIRAREMLVRTRTRWILHCQGVAKSHGIRIPGGSSSTFARRLVEVLPDTLEPALHPLLEILTQLQRQIRAYDRQLERLAAERYPETQILRQVRGVGSITALVFVLILQDPHRFRRSRDVGAYLGLVPARRESGQSRPQLRIRKEGNTMLRQLLVQCAHYMLGPFGEDCDLRRFGERLKTRGGAGAHHRACVAMARKLAVLLHHLWRTAEVYEPLFRERQRAA

SEQ ID NO: 184906 - protein, 360 aa, unidentified
MARAGKKPRARRVAGGVDTHQDTHHAAVELMNGSRIAGAEFPATARGYEQLLAWLRSFGRLHAVGVEGTGSYGAGLARYLAGQDVTVIEVSRPDRRQRRAKGNSDPLDAYAAADAVLAGRATALPKGGDGIAEPVRVVHLARAGAVKARTAAVNELKALLVTAPAVLREQLAGLGTAKLAAACARLRPGPDAGDPVTGTKLALRSLARRWQALDAEVKDHDARLTALITRARPDLLQIRGAGPETAAQLLITCGDNPHRLRSEAAFAALCGVCPVPASPGKTRRHRLSRGGDRQANRALYFTALSRLASCPRTRAYAARRAGEGLSGREILRCLKRYIARELFKTLTRPDTRKKAMQPAA

SEQ ID NO: 184907 - protein, 351 aa, unidentified
MLYLGIDQHKRQLTVNLRGEDGTVILKRQVSTRWEKVRAFFAELAEKAGADGGFLAILEICGMNDWLVKMLQEYGCREIVVIQPTERAKQKTDRRDAGELAHLLWVHRQQFLEGKQPLGLRRIQWPTPQEAEDRQVTMLRVVLTRKRTTVLNGIHKLLRKHNLEQSQPTKGFQTKKVRKWLEAVELPPLDRLEMNLLLPQWDLLEEQLKVVDEKIAARAVANEQVLLLETVPGISHYSALAIQSRIGNVERFKHADSLANYFGLTPGCRNSGEATKRGSKIVRYLLNQAVIKVLRHDGIMRAWFQRIKKRRGAKIARVAVMRRLATILWHMLKKKQRYRFASPDKACTQAA

SEQ ID NO: 184908 - protein, 344 aa, unidentified
MEYFAGLDVSLRSCAICVVDAKGKVMLERELPCEVGDIVDCLNSFVYPIERIGFEAGTLSQHLFYGLTSEGFDVVCMEARQVNAALSAMRNKTDKNDARGIAQVLRTGWFSPVHMKSREAHGVRALLSTRKALLNKTIDLANEVRGLLKIFGLRLPKTVQHGSFDGLVRPMIEMDEVLAHAIIPLLDARLVLYQHFLEQDRRVKGAAARDDVCLRMMTVPGVGPIAALTFKAAVDDPSRFKRSRTVAAHFGLTPRRYQSGEHDNPGRISKAGDRDVRATLYAAANALLMRTMAGSQIKSWGMRLMRTKGRRRAVVAVARKLAVLLHRMWADGTEFRPAEVEGTA

SEQ ID NO: 184909 - protein, 400 aa, unidentified
MLSIGIDVSKGKSTVCGMKPGGEIVYAPFEVQHTRKGMSELVSLLRSSGEEVRAVLESTGSYHCPVVAALLENGIFVSVVNSLRMKRFCSQSIRKVKTDRIDAMQIALYGLAYWQELQPARLPEDTYRELQLLARQYYQMTSMLIKAKVDFNALCDQVLPGMQELMSDHAGRHKLSDFVLRYRHTTHILEMGETRFRKDYCKWAEKKGYRNCERMAALIFATAQNGIPVLPNAPSTQIVITEAIRVLHTVEASRDAILTQMQALAKTLPEYSLVREMPCIGDTLAPRLIAEIGDVRRFHSKRALIAYAGIDAPPYQSGKFCANNRHISKRGNRYLRKTGYEVMQSYVMHKPANDPIFTFIEKKRGEGKSGKLAMVAGLNKFLRVYYGKVTELYRSLPAIE

SEQ ID NO: 184910 - protein, 337 aa, unidentified
MKYCGIDLHSNNSVVIVSDDEDRIVLQKRLANDLGQIRVVLEPHREELVGVVVESTYNWYWLVDGLMDAGYRVHLAHPSAIKKYEGLKHSGDVADAAYLAQLLRLGLLAEGYIYPREQRGVRDLARKRMQLVRYRTAQILSIEAILIRQTGARLKGEAVKRLTAEQVDELGFAPDVGLALEANRVVSQALGLQIEALERRLKERVSLRAEYRLLKSVPGIGEILATTIMLETGCIDRFAQVGNFSSYCRCVDSWRESNGRKKGEGNVRNGNKYLAWAFIEAANFALRCCVQAKRFYERKKSKTNRVLALKALAHKLARACYYILRNQEPFDVSRCFG

SEQ ID NO: 184911 - protein, 347 aa, unidentified
MTEAYDGRQVVGIDLHRQRSVIVRMTEDGRKLETVRITNSPAALRAVIAKAGKNPRVVIEATYGWYWAVDVLEAAGAEVHLAHPLGVKAYSYRRVKNDERDAADLADLLRMGRLPEAWIAPQEIRELRELTRYRHKLVKARTSVKDQVHAVLAKLGIPVTHTDIFGVHGQAWLDELKLPQPYAGKVASLRQLAGGLTAEIGLLEQVLGDLLAGHEGYAAIQQLPGIGPVLAAVIVAEIGDIRRFPGPGQLASWAGLTPRHYESDTKVIRGHITKQGSRMLRWAVVEAIQRQPAGTRPRQVRDGIIARRGKEARNIAKVAAARELLTLVFYGMRDGHVRRALQRGQAA

SEQ ID NO: 184912 - protein, 427 aa, unidentified
MPYRIAGIDVHKAMLAVVVADVEVEGDWQFARRQFGATPSQLRLLTEWLVEYEVEEVVMESTAQYWRPVWDALERDWQPTQRRRVDAGPTTGALHLAQAQSNHGRPGRKRDVPDAERLVKRLVAHELTLSFVPDVTQRLWRTVTRRKYQLTRNRVQLQNRLESLLEEAHIKVSTLVSDLLGASARRMLRAVATGETDPAAVAALGSPRLRATSEQLCDALGAAADVPPLYRRLLAMTLAELDLLESHMQQLDEELAALLRVHQAAVQRLAAVPGFGVDSAQQIIAEVGPTATTFPTAKHLASWVGACPGHDESAGVNRSHRVPSGNRQMRRLLNQAAHAAAKTKGSIFELLYRRFVGRLGHAQAIGAIAHRLCRLVWKILHDGVAYEERGPVVSQARAQRRAAKMLRELRSLGYRVELIPAPSGNAL

SEQ ID NO: 184913 - protein, 463 aa, unidentified
MNEDGKREEAGSGKREGEGIAALGRKVAGIDVGSKTHWVCAPAREGAGREIKVFGATTRELEGMAAWLLERGVESVALESTGVYWIPVHEVLEGRGLDVVLVDTRALARVPGRTKTDRRDCEWIQRLHSCGLLHGAFRPAEQVCMLRTLVRDKGVLVAEQADWVRRVQKSLEQMNVRVHRAVADLTGATGMALIRAIVNGERDARQLAKLRDPRCHKSREEIAEELTGHWREDHLFSLGQALKMYDAIQERIEAYEGAILRKLREMERDDCRGQEPPPLDRNKAKAIRKRGEEPLRQALYRASGEDLTSIDALGVETVQTVISEYGPDLSIFPTEKQFVQHTLLAPHRPTSGGKPVKKKKRRGSASNRVAAALRMAALSLRHSQTALGAYYRQMARHKGGDIAVFATARKLATLIYRTLRWGKNYVDEGAEAYEKRYREARIQRLRSIASELGYQLAPLAAQA

SEQ ID NO: 184914 - protein, 333 aa, unidentified
MELYSGIDLHSSNSFLAIVDESGKRVFKEKTPNDMATILRVYEPYRDQLAGIVVESTYNWYWLVDGLMAEGYAVHLANPSAIQKYSGLKHADDKHDAFWLAEMLRLNILPTGYIYPKDERPIRDLLRKRGHLVSLRSSLLISLQNIITRNCGMKMKTNDIKRLRENRVHPLLADNEDLALAGQVSKDSIDFLTRQIRTIETFLEKKLELKDAYKGLVTLPGIGKILGLTIMLETGPVTRFEKVGNYASYCRVVSSQWTSNGKSKGKGNKKNGNEWQQVSFLGFLRGSGICQTLRRQGQGLLQPQVEKDQLHDCARGIGTQTGKGIVLRHAGPG

SEQ ID NO: 184915 - protein, 292 aa, unidentified
MKKISTVTTNRNEIFKAPKLTIGLDLGDRFSHYCILDEAGNVILEHNLPTTPKGIHQVFSKIPRSRIALETGTHSPWVSRQLSQMGHEVIVAHARNVRLIGENSRKDDQLDARMLARLARIDPGLLGPVRHRSAKAQIHLTVIRARAALVSTRTALVNAARGLTKSYGERLKKCGTEQMNREIAKGLSQELRDALDPLLGEIESLNERIAKEVHPEVALLKQVKGMGTLIALTYILTLDDPHRFRRSRDAGCFLGLRPGRRNSGNSEPQLHISKEGDRYLRTLMVQGAHYIL

SEQ ID NO: 184916 - protein, 318 aa, unidentified
MAKSTTLTAGIDTAKDKLDAAIAGVAVTVSVPNDKTGWQKLARIFAKHKVGRIGIEATGGYERGVVRALQTAGFCVVVLQPLQVKRFGQMRLQRAKNDTIDAALIAACTAVLDADAHAPPDLRFDALADHLTFIEQIEEDKARCKTRLEHIADKRLRAFVLADIARLEKRRAAELARLATELRAHADLAHKLDLVLSIPGIGERTALAVIVRMPELGQVTREEAAALAGLAPFVHQSGTYAGQTHIGGGRARLRRSLYAAALPAATQWNPACMALYRRMVGRGKKPISALVACARKLLIFANTVVQRGTPWEAKPAQS

SEQ ID NO: 184917 - protein, 408 aa, unidentified
MQVLHPRCGGLDVHKDSILACARIATETGVAQHVETFGTTTSSLLKLSDWFAGYGVTHVAMEATGVYWRPVWHVLEGVFDLVLANAMHIKNVPGRKTDVNDAMWIADLLAHGLIRGSFVPPTSVQELRTLTRTRKQLVRERASHVQRIDKTLQDANLKLGSVLTDIMGQSGRAILAALVAGETDPEKLVTLVSNRVKAPRREILEALRGRVTPHHRFLLKLHLDQIATLEEAIAQVDAEVGNSLAPFRAAAERLTTIPGVSAVAAAVIVSEIGIDMTRFPTVGHLISWAGLCPQNDESAGKRRSTRLRKGAPWLKTTLVQTAWCATRAQNGYLRAQFLRLKARRGPRKAIIAVAASILTAAYFMLSRGTDYHDLGPTSLERGDRQKVARRLVRKLAELGFQVDLRDAA

SEQ ID NO: 184918 - protein, 454 aa, unidentified
MNKVESKSEKSPYEKSLTMVNPHAAGLDLHKETIWGCAGSGASSDSPVQTFGTYTAELRRLVKWLQDSGVETVAMESTGVYWIPVYGMLEDAGLKPILVNAREVKGVKGRPKTDRLDCMWICRLHSYGLLRGSFVPPANVTALRNLCDCREKIISESARSIQRMQKSLQRMNCRLDNAVSNIAGDSGLRIIEAILGGERNAAKLAELSDRRVEKKKSEIAGDLEGNFKTELIAVLGEWYEHYQFYNQRLAKINEKIYALLEKFPRKANSKDLPPKPANYREDKMHFSRPIRPILFEIFGTDLTQLAGVGPSVALSFLATVGPDVSAWPTENHFASWLGLSPNPQISADYRKKGKTKLVKNLLACDLKTAGMTGQRTDSFLGAFHRRLKVRVGPAKAKNATARKMAIILYRLVKYGRQAIKFSAEQYDQIYQERKLANLKRQAVKMGFNLVAAND

SEQ ID NO: 184919 - protein, 388 aa, unidentified
MQVIGDRPEAANAIRTNLGAIFVSLELSQSTWLITSLSPGSGEKMSKQVVHGGDIAGLLARFARLQEKARARTGRNFPIIVIHEAGLDGFWIDRVLKNEGIESHVVDPASVATSRRRRRAKTDKIDGEALVRTLLAYKRGEPRVCAMVKAPTPEEEDRRRLCRERKVLITERVRHVNRLKGLLFSQGVCGYEPLRRNRRRRLDELRTGDGRPLPKHLKAQISRELDRLELLLEQIKVVETERDALLAAQQIAAPTSAAMLLAIKGIGPDFATILWSEGLFRHFDNRRQIASYAGLAPTPWKSGSIDREQGVSKAGNPRLRTTLIQLAWLWLRHQPQSALALWFEERVVRNGGRLKKVTIVALARKLLVALWKYVTAGVVIEGAVMKVA

SEQ ID NO: 184920 - protein, 311 aa, unidentified
MTDDTIGIDISKATLDIHRLSDGKTMSFSNCPVGFKALSRFCAKTAVARVVYEATGAYHSGLERALGAHLPLVKVNPLQARRFAQAQGLRAKTDAVDAKMLADMGNAFALEPDEPAAEIQHDLKELRSFRSGLIKDRTGIMSRMKTQTLSITRRQSKARLAQVDKQIAEINAEIERLINSSDKLAHSMKILRSIPGVGAICAATILIEMPEIGSMDRKQVASLTGLAPMTRQSGQWRGKSFIQGGRKIVRDALYMPALVAMRHNPDFKAKYQALIKAGKPPKVAITALMRKLIELANALIKADRNWVTKGA

SEQ ID NO: 184921 - protein, 345 aa, unidentified
MTKVSMIGLDLAKNVFQVHGIDASGKVVVRRQLRRSQVEKFFAGLPPVVVGMEACGGAHHWGRVIEKLGHEVRMMSPAYVKPYRKRNKTDGRDAEAICEAMGRPTMRFVPVKSLERQAVLVLHRTRRLLVRQRNMSGNALRSGLAEFGIVAAQGLKGLRTLMQLLDDPTTPIPDIARMALQVLARQWEGQNAQACRLESEIVRATRSDAVARRLMQIPGVGPIGASAILAAVPDASLFKSARDFVAWLGLTPRQFGTGGTQRSGGISKQGDRTLRTLLTLGATAYLRHERARGPRDPWLRELLARRPFKVVAVALAAKIARIIWAMLVSGESYRARNPSAAAQAA

SEQ ID NO: 184922 - protein, 322 aa, unidentified
MSQPGSLCVDIDVSKAILDIAASSAIEQFSVGNDIDGFDAIIAELRMYAIALVLMKATGGLETAIVCALQAEGFELAVVNPRQARDFARAMGYLAKTDSIDARVLSQMAEVLNRHPERERFIRALPDTECQVLTAMVVRRRQLITMLVAERNRLHPAHPLNRKSINIIIKALEDELARLDTDMNSHIHSHFKELAKRLSSIKGVGTMTAAALLAEVPEQGNLSRREISALVGMVPVNRDSGTMRGRRTIFGGRAGVRTALYMAALVATRFNQVIKVFYMRLLAAGKPKKVALVTCIRKLLTILNAMLRKNEEWNESYHHVAP

SEQ ID NO: 184923 - protein, 348 aa, unidentified
MDKITAVGLDLAKQIIQVHGIDAAGRVVLRKAVRRERLLALLAQLPRCVVGMEACSGTHHWARELRQLGHEPRIMAAEFVRPFRKSLAAKNDANDAEAVCTAVVQPNMRFVSIKSVEQQALLSLHRIRQGLIEERTATINRLRGVLAEFGVVFAQSAARLQRALPAVLADEERLPALVQRSVQMLREHLHDLDSRVAEFDRGIAQHAKSSAPAQHLVALSGVGPLTASAVVATVGNAQDYRNGRQFAAWLGLVPRQYSSGGKRKLGRITRRGDAYLRALLIQGARSTLQAALRRAPARHDRLSAWIVQLAQRVGYHKTLVAIANKHARIIWALLARDQALDLARTTMR

SEQ ID NO: 184924 - protein, 412 aa, unidentified
MKTVHTKRTGQAGRPSVGADRCVARVVPSLLPKSSNSCQGYPSPHLSQGRASLEQIKSIKEDCLLEAPLIFVGIDVSKAQLDVAIRPSAQSLSVTNDRAGIKSLIKHLKKLRPQLVVLEATGGLQRQVLSALIAGEIPVVMANPRHIRDFAKSIGQLAKTDRIDASVIAHYAEAVRPKPRPLPDEASLELRALSARRRQVLDMIVAEKNRLATASKVVKKRITAHIAYLEQELNDADQDLDRFIEKNAAWKENQQILCSTPSIGPVSSRTLLVELPELGALDRKKISALVGVAPFPRDSGTLKGRRTIWGGRASVRSALFMATVVATRFNPVIRDFYKRLKAKGKPSKVCLIACMHKLLTILNAMIKNKIRWSENLLTRPLDMKHSCYISGLRLRLARSCTGEFIPSADCGF

SEQ ID NO: 184925 - protein, 339 aa, unidentified
MTEEKGFIWAGIDVSKRTFFAAIDIENEAEKLPVAKLPAKEFKRSKDGVASFIKWANELLEDQEFAVVMEATGSYSLELISLLKNQRTDLRISMQNPRMVSDFIRSLNQPHKTDKTDAQAIARFGTERKPEEVSLPEPHWAELRELERLRSAMVRVRVELENRAESLFTAFARRTNQRTIGSLNMEISELEREIKHLVIEHEDIHSEVRILTSMPGVSFVSACAILAELGSLKQYDQKQISAVSGLAPRRMSSGSSLNKSFMGRNGSKRLRQILYLDSIYAVAKVPLLNSMYERLIAKGKSKMTARCACMRKLLLILRAMVVNNKPYDENYFKTFPKSA

SEQ ID NO: 184926 - protein, 343 aa, unidentified
MDISTIGLDLAKSVFQVHGIDASGAVVIRKTLRRPQVLPFFAKLPPCIVGMEACGTSHHWARELMKLGHQVRLMPPAYVKPYVKRGKTDANDAEAICEAVTRPTMRFVAAKSREQQAALALHRTRELLVKERTQLVNMIRGLLAEFGIDIPRGLERALAVARQIAEDGIVDVPDEARAALLELSRQALAAHERLRSIDRAMLASHRASDLAVRLATIPGIGPIGASALAASVADPLQFRSGREFAAWLGLTPLQHSSGGKERQGRISKMGDRYLRKLLIVGMTSLVRRAKYKPQSVDPYLVGLLTRKPARVATVAMANKAARIAWAIMARGGTYRAPVSRLAA

SEQ ID NO: 184927 - protein, 317 aa, unidentified
MTQTSITTAGIDTSKAKLDIALHGRAGCWQVPNAPSGWRLLAGQLTKAGVTRVGIEATGGYERGVVEHLRAAGFAVLVLQPIQVKAFGRVRLRRAKNDALDAVQIAACAATLDQVKVAPDPRLVQLADNLTFLEQIEEDIKRFKTRLEHIDEPRLRRMVLADIARLKARRLTQIRDIAKQLRAHRDLAARLDLVLSIPGIGERTALALLIRMPELGRISREEAAALAGLAPFDNDSGQQKGQRRIAGGRARLRRSLFAAALPAAFRWNKALIALYQRLTAAGKAHNTALVACARKLLIYANTVVQRGSPWTERPLGV

SEQ ID NO: 184928 - protein, 475 aa, unidentified
MIGLRSSISRALGAVSWAVQCCFEHADQIRLTPWQLLRAAARLLVCHGKGEGVVLQEDPQGEEIVARVAALDIGKAELVCCVRVPHEAKPGRRLQEVATYSTMTRSLLAMSDHLRCLGVSRVVMEATSDYWKPVFYLLEAQGLDPWLVNARDVKHLPGRPKTDKLDAVWLCKVAERQMIRPSFVPPPEIRRLRDVTRYRIDLVGVRTAEKQRAEKLLEDAQIKLSVVASDIFGVSGRQMMAALIGGQTNPKALAQLARGRMRAKLDALEEAFTGHFTDHHALLLTKMLARVDALDTDIAELDAAIEEMIAPFAPTVERLDEIPGVGTTAARVIIAEVGMDMSRFPTAAHLASWARFAPGVKESAGRKKGSHTTGHGNRYLARALGEAAVAAGKTGTFLGERYRRIARRRGKKRAIVAIGRSILVIIWHLLSDPQARFHDLGPDFYDNRIGPERKKRNHIHQLEALGYKVTLEPAA

SEQ ID NO: 184929 - protein, 332 aa, unidentified
MENFYFIGVDVSKKKLDFCVMFEGKVVHEEATANHQTAIMSLLRHLEEDYGITSDRMLVCAEHTGQYTFPLACACKSVECKLWLENAAEIKYSSGVQRGKNDKVDARRIAIYAGRFQDKVRYYERPTEDIERLKQLESERTLYVTDLAKYKGQMKDQKDYMPKALYERKMKRLQALMDDLEEAIQAITDEMDEVIASCHVLFRQRELLMSIDGVGRVVATNMIIATEAFTRFDDPRKFNCYAGVAPFSYSSGSSLHSKARVSHRADKVMKRLLHLAAVAVTHRIGGELKKYYERKVAEGKNKMSVINALRAKIVARMFAVIKRNEKYKPILS

SEQ ID NO: 184930 - protein, 356 aa, unidentified
MSRDIKYIGMDVHKEAIVIAVLNGSGKLVMESIVETKASSILQFIHGLRGELHVTWEEGTWASWLYDLLQPQVEQVLVCNPRRNALLKEGSKNDKVDAGKLSDLLRTGMLRPVYHGENGLRTLRELARSYQTISKDLNRVMNRLKALYRGWGSACAGTQVYALRYREEWLNKIPHAGVRRRAELLYQQLDGLQGLRRTLRPELLAESRKHKAVKLLRQIPCIGPIRAARLIALMQTPHRFRCKRQLWTYSGLGIETHDSAQYRYVGGQLQRSKKPQQIRGLNQNHNHEMKEIFKGAATRASCGRGPFHDFYAALLAKGMKPEMARLTLARKIAAITLTLWKTGGRFDAEQLKAQAA

SEQ ID NO: 184931 - protein, 394 aa, unidentified
MRFAGIDIASETHVLAIVAADGTVAVKPTAFAEDDLGYQNALTLLGTPGEVLVSMEATGHYWKNLFAVLVAAGHAVALLNPLRTHRFAGVDLERTKTDAIDALAIARFAAQKRPPTTPLPDALAEELRELVQLRQRLMQDFGDRVRQLHRLVDLGFPEFTRYVRTLDSELATAILRDYPTAAAFRGVSARRLAAVRYDGRHQVGPNLARTLIDAARRSVGQHHSATYRLQIRYACDDLDTLRGRLRTLDRDLDGKLRQHEVGRLLTSIDGIGPQTAARVIATVGNPAHFRSGSALAAYVGTIPALKQSGKRQSLRGGHTPIGNAQLRAALWMPTLSAVRCNPWLRAHYQRLIARGKLPKVALLACMRKLLLVIYSVAKHGQPFAPRLQPPQAAT

SEQ ID NO: 184932 - protein, 503 aa, unidentified
MAVRNVGIDLSITGMHRAEAIDERGERCGHLSFQTTPEGLAALANLCFRDGSTPTVVLEPTGLAWFPVALFLRARCPEAVLVRAKQQKVSALRRVLREHAKSDRLDALTLARLPWVDPEHLEPLALAGTDMHRLDRLTRRRDRLAAGVGHRKTRIASLLQGVFPGLWECFEDNFNPRARWVYRRQMNPFRLSKLSVSRMEATFRRLTPKATSAVIQRESTSVLATAKRLAEVYRPARQAGLVTDASFETWQQEISMELDLIEAEETQIAKLEEEIGPLYRQLDPQSYLRTIPGMGRRVAPLLLAAVGDATRFRNAKAFSQWTGVLPRSHQSSRTQFLGMRMAKAGPGRVKRALYQAAEYARRWDPQLAAIYYRQMVDYGKTHKQAMGAVMSHLAVRVCTVLREQRPYELRDLQGQPLTRLEAGRLINERFRVPEEMRRLRRHHHRPVKKNIREEALRAVMGRWDYATTHEAAKAPQRGKPVPIRPKSEDNTMCQLPQPVGHTP

SEQ ID NO: 184933 - protein, 408 aa, unidentified
MEVIHQRCCGLDVHKKSITACAILPKGKEIETFGTMTHDLIQLVDWIKSKGCTHVAMESTGVYWKPIYNLLELEDIQPLVVNAAHIKAVPGRKTDVKDAEWIAKLLRHGLLQHSYIPNRDQRELRELVRYRRSLIEEKSREISRIQKVLEGANIKLSSVATDIMGVSGRSMIDALINGMDDPQALASLAKRSMKKKKEDLERALFGSVGPHQKMMLKTQLTHIDFLDQQIAILNEEVQQRMQPYEEDIELLDSIPGIGRNHAEQLLAEIGLGKDISKQFPTAPHLCSWAGMVPGNNESAGKKKSGKTRKGNKKLRSALVEAAHSAAKTKNTYLSSQYHRLAPRIGKKRAAVAVGHTILTIVYHLLNKRQPYIELGADYFDQRKKEIVIKQSIKRLEILGCKVTVEATA

SEQ ID NO: 184934 - protein, 418 aa, unidentified
MEIVYERVAAIDVGKKIIAVAVRTPGERAGTRHQQVRKFNTYYQTLVEMVAWLAAEGVTHVSMEATGVYWRPVFHALCEAEHPLEILLVNARHVKNVPGRKSDALDAVWLAKLTECGLLRGSFIPPAEIAAIRELTRYRKKLIEARTSELQRLGKVLEDSGIKIDSVASKLTTMSARDMIEALINGERDPGVLAELARGRMRSKIPELTMACAGRFGAQHALMCTLHLEHIDHLVDMIARLDTRIDEATLPFVAQTTLLATIPGIAERAAQVVISEIGVDMTRFPTAGHLASWAGLCPGNNESAGKHRSGRTRKGSKELCAVLCECAWSAGRTNTYVGAQFRRFHRRFGKKGGKKAATATAHTLIVIIWHVLAENTAYRDLGSDYFTRRIDSPEVRKRRLVRELEALGHKVTIEPAAA

SEQ ID NO: 184935 - protein, 410 aa, unidentified
MHLYCGIDWATEHHDVAVVDDGGRVVARCRVSNDAAGFAQLLTVLAEAGDSADDPIPVGIETDRGLWVAALRETGRVIYPINPLAASRYRSRYAVSGAKSDATDAVLLANIVRTDAAAHRPLPADTELAGAIRVLARAQQDAVWARQQIGNQIRDLLKDFYPAAIVAFDELPSGGLARPDARTILAAAPTPAQAAKLTPARLRRLLVKAGRRRELDRDIDRLRAVFADTYLHQPPMVENAMGIQLTALLRQFDAACAAADELAEAASAHFEQHPDAAIITSFPGLGNLTGARVLAEIGDDRARFADARGLKAFAGSAPITRASGKKTVVLHRHIKNRRLAAVGSMWALTSLRASPGARRHFDARRTAGDWNRQAQRHLFNKFLGQLHHCLQTGQLYNEHRAFPPPLPLAA

SEQ ID NO: 184936 - protein, 384 aa, unidentified
MRAVCGLDVHKDSVFLCILNEDGELIERVFGVLTFQLQQMRDLLLTHHVDEVSMESTSIYWIPIWRILAPHFHLRLVNPYFIKQLPGHKSDVADAQWIAECTMKNLVSSSFVPPEDIQQLRQYDRRIFDLDEEIVRKLSKLDAVMQRCNIRLSNYVSNVDCKSYKDVVRKISEGVTDPEVLIEEIHGRIIKHHGRETILASLTGVISQAETDVLRQLREELDMAEKHKQECLEKMLEICQEKYPDELRRLQTIPGVKERTATSLIAEIGTDMSKFETANHLAAWSGLRPRNDESNKKFKSRRITHGNVYLRKNVIQCAWAASRTKDCFFSRFSYHQTQVRKKNRMKVIVAVARKLLVATWHVINDKTDYVDFQKQDRQASVTNG

SEQ ID NO: 184937 - protein, 309 aa, unidentified
MDEIIIDKGCGLDVHKETVVGCVMGSGIKKEIRTFSTKTNDLLRLKTWLSGLGITHIAMESTGPYWKPVFNVLEDGFTVILANARHIKNVPGRKTDVKDSEWICRLLRSGLLSASFVPPQGIRELRDLTRYRRKLTQAVSSEKNRIQKVLEDANVKISSVLSDTFGVSGLQMIEAIMEGKLSEEQISELAKGRLKSKKAEIREALVGYFQDHHRFMIRASLEHIKHLEKLVEELDREIKEKLGEKYQKEYSLLQTIPGVKEQGAATIIAEIGADMDIFPSEGHLSTWAGMSPGHNESAGKKKWKDDPWQ

SEQ ID NO: 184938 - protein, 364 aa, unidentified
MNKCRLNTELSSHEGTRCQFNGSTGVIKLGIDVHQDFYVVVMQQGGSNPKPPQRFAKEAFLYWAAKLRHQTEQVHAVYEACGFGFGLQRQLAELGIKCYVVCPQKLDERNRRVKTDGLDAKALCLKLDRFVQGNRDALALVRVPSEEEEQLRAIHRQREQLVKARKRLEAQGRSLLVNHGIEPVKNWWKPRTFAALQVPQWMKALLGNSQPILLALQEKICVLTVQLQAGARANQPRGLGAMTSVVIDREIGNWHRFNNRRQVGSYTGLCPGEYSSGNTRVQSCVTKHGNPRLRAALVELAWRLVRFQPNYKPVLKWRETLRKGALATGAARKKAIVAVARQLAVDLWRIRTGRLSAESLGLSS

SEQ ID NO: 184939 - protein, 402 aa, unidentified
MRGLPHTKGDRFMENIIYIGLDVHKEKIQACAFLAAYDFGEDRVLANIELGGNYREIIKFASTLKKKFGKETRFVCGYEAGCLGYSLCRNLQGCDIECHIMAPTTMSKEPGVRIKTDRRDAEMIARCLAYNTYKGVHLLDEEDESVRDYIRMRDDFKQMLKGVKQKILALLLRLGIRCDTCKMPWTQKHLQWLKSVDMGKGLNRETLDEYLKELDHLKDRIDNFDTRIHELCDTERYKENVKKLICFPGIKEHTALSFISEIGDFTRFTKAKSFAAFLGLVPGEQSSGSKVHRTALTKSGNNHLRRLTTEVAQAAIRSNPSYKSKALKARQEGAPEEVIAYADKARDRIIRKYKKMIRGEDILGGHKAHNVVVAAVAREMSCFICGMMNGWYNGADSDKLQI

SEQ ID NO: 184940 - protein, 309 aa, unidentified
MTANQKFSRFIGIDVSKAKLDIYDDATGEFLTVENTAKAIEKYVSALSPDPELLIVVDLTGGYEALCVNTFYNRGFTVHRAEGRRVKAFMRSYGEHAKTDRIDAYALALFGRKLHETLRMYTPLPLNLKPVTERISDLKTMLLQEKNRSTAPSLPPDMKKEIVRHIAYLEKEIERLYQKCLDIIKNDPPLAEAFYKIIAIKGIAEKSAVLLLTTLPELGCTNRRQIAAIAGVAPYAKDSGTLSGYRRIRHGRTTAKSALFIVTLVAIRHNAQIKEFYERLLKKGKSKMTAIIACARKLLIIVNATLKTC

SEQ ID NO: 184941 - protein, 370 aa, unidentified
MLDTTTFIGLDVHARSIKAVSLDVMTGEVRAATFGYDAGAVAEWVRSVDPRARCVYESGVTGFDLQKRLSGLGVGCVVGAVSKMIKPSADRRRKNDRNDAEFLARMLSVGNVVEVWVPDDECEAARDLTRALEDARDDLSRSKQRLSKFLLRHGLVFDERTPTGRRKGNWTRAHWSWIESIRFAERADNDVLAYYVDAVRRAAEEKARLEGLVEAEARKPRWRKRVDSLRCLKGVDTASAADLVFEAGEFSRFRNARSFAAWVGLTPSEHSSGESDRRGAITKAGNKHLRKTLVEAAWHYLTCSGRPKDLAKGQAPDRGARRHAAKGVRRLVERREALLARGVHGNKANVATARELACWVWAVGLMAEEA

SEQ ID NO: 184942 - protein, 360 aa, unidentified
MEVGQTGADRGVVGGVDTHKDLHVAAVVDELDRVLGSRCFATTRHGYKQMLTWMRSFGQLRRVGVEATGTYGAGLLRYMQNAGVEVLEVTTPDTHDRRKRGKNDDLDAQNAAHAAFAGRRTITPKSRDGMVESLRVLKACRKTAVAARRVALQMIHNTIVCAPDDLRETLRKMTRMQLIRTLAAWRPDLTDYRSVGSAYRITLKSLGRRYLELHDEIVDLDTMIVAIVDELAPALVARNSIGHGSAAQLLLTAGDNAERLQSEASFAALCGVSPVPASSGKTIRHRLNRGGDRAANSALHIIAIGRLRTDLRTKAYIAKRVAEGHSKLEAIRCLKRYIAREVFSLINQRKREINQGRNAA

SEQ ID NO: 184943 - protein, 356 aa, unidentified
MTGQRKELNFSGQNIYVGLDVHKKSWSVTVLSDVSFLKKFVQDPSPDALYAYLSRNYPGATYYSVYEAGFCGFWIHYRLTELGVHNIIVNPSDVPTTVKDKIRKTDAVDSSKLAHSLRSGDLKGIYVPDNISLEIRSLIRLKDSLTKDLTRLKNRIRAYLFYFGIEDAPMPSKHWSRNFINWLKELKMDTTSGRDALDLMINQLETIRDQQKDLLLRLKKLYESERFAGPLKYVMSIPGIGRMTGMTLIAEIDDIKRFKNSDHLASFIGLIPMCHSSGEHEGTGDITIRKHGRMRGAIVEAAWASAREDPAMQLAYASFCKRMVPSKAIIKIARKLVNRIYYVMKHQQEYVKGIVA

SEQ ID NO: 184944 - protein, 404 aa, unidentified
MNAVGIDVSKGKSTVAVLRPYGEVVVSPFDVAHTGSDLRALADLIKKLPSETKVVMEATGNYFESIARYLHEQNIFVSVVNPVLISDFGGNTLRKPKTDKKDSVKIASYALTYWLDLKEYTPQEDLRKSLKLMNRQYQQSIKLKTMMNNNLISLLDLTFPGINKLFTSPSRESDGHEKWVDFVLEFSHCDMISKLTIKAFAKKYKKWSDKNSYHFTESSCEKIYAFAKDCVSSVSSDKAIVFSVVQAAKMLISATENCHAIQSEMNRVASKLPEYDTVMNMYGVGKAVGPQLMAEIGDPRRFHSRKAITAYFGYDSENNDSGQKTTRSNPMTKKGSGALRRTLFIIMQVLLQTKPQDNPVYDFLIKKKSEGKHYYSYINAAANKFLRIYYARVKEVLNVSEQMT

SEQ ID NO: 184945 - protein, 335 aa, unidentified
MNQARVHIGVDVGKECLDICYPDGSKEHIGNTKRSRAKLIRKAKAMSAIVSFEATGPYEENLADECLAAGVPAVRLDAWKTRKYAESQGMLEKTDAIDCEMIRDFAASLKPEQLRFVRPMSDGYRRLKRATSVRRNLIKAKTLVVNQLENILDKDVGASVSRVIDALERQIEKMDELCTEAIRSDEKMNALAVRFEQVVGVGPVLISTMLSSCPDIGSFTSKDIAKMAGVAPIENTSCTIKKKSKPRRGRRELRSALYMAAVSACHSNHLLEPVYKRFTDRGMPRRVALIALARHIAILMNYIAKYPDFNPAVDPKKAALLALPKRKPGRPRKNP

SEQ ID NO: 184946 - protein, 360 aa, unidentified
MTKSTTIIGFDLHAATTVAAVLLPGQRTPALHALSSDIPTVVRFVERVRRQGRVVCCYEAGPCGFELQRALANREMQCDVIAPALIPRRPGDRIKTDRRDASQLAILYRAGALTIIGIPTEQEEAARDLLRCREDIRADLLRARHRLSKFLLRHGRRFTETKKAWTKRHRAWLQAQHWPLAALEQTHRAYIRAVDEAVARLQSVDTELRDLLTIEPLRARVERLRCFRGIDDLTALTIAAELGDPRRFPTAPRLMAFTGLVPSEHSSGAKQARGTITKTGNAHLRRVLVEAAWHYRHHPFVGRALRLRQRGAPAPVIQQAWQHRLNRRYRCLAARGKPRPHIVTAVARELTGFVWAALTQ

SEQ ID NO: 184947 - protein, 416 aa, unidentified
METTETVYTIAGIDVHKKMLAVVVRSQRGEQAGYEKHKFGTTRAEILHLEAWLQAHGVSEVVMESTAQYWRPVWYGLEKLCKLHLTHPLKTRAPRGRKSDFRDAQRLADRWSSGDLEDSFIPGAEQRSWRWLTRTRVQLRKKLGIIHSHVEGLLEQGGIKLSSVVSDLFGVSGWTMLEHIAQGVTDEDVLVKLARGVLRKKHSELKQALAGRLEPIYQLLLRQHMEQVRLLRKQIEELNKALAEAMKEHIAALHRLSKIPGVDLYSGQELLAEIGPKAAAFPSAEQFASWVGVCPGSQESAGVNYSRRSAKGNRYLRRLLCQIAWAAIHTKKTFFAGLFARLKPRVEGKGAAWAVAHRVAKVIWLVLHEEVEYKEKGPRPPNERTLVRKLRRMVKEFGQLGLDVRALLEQQLANPA

SEQ ID NO: 184948 - protein, 364 aa, unidentified
MNKCHLNTELSSLEGTRSEFNRSTGVIKLGIDVHQDYYVVVKQEGGTNPKPAQRFSKEAFLHWAAKLRRQGGEIHAVYETCGFGFSLQRQLSALGIQCRVVCPQKLDEQNKRVKTDGLDAKALCLKLDRFVQGNRAALALVRVPTEEEEQKRAIHRQREQLVKTRKVLEAQGRSLMVNYGMEPVSSWWKARTFAQLQVPEWMKELLQNSQPILLALQEKIRALTVQLQAAAISQQPRGLGLLSSVVIDREIGNWTRFKNRRQVGSYTGLCPGEYSSGNTRVQSCVTKHGNPRLRAALVETAWRLVRFQPDYRAVKKWRHLLAKGALATGAARKKAIVAVARQLAVDLWRIRTGRVATETLGLIN

SEQ ID NO: 184949 - protein, 430 aa, unidentified
MKSNTQNAKIETITEKTLVLGIDVGSETHYARAFDYRGIEYSKKPFKFSNTEVGFATFKEWILDLKERHEKDKVVPGMEPTGHYWFNLGKFLQDNEMKPVLVNPHHVKKSKELDDNNPTKNDRKDPKVIAGLVREGRYMIPYLPDGVYADLRTASNIRFQLQAELTRIQNRISRWFNIYFPEYKTVYGKPDAKSGMLILKAAPLPEDILTLGIDGVNQIWRDAKLRAVGKARAKTLIKAAEHSIGSKEGTMSARMEIRMLLEDYESKNMRLQEVMVLIEELVKEIPMAEKLLEIKGVGIRTVSGFLAEVGDISRFNNPKELQKLAGLALVENSSGKHKGETTISRRGRKRLRYLLFEVAMSLVAKNPEFRELHNYYTTRRLNPLKKMQSLMAIAAKLIRVFYAMLTKGVDYDPKKMVRDIKRPAVYLQVA

SEQ ID NO: 184950 - protein, 347 aa, unidentified
MRFYTKQHQFYCGIDLHARAMYVCILNQSGEILVHRNMKTTPETFLNVIAPYREGLVVAVECMFTWYWLADLCTYEGIPFVLGHALYMKAIHGGKAKNDKIDAHKIAVLLRGGMLPQAYVYPAEMRATRDLLRRRMHLMRKRAELLAHIQNTTSQYNLPEIGKKIAYKANREGVAERFREPAVQKSIEVDLALIDYYDELLRDVELTILKAAKQHDANTLYLLQTVPGIGKILSLVLLYEIYDINRFPRVQEFASYCRLVKCAKESNGKRAGSSGTKIGNAHLKWAFSEAAVLFLRDNPAGQKLLARLEKKHGKGKALTILAHKLSRAVYYMLKRKVAFDMHRFLSD

SEQ ID NO: 184951 - protein, 424 aa, unidentified
MPPPGWLAVCGPARVTRRTTRCATRGLRVTIIGVDAHKRSHTLVAIDPGGRKLAEKTVTTTPSGHAEAIDWVLKNFGADVEWAVEDNRSFTHLLERDLLAAAPWRVVRCPPALMARTRASARTPGKSDPIDALAVARAALRETDLPVAVHDDVSWQLRQLVERREDLVTQRAGVMHRVYAHVHLLDPTRPTPTGLDKRNRRDALGRFLRTQSGLLAELARDEVDDLEYLTRRIDSLTERIVERVDELHSSLLTIPGCAHLTAAKFIGEAANMDRFRSEAAFAAYCGVAPVPRWSGSTAGTLRVSNGGNRQLNTALHRVALVQLAKIPVGRTYYERRRAEGDTGAEAIRRLKRKLCRLVFNRLRADYHVRTAADTVGPAVAAADVGQVPAWLELVDIAHSMREERKSPRRSVGEHRMIQPGDAEP

SEQ ID NO: 184952 - protein, 409 aa, unidentified
MRVIGLDVHRDFAVVALLEGGEICGGGRVDLTRDAVIAFGRQLRADDEVVLEATGNTATIVRLLRPFVRRVAIANPLQVRAIAHAKVKTDKIDAATLAKLHASGFLPEVWMPDEATVALRRLVAQRGQVVQQITRAKNRIHGVLHANLIPPYRGELFSAAGRSWLAEQPLAEDEKLAIRRHLADLDHRAADLAALDQALAVRALEDARVRRLMTIGGVDATVALGLLAAIGDIARFSSSEKLVSYFGLNPSVRQSGSGPAQHGRISKQGRAHARAVLVEAAWAAARAPGPLRAFFLRVQARRGKPVAAVATARKLAVLVWHLLTKAEDYAWARPALLEAKLRRVELTAGHPAARGRRKGRAHAYNSKEVRQRERAWLEQTERAYARFVAAWQEKRPAGRTGAASGRRTP

SEQ ID NO: 184953 - protein, 422 aa, unidentified
MSDLEAVVYHAYVGIDWANLKHDVCVQQSISDTREFAVVQHSPEAIDAWVKGLQQRYGGPIAVAVELSKGPIVSALQKYDFIDIFPINPSTLAKYREAFQPSKAKDDPTDAALAVDLLLHHPEHFKLLKPQSAKIRALATLVEQRRSLVGERTRITNRLRAALNQYYPQVLDWFVHIDTPLFCEFVKRWPTLVQAKRARTSTLRRFFREHHMYRGSVAEDRIQAIRDAHPLTLDDAIIVPYRLQVLVLVEQLELMFKAIEQFDAEIEKQASSHPDYKLFQSLPGAGPSLAPRLLVAFGEQRDRFKSAQDMQKYSGIAPVTERSGKKHWVHWRLQCPTFLRQTFVEWAGQTINKSYWAGLYYYQQREKGATYQAAVRSLAFKWIRILFRCWQTGVAYDESRYLKALERRGSPLLKNQAMLKSA

SEQ ID NO: 184954 - protein, 341 aa, unidentified
MNETLFCGVDLHSDNAVYVITDEQDRQLFSKRLPNDLAVVLGALEPYRDRLKAVAVESTYNWYWLVDGLRDYDYPVCLANPAKMEQYDGIKEANDLTDAAFVTHLLRLGVLPTGYIYPREDRPVRDLLRRRTLLVRYRTSLKQSLQNMVVRQTGRSLGWRKVRDLDNEARAELLGDDDCLPFVADQQVELIELLDERIKRFEQKVLEHAHLRSAYECLLTLPGVGVILGLTIMLETGQIGRFKRVGDYTSYCRCVRATRSSNGKKKGSNNSRNGNAYLSWAFVEAVHHAIRCCPAAKKFYDRKMAKRNGALATKALAAKWTKAAYYMMTRQESFDLARVFG

SEQ ID NO: 184955 - protein, 458 aa, unidentified
MNRKRSKPKIDRKMPMVHPNAAAIDIGATMHMAAVRADRTPEPVRSFGTFTTDLHRLVDWFTECGVETVVMESTSVYWIPIFELLDARGFTVFLVNARDAKHVPGRKTDVGDAQWLQRLHSYGLLRASFRPKGQIAELRAYVRQRERLLEYAASHIQHMQKALTEMNLQLHHVVADITGATGLRIIRAILAGEHDPKVLAHLRDYRCHASAATIEKALTGSYRAEHLFALEQALALYDAYHEKVSACDARIEAVLKELSIGRGRRSDSLLSPRRPRTDQMNGLAFDVRAALFALLGKDLTQIDGLGPYLSLKLIAECGDDLSPWASAKHFTSWLGLAPSNKISGGKVLSSRTRRCGSRAAALLRLAAVTVGRTETALGAFYRRLSARIGKAKAVTATARKIAVLFYNAVRHGMEYVDPGASYYETRYRTRVIDNLHRRAKVFGFVLQPVEPISGVAVS

SEQ ID NO: 184956 - protein, 347 aa, unidentified
MNSVGIDLHRNRSHIAVIDGEGTETLSRRITNDPATFLQLLGELEGETQIALEATYGWEWLADVLQDAGYELHLAHPLRTKAIASARVKTDAVDARTLAQLLKADLLPEAYIAPRELRDLRDLLRHRVAMTRMRAALKNRAGSILAKQGIKRPYSDMFGPSGLAFLDALELREVPRGRLDGALRLIADFTREIDLTTREIEARAKADPYVEVLCQIRGVGRYIAMLVIAEVGDVTRFQTARQLCSWAGMVPTVRSSDQRIRLGHISHQGSPALRWALVEAAQHASRGGGPLRAAFERISRRRGGQVAKVAVARKILTLCFYGLRDGEIRCLAPRVGARAVRTLAVAT

SEQ ID NO: 184957 - protein, 412 aa, unidentified
MPRWVGRAIGLDVHREFCEVAICEDGRTRSAGRVSATPEGIAVLARSLLPSDRVALEVTGSCWEVARILEPRVNRVVVVSPDDTGITSARAKTDKLDARALASLLWKGELEAVWMPDERCRVLRRRLARRQQLVWSRSRAKNEIHAALQRRLQPKPPCSDLFGVKGRAWLSSLELPLEERESVDAGMRHIEFLDAEIAAVEKLIAKQALSWPEIRRLMTVPGVNLICAASFIAAVGNPNRFLTSRKLVAYLGLDPRVKQSGEGPARSGRISKRGSPSARWALVEAAWTAVLQPGPLHAFYVRTRNRRGHGKAIVATARKLAVLFWCMLTRGEDYAHQQPSLTRKKLRRLEITAGAPKYTRRAAGIWSTNDLMREAELELARQAETSYLRLVQDQQAGAPAKKAGASVTLERA

SEQ ID NO: 184958 - protein, 387 aa, unidentified
MSQTVAALIPAAVDYERTLVLAIEVSNKSWVLAAQVPGLPHTKAKRTINPEAEALLAAIAGYRARAAAMGRSIERVIAVYEAGWSGFWLARWLMRHGVEVYVVQPSSVPVDRRMRRAKSDGIDSELLLRILLAWLRGEPRVCSMVPVPDEADEDARRCVRERTELISERVGLTNRIGAVLATLGVNDYNPLLRNRGHRLAELRTGLGEPLPANAHAKIKRLLARLELVLTQIAELERERDAVVETEASDKASKMIQQLTALRGIGVQSATVLVREAFVRRFANGKALGSYAGLASSPYSSGGIDREQGIGKAGNRRVRTVMVELAWLWTRYQPGAAQVCWFRERVVSTGRRVRKIMVVALARKLLIALWRFVIDGVVPEGAVLKPAA

SEQ ID NO: 184959 - protein, 342 aa, unidentified
MQIAILGIDLGKNSCSVVGLDVAGRVVLRRRLSRDGVIKLAAGMPGCVIAMEACCGAHHLGRLLREHGHQVRLMSPEYVRPYVKAQKNDDRDAEAIAEAATRPTMRFVELKSEAQLDMQSLHRARDRLVGERTALINQLRAVLLERGIVVPQGRRKLERYVDALLAEEEIRFSPRTRLLVEDLRAEWRELDRRISAFDDEFAAQARTDETARLLTSIPGIGPLNATALTAAIGNAQTFGRGRDLAAWLGLVPKQVTTGGKPKLLGISKRGNGYLRKMLIHGARAALPTLSKGETPLGAWLRGLLGRAHVNTVVVALAAKLARIAWAVIRSGKKFDMKAATAS

SEQ ID NO: 184960 - protein, 338 aa, unidentified
MAIIATGIDLAKNVFAVHGVNQGGAVHLRQPKVARAKLGALIAALPPGVIGMEACSGAHHWARQFQAQGHTVRLMAPKLVTPYRMSGKRGKNDAADAAAICEAMQRPNMRFVPVKTEDQQARLMVHRARQGFITERTACINRIRGLLSEFGIVLPLKAEVVRREARNHLEDLPGFANLVIGDLLSEVAHLDERIKQYDVHVRTMARDCSAAQQLMQLMGIGETTATAIVAMVGNASEFSCGRQFAAWVGLVPGQYSSGGKTRLGRITKAGDPYLRSLLVMGARAVLNAAKGKSDGLSRWALALEKRRGYWKAVVAIAAKNARMAWAVLTKGESFKLPA

SEQ ID NO: 184961 - protein, 411 aa, unidentified
MDIVHERAVGMDISKRDAKVCVRVPGAIHGQFISTVTTWGATTNQILELRKFLERQHVSIVVMEATSDYWKPFFYLLEETLPVELINAKSARNIPGRKTDVNDATWLAHLAAYGLLRASFVPPPPIRELRDLTRARAIVVRDRTREIQRLEKFLESSGIKLSSVVTSLTGMSSRAMLDALVAGERDPDVLAALARGKLKSKIPELVQALTGRFGEHHTFLTRMYLKQIDAHTAMVEDLTAKIEESMEPFRLTRELLVTIPGVSTLVADVIIAETGADMNVFPTAGHLASWAGVCPGSNESAGRIKSSKTLPGNKYLKAALGIAALSASHSKDTYLSVKYRRIAARRGPIKAVVALEHNILTAVWNMLANGECYADPGADHFTKLDPLKTKNRAVRQLQTLGYEVVITPVAA

SEQ ID NO: 184962 - protein, 349 aa, unidentified
MGMLADHVDHVIGVDTHRDSHTAAILDTTGSVLAEVTVPSDAFGYKRVHAFGRSHAQGRRAWAIEGTGSFGAGLTTYLLEQGEWVVEIDRPARPARRNGAKSDELDAARAAREALSREHLAQPRRRGDREAIRVLLTTRHGAVVARTKAVCHLKALLVSAPEQLRNHFRHLRTDEQLTRCARLRTSPSQSSEHRCTVMALRSTARRALVLQAEADDLETEIERLVMQAAPGLLTEPGVGAISAAQILCSWSHCGRLRSEAAFAALAGAAPVPASSGQTVRHRLNRGGDRQLNRALHTIVLSRLAHHEETRTYAARRKADGRTPREIKRCLKRHLSRRLFKLLEASAADA

SEQ ID NO: 184963 - protein, 346 aa, unidentified
MTIVETRAITGGVDTHADVHVAAALDPIGGLLGVEEFPATAAGYAGLLGWLGGFGTVALAGIEGTGSYGAGLARHITAAGVRVVEVDRSDRQDRRRQGKSDPLDAVSAARAAQSGRARGAPQGRDGAVEAIRALMADGRSAAGERTRTINQARALILTGPDDLRARFAGHTAAALVTAIASLRPRPGDAAGHATRVALRELGRRAVFLDGQLERLDELIVPLVTARAPGLLALYGIGPNTAALLLIAAGDHPERLRSEAAWAHLCAAAPIPASSGKVTRHRLNPGGDRQANHALWRIVFTRMGSDPATRAYVERRTKEGKSKAEIIRCLKRYVARQVYPHLRPAAD

SEQ ID NO: 184964 - protein, 449 aa, unidentified
MPKRTFQLQKFKGGNNLNNMKIIGIDPDSKDIVCCLIQPNSDLIVLKTFITTKNGLQKFINWVKLFEDVLIAIEGENGQSTPLEKILKDNSISYYSIPAYRIAKFRKAVLGENKNNCNDAETVARFACTMEQQGKLKDFQIEYEADEELQRLTRDHEYISKACTGELNNLWKHLKNISNDLYLALQGRNPNSSISYKILSKKGILRLFGAKPDISEWRSLKYEEFIIIMGGRNYRGRKTLITQLQMLSQDFKPYPFSLCLSIQLCAQRIIQLQEHQDAIKNELEKISEKKKEIQHLMKIKGIGIITATTMIAEIRDIDRFKSNHKLASYAGIGLVENKTGDNENMRNSVLYNHRLKGAFMQGALTFIIHNPDSHLTGYYKSLLRKGMKKIRALRRVARALIRKIFRELKEFKIKEEQSNIKSKRASDMAIGYNNPIESNIPPATNTYIM

SEQ ID NO: 184965 - protein, 338 aa, unidentified
MTVVTVGIDLAKNVFAVHGVNAAGKAVLVKPLVRRAKLLELIATLPACLIGIEACTGAHYWAREFQKMGHTVRIMAPQLVSPYRMSGRHGKNDAADAAAICEAVTRPNMRFVPIKSVEQQGQLFVHRAHQGYVSERTALINRIRGLLSELGIVLPQAFKAFLSGVAQVLEDLPGYCNQVIGDLLNELYHMEEKIKNSEKLIQQLARDNSAAQLLMQFRGIGPMTATAIVASIGNGHDFKNGRQFSAWLGLTPRQQSSGGKARLGRITKAGDSYLRTLLVLGARSVLLGAAKNDDPVSRWALQLKERRGYGRALVAIAAKNARMCWAMLHLRDEFRFPA

SEQ ID NO: 184966 - protein, 382 aa, unidentified
MDSTCSWSRIIGLDLSKATFKGCILYGEGFVQRKNFSGEMRQDESGYVLIKNTIRDGDIVLMEAGSSTFNLARYLLRNSGAVDVVVLNPANLRIIWDSQKKNDKADAMKIACIARDMRPEAWPRVAVPSEQEQSERAVITHWVFLRRQETMLLNRFFALFNSLGFPEIDKGRMRSSADFRVQTVNDLLSFNELSFTDALMLEQQISIVQNQLGLMEDRLRAICLNHPRQALSWLSIPGIGLINAATLIAYINDGSRFSRPDQLLNYAGMVPKQNQSGTVDVKGRITKRGCTAIRRSIVQGAQVVMMQPPTCDLTRYAYRRKKECPFNGKVAVAVANRMLRTGLALLHHDDLYRPMIENGFDRLRRKLAEYKLQALAAYLTRN

SEQ ID NO: 184967 - protein, 311 aa, unidentified
MKIKGQRKFDNTTSGFEALNSWLKKKVDTGLTLTVTMEATGVYYERLAYFLHGAGYKVHVLLPNRIKGYMKFLNLKSKTDKLEAKALAELGLGTKLPEWKPASPQMYTLKRLSRERNNLKEEKTALSNRLHAEESCQKPEKLAIKRLKQRIALIDKQIGQVEKQMHQLAAKDQELQSRIENICKIKGVAFITVLAVIAETNGFELVEHKSQLVSYAGYDIVERESGSSVKGKTRISKKGNRHIRHALHFPAISVVKYHEEFRSLYERVFDRTKVKMKGYVAVQRKLLVLIYTLYKKNIPYDPAYYKTLAVG

SEQ ID NO: 184968 - protein, 354 aa, unidentified
MIIIGCDYHPGFQQIAFVDTDTGEFQERRLQHREEAEKFYRDLAAQGMPVRVGMEASGQARWFERLLSELHFELWIGDAAEIRTKRVRKQKTDRQDAQLILRLMLEDRFPKIWVPSWENRDLRQLLWHRHRMVQARTRIMNQLQAVALNEGLRCKKRLWREAGREQLESFVLAPWASRRRRDLLELLDQLTPTIAELTQAIEQEAGKCPAAQRLQTHPGVGALTGLAFVLIIGRAERFQCGKQIASYLGLVPLEDSSGQRRRLGHITKQGNSLLRFLLVEAAQVTVRSDPEWRRKYFHLALRRGRKIAKVAMARKLAVRLYWMWRKGWNYEQLKKFGSHAGQPGNRDGVQSITE

SEQ ID NO: 184969 - protein, 332 aa, unidentified
MKYKVFIGIDVSKLTIDAHLHGIGASKTFSNEEKGFASLLSWVKKYSKQSEPAEMIICFEHTGMYSIKLATYLNDLGIPFAMLPALQIKQSIGIRRGKNDQIDAQRIAEYAWLHRETIQATLLPAKSILKLQSLLTLRNRLVCDRGGYEATWKEQKKALEGKEHKGIFQVYKSLIMNLTVQVKKIEEQIKAVIESDEAVKLNYQLLTSIKCVGPVLAANMIAYTHNFTRFATWRKFACYVGTAPFEHQSGTSIKGRTRVSSLSNKQLKKLIHMVAICACAYNPEMKSYYKRRVSEGKSKMSTLNVIRNKIISRMFAVVNRGSGYVDLMKYAA

SEQ ID NO: 184970 - protein, 403 aa, unidentified
MNMNAVGIDVSKGKSMVAILRPFGEIVSTPFEVKHTVSGIRSLIGHIKAIDGESRIVMEHTGRYYEPLVRELSQADLFVSAVNPKLIKDFGDNSLRKVKSDKADAVKIARYTLDSWAELRQYSLMDEIRNQLKTMNRQFDFYMKHKTAMKNNLIGVLDQTYPGANTYFDSPAREDGSQKWVDFATTYWHVDCVRKLSLNAFINHYQKWCKRRKYNFSQSKAVEIYEASKEIVSVLPKDDLTKLIIKQAVEQLNMASQTVEQLRTMMNDAASKLPEYPVVMAMKGVGKSLGPQLMAEIGDVSRFTHKGAITAFAGVDPGVNESGSYEQKSVPASKRGSGTLRKTLFQVMDALIKTKPQDDPVYLFMDKKRSQGKPYYVYMTAGANKFLRIYYGRVKEYLSSLPK

SEQ ID NO: 184971 - protein, 352 aa, unidentified
MRIIGCDLHARQQTLAVLDTATGEVMEKTLTHSGSNVQEFCAALPGPVRVGIEATGTMQWFLSLMEELGIDCQVGHPAKIRAAEPRKQKHDRRDADLILKLLVENRFPSIWRPSKELVDLRALLLHRHQWVRMRTRIQNALQAIALANGLRRGPGLWSQTGQCTIASLPLAPHTAHRRSELQAMYAKFDNDIEKLNQRVQEQAGKRPGATLLMTHPGVGPITALATDVFLGNPKRFADGKALASYVGIIPSEYSSGGRQRLGGLSKQGNPLLRFLWCEAAAHAVRRDPGLQRFYRRKLVQKGLGKARVAAARKLGIRLWIMLRDQIDYHEFCRRGQMQQNSGDARAGMPGTR

SEQ ID NO: 184972 - protein, 293 aa, unidentified
MVDDKRYVGIDVAKARLDVALGLNGERLAVANDERGISALLKRLEPTDLVIIEATGGLEVPVASTLATAGIAVAVVNPRQVRDFARATGQLAKTDALDAQVLVRFGAAVKPQVRALPDAQARALEALVNRRRQLVEMLTAEKNRRANSPKVIHKSIDEHIHWLEKRLAGFDDELTALVRATPIWRERDELLRSVPGVGPVLATTLLAYLPELGALNRKQIAALAGLAPFNRDSGSLRGSRCIWGGRAQVRRVLYMAVVSAVRPIPSSRIFTPSCGHAGNTLNRRSPHACANSS

SEQ ID NO: 184973 - protein, 358 aa, unidentified
MQTKSNTICFNGQNVYVGIDVHLKSWKVTIMLEDLVHKTFSQDPNSEILYKYLKKNFPGANYYSAYEAGFCGFGAHRELIQFGISNKVVNPADVPTTDKDKKQKEDKRDSRKIARSLRNDELKGIYVPGKAMEELRGLVRYRKTQVKEIGRSKNRIKSFLHFNGIEIPIEMDTASKHWSGKFTQWLKTIKMSTPYGDMVLKETLDTAEHQREKLLKCNRVLRDMNKNSEYSQKLKLLQSVPGIGLVTSITILTEVEDIMRFKNLNQLCSFVGLMPTTHSSGEKNKAGNITPRSNRFLRSNLVESAWIASRSDPSLAYSFNELCRRMQPHEAIIRIAKKLLNRIRYVMKNETEYVLSVI

SEQ ID NO: 184974 - protein, 421 aa, unidentified
MNQLSGTPFRAYIGIDWASTKHDICLQVAGSEDRIFERISHTPEAIEVWVQALYQRLGGPIAVALELSEGPIVSALEKYGFFVLFPIDPKRLAKYREAFVPSGAKDDPTDAEFAVDYLMRHPEKLKALKPESAPMRKLRYLVEARNRIRGDQSRCVNRLIQALKQYYPQAVDWFNDHNTLVFCDFLKQWPTLTKVRRARKTRLERFFRDHNVRFARLIEDRIAAIKTATPLTCDEAVIEAHRLQVEILVKQLRLTIQAMKCFDKEITAIATQFPDYGHLYTPLPGAGKVIAPRLLAAFGEDRDRYRCAAQLQKRSGIAPITKRSGNSTWVHWRFQCPKFLRQTFIDFAAQTINKSAWAGAYYRQQRAKGASHNIAVRALAYKWIRVLYRCWQDRVPYDESKYLKTLRRRRSPLLKQLAEAA

SEQ ID NO: 184975 - protein, 338 aa, unidentified
MSLYGGIDLHSRISWLVILDGALKLVRQIKLANGLADFLRVLEPYRGELVGLAVESTPNWYWLVDGLQEAGYRMHLANTYAAQQYSGLKYTDDRHDARWLAHLLALGILPEGYIYPSHERPVRDLLRRRGFLVQKRTSMVLSLQGAFGCHTGHRVSSDTVKKWTAVEIEERLDDPLVARGLTCLLEPIKVLSSQIGLLEKEVLAHAKLRDEFALLKTVWGIGPILAMTVMLEVGDIKRFETVGNFASYCRLVKTDRISVGKRKGAGNAKNGNPYLSWAFSEAAHFAIRYHDAAKRFYQRKRARTNGIVAVRALAHKLARASYHVMRDQVEFNPQRLFA

SEQ ID NO: 184976 - protein, 348 aa, unidentified
MTKQLMAGIDLHGNNLVIGIVDQDGRRLKHQKLACDLKLVDGFLAPYKAQLKSLAVESTYNWYWLVDGLQALGYPVVLANPAAIKQYSGIKHADDQNDAYFLADLQRLNILPTGYIYDAKLRPVRDLLRRRMGLVHQRTALMLSFKSLYTRTTGQAMSLSRLKGLAVAEAQTLYEHPANCLIATLQKEHIDKLDQSVAAIEQLVLASARELPCYKPLVTLPGIGRILGMTVTMEIGVLSRFPSAGDFASYCRTVASKRLSNGKKKGDNNQKCGNKYLAWAFVEAANFAKRYDEQCRQWFDRKAAKTSPVMATKALACKLAKAAWYVISENSAYDPQRMFPESGSKPGQ

SEQ ID NO: 184977 - protein, 383 aa, unidentified
MRQIEQMPSAWDAAVFVAMELSKSAWLLAAQGSPSGKASSHRLEGGDIAGLLGLLRRLQAREQQACGRPVQIILGYEAGYDGFWLQRRLAAEGISCWVMDPGSLQVDRRARRAKTDRLDAAMLLRALMAWWRGDRAACHMVQVPSVEREVARRTHRERQRLIAERVQHVNRIKGLLATQGIYDYRPLRRDRWERLEDLRTGDGRELPPRLRREIEREFRRLELVLEQIAATEAERDATVAAPAAEDADAAMVAQLARLGGIGPELATVLVREALYRPFANRKEVAAYAGLTPSPYASGDRHRDQGISKAGNPLLRKAMVELAWLWLRYQPDSALARWFTERVGSVRGRIRKIMAVALARKLLVALWRYLTTGLLPEGARLKVV

SEQ ID NO: 184978 - protein, 401 aa, unidentified
MRSIGMDVHRTFAQIAIVDDGLCRDDGRIGVRPEDLRAWAATLEPDDEIALEATTNSDAIATLLRPLVAKVVVSNPRKTRAIAEAKVKTDKVDARILAQLLAADFLPGTWVADDRTRVLRRLVVRRMHLVKARTRSKNQVHAILARNLAPTCPHADLFSGVGRRWLRSQDLPADEWRSVDALLRQLDFHGDELAEVDRDLAIEAIDDPVVARLMTVPGIDVIVAMAVVAAVGDFSRFESPDRLVSYLGLNPKVRQSGNSKATHGRITKAGPAQARGMLVEAAFAASRTPGPLRAFYRRIKDRRGFQVATVAVARKMTVLCWHLVTKDEDYAFARPSLTAHKRRKLELAAGAESHRGPVAGASRDYHIKRLRDEEKALVEHAERAYEVSAAHWQPQGPRREG

SEQ ID NO: 184979 - protein, 331 aa, unidentified
MKKIFIGIDVSKKTLDVAIYSTNGNERANHLVIENNPDGFKKMISWIKKKKIDLKEVFICMEHTGVYANAIVSFLEKEEITYCRMSALAIKKSLGIVRGKDDGVDAFRISQYTYEKREKLSPSKLPPANIIALRNLLVERKGYVKSIAQYKQRKNEIAVHQEKKSIKRYTSVIKILTKKVEEIKLEIMELIENDSELLKTYTLISSVIGIGFVNAVSFIAYTNNFQDFTNPRAYACYISVAPFPYSSGTSIKKRTSVSKIGRLELKAVLTMAARSAIINDPELKRYYQRKFNGKRKPESNHGQVLNAVKFKLICRVFAVVKRQEKYVVFKY

SEQ ID NO: 184980 - protein, 371 aa, unidentified
MKENSTFIGMDVHKNSIDIAIAPKGRKAQVRHYGKIDGTLAALDKVVRKLVSQGDRPHFVYEAGPCGYQIYRHLTAKGFDCSVVAPSMVPKQSGNRIKNDRRDSMMLARLHRAGELTAVYVPVAEDEAIRDLSRAREDAKGDEKKSKQRLLAFLLRSGHRYSGRSPWSQAHMRWLADIKMVHPSQQIVLQEYIDTLSHCTLRLQRLTEQIRQLLPQWRLFPVVQALQSLRGVSLIVAATTVAEIGDFKRFQNPEELMNYLGLVPSEHSSGEKTRRGSITKAGNSHVRRMLVEAAWAYRFRARVSRALLKRQEGLPQEIRDIAWKAQVRLCARYRHLWAKGKVKQVVTTAIARELCGFIWAIANETDVPMTA

SEQ ID NO: 184981 - protein, 369 aa, unidentified
MAKPITYVGLDVHKDTIAVALAEAGLRGEVREHGKIPNTPAALKALTVKLAPARRELRFCYEAGPCGYGIQRQLTEAGHECAVVAPSLIPRKPGERIKTDRRDAINLAKLHRAGELTPVWVPDQAHEAIRDLVRARQAAVRTLRQARQQLSGFLLRHGRHYHRPAWTQLHRRWLASLKFDQAVHHIVLEDCIAAVEAAMARRDRLEAHIEAVLPEWSLAPVVEALQALRGVRLVAAATLVAELGDITRFTNPRQLMAYLGLVPSEHSSGRTRRQGGITKAGNGAARRMLIEAAWSYRFPARISREQLLRQERQVKPIRDIAWKAQERLCRRYRKLARAGKQPTVITAAIARELAGFMWAIAKQVPPMAT

SEQ ID NO: 184982 - protein, 384 aa, unidentified
MNYSSILFIALDTHKTFSEVAYCEDRQRAEIKHFGRVNSTKAALSKLARQFTSKYPNHTLHFVYEAGPCGYWIYRLLTSLGHSCYVVAPSLIPKKPGDRVKTDRRDAIKLASCIRNGDLTPIYVPEPEDEAIRDLSRAREACMKDLKAAKYQLKALLLRNHIQCTVKDNWSPKHLRWLTELVLPHPAQQIVLQEYIQTVSERMRRLERLDNELLHHVKRWRYYPVVKAIQAMRGVRLLVAVGVIAELGDLTRFDHPRKLMSYLGLVPSEHTSSDKRKLGAITKSGNHRARRLLVEGAHSYRYAANISTEMQKRQESLGQEIIDIAWQAQLRLCRRYQRLMKRGKHYNVAIAAIAREMIAYIWAIAREVVLSHVVPANRLARVPA

SEQ ID NO: 184983 - protein, 423 aa, unidentified
MDVVGIDWAWDFHICYSIEKNKIYRIKDNEAGYRELLNEVSKEAVFVIEESFNRISDFPLSEGREVYLLPPKRSKEARGYHSNGIKTDSLDARSIALTYSEHPEYCIRARNNEEGRSFREQLRVYRYYKDEASRLKNKLHNELHDHFPEFVEVMGNWKKNKGKILLLSITDELKSLSIEEIHNYFKENQIAFTNSLRKKAKELKKREWHITKYTLMMVANAARNLLEVERGKQEMKNEMERNLKESKYRVILSLPGVGVVTGVALVAAFLNHEFGNYRNFQKYCGTVPIIIQSGNFRKCVMRKHCDRNLKGTLHMMALSAVNKGSWMKGYYARKIKEGKSFGHALRALANTLVKIAFAMLKSLKSYDEELFLSSRGNKSPQSNYTTKTSTPETEKKTNEKSSLPASVAQTNCHLGTDSGRLSP

SEQ ID NO: 184984 - protein, 348 aa, unidentified
MLIIGCDYHPGFQQIAYVDTGTGEFWERRLTHREEAEQFYGGLQGQSVRVGMEASGHARWFERLLSELRFELWIGDAAEIRTKRVRKQKTDRQDAQLLLRLMVEDRFPRIWVADAENRDLRQLLWHRHRLVQMRTRVMNQLHVVALNEGLRRKKALWRPVGRQELESLRLAPWASRRRQDLLDLLDQLTPKIQELTQALEEEVQKRPVTRRLMTHPGVGPLTALAFELVIGTPERFHCGKQIASYVGLVPSEESSGDRRRLGHISKQGNSLLRFLLVEAAQVTVRSHPQWRNKFFHLAMRRGRKIAKVAMARKLAVHLYWMWRQGWDYSQFDKLGSHAGEPGNRHGVQ

SEQ ID NO: 184985 - protein, 355 aa, unidentified
MIIIGADYHPSFQQIAWVDTSSGESGEQRLQHNEEAEKFYRDLKERGVKVRMGMEAGGHARWFERLLAELHFELWVGDAARISKQRVRKQKTDRQDAQLLLRLLREDRFPRIWVASLENRDLRQLLWHRHRLVQMRTRIMNQLQAVALNEGVRRRKRLWSKAGRVQLGSLALAPWATRRREDLLALLDYLEPRIAKLTAAIEQEAQKRPRARQLMTHPGVGPITALAFLLVIGTPQRFARGKQMGSYLGLIPSEDSSGDRRRLGHISKQGNALLRFLLVQAAQAAIRHDGDWRRQFLHLAMRRERRIAKVAMARKLAVHLYWTWRKGWDYQQFTKFGSQGRKPGSHAGVRTASTR

SEQ ID NO: 184986 - protein, 336 aa, unidentified
MNEMACVVGIDVAKRKFDIALLINNKIKTKVFDNTPAGHKAFEDWLIERSAIPGQTHLCMEATGPYSETLATRLVTDGWQVSVVNPARIKGFAQSELARNKTDRADATLLARFCMAMRPGLWTPPPVEWRELRGWVDRLQAFKEMHQQESNRMEAHRASGQMHLVQDVQTHLDWLDKQIKELERGINDHIDRHPDLKRDAELLGSIPGIGDTTVAKVLAYAGNVRRFTNAKALAAFIGVTPRQRLSGSSVKGRTMMSRTGHSDLRRALYMPGMVARRHNPVLKMFGDRLSAAGLAPKAVVGAVMRKLAHLIYGVIKSEQPFDANFNHSALAIQDGI

SEQ ID NO: 184987 - protein, 421 aa, unidentified
MRKAGTGKVKHVKDDTLIVAVDIGMEMNRGYCTTADGRDIKPFKFDNSREGMDKLWGMVMASKNRFKCNEVIVGYESTGPYGEPFLHYLLKKDVKIVQVNPMHTKRVKEINDNSPLKTDDKDPRVIADIIKLGRALSVVIPEGDAAYLRRLNNSRERHVRERTALLNQLQQLVFLLFPEFKKVFKNIKCMTPLYLLKTYPTPESISALDKHDLGDEMRKQSMGKFNECHADMLINLARNTIGIKEGVSGLSMDIRHILVQLEMLKDLIDEIESEMETTLERIPYSSKLLSIKGLGVVSVAGIIGEIGDFKKFQTRGEIMKLAGLDLYEISSGKMKGQRRISKRGRSLLRKILYYVAIQTIRKNGIMHDYYTRLTDGGMKRMKALVAVSRKLLGIIYAIVRDDSEYLVNFEPVKRQVIKKAA

SEQ ID NO: 184988 - protein, 346 aa, unidentified
MKILALDLGKYKTVGCAYESESGAHQFKRGLTTAGGLAGMVQAVKPDRVVIEICSIAGWVCDLMWGLGIEVQVANTSDDAWRWRKVKQKDDRRDALKAARLSAVNQLREVYIPAPEVRQWRALITYRQQVIRRRTKIKNHIRDLLLREGQLLGRGSSCWSQLGIAALAAQARPFSECGPAELWRGELQLELEQLKEIQRQVATVTAQLDKLGAGDARVQLLRTVPGVGARLAEAIVALLDQPQRFRKASQVSGYIGMVPKAMDSGETERRGHITRQGSRLVRSLLVEVAWAGLRHNAWVRQTYQRLSGGKKARKKIAIVAVGRKLLVKCWAMLRDNRPWDWQPQIT

SEQ ID NO: 184989 - protein, 412 aa, unidentified
MKDLLEISCGLDIHKEKIVACILTGPLGKPTHSEIREFTTLIPDMLALRDWIISENCHHIAMESTGIYWIPIYEILEDAFSGDITLLVVNARHMKNVPGKKTDMRDSEWISTLLRAGLLNASFIPEKRIREFRDLNRYRKSIIRDITSQKNRVEKFLQSSGFRLSSFISDIFGASGRNIILHLMEHGQIDKISLDSYLKTKTRKRIDEILMSVNGTLSEHQKSFLKILMCHYESMKEHLIEIETHLQEDMLPFALQIEQLNTIYGISTTASCAIIAEIGTDMKPFKTAEHICSWAGLCPGNNESAGKRKSTSITKGNPYIKSMLCEIAWVIAGKRNTYLSAWYWRIKQKKGARKAIVALARKLLVIIYTMLKQGTNFDENCFEVRRKNCEQKQLSRYIRELEKHGYTVEAQV

SEQ ID NO: 184990 - protein, 331 aa, unidentified
MFPVGIDVSKNTLDLCMLYDGIKGRIKTRNIQNNRHSVENILRWLRLQHCGPEDVHVVMEATGVYHERLATELHDAGFYVSLANPHRSREFARGMGIMTKTDKVDAYLLACYAFLKNPHRWEPPAPEIRYLGALLRRRDVLLGDALREENRLEKYLSTDTPADIISSCMHMAQLLREEVSNIERQIKAHIKASPALRRDYTLLTSIKSVGPQLEMHMLVVLRSHDFSSAEQAAAFLGVVPIEKRSGTSVRSRPRMSKIGPPQLRAKLYMSALCGKIYNKRMRNIYDEMCLRGKPKMVAIGALMRKLVHWCYGVLKTGIVFNDEGLKQVLST

SEQ ID NO: 184991 - protein, 342 aa, unidentified
MQVTTIGLDIAKNVFQVHGIDAKERVVVRKQLRRSQVIAFFSALPPCLIGMEACATAHYWARELRKLGHEVRLMPAKDVKAYLKRNKNDAADAEAICEAVRRPTMRFVQIKSAEQQGQLMQHRTRDVLIRQRTQIINALRAHLAELGIVAAQGDAGVNELCAIVADDRDERLPIDARASVIVLAAQLEALQTLIGSIEKRIKMQHRSNETSQRVETIPGIGVLGASAIVATVADPTIFRSGRDFAAWIGLVPRQDSTGGKQKLGPISKQGDRYLRRILIVGAIAVLRRAQENPGKYPWLTQLLARRPFKVVAVALANKMARTAWALMAYGGTYRAPELAEAA

SEQ ID NO: 184992 - protein, 353 aa, unidentified
MMYVGVDVGKSRCRAAMMNQEGKITGEFDFSNDSQGIFHLASMLTMDDRVVMESTGAYWLNLYNQLDELHIPVVLANPLQTKAIAHGRIKSDKVDARILAHLLRADLIPECYVPPKEMREIRSLVRHRLSIVKLRSMTKNKVHALVDRNGLKHEFSDLFGKSAMQWLKSLELSGLDRLMLDNYLMHLESLNMQIERVDAEITARATIDKDVRLLLSLTGVSVYTALLIKSEIGSIDRFPSYKKLISWAGLAPSVHQSGNVEYHGNITRQGSRMLRWIMVEAARVAAVHDSRLRTFYERVRERRGDQKAVVALACKMLKIVWFMLTKREEYESANRKRFVKKLNSLDAEKRVAG

SEQ ID NO: 184993 - protein, 361 aa, unidentified
MIVIGADTHKASHTVGAVNDATCRLIADQTVTAKRRAFGDLLVWARGLGGERVWAIEDCRHVSAALERFLLARGERVVRVPPALTADGRRSSRERGKSDLIDAVQIARAAIREGLDTLPVAHLAGPELDVRLLVDHRERLVGQRTALINDLRWNLHDLWPELQIPARALIGTGWQQRLAGRLARSEQTARVRIARDELRRVRDLTRSIDALEHELAALVADLAPQLLAEPGCGVLTAAKLIGEIAGIRRFTSDAKLARLAGTAPIPASSGRTTRHRLDRGGNRQLNCALHRLAVNKGRYDPQTAAYLQRKQAEGKTRREALRCLKRHLARRVWRLLQPSPTQPNRTITIHCNTPTHHFSLT

SEQ ID NO: 184994 - protein, 342 aa, unidentified
MEKSLFIGIDFSKKTFDVSVIHPSNLQAVDYQQFENSKEGCMSLFKWIKTLTKEPCSNWLFCGEHTGLYSVCLSEFLVKKELFIWLENPLQIKQSCGIRRDKNDKSDSREIAFYAYRFQDKAKAYRLPDKSLKSLELLLSFRERLLSNKQTLLVSSVEIRRVMKQDATARFIYEQSKKDIERINKEIKEVEKRMLKQIESNESLQENYELVSSIKGVALINTVAILVATQNFTRFENSRQFACYTGMAPFGKQSGTSINTKPRVSRLADKKIKVLLTQAAKCAIRHDMNIRQYYERKLKQGKDKWLITNNIRNNIIHRIFAMVRNKQLYQVNYINFLDKARA

SEQ ID NO: 184995 - protein, 378 aa, unidentified
MAARSVSPPANRRSSSHGQEPNVQGTLGVSKPTRKRKETPVEHQRQYVGIDLHRRRSVIVRINDDGEVLETVRVVNDPLELALAIADAGEAPEVALEATYGWYWAADLLEAEGAHVHLVHPLGLHWDSRRVKNDVLDATELAKRLSRGDLPEAWIAPPELRELRELVRYRAKLVALRISAKAQVHAVMAKLGILPTLDDMFGPGGQKLLDEMPFTGTYAIRIASLRDLLEIYERELVDIERTVARRLRGHTGYRAIQAINGVGPVMAAIFVAEIGDVSRFESAGHLCSWAGLTPTHRESDTKVRRGHITKQGSNLVRWAAIEAVVRYHGGAPIAPTYARIAVRRGAMIARVAAARKLLCLVYYGLRDGEIRCLAEASA

SEQ ID NO: 184996 - protein, 374 aa, unidentified
MSSNVCHQIIYLAIELSSSSWVIAYRVPRNDKAKLHRLEAGDGTGLLAFIAGLRHRLDPSDDASTLVVSCFEAGRDGFWLHRLLTAHGVINHVVEPTSILVTRGARRAKTDRLDAVGLLRVLAAKFAGDPGACRTVVVPSVEEEDAKRPHREREFLVQERVRIENRIAALLATQGVRERPSLRSWDADMRALRTGDGRPLPTHLVAELNRLRRRLSLTLEMIRELDAVREQALEAQHDSASRTVKALCTIRGIGVNFASVLTREVFYRTFDNRRQIASYLGLAPTPFQSGGMDRDRRINRAGNSRARKTLVQLAWLWLRYQPESSHAAWFRDRVGSLQGRIRRITIVALARKLLIAIWRFVTLGLAPEGAIIAA

SEQ ID NO: 184997 - protein, 446 aa, unidentified
MPPSPPEDVLEDRRSGSANHRYVRFSRLEGVRDGEAAEYGTLKGDHERGEVMDYWVGFDVGKRFHWLCVLDGDGAILLSRRVDATEEQLEAACSEIAALGDVEERVIGVDVLGGPATLLETTLLERGERVRYIPGTAVNKVRDAYPGGEHKSDPKDAFVIADQLRLRWKSLREVRIRNESAIELRTLVGYRRDLVQDQRRRVCRLRDLLSQVFPMLEAALPDLAEKGALLTVAKVALPSDARRLGKSRLARWLKARGSRKSEALAEKALLAAKAQRRELPASEVKAALVSEIAWEILRTKDRIADLEKRLEELVETNPDGKIVGSLPGMGLILTAEFLAEVDDIGRFGSPDRFAAAAGIAPVLRASGSVSYQRRAKKGNRALKRVLYQSAYCAIGHHDKSRDYYQRKRAEGKMHEQAVVALARRRVNVLWAMLRDRTTYREMPLAA

SEQ ID NO: 184998 - protein, 335 aa, unidentified
MQVYGIDLSKEKFDVSFIDAKGKEKKQKVKNAVASISRFLSSVSEDGILCAEHTGVYGDLLVYLCNQMNVPIALVPGYTIKHSLGLVKGKSDPLDSKRIREYGERFPDKLEYAEYPEENITELKQLYTLRHQLVKQRKSLRTLDKGEEHHPMQSISVHKHIHTVLDGLDKEIVDIEEDIEMLIRKDQAMNENFELVTGIIGIGPVIATDLIIKTGNFKTIDTHRRAASYAGVCPFPNSSGKMLGKSKTSPFADKKLKSLLYMGARAAVKHNKEYKLYYQKKELEGKPYFLIMNNVSNKLLRTVYSIVKNKTPYVRDYVCLDPRERNINSSTKKVA

SEQ ID NO: 184999 - protein, 368 aa, unidentified
MPAVRLQFCLMKNKLISKTVIGIDLGDKKHAICVVDQEGNIVAEFSIENRRRELAELSKNYPGSLVAMEVSTHSPWISRLLTGLGMNVVVANARKLRVIYTNERKCDEYDAQMLAKLARVDIELLHPITHRSKDSQQDLLMIKLRDTLVRQRVTAISSIRSSLKALGFQLPAPSSPSFAGIARAELEQNPELLLLVEPALCAIDELSKRILEFDRMIRGAIKTKHPQAQRLQQITGVGPITSLCFVLTVEDEQRFSETRDVAAYFGLVPRRFQSGDSDKQLPISKTGNRYMRKMLVQSAQYIMGHFGPDCELRRYGLRLTERGGAAAKKKAVIAVARKLSVLLLTLWKNQSDYQPLRDSQTTTVIQAS

SEQ ID NO: 185000 - protein, 414 aa, unidentified
MKVVYEVCGGIDVHAKMLVACLIGADGTKQIRTFSTMTDDLLKLHDWLVAAGCTHVAIESTGVYWKPVFNLLEDALTVILVNPEHARALRGRKTDVKDAEWLADLLRHDLLQPSFIPPPEIRELRELTRYRESLVGEQAAVANRIQKLIESANIKLGQVATDVLGASGRAMLRALAQGETEPSKLADLARGQLKEKRTLLIRSLRGRLTTAQRFVLGELLARWSELEAAEARVIKEIDQQLQSPAHPQLARAREILDTIPGLGPRVVEVVIAEVGVRMREVFPTDAHLASWAGLCPGNKASGGKRLSGRTRKGNTYLRAALVQAAWGVTRKKNCYLSAQYYRLVKRLGKKKALIAVAHSLLVIIYHVLERDQSYIELGGDYFDRRNTEKQRAYYIRRLQMLGLKVNVEELPAAA

SEQ ID NO: 185001 - protein, 350 aa, unidentified
MLIIGCDYHPAFQQIAFVDTATGDCGERRLEHREEAEKFYRELAGRGMKVRAGMEASGQARWFERLLAELNFEVWIGDATVIHAKRVRKQKTDRQDAQLILGLLLEDRFPQIWVPSWENRDLRQLLWHRHRMVQARTRIMNQLQAVAINEGLRCKKRLWGESGREQLEAFRLAPWASRRREDLLKLLDGLNPTIAELTQAIEQEVEKCPEAQRLRTHPGVGPLTALAFVLIIGRADRFQCGKQIVSYLGLVPLEDSSGNRRRLGHITKQGNALLRFLLVEAAQVTVRSLPKWRSQYLHLTMRRGRKIAKVAMARKLAVRLYWMMRQEWDFGKLTKFGSHAGKPGTGDGVK

SEQ ID NO: 185002 - protein, 338 aa, unidentified
MKLYGGIDLHSNNSVISIKDADGQIKARKKLPNDLQTIFRFLSPFKDALSGLVIESTFNWYWLVDALMEADFCVHLANTTAIQQYSGLKYADDNSDADWLAEMLRLGILPEGYIYPKEERTARDLMRKRMQLVQQSTQNLLSIQGIYMRHLNYKLSNNKIKQLNVEKIKQDFSSANVAQATQCNLIVMNCLKEQTQGIEQTLLKQVKLRPDFQHLTSIDGIGNILSLTIMLETGEINRFNKVGNYASYCRCVSGARYSNGKKKGKTNSKNGNKYLAWAFIEAANFAIRFNKTVKSYYQRKLTKTNQTVAIKTVAHKLARACFYVLRDQVDFDVKKAFG

SEQ ID NO: 185003 - protein, 358 aa, unidentified
MNYIGCDCHIASLDFAVVNERGETTKKQRVDTGVKELMEFVRSIPKPRTIIIEEGSLAGWLLEICTAYGEKLIITDPKRNRWIGRAGQKNDTIDANKLAHLARGGYIKEIHHPIGHRRRFRELVLSYHDTVKSQTRIKNKLKAKFRQNGIRCSGETVYSAKYRKEWKKKLPKDKVVQVIVEGLWHQLDQVHEVQEELLTHIRKQSSQYPEIKRFKKIPGIGPVHAATISAIVETPHRFAHKKKLWMYAGLGLAEKASGEKVYSRNLARDYNRLLKNALKQATEAAIIAKDNQFRRQYLRLTIEKGIPSHRAKLTVARSILATVYGIWKSGVDYDPNIDKRRKESNKTQVRAYHLVRSG

SEQ ID NO: 185004 - protein, 346 aa, unidentified
MKDVQIIGVDLGKNGCSLVGLDHAGQVVLRRRVRRDGLTALLAKLPSAVVAMEACCGAHHLGRLLVAQGREVRLMSPEYVRPYVKAQKNDDRDAEAIAEAATRPTMRFVALKSEAQLDVQVLHRVRDRLVGQRTSLMNQTRSILLERGLVVAQGRRALLDALQAVEEQGEASKLSGRVRLLLADLLDQWHALDSRIAALDEEFTEMARNDPAARRLATIPGVGVMNATALVAAVGDGRTFSRGRDLAAWLGLVPRQATTGGKPKLLGITKRGSKYLRKLIIQGARAALPPLARSPTPLGAWLRGLLARAHGNKVVVALAAKLIRVAWALLRHGTSWSWAPSQLATA

SEQ ID NO: 185005 - protein, 371 aa, unidentified
MNSIVYIGLDVHKESYTICSFRPEDDCAKHTMKIKSDYKQVLKYLDAMRKHYGEDTVFVCGYEAGPIGYRLYHELMERNVGCIIMAPTTMGITNTNRIKNDKKDAANIARCLAYRLYSPVHVPTAEDEEVKEYLRMRDDQKQALKKVKQQILAFVLRQGLKFEGGKSYWTIAHVKWLKSLEWDGLMQEVMSEYLITYDYLVSKIERLDVRIEEIATGERYAENVKKLSCLIGVKTYTAMSVLVEVGDFRRFEKPDKLASFLGLVPSESSSGETQRTGGITKAGNSQLRRLLVESAQSYTRGAIGHKSKELNRRQQGNPVEVIAYADKANERLRRKFYRMVLKNNTPRNKAATAIARELSCFMWGLMTDNIA

SEQ ID NO: 185006 - protein, 415 aa, unidentified
MEQIFMIKENYIYVGIDLHKETHTAVMIDCYNQKLGEITFPNRPAAFPKLVTKVKKCNTDGKEVVYGLENAYGYGRALAVWLIDKGYLVKDVNTAISHRQAKHRGAMYRKSDSDDAKAIALATLNMLDKLPDACPNDAYWSLGQLVHRRDNIMKQRTRLVNQLHEQLCIAYPSYKQFFNDISRPTALYFWEHYPSRKYLKGKSVEDLRAELVPVSHNKCSTKTCEKILDAVASDKVKNNAYQDARDMVTLSIVSDLQHYDSQLTEVDKMLEQMYKMLGCTLTTIPGVNVITAVKILAEIGDIKRFSNANKLAQFAGIAPLHLSSSGKGKDVATKQGNRRLQATIYFLAIQMVQISSKGTPRNPVVRAYYEKRKAEGKTSQQALICISRRLISVIYGMLKNGTEYRMPVVENAGEK

SEQ ID NO: 185007 - protein, 534 aa, unidentified
MASKKRNTQKKHIRSEGTYSSEELKCLTLDDGTRVITSADGDIKRPVCAGIDVHKEILMAAVCRTDPETLKAVFYVRQFQSTNKDIRNMAQWFKAHGVRDVCMESTGKYWIPVFNILEQCGLKPVLTHPKYVKQAKGRKTDFRDAIHIASLFRMDLVVASFIPPADIRDLRELCRYRLKLTYMRTSEKNRFQNSMTVSKVRLDCVFSDPFGKSASAIMEYLIETDPDQVSDEEILNLVDRRVQASNEDILESIHGYEFIGVQRDKLNIIQLHLGQLNECIRLIDEKLEYYRQKYFRIIRHLVTMVGITDISALYILGEIGTDMSVWKDDAALSCWAGLSPANNASAGKKKSTRTGDGGHYLKPLLVQCALEAAKSTRKDPYFHCKYETLKKRRGHKKAIIAIARKMLVAIYHMIRDDADFLPVDYEDTIQNTKKTKGLNLNNVIAFLKEQGADESTIHLIETQCCGKETETTDTCSKSPVVQDAKEKQSTSGSADISQPIQESVNGSPVLISGSQQGHALNCHPKDPAVATATA

SEQ ID NO: 185008 - protein, 355 aa, unidentified
MNDAKYIGMDVHQATISVAVRDSSGNLVMEAILETKAETILQFIRGLRGSLYVTFEEGTWAAWLHDLLQPHVTRVLVCDPRKNALLKVGNKNDRIDARKLSELLYLNKLSPVYHGEPGIRTLKELARSYIAMTRDLTRVMSRLKAIYRSWAIPCAGKQVYAPRYRAEWLARISEAGVRRRAELYYQQFDALAALRQQARRELLAEARKHPAMRLLRQIPSIGPIRAALLIALMQTPNRFRTKRQLWAYCGLALRTYTSGEYRFVGGQLKRSKKVLAVRGLNINHNHDLKNIFKGAATRAASTAGPFHHLYEACVARGIKPHLARLTLARKIAAITLLVWKKGVRFDAEHLKQQAA

SEQ ID NO: 185009 - protein, 403 aa, unidentified
MRIIGMDIHRVAAEVVALFEGKLTKLGRVPMLREHLEAFARRELTHDDHVVIEATGNAASVAELLAPFVERVIVANPKQVRMIAHAKIKTDAIDAAVLAKLYATGFLPEVWVPDARTQALRRQVARRTQLVRQRVRLKNIIQSILHAHLVPPCPHGNLVGISGRKWLAKQIVPPDERAAIERHLGQIDVIEAALKVVEAEIAGEVLADPVIRRIMTLPGVDMMVATGVAAAIGDVRRFPDPQKLVGYLGLNPSVRQSGEGPAYHGRITKQGRGQARGMLVEAAWAAARSPGPLRAFYQRIAARRGKHIAAVATARKLSMILWHMLTKETDYIWVRPALLARKLRNVELKAGMPAEHAKRGDAYDYNIPERRAAERAQVEQAEQDYARFISRWRSRPRGEARPA

SEQ ID NO: 185010 - protein, 423 aa, unidentified
MSERSTRRFIGLDVHRDFAQVAIWEDGVVRQAGRFATTPEGVRAFAADLGPADEVALEATGNTWAIAALLASRAGRVVVSNPVKTRAIAEAKVKTDKVDAQILASLLAADFLPPVWLPDLQTSALRRQVLRRAHIVRQRTRLKNQVHAILHRNLIPRCPASDLFGIKGRVWLAEQQLPPDEQATASALLRQRDFQGEELSRIDADLARIALGRDDVHRLMSIPGVDAIVALSIVAAIGDITRFRSPDKLVCYFGLNPRVRESGGHSASHGRITKAGPGHARGMLVEAAWAAAKTPGPLRAFYQRVRARHGMQIAVVATARKLTVLCWHLLIKGEDYAFAQPSLRAHKHRKLELRAGLPPANGRKGNASGYSLKAIRAAERDLAAQGEAAYRTMVAAWQPSRPASKPRPPSVAVGVDASNGTRL

SEQ ID NO: 185011 - protein, 402 aa, unidentified
MNAVGIDVSKGKSMVAIMRPFGEIVSAPFEIKHTASDINSLVELINSVEGESRIVMEHTGRYYEVLAHQLSEANLFVSAINPKLIKDFDNDSLRKVKSDKADAVKIARYALDKWQNLKQYNVMDELRNQLKTMNRQFGFYMKHKTAMKNNLIGILDQTYPGVNTYFDSPARSDGSQKWVDFASTYWHVDCVRKMSLNAFIDHYQNWCKRKKYNFSQSKAEEIYGKAKELVPVLPKDAITKLIIKQAVDQLNSASTTVESLRTLMNETASKLPEYPVVMAMKGVGTSLGPQLMAEIGDVSRFTHKSAITAFAGVDPGVNESGSYEQKSVPTSKRGSSDLRKTLFQVMDVLIKTHPQDDPVYQFLDKKRAQGKPYYVYMTAGANKFLRIYYGRVKEYLSSLPES

SEQ ID NO: 185012 - protein, 425 aa, unidentified
MSSDITIAAFIGLDWADQQHVIRLRAAGSAQVEAQVVDQKPESLRVWIQQLRQRFGGRPVALALEQSRGSLLYALMNVDFLLLYPINPQNLAQYRKAFYPSGAKDDPQDALLLLEMLEKHRDRLRVWVPDDASTRSLRLLAEHRRKLVNRRTALTNQLTSLLKEYFPQALEWAGPLDRLAACHFLQKWPSLPALQKSSASRLRKFYDQHFRDDPRALEQRLEQIRQAQPLTSDPALLTASPLMVQALVAQLRPVIESIRQFDQQLQQRFSQHEDYTLFHSFPGAGSALGPRLLSAFGSNRDRFEGASEVQNLSGIAPVTERSGKSCWVHWRLACPKFLRQSFHEFAAQSIHFSLWARALYDQLRARGLSHHAAVRAVAYKWIRILFRCWKNRTPYNEAIYLAALQRRGSPLFALVSTQLQEVTCE

SEQ ID NO: 185013 - protein, 337 aa, unidentified
MKHSVISIDLAKNVFQVCAMDSNNQVVLNKKYSRNKLLHALRQFEPTQVVMEACYSSHFWGREIQSLGHSVKLIPAYQVKPFVVGNKNDHNDAIAIAEASQRPKASFVSIKTVEQQDIQSLQRIRERQMKQRTATANQLRGLMAEYGVIVPAGLNQLRNSVPDILEDAQAPLTMIARGFVDRLYRELTAYDHAINELEDALKSLLKHNQDYQRLLTIPGIGPISGAALIAAIGDARYFKNGRQMAAWMGLTPKQHASGEKSRITGISKRGDRTLRRLLIHGARAVINWCEKKHDALSLWLKALSKRAHPCKVVVALANKLARIVWAVLASKQPYIAM

SEQ ID NO: 185014 - protein, 337 aa, unidentified
MKYSGIDLHSNNSVVTVTDERDRVVAEKRLPNDLSKIVAFLLPWRDELAGVVVESTYNWYWLVDGLQEAGFEVKLANTGAIKKYDGLKHSGDEADARQLAHLLRLGILPTGTILPPEDRATRDLARKRMQLVRSRTSHILAIENILARERAVKITSNQIKRLTAVDVDQMGLSADVALAVQSNLAVVTTLGAQIELLEKRLQEKLGERPEYALLTSVPGIGRILAAIILLETGPIERFDAVGNYASYARCVDSQRLSNGKKKGEGNAKNGNKYLVWAFVEAANFALRFNAEAKRFYERKKARTNNVVATKALAHKLARACFHILKERAPFDTRRCFA

SEQ ID NO: 185015 - protein, 376 aa, unidentified
MFKQAHYKVGCDAHKHYSLFAVLDHRGKPVEQTRVNHVPGAIRAFVSRFPPGTPVALETVGNWYWIVDEIEQAGCVPLLAHAQMAKKMMGHVHKTDKLDAQGLAILQHLGSLPTVWIAPGEIRDERELPRTRMALSKVRTMLKNRMHSTLAKYALSLDTQSDIYAPKWRPQLLELICSLPDETRRCMRQELELLDQVQEQIHRLEARILERVQVTPTIQLIQSVPGPAKILSIVIDREVGSIDRFPSPHHFASYSGLVPKVKASGGKTHYGKMITPSRCPSGKAANNYLKWAFIEAANVVVRQQHHPNWRQKYVVALFERTRQRKGHAVAVGTVARYLAEATYWVLKKGEPYREPVPQHPVGRKSAVSPKQGQVRT

SEQ ID NO: 185016 - protein, 475 aa, unidentified
MNIKGSKKKNQVLSVNIFEQQGIIVKADAIKAGLKASTWHEVETRGKFDKNDKLSFVSDDMLILGCDIGSETHYVRAIDIRGRELSKSAFGFSNTAEGFESMLDWSTKLAAANDKKQIVLGLEPTGHYWFCLTTWLVAKGISVVQVNPYAVKQTKEVEDNSQLKDDKKDPKLIANLVKDGNFGMPYLPEKLYADIRRLSMFRDQLNEDRIRNLNRLHREMKIYFPEYKDAFGKIDGAFSLELLKAAPFPDELAALGTEGMKQIWHEAKLRGRGYANASSILEYARKSVGIKDGADAGRQAVKWFVSRIIELDGQLSDIENKLNERCMEIPHAKNILAISGIGENILSGILAEMGDISRFDDVKEIQKLSGLGLVACSSGKHTGETKISHRGRKRLRYWLFQAAKSAVAHSGEFKELHVYYTTRKQNPLKKMQSLIVIACKILRVIFTILTKGTTYDPKKLLGDIVRPNQAIPQAA

SEQ ID NO: 185017 - protein, 341 aa, unidentified
MKDFYDTTRIKNDNKVLAKYLRKLSNKFELRVCYEASGSGYTLQRKLETWGYHCDIIAPSLIPKKPGDRRKNDFRDAKNLTRHYAQGQLSIVHSPSEEEESVRSLIRCRIAMKESEKRIKQQINSFLLAYDFHWSKSKWTDQHVKWLWKLQMRDQYSQNVLKEYLGYFEYLSTRIAYLDQQIEQLADSEVYAPSVKKLRAFRGIGTLSAMLLIAEITDFKRFTTPRALMAFLGLIPSEDSSGDRQGGSFITKAGNTRCRKQLIESVQHYIKKPHISSVMKKKLKQVDAKSTNIAIKCMNRLHKRYWHLTMKGKNSNKAKTAIAREFVGFIWAMMQAEPMKA

SEQ ID NO: 185018 - protein, 315 aa, unidentified
MREKGYFVGIDVSKAFLDVAVALEGKSWRVSNDQAGIAHLVERLKAMSPEVVVLEASGGYEMLVVGAMGVANLPVARVNPRHVRDFAKASGRLAKTDKIDAFVLASFGEVMRPEVRPLKDEQSQELQALLTRRSQLVEMLISEKNRLGTCLEKRVRKDIMKHISWLKKRIEEVEKDLESRIKASPIWREKEAIMRSVPGVGPILSLTLLAELPELGTLSHKKISSLVGLAPFNCDSGKFKGKRRIWGGRAKVRTALFMATMAATRFNPIIRSFYQRLLLAGKPFKVAITACMHKLLIILNAMMHHRSLWLSRNST

SEQ ID NO: 185019 - protein, 342 aa, unidentified
MKYIGVDLHTTQLTICYLDESGNEELELVKIDNIDYFLKRINPTDKVAFEATGNSLFLQTALKAVLSIDNIYVVNTLQFKLISKSVKKTDKNDARLLAEYLSKEMLPEARLRSEIDNQILNLIETRDMLVTSNTAFKNQIHNIFLKLGIKLKCSEVSGKKKRKDLVERFELGGIYKFQVEFALSNIEHNYAEIAKLESKLNELKPEMKQVENLTSICGIGDKSAMAVKAIIGDVNDFETPDKLAAYVGLVPRVNNSNETVCHGMITKRGNKLIRKLLVQCAWVSIRYNPVLKEFYSVLKKKKPAGKAIIAVARKLVYQIFYTLKHNWYFTNTENTEKEIKVF

SEQ ID NO: 185020 - protein, 416 aa, unidentified
MSRKDSTVVLSVVHPICCGLDIHKDKISATLISDDGAVREEVEEFGAFTDELYRMKDWLLERGCAVVAMESTGVYWRPVHNVLEDRCQVILVNARHVKHLPGRKTDVSDSRWLAGLLRHGLLRGSFIPEKHVRQWRDLSRLRKTYVETLSDYKRRVHKLLECANIKIDSVASDLFGVTGMNLITLLVSGHEITREAVSACTRGKLKGKEDELFKSIQGFFTEHHRFQLISMLTLITAMEKQIAQVHARLTRLLSDREDKIALLMHVPGISELSAHALLAEFGDTLDQFESSASLASWAGLCPGNNESAGKRHSGRSPIRNGHVKTIMVEVAWGAIRKKGSYYREKYYSLRARKGAKKAIIAVAHRILKAVFHILKFGRAYHELGEQYLIQLNNTSRLHHLHKQAAKLGYVLVPLGA

SEQ ID NO: 185021 - protein, 422 aa, unidentified
MKKRNYRKISINQFQLEPVTKAIPKGRLVFAIDVAKVDMVAAVADGQGQVVSYVTWRNIQDAQKLRELLEAFRANGYDVEAVMESSGTYGDVLRHRLYDLGVPVYRVSGKRTHDAQEVYDGVPSLHDAKSAAILAKLHVDGVSTPWPPVAEEKRELRGAVELMDLYQERYLQLVHRLESWLARHWPELPEMLELTGATLLALVGRIGGPAQVAAAPEKARRLMRGMSHGLMDSAKIDRVVESAAHSLGVPPLPRELQALMAIADEAQRSLRAYTSAKTALEKLSMQSSSQRMAGTVGKATAAVFTCFVGDPTLFPSTASYVKAFGLNLKEKSSGKHVGRLKITKRGSNRARHYIWLAACRWIQKDLAARAWYEKKVRRDGGAKSKALVALMRKLAQALFHIGRGDPYDASKLFNLDHLGLRT

SEQ ID NO: 185022 - protein, 414 aa, unidentified
MKKHNNSPKKSEPTSKRAKSRGPVQLDPKEVLAELLGKLREKLDPRVVAASAGKEDGRGELRPNLDRLTVGVDLGDQWSHSCILGLEGETLAEGQLRTTPQDVTEFFAALNVARVVVEVGTHSAWVREVICGYGHEVLVANPRLMEGSKRRKRKNDRIDANKLARLGRVDPQSLHPMQHRSPGVRQDLVMLRARDALVAARTELINATRGLVKSMGARLPKCSSPSFAQKVEEAVPAEIREALLPLVRMTAALSDSIQGYDEKIEKLASEKYGHTTLLRQVKGVGPITALAYVLTLENPERFVKSRDVGPYLGLVPKQEDSGESQPQLGISKAGDTMVRRLLVGSAQYILGPFGPDTDLRRYGLRLCERGGKNAKKRAAVAVARKLAVLLHRLWVSGEVYEPLRHAMVPIAAAA

SEQ ID NO: 185023 - protein, 398 aa, unidentified
MTESSDYESVQVFIGVDVGKDTHHAVAINRSGKRLFDKALPNDENKLRSLISDLKQHGQILLVVDQPATIGALPVAVARSEGVLVGYLPGLAMRRIADLHAGEAKTDARDAAIIAEAARTLPHALRTLKLADEQIAELSMLCGFDDDLAAQTTQASNRIRGLLTQIHPALERVLGPRLEHPAVLDLLQRYPSPEKLASLGEKKLAAQLCKLAPRLGKRLAADIAQALAEQTVVVPGTNAAAVVLPRLALQLITLRKQRDEVALEVEQRVIAHPLYPVLTSMPGVGVRTAARLLTEVACRAFASAAHLAAYAGLAPVTRRSGSSIRGEHPLRRGNKALKRALFLSAFAALRDPLSRAYYTRKMSQGKRHNQALIALARRRCDVLFAMMRDGTFYTPQGS

SEQ ID NO: 185024 - protein, 402 aa, unidentified
MNAVGIDVSKGKSMVTIMRPFGEVVASPFEVAHTSAGFCELANSIKGLKSETKVVMECTGWYHYPVADALHEAGLFVSTVHAKLIHDYGNNTIRKVKTDKADSIKIANYGLSNWMELPRYTPVDDIRMMLKTFSRQYSKYQNMKTMLKNNFIALTDRTFPGVNELFSSVPRRSNGHEKWVDFSFKFWHCECVSDLTPKVFADRYQKWCKKEGYRFSQVKADDIYASACGHFSVMPKNGASKLLVTQAIGQINAISDNIAVIAREMKSLAESLPEYPMVSQFFGVGEILGPQLVAEIGDVFRFRNKGSLVAYAGLDAPPYESGKFVSASRSISKRGSSHLRKTLFQVMQIYLQHAPVDEPVYQFIDRKRAEGKHFYNYMTAASAKFLRIYYARTKEYLNSFNI

SEQ ID NO: 185025 - protein, 372 aa, unidentified
MIVVGTDTHKQTHTCGAVDALTAKARGELTAAARRGSFGKLLVWARKLDGERVWAIEDCRHVSGAFERFLVARGEHVVRVAPKHMAGARRSARERGKSDSIDAFAVARAALKEGLENLPGAHLDGRALDIRLLSDHRDDLIHARTQDQQRLRWHLHDMWPELEVPSGALDTAKWLGTISRRLARAEQTMRARIARELVRQIAARTTRINELERELARLVTDYAPQLLAEPGCGPLTAAKLVGEIAGADRFATDAKLARTSGTAPIPASSGATHRHRLDRGGNRQLNCALHRLAVNKGKWDPAAAAYLARKQAEGKSRKEALRCLKRHLARRVWKLLHTPPTTADPGPTLPIAPKATDHLEIVGAPSRMICLG

SEQ ID NO: 185026 - protein, 354 aa, unidentified
MIVLGADAHKRSHTIAAVSAATGELVGEQTVQVGARGLGALLSWARGLGGERVWAIEDCRHVSGSFERFLIARGERVLRVTTKLMAASRRNARDRGKSDSIDALAVARAALREGLDALPAAQLAGPELDLRLLVDHRERLIRQRVALNNTLQWHLHDLWPELELPGSSLFYGRWAPRVARRLARAEQTMRVRLARDLLRRIRELSQTIKALEREIAALVATVAPQLLSEPGFGPLTAAKLVGEVAGASRFSSDAKLARAAGVAPIPVSSGKTNRHRLDRGGNRQINATIHRIAVTRLRCHPETQDYIARKRSEGKSTKEAIRCLKRHLARRIWHLLQPPHPVEGTPPHTITFLT

SEQ ID NO: 185027 - protein, 412 aa, unidentified
MDVVHERCAGIDIGKADVKVCVRVPGPGKRRRKEIRTFSTMTRDLLAMRDWLLTEQVTVVGMEATGSYWKPVFYLLENDIETWLLNARHMKNVPGRKTDVADSEWICKMVEHGLVRPSFVPPPDIRQLRDLTRYRTEVIRERTREAQRLEKLLEDSGIKPSAVVSDLLGKSARAMLEALIAGERDPEILAEMARASMRAKRQILAQALTGQFTGHHAFLARTMLDRIDAVTATEAWLSEEITRQLAPFRRQIELLTTIPGVSTRSAEMILAETGAYMGRFPSAAHLASWAGMCPGNHESAGKHTSGKSRPGDPWLKNALGLAATAAARSKDTYLASRYKRIAIRRGKKRALVAVGHTILTSIWHMFTNDAEYADLGADYLLQRTGRARQTRRLVSQLNMLGYQVSLQSAEPV

SEQ ID NO: 185028 - protein, 394 aa, unidentified
MPKIVYPICCGIDVHKSFIVVCIATTDEKLVTTYKSKRFSTFTGDLRRLSDWLVQYNCRDVCMESTGKYWIPVYNILESTCHVVLAHPKYVKAIKGKKTDKRDAKWIADIFKHDLINGSFIPPVDIRQLRDLVRYHYKLTGYTTGEKNRAQNCLTVSNIKLDDVFSDVFGKAASAITERLLENSEPFDVKPYLTKGIKASPEEIQLAVDGVMCVNQAEKLRIIRSHMASLELCKANLESEILSIAEKFLPQINFVLTIPGIQTFSAIAIIGEIGADMSVFETSRHLCSWAGLAPQNDQSAGKKKTTRISRAGVYIKPLLVQCANCAIRSKTNPEIANRYNAIKKRRGHKKAIIAIARMMLTAIYNILKKNEPYNAELYRKADAPPAKGRPELFV

SEQ ID NO: 185029 - protein, 339 aa, unidentified
MQVTTVGLDLAKTIFHVHGVTEGGEVAFNRPLRRAQVLGFFERLSPCLIGIEACASSHHWARELSKLGHTVRLMPPMYVKPYVKRGKSDAVDAEAICEAVTRPTMRFVEIKSEDQQALLSLHRARDFVVRQRTQLINMLRSLAAEFGIAIARGVARAIDFAKGIIDGKQSGLPELAQDVLRVLSRQLVDLHNRLGWYEITMRIQARLSRQAQLLQTIPGVGPVTASAVAATIGSGCQFRSGREFAAWLGLTPRNHSSGGKERLGKITKMGDRYLRQLIVVGMTSRVRQVANHPERADPWLTKLLQRKPARLATVAMANKTARIMWAVLTRNEPYKPHAA

SEQ ID NO: 185030 - protein, 426 aa, unidentified
MLNSQINKIQAITSDTLIVGVDIAKNIQWAQFINFRGIEVSKHICFENNYSGFNSIMEKIEEIKSKNNFLSVIVGMEPTGHYWKTFATFLHNNGIKVVQVNPYHTKKAKELDDNSQTKSDKKDALVIAKLIKDGRYSAIYFPEGEYADLRNLSNTRLEVSRLLNICKNRIHACVDEYFPEFETVFKSFIKGKVALHILKRIPFPTDILELTLEDIISVIREAAKKSVGKKKAEELIRAAKVSIGIKVGLEGARIRLNNLLEEYELYHNQLEKIEKEMAQELEKTGYKDILTSIPGIGIISAASFIGEIGDPKRFSNPQQIIRLAGYNLVEDSSGKHKSKTMISKRGRKILRTILYKISLIVVSKNQEIKLLYKYLITRKENPLKKKQALIVISGKMVKIMYSLIKKEEVYDKEKVLGIYRKQQIVA

SEQ ID NO: 185031 - protein, 347 aa, unidentified
MTIVGNPDAVVGGVDTHADVHVAAVVNHLGGVLGVESFTTTSNGYRQLVSWLRSHGELVLVGVEGTGSYGVGVSRYLQREGVTVVEVDRPNRQTRHRKGKSDPVDALAAARAALSGSATGSPKTRDGNVEAIRVLMIARRSAVDARIETLNQLRHVVFTATSEIRTKFTGLTAVGLVNKATALRPREGDDPVRYTTYMTIRALGHRVQYLREETKRLNRMLRPLIRQTAPTLLEVYGVGYDTAAKLLVAAGDNPERIRTEAAWANLCGVAPIPASSGKTKRHRLNRGGNRQANSALYHVVITRMRHDQRTRDYVARRLTEGKTMGEIARILKRYAAREVFKHLPHPA

SEQ ID NO: 185032 - protein, 429 aa, unidentified
MPTSPSPSPHIVAWIGLDWADETHAVCLQAAGSAELEPSALKQTPEALQLWVAGLRRRFPQGKVAIALEQSRGALFYALMTHDFLQLYPIPPQALADYRQALYPSGSKYDPGDAQLLLEFLRKHSERFHPWVADTAATREIALLVQHRRKLVDQRTAFTNRLQALLKGYFPQALDWWGDLTAPLAWDFLSQFPSLSKAQKASRMQVRKIYHAHSRRTPEQVEERLDQIRAALPLTTDEAVINSSVLMVQVLVGELRVLAEGLKQIEKHLADLFAAHPDHDIFRSFPGAGAALAPRLLAAWGADRQRFCGAAPMQQFSGIAPVTSQSGKKRWVHWRWACSKFLRQTFHEFAGQSLPWSPWAHAYYQQKRAGGANHQAAVRSLAYKWIRILYRCWKDHTLYDEARYQQALARHGSPLAAALHQLPTPEARP

SEQ ID NO: 185033 - protein, 387 aa, unidentified
MPQPNDQSKSLAALDQDSTLIAVIEMSQASWLVGAMVPGVERHPLKKLAPDAEALLRLLQRWREEAGRAGRPIARVAVAYEAGRDGFWLARWLRARDIEAYVIHAASVAVSREHRRAKTDRLDVSLLQRAFLGWLRGEGDHCRMAAIPTLEAEDARRPSREHEALVGERTRIINRMKSALVRLGMRDFKPSLRKAAERLATLRTPEGAALPPNTAAELGRDMTRLQLVKAQIAEIERTRLERLRQPLAAPAQGMIALLARVVGIGIETADMLAQEVLSRSLRDRRAVARYGGLTGAPDESGARRREKGLARAGNARVRRGMLQLAWRFLMFQKNSALARWYRERTADARGATRKTMIVALARKLLIALWRLVTTGEVPQGVILRPVA

SEQ ID NO: 185034 - protein, 425 aa, unidentified
MKKTDYLSTLFVGIDIGSRTNVVSAIDFNQDFFIRMKPVPNAKEGAETLESLLVDVLSAHHEFNHVIIGLESTGFYGVHIANYLSASDLLAPFGTEVYCLNPKEVAKYKESFNALDKNDGIDSFVIADFARVGRISIKPWRGAQYLALQRLTRHRLHIAECIAREKTYVLNNIFLKFSEFAMLKKEDHPFSNKYGATAEAILEQYVTNDDIIEASIEELVELIESKSRGRITDPEETAKILKAAANGSYRLDKVVAEPITLSISSSFNCIRAFEKELKAIEKAIEHTVQGLNPVEYQVLKSIPGIGHVYAAGILAEIGTIKAFTGNGALAKYCGIVWKENQSGNFRAEDTKMSKAGNRYLRYYVIEATGSVINNCPEYKDFYDKKFAETTTHQHKRALALTSRKFLRMLFGLLDKSQLYSLERSR

SEQ ID NO: 185035 - protein, 400 aa, unidentified
MTTRTTAWAGIDIGKTHHWICAVDGDGRALMSVKVANIEADIVAALATVTDLADQVVWAVDIVGAPSALILALLARAESPVCYASGRVVNTMSAAYTGEGKTDAKDAYVIAETLRLRRDLPMVDTVTDLTRELALLTAHRSDLIADRVRMINRLRDVMTSVFPTLEQQFDYSSHKGALILLTEYASPKRLRRLGETRLTQWLRRRQVRDAARVAARALAAARGQDIELPGQQVAEMIIAELAASLLQLDQRIHGFDQQIAATFRRHHQAMIIESMPGFGPILGAQLLVAAGDLRGYPSAGHLAAAAGLVPVPNDSGRRSGNLHKPRRYSRPLRHVFYLSAQTSMMRAGPNRAYYLKKRVGGHTHAQAVITLARRRIDVLWALLRDDRTFSIDPPSLAAAA

SEQ ID NO: 185036 - protein, 316 aa, unidentified
MQAQQVFIGVDVAKDSLVSCIHGLAKPQVVANEERAIKGWLKTLAPQAVIGMESTGRYHQSLARLAHQAGLRVYVLNAKDVYFYAKALGARGKTDPGDARVIARYIAEHHGALHAWAPGTAAQLRVQELLQRRARVAVHRASLRQVLAGLEELAPDVLQLEQHFEQLLQHIDDEVQALVASETQLSQGSALLQTICGIGPQGAALLAALFNRIEFANADALVAYSGLDPRPCDSGTRSGRRRLSKRGSPSLRRQLYLAALAATRSKALGPTYRAIRARGFKSTPAVVILARRLLRIAWAVWKSGQPFDAARLQLAP

SEQ ID NO: 185037 - protein, 428 aa, unidentified
MGATLMQVCISVEDREHGSNRSFGTDTQSLRDIVNWLLGHGITHVAMEATGVYWIPLFNMLVKNGIEAVLLNAADVKNYTARKTDVNDAAWLMTLMSYDLVKPSFQIDELSRALRNCTRHRMSLVSTCSDCIRRMQKTMELMNIKLTEVISDIAGPTGIRIIEAILAGNTSPRDLAALASDRCKSSKEDIAGALEGTWEDELIFILGQHYRQYLLYREQTMQLDSVIEGKLKLLVERILKMNGGEVRTVIRSKKGTPHMKNRISFDIEALSVQIWGVNLMRIEGVSGITMLSLMGELGCNFVSSFKDAAHFCSWCNLSPCHKITGGKIISSKMKKRVNPVGLTLRNCAQTLANSKSPLGDYYRRMRSKGGGKYAVCATAHKIAAIIYTMVRNQQEYDPSKVSVNDRQWLEKRIKHHEKLLKKLKSMAS

SEQ ID NO: 185038 - protein, 351 aa, unidentified
MLSMGVDYHKKFSQVAVVNERGKPLFNRRLPNEKPVFKRFLEELDQPCQGVVEASRTWGVMYDMLDDLGVDMKLAHPLKVKAIAEAKIKNDKIDASTLAHLLRADLIPEVYVPSKEIRHQKNILRQRAWLVKLRTMTKNRIHQIIDRNHVQTPGFKDMFGSGGRKFLDSLTLPHPDNDLLKDHLEILDFITNYTKRTEKMIAKTVKNNRMVEILLSFPGMGKCFAPLIALEIANINRFATPAKLTAYSGLSPSIYSSADKTYYGKLIPGCNRWLRFAFIEGAWVSLHTSPYCRAYFNRMKKRRGSNVAITALARKLCEFTYYCFREDRYYRERPYTYYQRTKKTLVALRSD

SEQ ID NO: 185039 - protein, 318 aa, unidentified
MNTKINQSINVGVDTGKTQLDIHIRPLDLFFSVENNDKGIKKALKTIKSHSPERIVIEATGRLEMPFVLACAEAQLPIVRANPVHIKRFAGAIGRRAKNDRLDAELIAHYGEAIKPAFTVIKPKNIRLMSDLVIRRNQLLSMQTMEKNRIQILPASLHPTIKPMLTTIKNQITKLEEKLVKLIEDSPEYQAKNTILQSVPGIGNIAAASIISNVPELGYITNKQAASLIGVAPITRESGRYKGKRVIQGGRAQVRTVLYMAMMSAMQCNPVFKATYARLVAAGKPKKVAIIACVRKMVVALNSMLRDGAMWDENTAKN

SEQ ID NO: 185040 - protein, 284 aa, unidentified
MSEYVGLDVSLEGTSVCILDDSGRVMLERTVVTDPESIARLIRAKARRVNRVGLETGQLSVWLCHELRRLDVPVVCMDARQAHAALSVRPVKTDQNDARGLAEMVRMGWYREVKVKTLSAHEQRGLLMARQRLIVVRRQIEGQVRGLLKTFGLVVGTGVGGSFVRRVKQLADRRPSLSGVIHSLLDVLAAATREIVILDKQIAAIARANIPANRLMTVPGVGPLTALAYVSTIDDPTRFRRSADVGAYLGLTPRRYQSGEIDRQGRISKHGDRFLRTLLYEATF

SEQ ID NO: 185041 - protein, 386 aa, unidentified
MMVIGVDPHKSTHTATAVDPQTNRAVASVRIQASLADYRRMLTWARQFDQRRWAVENAEGLGRHLSSWLLARGEQVVDVPSTATARVRQLSRGGGRKNDQIDAAAAACVAALQGDGRPLEAEGVTDALALLDESRMNLAQSRVRLVNQLHALLRELIAGGAPRDLSATTAATLLRHIRPAGDVERVRKQIAAGLVTQIRAVDTLLKSNAQQISELVAASGSTLTGTVGIGAITAGRLIGRTGRAGRFPSPASFANYAGAAPVEIASADKARHRLSRGGDRQLNTALHTVAITQIRTPGSRGHAYYNAKIAQGKTAREARRCLKRRLADHIWRTMITDERRMATSPGGHPGAALTSSAAGSTPTTSSSDKSLPGPARADSTTLRSTA

SEQ ID NO: 185042 - protein, 326 aa, unidentified
MTAPKLGIDISKKTFDVALIRDPETMKVKQRQFSNTPDGFQALQTWLAKQGVRQVHAVMEATGAYGDALAECLHGAGHLVSIVNPAQIKAFGQSELQRNKTDRADAALIARFGWRHNPTPWTPPEPEHRELQSLVRHLDDLIEQRTQVSNRLSEGRLTKAVRESWEEILQALNERIAEVKRQINQHFDDHPTLKRQRELLDSIPGIGPETAGRLLAEMPQLGEFDSARAAAAHTGLTPKRHQSGTSINAPTRISKIGNSRVRYALYLPAMAALRSSKEFKELAARLTERGKKKMQIIAAAMHKLVRIAHGVLKNQRPYDPNYAAAD

SEQ ID NO: 185043 - protein, 333 aa, unidentified
MKSDTVHIGVDVSKAKLDIYVPASKEGSRPVTKEVDNNINGFRELRDLARKAKATVCVEPTGGYELELIAFMHKFDVPVAYTDALRVRQFARAEGSISKSDTIDAALISRFADKIGARILEAREVEAVELKRKAKFRQTMVDSRTSMINRLETEVDAEMKVLLKEQIRLASRIIEKAERLCLDTVKKNERMDGLRDRFTKIGGVGDLTAISILSGLPEIGKLSDGKLNRLVGIAPEEKQSGTKEWQRRIWGGRKDVRNALYMAAVASIKWNAILGSYYHKKRAEGHPHKWAIVPTMRKLLSLLNRIARDPGFAPMPEPESTKQNANVGRKKAA

SEQ ID NO: 185044 - protein, 368 aa, unidentified
MNDVTTYVGIDAHKKDLFIATLTGNEATAVAWTTPNDPKAIRRLVKKLEREAPGPVRVFYEAGPCGYALQRQVTTSRVTCDVVAPALIPRKPGERVKTDRRDARKLVELGRAGLLTAVQPPTPEDEAVRDLARARDDAREDLQRCRHRLGKLLLRRGLHYHGRNWTRPHREWIEGLDWKHAAERAVVDDYLLAIDHTEARLMELDARLSDISETEPYRKQVGWLRCFRGIDTLTAMLILAELHDFRRFPSARGLMAYLGLVPGEDSSGEKHRRGRITRTGNALVRRLLVEAGWHYQHRPGVGVGLARRRKGQPARVIAIADKAQQRLCRRFRKLAAQNKPPGKIVVAVARELAGFLWAALQPAPATLN

SEQ ID NO: 185045 - protein, 346 aa, unidentified
MEITTIGIDLAKEVFQIHGVNRHGKAVFCKQLRRNEMFKFFVNLEPCLIGMEACGSSHYWARKLNEFGHTVKLMPPQFVKPYVKTNKHDMADAEAICEAVSRPNMRFVPVKNIEQQAILSVHRTRQGFVKARTAQANQIRGLLSEFGIVIPQGIHSIAKRVPSILEDAENGLPGTMRHLLERLSDHLKELNRQVEELELQIKLWHKENEASQRLEAIAGIGPITASAIVATVGDAREFKNSRQFSAWFGLVPKQRSSGGKQMLLGISKRGDAYLRTLLIHGARAVIRFAEKKAEPDSWLRKLIARRNKNVAAVALANKNARIIWALLAKGAAFRHNHATAAAATVA

SEQ ID NO: 185046 - protein, 367 aa, unidentified
MSIYFGVDFHARQQFIKWCDTSDGEVHEQQLFHHALEEVREFYTRFQGEVIVGLEASGYSSWFETMLQQIGHQVWVGNPTEIRRRARSRQKTDRRDAELLLELLLKDEFPRLHRLTPASLEVLRQLRYRHRLVQMRTRIYNALQAIALSAGVSLKAKLRTNKGQQRLCQLSLTPACAQQRQEWLSLLSELSRRIAQVEQELEPLAAADPRVQRVRTHPGVGLLTGLALVHTLCPVSRFSNSRKVTAYIGLEPREYSSGERQRFGGISKAGSRLLRFLLVEAGHKAIAKDQHLKKLYHRLLHRRERAKAKVAVARHVLVHSYILLRDEIDYAEFLRRGVAVRSARVGHRLSMPDKLIERSASGQQQSA

SEQ ID NO: 185047 - protein, 312 aa, unidentified
MDAIYVGIDVSKDRLDVAVRPSGESFAVSRNGAGIDELIERLKSLSIKLVALEATGGFETVVAAGLAGAGLPVVVVNPAQVRAFAQALGKRAKTDPIDAAVIAHFAEATKPQLRQFPDATTQLLADLVARRRQIVEMIAAESQRARHLTLPRLKKSIARLRKALEKELSELDADISDHVRGSPAWAEKEDLLASVPGIGPIIARTLIAELPELGSLDRRQIAALAGLAPWTRQSGKWRGKSFIGGGRASVRRALFMGAMVAARHNPTLKLFRDRLVAAGKNKLVAIVAVARKLLTILNAILRDKTPWQPKIA

SEQ ID NO: 185048 - protein, 350 aa, unidentified
MLIIGCDFHSRFQQIAMVDTETGELIERRLDHNNGEAKKFYAELKKPVRVGMEATGYAQWFERMLATLGYELWIGDAAEIRAAMVRKQKTDSRDALHILDLLLANRFPRIWIPSPGERDLRQRLRHRHKMVCLRTSVRNQLQALAMGQGVYRKRKLWTAGGRAELEALGLDPWASRRRQELLQILDRLDPCLTELDRAVAKEAEQRPAARCLMEQPGVGPVTALMFVLTIGPVERFRRSKQIVSYLGLNPRESSSGGRQRLGAISKQGNSMTRFLLVEAAQTASRYDEELRRDYQRLKFRRGTAVAKVAIARKLAVRLYWKLRKHSSLVPSTRMQGSSEHPVVGASLSGN

SEQ ID NO: 185049 - protein, 428 aa, unidentified
MSVKDYNKQVEKRQRIRETTLIVGVDVGNAFNAVGYMNKEGNVLGSCAKLYNNREGFEQFVKMTEVLKRKYKLKDVLIGMEPTGHYWRKLAYFAREQGYEVRFIRTTAVKHHREIDESSSAKNDHRDALTIANITREGKYIDTVIEDGAMRQLRTLSKTRERLLRYSVSAKNALHAALDDYFPELHEVFKSMGTRSLWAILEGSPFPCDVLSKKVSFFQELIAKSSRKKAGSAKKARALCQAARRSIGIKRVGDADRFRVKICLEEVKRTVLMLRDIDRQMKKVLKEIPSAPYLLSIPGVGPLSAAVFLGELGDPANFHNARQIVKYAGYDPQESDSGSWVSRKFISKKGRWLLRKYLFFMSMRVIVLSKYFQNYYQRKLETKNRVGQQPKRKEILCAVAIKLIKVIFALLRDKRTFEDEVCVIAAHK

SEQ ID NO: 185050 - protein, 357 aa, unidentified
MTSRQRSTSSSTDPPVRREVVLGVDTHGEVHVAAVISPLGKILGTESFPATAAGYRQLLVWARKRGTVRRAGAGLSRYLLAQQIQVYEVNRPDRTARRQLGKSDPLDAQAAARAVLSGRAQAQAKSGDGPVHSARMYKLAKDSAVKARTQAINQLKAVLVVADPALREQLSSLGNAELFRTCARLAPLDGGGDEDAVAQATHMTLRMLAERIEQLTAQVDELNQRLTRLVERHVPQLLEPVGIGPDSAVTLLITMGDNPERLNTEASFAALCGVSPIEYSSGRRSTRRLNYGGDRQANAALHRIVFTRLRHDPRTQAYYERRTQEGKTRREIIRCLKRYAAREVFNLVRPVARTPAL

SEQ ID NO: 185051 - protein, 363 aa, unidentified
MIESTTVTVGLDVHARSIRLAAVRADELLEERTLGYDEEAVEQLLRRWPAVRCCYEAGPTGFGLYRYLVERGIDCAVVAPGLVPQRPGDRVKTDPRDARKLARLHAGGLLEPIYVPTPELEAARDLVRARDDARLDRMRDRQRLSKFCLRHGRLLPTSGWTVIRRKWLGEQRFEHAAEQITFDTYLHAVDLVDRRVEALEHAIRETAAQRPWRELVARLRCLRGVDTLTALALAAEIGDFNRFRTAVEFMAFVGLVPSEHSSGEQRRQGSITKVGNSHVRRLLVESAWHARRRPKVGYELARRHRGQDAAVIERAWRCQQRLYQRWQRMAGRGKPHQKIVVACARELAGFVWALATEQPLRST

SEQ ID NO: 185052 - protein, 317 aa, unidentified
MTQTICGVDVASKSLEARIGQQGAAGSFANNPEGISALSAFCHAHHVELVAMEATGGYEQQAFAQLSEQGLPVTILNPRAVRQFAQSMGSLEKTDRIDAGMIAWYAEVKKSRPVCLAPESQQHLRALVTRLRQLTEMRAVQLNQQRLVTDRAVQASFKKLLAVLARQIRELEQRIAALLEKDPLWRQLNEAFRTIKGVADRTVARLMAEMPEIGTLSNKTISKLAGVAPLANDSGKHQGKRAVRGGRAAVREILFIVASVVGRYEPDFIAFQQRLRAAGKPPKVVRIALAHKLLVRLNAKAREVRQRLATPQPEAAV

SEQ ID NO: 185053 - protein, 287 aa, unidentified
MSHDVQYIGMDVHQEAMVIAVLNESGKLVMESVIETKASSILQFLHGLRGELHVTWEEGTWAAWLYDLLQPQVQHMVVCNPRRNALLKEGSKSDKVDAGKLADLLRSGMLRPVYHGENGLRTLRELGRSYQTISKDLTRVMNRLKALYRGWGIPCAGTQVYAVRCREEWLSKIPHAGVRRRAELLYQQLDGLQVLRRELRPEFLAESRKHKAAKLLRQIPCIGPIRAARLIGLMQTPHRFRSKRQLWTYSGLGIETHDSAQYRFVRGQVQRSKKPQQVRGAESKSQP

SEQ ID NO: 185054 - protein, 344 aa, unidentified
MPCFAALDVSQETTAICVVDDDGTIIAETTIATFPDVITSFLRDKAPNLSRIGLETGPLAVWLWNALAARRLPVLCIDARHANAALKMQPVKTDRNDAAGLAQIMRVGWFKQVRIKSRDCYQVRSLRTARETLVRIRVKIENELRGFLRTFGVLFGKRVGGFTGRAHEIICGALEASPEMRIIAEALMKARSSVCDQIKVLDKRLAAIARANPTAQLFMTAPGVGIITALSVVSAFDDASRFKRSSSVGAYLGLTPRRYESGETSRNGRISKQGDKMVRKHLYEAATTLLTRNLRSSPLKIWGMKLAKVSGFKKARIAVTRELAVVLHAMWKTDTPFRWTQSAA

SEQ ID NO: 185055 - protein, 391 aa, unidentified
MYIGIDLHKISAVVTAVDDSGQEVVTTRFMNNLNGWNKFHKTFPDGGYVALEATLNHMEVVDLLEDWGYDVSVAHCKGVRAIATSKAKTDKIDSHVLAKLLQSDFLPTAYVPTKQIRQMRELLRHRIQLGRDVVQVKNRIHALLSKQWVTHEFSDLFGKKGRLFLASLELPIKSRYVLDSLLRELDVINHEISLIESLLAKYSVTDEDVQRLMQIRGIGFYSAQLIKSEIGDVHRFPSHRQIASYAGIVPSVRNSADKVRHGHITKEGNRNLRWVLVEAALQAKENNPKLKKIYARLSKRRGPMIAKVAVARHLLRIIYYMLRDKTDYHYVDQSLYEDKKKRINSIARFHDRRFKEATKTTLDYDRPGRSLPKIEMVNKVGNIKGSVSNFS

SEQ ID NO: 185056 - protein, 356 aa, unidentified
MISRGVLHIPRIIVGVDTHKDEHVAVVIDKLGARIGQRNLPTTNTGYVGLEHWVSGLGEIEAFGVEGTGSYGAGLARFLRGQGHSVIEVNRPDRSTRRRLGKSDPTDAEMAARAVLAGVARDQPKSGVDEVEMIRMLKSTKDSAMKGRTQAINQMKALIVTAPVELRAVLSGLTASQLVARCTGWRNGQLETPTTAAKYALRSLARRYSQLAEEIEGLNKELARLIVAFAPMLMEALGVGPDTAAALLVTAGSNPERLKSEAAFAALCGVSPIPASSGKTNRHRLNRGGDRQANAALYRVVLVRLRYDVRTRTYLQRRTEEGKTKTEVIRCLKRYVAREVFGILHDIGMRHTVQNA

SEQ ID NO: 185057 - protein, 360 aa, unidentified
MAKAKTVVGLDVHATKIVAAVLDIETGELSRFAMSGEAAGAAGFCVGLPRPVRVAYEAGPTGYGLARELIKRGVECVVAAPSKIPRASGDRVKTDRRDAEHLVRLLLAGKLHPVRVPGPEEEALRDLVRAREQVRVDLMRSRHRLSKLLLRHGIRFDDGKAWTDRHRAWLAAIMLPWAAAQSTLLDCQGAIDALCHRRDSLEREIIALLPASPWATQVGRLRCLRGVDTLTAVGLCAEIGDFERFAKAEQLMNYIGLVPCESTTGQQRRLGSITKTGSGHARRLLVEAAWHYRTRPRIGKALTDRQHGQPPEAIAVAWSAQRRLHRTWTRLEARAKRRTIIAVAAARELAGFCWAITQIE

SEQ ID NO: 185058 - protein, 272 aa, unidentified
MTIKRIGLDLAKQLFQLHGVDQQDQVVLRKQLRRNQMLAYFSNLPPCLIGIEACSSAHYWARELQKLGHTVKLMAPQFVKPYVKSNKNDAKDAEAICEAVSRPTMRFVAIKTIEQQDIQALHRIRTELVHQRTAKVNQIRGFLAEYGMVVERSVEKLRKALPMLLEDGENGLSFYFRALLQGLQQDLITLNDRVSDLDKKIKLLASSNTSANRLQQIPGIGPVTATALVSAVGDGKQFKRGRDWSAWLGLTPRQHSSGGKECLLGISKRGDS

SEQ ID NO: 185059 - protein, 363 aa, unidentified
MTQKKFVGLDVHRDTIAIVVIDEQGNSLIQSVVATEVEVIRDFLIGLSGKVYVTFEVGTQSNWLYHQINPIVHKVVVCNPRHNKFLMVGNKADLIDAEKLAQLLRLDSLKEVWQHSAAQLHLKELVRTHENLVSDCVRVKNRIKAIYRSHGIKCSGTSVYGPGKREMWLTKLGTPGMGFRADTLLTELDTLTKLRKQTKLEMFRKARKHADYKRLCQIPGLGFISVSYLLAQVGTPFRFKSKRQFWKYCGFAVNTHSSADHQIVDGKLQKRIKQTSTRGLTRHYCHRLKAVFKSAAQTSSSREPFCFYYENLIAKGTRPALAQVALARKIAATTLSIWKNQSDFDGKRVAAQGIKYKQLVETQ

SEQ ID NO: 185060 - protein, 361 aa, unidentified
MLYRTSIGLDVHARSIAATAFIPETGEIVRKAFPYDAGKVAEWAKGMPQPARCVYESGPTGFDLKRKLDKAGVPCVVGAVSKMLRPSGDRVKTDRRDATFLARMLAVGNIVEVAMPTEAMEAARDLARAREDCRHDLMRARHLLSKFLLRKGIVYPGKTAWTKAHREWLGRLEFADPCERLVFGEYLESVRSLELRRARLDRAIEERAAGEDMAPAVSALRCVRGISTVTAFSIAAEIGDFSRFPDARSFMSFVGLVPSESSSGESVSRGGITRTGNIHVRTLLVEAAWQHARPLRPMSAAAMGDAAGVPADVAEAAARANRRLHSRAAHLRGRGKPASVVNAAIARELAGFVWALARMAG

SEQ ID NO: 185061 - protein, 351 aa, unidentified
MTADQDRAGEVIVGVDTHADTHVAVVIDDVGRRLGELHVATTPRGYRELVVWARQFGRLDRAGVEGGGAYGAGLVRFLRGEGVEVIEVDRPNRQRRRRKGKSDPVDAEAAARAVLAGDATTTPKDTTGVVEAVRILHLTRRSAVKAKTQAGNQMKDVILTAPDELRSQLRGLTTRQRVKVCARWRPGPVTDPLSAARRSLHDLAKRWEALHDEIKAHDADLRRLLDGLVPTLLDEAGVGTEVAAKLVIAAGENPGRLRNDASFAALCGASPVEASSGKHQRHRLNRGGNRQANNALHVVVLHRSRTCPETRAYIERRRAEGKTDREIWRCLKRALARRFHNQIKHDLHLLT

SEQ ID NO: 185062 - protein, 404 aa, unidentified
MVFVGIDWSEKHHDICIVDQEGEILAKGRVTEGIEGIARLHEIVAELAEEPEDAIVGIETDRGLLVGALVSAGYQVFAINPLSVDRYRDRHSTSGAKSDPGDAKVLADIVRTDRHNHRPVAGDSELADAIKLLARAHQSFIWERQRHVNRLRNALREFYPQALEAFGAGLAHRDAVAVLGIAPTPDLGRRLSRSKIASALTRAGRQRNAETRAQKIQAALRSEQLQAPQTAARAYGSIVSSLVTLIAGLNDQIAGLEQELKEAFKDHPDAKILLSLPGLGTVLGARVLAEFGDDRTRYLDARARKNYAGTSPITKASGRSRVVLARFARNEHLYDACHLWAFSALTKSPGARSYYDLQRGRGKTHNQALRALANRLVGILHGCLRHGQTYGESIAWPSLIEKAA

SEQ ID NO: 185063 - protein, 370 aa, unidentified
MGNRSMFVGLDVHKETIDVSIAEGDRLGEVRHYGVIKSDLEPLDKVVRALRAPDRRLHFVYEAGPCGFGIHRHLTHRGEDCVVVSPSMIPKRSGDRVKTDRRDSQMLARLHRAGELRAIYIPDATDEAMRDLVRARADAVGVGTQAKYRLKAFLLRQGRRYPGREGWTLPYRRWLTDLSFPSAAQHIALQEYRDAIGETEQRIERLTEQLRQLAPTWRWAPVVDAFQALRGVSFITAVGLVAELGDLTRFRQPRELMAYLGLVPSEHTTGPRVRRGAITKAGNPHARHLLAEAAWAYQGIPRIGRQHAYRQETLPKVVCDIAWKAQLRLTTRFRRLVAKGKAKPKVATAIARELTGFIWAIAQEVSPAPQ

SEQ ID NO: 185064 - protein, 359 aa, unidentified
MPFAGVDVHKRYSMVVVKDETGSILCRGSLQNDVACFREFFSAIDGPTKAVLEAGRDWGVIYDLLEGIGVEPVLANPVKTRAIAEAKIKTDTVDATILADLLRGDLIPVVHVPPREVRAQKNLLRQRLWLVELQTRIKNRIHNIMDRNHVKPPPVANLFGQAGRRFLDQVQLPVPDDRLLRAHLELLDLVQRQIGRSAEWIDEALSQRPEVAILRTLPGVGKILSALLALEIDDVHRFSHPGKLCAYAGLVPTTYASGGKIRHGRLLPSCNRWLRWAFVEAAWAAQRSSAYCRGYFEKIKRRKGANCAITALARRLCEITWHCLTDSRAYEERVMMPIRKELARPPSLVLGRLGTSQTD

SEQ ID NO: 185065 - protein, 320 aa, unidentified
MTQRSFCGIDVAKDRLDVMVLPEELCWSVVNDAAGWAELVAKLRGLGIAASGIEASGGYERGVVRALLAAGMSVRQINPFKLRQFAKACGVLAKNDRLDARMIALFVATLPTRSTQRYAAVERLAELVTARRQLSDDKVAAENASRLFEDAALRRLYGGRIARLAADIALLDKRLAEIVAGDAMLARRYALLVSMPGVGPVLAVTLLALLPELGQMNRKQVAALVGVAPYDFDSGKLKGMRCIWGGRAPVRRVLYMAALIGCRCNPQLRAFHDRLATAGKKAKVVLVAVMRKIITILNAMLRENAPWVERSIGRHILPAA

SEQ ID NO: 185066 - protein, 342 aa, unidentified
MTNMHYIGFDIHKKTIAFCEKTVDGTIVEQNTIPSTRNAIKIWASQRTTPWIGAMEATLFTGWIYDSLRPYATELKVGHPAMLKALAVAKNKNDRSDAERLADLLRCNLLFESYMAPEYIRELRRILRFRNLMVREATRMKNKTSGILMEVGAQYNKKKLHGQRYFDELLDSLDYIPESVTELLRFCRINTTHFTTMQKQLTRGLLKNPDISERIKLLMTIPGVGEITALTWVLEIGEVERFTQIRRAISYCGLCSAQSESAGVEKRGPISKKRNKHLQTVLVEAAKLAPRWNSQLAEVYDKEFATGNRNSATLAVARKLVAYMLAVDKNQKAFEFREADAA

SEQ ID NO: 185067 - protein, 354 aa, unidentified
MLAELVDHVIGIDPDRDWITAAIVDARTTGVIATERFAANSDGYNEAFDWADAHTEAGERAWAVEGTASYGRGLTAALTRSGEWVIEFDRPHQRATKDGAKTDELDAVRAAREVLGRKRLHQPRVHDGHREALRVHVVTRAGAVRARTAAINELKALLVTSDDSLRSELRGLTTRALVKRCAAMRDSKQRSVAELSTRSTLRCLARRVQHLTDEIKTHDSAIRRLLQDVAPQLTDQPGIGHVTAAAFYIAWSHPGRCRNEAAFARLGGAAPLPATSGQEQTRHRLNRYGDRQLNHALYIVAMTRSRCHPDTIAYRARRRAEGKTDREITRCVKRYIARQVWRLLEHPNAPEITT

SEQ ID NO: 185068 - protein, 395 aa, unidentified
MLHLELERAVHKKVIVVTILVEQSDRAVKEETREYGTTYKACEGLANWLLSNRIQLSVMESTGIYWKNIYAALEKAGLRVSVVNARHVKQVPGRKTDVKDSQWLARLARYGLVKNSFIPPKDLRELRIIARYRTKLVGTLAGEKNRLHKTLDDAGVRLGNVVSDISGVTATEIIAGLIEGQPISDLLACTRGALKKKKDELQAELEGELSARHLFLLQKLQAHIAYLHNELKELDEYLFTAMQPYQKQWEILQTIPGIDAVGAALLIIEIGVDMQQFGSREQFCSWAGMCPGNNESAGKKKSGKTPKGSKQLRYILCEAANAAAKTNCQFQHKYKSIMIRRGHKKAIVAVGHKMLRVIFSRLKEGEVYHDPKVNYEELVVKKNASRWIRMLKKYQ

SEQ ID NO: 185069 - protein, 369 aa, unidentified
MSLQTKTLLMALELSNKNWKVCFGDGSKQRERAMPARDIKRLMREIRGAKEKLGLPETARVVSCYEAGRDGFWIHRMLEENGICNYVMDPSSIEVPRRARQRKTDRLDARKLLKLLIRFELWKEDDSFSSVCIPSEEQESQLRLHRERERLVKERTGHRARIKSLCILHGISSSDVLRKKVDSLRDWKGNKLPPQWRMEVAREKDRLTLVNEQLKAIEQTQEEALKEPDTKAVEQAKKLMALKSIGMQSSWTLSHECFGWRHFANRKHLGSFAGLTGTPFDSGETLREQGISKAGNRRVRTTMIELAWMWRRWQPDSALTRWFEERYVCRGSKRSRRKGIVALARKLLIALWKYLEFGIVPEGAVLKTV

SEQ ID NO: 185070 - protein, 370 aa, unidentified
MSQSSTLFIGMDVHKDTMAVAYVAQDQGAEVTSIGTIGTRQCDIDQLIRKMQSKATHLIFVYEAGPCGYWLYRYLGKKDYDCWVVAPSLIPKKAGDRVKTDRRDAIQLARLARSGDLTVVYVPQVQDEAIRDLTRAREDAISDCKDAKFRLKAFLLRHDIRYTGRANWGPAHLRWLSEVVCPTPTQQMVFQEDVRAVQEHTERLQRLEQALHEHVQAWRLYPVVEALQALRGVQCTVAVTLIAAMGDLTRFDTPRELMQFLGLTPSEYSSGAHRRQGAMTKAGNTHARRVLVEGAWAYRYPAKVSRHVQLRLETQPKIIQDISWKAQVRLCNRYRRLVARGTHANIVTVAIARELAGFMWAIAREVPIIP

SEQ ID NO: 185071 - protein, 336 aa, unidentified
MLYVGVDLHRKASQVAVVDEQGKLIFNRHVPSQREDLLRVFGEAGPIESMQVAYEATYGWGWFADLLEDVGIPAHMAHPRANKAIASARVKNDAVDAKTLAQLLRTGLLPESWIAPPETREARRLVRMRTAMVRIRSRLKNQIHALLADRGLHPEGSDFFAGDLTRMTKQLPAVTKQRAEANLRLIEELDKEVDLADSHIHKLFARDEGVRRLLPIPGVGIITAAIVVAEVGEITRFPTARQFSSWCGLTPTEHSSAENIRRGHISKQGSRWLRWVLVEAACHAYRNRELSTFEAGIASRCGDKIARVALARRIATLCYHALRSPQGCRAFPARTR

SEQ ID NO: 185072 - protein, 423 aa, unidentified
MEVMHKCCAGLDVHKNVIVACVRLTLGRKVERECRTFDTTTTGLLALLSWLSASGCTHVAMEATGVYWKPVWNILSDGTFELIVANAAHIKNVPGRKTDMNDAMWIADLVACGLIRASFVPDERTQELRSLLRTRKQMTREQTSHIQRMQRTLEEGNIKLDSVISDIVGVSGRCMIEAMIAGETSPVRLADLAHRRIRVPREALCEALRGRVTDHHRFLLRLHLRQYDALAAAIAEIDQQVEVLIEDMDEQIEAGQATFRALIMLLCSIPGVGTLAAVVILSEIGRDMSRFPTAGHLLAWAGLCPGQNESAGKRKSSRLRKGAPWLKTLLIQCAWAASRRQDSYYKAQFSRLKARRGPKKAICAVAASILTAIYHMLKDGTGHRDLGASYFDRRSIDAKAKRLVSQLTKLGFQVQLQQIAEAA

SEQ ID NO: 185073 - protein, 376 aa, unidentified
MIEKLRFLGLDVHAETITVAVAEADGEVRSLGTIANREESIRRLIRKLGPVEHLRACYEAGPTGFVLYWQLTQLGVKCDVVAPSLVPKKPGDKVKTDRRDALKLARSHRSGDLTAVWVPDEASEALRDLVRQREAAKQDQLRAKHRLTKFLLRTGQRPPLGVKTWTERYVEWVQQVRYTHPAQEATLLDCLNEVQHMEERVKRLEQSIVEVIQLAPVPMQDVVRGLQALRGIAHISAVTIAVELGNITSRFERARDLMGYSGAFPSEDSSGERIRRGGITKSGNAHLRRIVVESAWSYRHRPAIGARLRKRQEGLPAEITEIAWKAQNRLHKRYMTLMARGKEQRETMTAVARELLGFIWAIGIKAEASCKQQLAA

SEQ ID NO: 185074 - protein, 318 aa, unidentified
MNTLPENSRVVHLGVDVAKHELVLDLQGSIRRFANTPKGIAELINAISSRTDFPPHLVCEATGGYERALTVAALQRGVPISVVQPQRVRHFAKAIGLHGKSDPLDAGLLSRYGSQVLPLPLMPKDSARQRLDALLRARTELLDSMHRELNRSENDVSPVVIRIRKDLVKRFEKHLATLDDEIAKLVAGDSALARADAMLREVKGVGPQTSRTLLAFLPELGRIGRRAIAALVGLAPYDRDSGKTKGRRFIQGGRAHVRQVLHMAAVVAARHNPVLKAFYQRLREAGKPFKVAIVAVTRKLLLHLNTRMAIFLGNPLVD

SEQ ID NO: 185075 - protein, 412 aa, unidentified
MDRFVQRCAGLDVHKDTVAATVRVPGEDGQRLQETRTFSTTTRELLTLVDWLDSYGVTLVGMESTGCYWKPVYYVLEERFECWLLNAQHLRNVPGRKTDVADSAWICQLVEHGLVRASFVPPRPIRELRDLTRYRKAQIEERSREVQRLDKVLQDAGIKLSSVASETLGVSVRRMLDALVAGTHDPKVLAELARGRLRRKLPALREALTGRFRSEHHGLLVAQILAHIDYLDETIALLSEQVEQVIAPFSTERELLMTIPGVARLGAEVLIAEIGVDMRIFPSDAHLASWAGQCPGNHESAGKRRSGRPRKGSKWLHTTLTESAKSASRSKGTYLSAQYGRLRGRRGPGKATGALRHSILIAAYHILERKVPYQELGADYFDQRRSLEQRTKRLVRQLQQLGHTVTLEPLAA

SEQ ID NO: 185076 - protein, 397 aa, unidentified
MPWLGCSATVSWIALARGWGCRHAIQGRPQVLSDATCIGLDVHARSVRAAAIDPLSGVIREAALGGGDGEVLDFIARVGDARGVRVAYEAGPTGFHLARTLEGEGIECVVAAPSKLLRASGDRIKTDRRDALHLAQMLAAGQVVGVRVPTVEEESARDLVRARDDVRRELMAARHRLSKLLLRRGFLYEGKTTWGVAHRAWLGTIRREGLAGAGWATLQTFDESWETVCALEARRGRLDEGIARLAEESSFAEGVKRLSCLRGISTLTAVGLAVEVGDWQRFTPTSIGSYLGLVPSEHSSGSTRHQGGLTRTGNAHARRLLVEAAWHHLPTYHPSAALQARWDKAPRAVADHAGRGNRRLHKRWLGFKARKKTPTVANCAIARELAGWCQVLVTMDA

SEQ ID NO: 185077 - protein, 355 aa, unidentified
MSQEKYIGMDVHQATVSAAVRDRNGNLLMECILETKADTLLEFVQGLHGTLSLAFEEGTLAAWLHDLLKPHVNRVVVCDSRKAALLRDGNKNDRIDARHLSELLRTNQLKPVYHGEHGLRTLKELGRSYLTVSKEMTRTMNRIKSLYRNWAIPCAGTTVYAPRHRREWLAKIAEPGARVRAEHLYEQLDHLQPIRVRARRELLQESNKHDAVKRLRQIPSIGQIRAALLVALLQTPHRFRSKRQIWAYSGFAIETHDSGEYRYVRGKLQRNRERITVRGLNRNHNPDLKNIFKGAAISASNRPGPLQDFYETRVAMGMRPTMARLTLARKIAAITLTLWKKGANFDPQQLSRQAA

SEQ ID NO: 185078 - protein, 449 aa, unidentified
MDKKAKTKSNFQLAIIHPHSAAIDIGSMLMTVAYTDKDGQQQLMETDGFTESLGELVKTLKSAGITDVAMEATGVYWMALYELMEQQGLTVTLVNPRHFKNVDAQKTDVKDSQWLHQLHAHGLLRASHIAPDLYRELRSYVHERSVLQKQKSDTLNRIHKILTKMNIKVQHLISDIEGVSGMQLLRGIAGGITDAEELLSLIDIRKLKASKEDLLKSLNGVYKKQYILVLQKLLKLQDFFIAQMKEYELHIEETLQEMLPEDKSNNKPQIPVKTRHVRKNQYNINLKEYFRHIVQTDLTQIDGLDEISVLEIICVTGIDMSKWKTAEHFTSWLNLSPRPKITGGKIFGYSRRFTNNNATQAFRTAAQSLWNHKGALGKLYRRLAAQKGSAKAIKAIARKLAVIFYNMIKNKTQFDPGKMEIDQERQKRKQIARLEKEAIKHGYILQKAA

SEQ ID NO: 185079 - protein, 458 aa, unidentified
MKAKRTSAKNHSGMLTVHANAAAIDVGATMHMAAVGADCTSDPVRSFGTFTGDLHRLADWFAECGVKTVVMESTGVYWIPIFELLNERGVEVFLVNARDAKHVPGRKTDVSDAQWLQRLHSHGLLRASFRPKGEIAELRAYIRQRERLLDYAASHIQHMQKALTEMNLQLHHVVSDITGATGMRIIRAIIAGERDPTVLALLRDTRCHAGVDIIEKALTGYYRAEHLFGLEQALALYDEYQQKVSACDMRIEAVLMSLASLRGHRGEPLGSPRRRMPRQANGPAFDVREALYALLGKDLTQIHGLGPYLALKLVAECGDDLSAWPSAKHFTSWLCLAPSNKISGGKVLSSQTRRSGSRVAALLRLAAVTVGRTETALGAFYRRLSARIGKAKAVTATARKIAVLFYNALRHGMDYVDPGASYYETRYRERVICNLHRRAKAFGFILQPNMITSEVAVS

SEQ ID NO: 185080 - protein, 403 aa, unidentified
MISVGVDVSKGKSTICILKPYGEVIMSPKDYEHTQSDLKKLSDQLDDFEEEIHVTMESTGNYHLPIATYLKKKDFDVRIINPLEMKRYRCQGLRNPKTDRIDAVMIAQYGIDFWFRPFRDYVDDNERIELKALGMQYHKTMKTRKDRCLVLESIIDRTLPGIGGILNDYDKHTGKDKKSDFVYDFYHAEKITVHSEKRFCDRYASWSKKKGYRYSEDEARQLYSIAKDSIPTLPPSENTKLIVQDAVRILREVDASLYDILTRMNEIAKSLPEYVTVMEMKGVGISIGPRLIAEIGDPRRFHSAKALIAYAGIDAPPYQSGRFTGTERHMSKRGSRIMRKLGFELMDSINKHQKSYAGDPVCEYFLAKRAEGKMCRVAMFAAYNKFLRIYHSRVSNVLNESVK

SEQ ID NO: 185081 - protein, 372 aa, unidentified
MKSVCGLDVHKDSVYLCILSEFGELIEKVFGVLTFQLEEMRDLMLHHHVVDVSMESTSVYWIPIWRVLSPHFKLNLANPYFIKQLPGRKSDVKDAQWIAECTMKELIRGSFVPPEIIQQLRQYDRRIFDLNEEIIRKLSKLDAVLQRCNIRLSNYVSNVDSKSYKAVVRAISQGITGPEELVKLIHGRIIKHHGIDVITASLKGVVSLAEIDMISQLRDELDMAEAHKEKCQARMLEICEREFPEELKRLQTIPGIKERAATSLIAEIGTDMNKFETANHLASWSGLKPRNDESNKKIKSRSITHGNVYLRKTIIECAWAASRTKDCFFSRFSYHQTQVRKKNKMKVLVAVARKMLIAVWHVCTPYFNYTDV

SEQ ID NO: 185082 - protein, 415 aa, unidentified
MEATVERCAGLDIHQASVVACVLVGPPGCKPRKETRSFGTSTRELEGLRAWLEGLGVTHVGMESTGVYWKPVHAVLEGGFELIVGNAHHIEAVPGRKTDVKDAEWLADLVRHGLIKPSFVPPPPIRELRDLVRLRRSLTEARSTERDRTLKLLETANIKLASVASEVFGVSGMAMLRALVEGEAAPAEMAELARGKLRSKRERLTLALEGRLTEHHRYVLAFHLRRLAAIEEDLRALDARIEAKAEPFQAQRRLLQEIPGVDALVAVTIIAEVGVDMSVFGNAKRLAAWAGVCPGNHQSAGKRRSGATRRGNVHLKTALVTAAVSGSRRRGSYYRDKYHRLKARRGRLRAAVAIAHKILVAAYHMLAGGVPFRELGEAFLDQQARQRNVRHLLNRLNHLGYDVLLQPRAVEAAGP

SEQ ID NO: 185083 - protein, 339 aa, unidentified
MKLYAAFDLHSSNNYLAVIDEEGKRQMQKKLPNDAEAIVMALDPYRKKIAGIAVESTYNWYWLVDLLMAKGYDMHLANPAAIQKYKGLKHADDQHDANWLAEMLRLDILPEGYIYPKEGRSLRDLLRKRGHLVRLRTSLIISLQHIITRNCGVMVNVNDVKRLKEDRISPLLDGNEDILMAGSVSKETIDYLTRKIRSIERIIEGKIELSSPYRQLLSIPGVGKILALTIMLETGPIGRFQKVGNYVSYCRKVSSKWVSNGKSKGKGNERNGNRYLAWAYSEASELARRFDSQARSYYQRKAQKTNRMVAHQALAHKLARAAYFVMRDNVPFIAEKLFA

SEQ ID NO: 185084 - protein, 343 aa, unidentified
MDYFAGLDVSVKETSVCIVDNVGRLVREVKVASEPEALLQVLMTPGQPFKRIGLEAGPLSQWLFSALAEAGLPVICVETRHMRAVLKAQINKTDRNDARGMAQMMRVGLYRPVHVKTLRSQKIRMLLTHRKLLQSKAIAIDNDLRATLRNFGLKVGMVGRTKFEARIKELVDGLPDLAILVEPLLIVRRVLREQIGILHRRLLVIVRDDDVCRRLMTVPGVGPVVALTYRATVDVPARFRNSKAVGAVFGLTPSKYQSGEVNRTGAISRCGDEMMRAMLYEAAQIVLVRSTKWSWLKAWAMKIARHRGMKKAIVALARRLAVIMHRIWVDGTEFRWTREIAAA

SEQ ID NO: 185085 - protein, 408 aa, unidentified
MKALHRRCAGLDVHQQEIVACRRIVAGRKVQTEVGRFSTTTQGLLELADWLEDGKVTHVAMEATGVYWKPVWHVLHGRFTLILANAAHIRNVPGRKSDVNDATWIAELLAHGLIRASFVPPQPIQELRDLTRTRKELTREIVRHTQRIHAVLEEANIKLASVITDIVGFSGRRMLKAIVAGETDARRLAELGSSRLAAPREALVAALDGRIRDHHRFLIGQHLKTIEQIETTIGEFDARIEAALAPFRDAVERLKGVPGISQTAAQIVIAEIGADMSQFPSADHVISWAGLCPRLDESAGKRRSTRVRKGATWLKPVLVQSALAAGRKKNSSFKTRYHALKGRVGPKKAAVAVAANLLRVVYHMLKDGTCYHDLGEGYRRPHNPARAAANLANRIRALGYQVDISRAA

SEQ ID NO: 185086 - protein, 411 aa, unidentified
MHYFVGIDIAKSFHVACVIDADNKVIKKSFKFKNDEKGFNELILLLNSIDEVATFSIGMEATGIFFENLYLYLNEQGYNVILLNPYQTNKFRELDRMKKVKNDNIDALMIAALIKSGRYSKAYVSEDTYQSIKSLYRHKHNLLEEIKKHKRQISTLLAVVFPEIKQVIKDPFNVTGLTLLEKYPTAKHYKHSSVERILKTFRGIKGNNFNEQKAFKLLELAKHSIYQGNGANERAYVIRSHIRVIKLLQTELKELENEMLKLFNQTPQLEDNEEQEVMDIIDNLRTIPGVSDKTIFALISECGDLSRFKNNSHFIGYLGLYPTLEQSGNKLTYGPIAKRGAKLAKKALYQAAIAAIRHNEQLAKLYRDKVSQGRAKKEAVVIVARKLAHIILAIYKNNVAYNPQRVFQAST

SEQ ID NO: 185087 - protein, 365 aa, unidentified
MLYLGIDQHHKQITVSIRGDEGTVVLRRQVSTQPDKVRAFLEDVRRESGEEGFMAIVEVCGFNDWLMELLPEFGCRETVLIHPDKRSRRKTDRRDASKLSELLWLNAQRLRSGQKPQGLRRVVPPSGDDQENRQLTSLRKRIGQQRTRTINKIKNILRRRNLTWQQPTKTFQTHGVRQWLKTIELAEIDRLEMDHLLAQWALWEKQIEELEKRIGARFPLSQTAQQLATVPGISAYSALSIASRIGSVERFAGPRSLANYFGLTPGCRNSGEATDRLGSITKEGSPMVRFIVGQLVLHVLKSDRPMREWYVRIRRRRGSKIARVAVMRRLVTIFWHMLRHQESYQRGGPRRRKMAQEQRKTVSST

SEQ ID NO: 185088 - protein, 420 aa, unidentified
MRYIGLNVHKHFIEVCITDRKGKILERGKVNCQREVLLEFATKKLRKHDRVALEATTNTWAVVDLIRPHVKQVVVGNPMKTRAITEAKIKTDKVDAEVLAHLLRCDYLPSVWQPDEPTQTRRALLTHRNGLMSRRGRHMNRVQSMLARLMIKPPCKYLWSKTGVAWLEALELSPVDRLMLDSQLRQITQVNQELEIVDQHLVEIARTDSRARLLMTLPGVNHVVAVGLLAAIGDIERFCDGNHAASYLGLVPSTRQSGNKCYHGIITKMGYPHCRWLLTQACQHISRHTGPLRAFYRRLVKRKPRQVAIMALARKLVTIAWQMLKQNEPYRYAKPMLMAKKFTDLDLKYRQEQRRTPSAARAKAGDGLTAVYDEIGFTDSLSLDQVPDGERRMLIEKDVMMFVEELYRPVKKNKSTQSDK

SEQ ID NO: 185089 - protein, 317 aa, unidentified
MALQRIFVGIDVSKDWLDLWLEPPKRFERVSNDAAGWAAILGLLNALGAAAGLVVAFEATGGYERGLRQVLLEAGFEVRRLNPLRVRLYAKSLGRNAKNDRIDARVIARYAEAADTMPETLDPARERLAELVSHRRRLIDERVALGNQTAILGCRLLQTQNRKRLALIARHIEQTDALIREAVGQLPSLLAKLELLKTLKGVKDVTAIALLALLPELGRITRRAVAALVGLAPFDHDSGKLKGARAIAGGRTPVRTALYMAARAAARSKSPLGDFYRRLIAAGKTPKVATVALMRKMLVTLNAMVRDNQTWKHAKPC

SEQ ID NO: 185090 - protein, 350 aa, unidentified
MTDRKPIIIGIDTHKYSHVAVAIDLRGTRQAALSIPANTKGYLELERWSQSLGDVRAFGIEGTGSYGAGLSRSLLSQGHNVVEVTRPNRQLRYTHGKTDSLDAEGAARSVLSGQATARPKTQTGSSEMIRHLKIARDTAVKSRSQAMVTLKTLIINAPSDLRDALDQINGKVALIRHIAGFRPGDIQNTLASAKAAMRALARRWLWLHEAITTHDKELERLVGERAPELLASHGIATLTVAEMLILVGDDPTRIRSEAAFAKLCGVCPIPASSGKTHRFRLNRGGNRQANAALYRVAIVRMRSHEPTLAYVRKRTKDGKSKSEIIRCLKRYIIREIYGQLCLPKSVQIAA

SEQ ID NO: 185091 - protein, 342 aa, unidentified
MSEVYAGRQIVGMDLHRRRSVLVRMTEAGERLETVRISNDPEYLRAVMARAGEAPEVVLEATYGWYWAADVLAELGARVHLAHPLGVKMFSYRRVKNDERDAADLADLLRMGRLPEAWIAPPATRELRELVRHRAKLVALRSSLKCQIHAVLAACGVIVPMTDLFGAGGQGLLERVALAPAFQARLDSARRLIDALDFEVELFTKLASGRLRGHPGYTAIQTISGAGPVLAAVFVAEIGEVSRFRRAAQLASWAGLTPKHHESDTTVHRGAITKQGRRLVRWAAVEAIQRTDKHGRLGQVRDRIGARRGNNIGKVAAARELIELVYYGLRDGEIRCLNHRSA

SEQ ID NO: 185092 - protein, 327 aa, unidentified
MSIIGIDVSKAKLDTLWIRDLEAMKVKSKAQPNTPKGHQALVDWAIMQTGDDIGELHFVMEATGVYHESLAYMLHEAGARVSVINPARIKEYGKSLGVQSKNDKKDSVVIARFGMTQSPALWEPEPLEIRQLKALIARCDAVKQDIQREVNRLEKAVVSDASADVRESIETVHAQLEAEKERLESLIDDHLDNHPDLKNDRELLESIPGVGPVMARQMVAVIRSRSFVRASQCAAFLGLVPIENQSGTSVYSPPRLSKRGDARVRGKLYMAAIVATRHNPDIRHQYERLLKNGKAKMSAIGAAMRKLVQICFGVLKHQRPYQPQLAC

SEQ ID NO: 185093 - protein, 380 aa, unidentified
MPEAVIGLDVGKSSHWACVATRDGEVLLSAPVANREDDLDSLFGRFPDALVVVDQSRNIGALALARARAAGMSAAYLPGLAAHGAARLFAGDAKTDERDAMVIAKTALGIPDALLPVGDPGPTIAAARALAAQRNFLTCENTRNKNRLRSILLESCPAFEALVDLSDGPQLRLMASLGGAWSVADAGPRRAAALTRGAARGKIEALVRSTASSTRPDASVVAAEDRAVKLLARRISENSAEIEAITAEISALLEGDDTYRCLLTVPGIGPKTASELAISIDIEDFPSHDRLASYCGLAPRNRQSGTSISSVTASRQGNKRLKNLLIFSCNCLTRTKGRWGDYYTRCRERGMSHGKALKALARKRLKVIYAVMRDRVPYAA

SEQ ID NO: 185094 - protein, 321 aa, unidentified
MQEPALFIGVDVSKAELVISQGPEHRPRSVRNDAACIANWLAEVPPGALIAMESTGRYHGLLAHLASQADLKVYVLNARDVYFYARALGTRAKTDGVDAGVIARYLAEHHEHLHPWQPASSVQQRLQDLLTRRAQLATQRSALKQIVSGVDVRDIDASGVYEALDALLGAMDEKVQELIASDARLHSGCQRLRTIIGIGAQTSALLATLFSRFEFANADALVAYCGLDPRPNDSGTKHGRRRLSKKGPSLLRRQIYLVGFSASHSKALRPLYEAIRAKGFATTQAFIILGRKLLRVAFAVWKGTESFDPQRLLPKNDLQKT

SEQ ID NO: 185095 - protein, 312 aa, unidentified
MPDQAEPNYVGLDIAKDQLDYCLNEAAEGRCANTPDGRAQLIKKLQCLRHPRVICEASGGYEKIVVAELLQAGLEVCVVQPARVRALAQAEGLLAKTDRIDARLLRRYGQTVKLRLAMPTDPAIATLRELLEHRRQLTTQLSEVAGRMAVAGRTLCKLLQRQKVFLEQQIEEVEKMIEEHIDQDPDLHSKSERLQQIKGVGPVLSATILAYVPELGAIESAQLSALIGVAPHPKDSGGHRAPRHIRGGRHQVRHVLYMAAVCASRCNPILAAFYQRLRANGKPATVCLVAVMRKMVCLMNRLIQDPNFALAH

SEQ ID NO: 185096 - protein, 428 aa, unidentified
MNQEDRSRLEDFRQFRKEVRGSSEYLLVGIDVAKDKHHAFFGTATGKTLFRRLVFENSLEGFRKLLAQAEAMKVQEGLKKVVFGMEPTGNYHKPLGEHLIRCGQGVVLVSGVAAHENRKTLDGRWDTNDTRDAANVADLVSQGKCLFYEFPVGALQDLRDLLSLKRRLKRQEHGYRVRIRNHLLAKYFPELDRYYEQSESTALAIVRWCLDPSEIAGLEYRKFVQMVSSIRGRSFQEKRLQTIWKLAVDSVGCEAGATVEFEAQVMVEGLKQIRESIGQIDEKIHEVCCQFPEYEFLLSIPGFGRDVSSKVLGAIGDPYRFQNGRQVVKMAGFDLSAERSGKSSERAIPVISKKGKADLRYGLYQAALIASVRNPDFIVYYTDQLRGREREPGIKIKMRVKLAAKLLLMAWTLMKKKEPFHPDYLSIA

SEQ ID NO: 185097 - protein, 340 aa, unidentified
MKQYVGLDVSQRETAVCVVNETGQVIFEGKAKSNPGALTDLLSKHAPHAERIGFETGAMASWLWHELRRVELPVVCIDARHAHAALSVRMNKSDQNDARGLAELVRVGWYREVKVKSEESQKIRAILVARSRLVSMRRDIENQVRSLIKECGLLFPRAIGQQFRNQVSELLGVDHLLLSVISPLLSIHENVCQQQVRQRGPPVGKAGRHDASPDDGPGVGVVTALTFRHTIDDPSRFRSASTVGAYLGLTPRRSQSGETDTNGKISRWGDRLLRTYLFEAATVLLYRTKKWSSLKAWGMKLAKRIGMKKAKVAIARKIAVILHCIWVDGTSFDWGQPKPI

SEQ ID NO: 185098 - protein, 345 aa, unidentified
MKILKQVLGIDVAQKELVVSLGRMHEDLTAEIYAGKVFANTEKGFSALLEWVERSTDSNLPVRFVMEATGVYHESFAYFLDERLRQVSIVLPNKINHYFKTLDVKTVTDYTAAEAIARFGLERKLTVWKRPNAVFKNLKQLTRERDQIVDARTVTKNQLHAESCEAEPSKNTIKRLNALIAFLDKQEKEIMQEITAVVKKDQRASDTIKLLTSIPGVGVLTAAIVLAETNGFELIRNKRQLTSYAGLDVREKQSGTSIKGKPRISKRGNRYLRKAMHLPALSAIQCNERFKTVFARLVSRHGIKMKAAVAVQRKMLELMYILYKTNTSFDAEFTREIKKEKQLLQ

SEQ ID NO: 185099 - protein, 354 aa, unidentified
MNATQVFEKRKIAVAIGIDLAKDHCDVVAYNADNKICFTKANWAYPHLMEWLANAQPAVVLMESCKGCHVRARDIADLGHDTRLVKGADVKALRNVCQKNDIRDADYIVRLLYVPGTKFVFVKNQRQQSLQFLQNEYKSFQELRIQVGNQIHAGLEEFGCPAPKSKKFIQSRMMAHLEKNAELIPDEVMSSFLRRRDMWLNLFEQEEEAKKRMEEIAKTDDDAKRIMTVPGVGAQTAVGMLVHIGGDIGRFKNSGQFAASIGLVPKQNSTGGNTTLNGITKCGPKRLRANLVQCGQVILMHADKLKGNFGDWVRKMRDSGKKRGVIACAIAAKLARIIYRLMKDKVDYTPVPSR

SEQ ID NO: 185100 - protein, 343 aa, unidentified
MYYIGLDVHKKTISYCVKDAAGCVHQEGKIGSTRRELDAWIKTLPQPRTMAMEATIFTGWIYDHLLPHAEKVKVAHPLMLRAIAAAKKKNDRIDAGKIADCLRCDFLPECHMASTEIRNRRRILRYRGLVQRQAVQMKNRVSGLLMETGVSYNKLRLHRMGYFAELMATNEEVSENIRTRLSLCREHIDRSIMLDTALLRSLERDPLLADRLRRLRTIPGVGPITALTWALEVGDTSRFRSIKQAISYCGLCSAEKSSADKVMRTPISKQRNKHIQQVLVEAARLAPRYSEELALLYERERQRGNGNRATLAVARKMVALMLAVERRNTDFVPAGEFRRSAAA

SEQ ID NO: 185101 - protein, 338 aa, unidentified
MALYCGIDLHSRDCWLAILDGQLKVIQESKVGNDIEALLQVLEPYREDMEGVAVESTFNWYWLVDGLGDAGYHMHLVNTWAVKQWEGLKYSDDRHDARWLAHLLALGILPEGYIYPKHERPVRDLLRRRAFLVRKRTSFLLAMRGAFECRTGLRTTSNEVKEWTTEDVESYLDDPTAALGITCLLEPMKALTDQIRIIEKEAYKRARLRDEFAPLLTVWGVGKVLALSMMYEVGEIARFRKVGNFASYCRLVKSARLSAGKRKGSGNPRNGNPYLSWAFSEAAHYAVRYYPPAKKYFQRKMSKTNGIIAIRALAHKLARAAYYVMKDQVDFDPDKVFG

SEQ ID NO: 185102 - protein, 400 aa, unidentified
MISVGIDVSKGKSTVCLLKPYGEIVCKPFEVQHTEEDLEELANLLQKLDGEIKIVMEATGIYHLPILTFLLEKGFFISVINPFMMKKFSRNNSLRGAKNDRLDSVMIASYGIEKWYKLKKYEVNARIYTELRLLGRQYHRFMQTHVKHVQELTHLLDYTAPGLKTMFNSWTEHSNRDKLSDFVEKFWHFDLITSLSREEFVEQYLLWAKEKKYHQSQSKAEKVYDLASNGIPTLSSHTPSTQMMIQGAINVLRIVNNSLYHILSRMKELAKSLPEYATVRSMGGVGDALAPQLIAEIGDVRRLHNGHALVALAGIDPPPYESGQFVGTHRKISKRGSPILRKIGFEVMRVLKSHKEPEDNAVYNYILKKEAEGKNKKLSKIAGLNKFLRIYYARVMEVYR

SEQ ID NO: 185103 - protein, 351 aa, unidentified
MNYVGVDIHKRYSVLVAVDERGRELGRSRSNGNTAFGFAQFFGGLEGKSKVVLEACWNWGRIYDLLSEIGQVEEVVLAHPLKTRLIADAQIKTDGLDAYALATLLRGDLIARAHVPAKPTRQRKEVLRQRLYWARLRTRIRNRIHALIDRQRELKMPQCSDLFGRKGLSALNKLVLSEPDATLLREELGLLELIQGQIKAQEARIVEFNSNDEMTLRLQSIPGMGKILAAVAAAEIDSIERFSSAAKLCVYAGLVPRTHASGGKVYQSHLLKSRNKWLQWAFIEAAWVAVGCSAYFGGLYRQHRARGKNANIAITIIARRMCQICWTLLKERRDFIETFPGRSAVRLTAAA

SEQ ID NO: 185104 - protein, 402 aa, unidentified
MFYVGIDVGKRHHEVGVLDDQGKPIGKTLRFANSKTGSEKLLEFINQHKLTPDNSVIGIEATGHYWLSIFSFVHKLGFKTTVFNPLQSDALRHFYIRKTKTDVKDAYLIAQVIRIDSPDETPFIEEDLLRLRHLERLRYSFVDQASDIKRKVISLLDQVFPEYEQLFSDTFGKSSTELLMNYTLPEEILEVNTKKLVNLLMKASNGRFGESRALNKANQIRESALNTFGITIGTDVFKLQIQLLLEQIQLIEKHLLEIEQIMIEISNRQEHFLTTITGISDVTACVVLGEIGSINRFERPEQLVAYAGLDASVHQSGDFNSQNTRMSKRGSPYLRRAIWQAAFVASYHDPALSLHYQRLRKRGKAHGTAIGAVARKLTHIIFAILRDNKPYEPRPQPDPNTT

SEQ ID NO: 185105 - protein, 338 aa, unidentified
MKLYGGIDLHSNNSVVALLDEEDRVVYRQRLGNDAALVLESLAPYREAITGLVVESTYNWYWLVDALMDAGYRVHLANTAAIAQYSGLKYSDDDSDAAWLAKLLRLGLLPEGYIYPKAQRAVRDLLRRRSRLVQQHTANVLAVQNLFSRNRGRSLSANAIRRLTPETVGELLPDANLALAVQSTLLAMRGQEAAIDLLEREACAQVRGRPAYRHLLSTSGIGQVLGLTILLETGPIERFARVGNYASYCRLVGSERLSNGKRKGRGNTKSGNKYLAWAYLEAANFAVRYNPAIKRYYQRKRAKTNGVVAIKTVAHKLARACYYMLSEGTDFDVDRAFA

SEQ ID NO: 185106 - protein, 353 aa, unidentified
MKRGKYMGMDVHQAMTVVAVMDADGKVVLETMVPTEASAIIGLVQLISGPVHVTFEETTQAEWLYDAVRSFATEVIVCDPRHNKLLSEGSKGDKIDARKLADLLRTGMLRRVYHGNEGSRRLKQLVRGYEALSEDTKRTMVRIKAIFRGRGICTPGRQVYQPQHREQWLQLLTEPGLRERVRWLYEELDHLKPLRRQAKNAMLAESRKHRAMKLLRTIPQLGPIRAALIVATIDTPYRFRTRHQLWSYSGLAVVTHMSSEYEMKDGRVVRSRKPIATRGLNRNCNRRMKEVFIGAATAGSRTEPYRSYLQALEQRGIRREMARLTLSRKIAAVALTIWKKGETFDPKKLNWTT

SEQ ID NO: 185107 - protein, 342 aa, unidentified
MQIASVGIDLGKTTFHLVALDAHSKIVAKSKFSRKQLLAYTANLPTSLIGIEACSGAHFIGAALRDQGHDVRLIPAQFVKPFLKSNKNDFLDAEAIAEAVTRQNMRFVPIKTDDQLDLQALHRVRDRLVHRRTALINQIRGFLLERGIAFAKGPAKLRQQMSLLIEDAEQNLTPRMRSLLEHLWHEWKSLNEEVERVSDEIDVIADEDAACQRLRQIPGVGPLVSTATIAAIGNGAAFRKGREFAAWLGLIPRQHSTGGKPRLLGISKRGSIYLRRMFIHGARAMLLRVKYDTGRLGQWAHELEKRVPRNKAVVAVANKLARIVWAVLSSGHEYRNAEIAAA

SEQ ID NO: 185108 - protein, 340 aa, unidentified
MKSTTMGIDIAKNVFEVYVEDQAGQMVDRRRLSRKKMRPWFANRPPALVGMEACGGAHYWGRELAKLGHTVRLIAPQYVKPWVQTNKSDRADARAICRAVQEPGMRFVRLAHEEQQAVQACHRVRSRFIDNRTALVNQIRGILLEYGVAVPQGVGSIRKALPALLAEERWSALMRQFLTEQQGELLYWDTKIEAVTKQIKQTSATQPVCHRLEKVRGIGPLGASALWLKAAGQSYQNGRHLAAALGLVPTHTGTGGKVRLGGISKRGDRYLRRLLIHGARAVVAQVGEKQDRLSRWLRSLVARRGMNKAVVALANKKARVAFALIQGDQPYDVTKMCHAA

SEQ ID NO: 185109 - protein, 406 aa, unidentified
MELTTLHRRVIGLDVHQAQITACAIIEDEHGNRHVEQRQFGTFKRDRKTLAEWAAALKPDLVVMESTGIYWKSPYAALEAAGVRTLVVNAKHVKNVPGRKTDIGDAQWLATLARAGLLRNSFIPPAQLRELRLLSRQRQKLVGQLAAEKNRLHKVLTDGGIRLGVVVSDVHGASARQMVKALIAGKSAPEVLELASKRFKASREELFDAVQGELTPSHRFVLDELMRHIEEIEARIARFDARLLAGMDEQRNALALLQTLPGVDLIGAAMLLVEIGTDMDAFGSPDRLASWAGVCPGNNESAGKRKSGRAGKGNPYVRRLLCEFAHSARRTTCVFKSKFEALHIRRGHKRAIIAIAHKLLRTVFFMLKRGQCYRDSATDYEALAVKRNAPRWIKALKKFGLIDQPA

SEQ ID NO: 185110 - protein, 335 aa, unidentified
MLSNAFDYLDTVTGQVRRGQVSPADRVQLRAWLARFAGRGDVAFAVEGCAGWRYVAEELAAAGVAAHLAEPADTAFARGRKRHAKTDKTDSRHLRQLLAEGRLPECWIPPGHILEARALLELYHDLRAEHTAWVQRIHAVLFHHGAPALGEGTLRTGQGVAALRAAAADHLSPAGQLQVATALEVIEALEARMHMVRHQLLAAARHLTGAKVLAARLYGVGPVTGLAMTCWLAGEGRFSSSRQAVRFAGLDITVHSSDRKGPPGRLSRQGPPVLRWAVYEAGKTHARSSAPDHRYYATVKDREGGKRAALSEARKILRQAHHILAELGDDALSAA

SEQ ID NO: 185111 - protein, 342 aa, unidentified
MQHLYLGIDWGKKFSQVFGFDEDGVIVVEERVPTLSLSAWDALLGRLQCYRVQAGFEVGAHYDWMFDLLKAHGAEVFVIEPAQFAIISKSQRKTDKIDAQKIAEGVRRGDLPLVHVPDAQTRADRRLVAFTHWHSQQSTRLKGKLRSLLLGQRIELACSNITGVKARQWLERDVAPRLSEQEQMFMRHLLVQAELAQRQRKELDALVAARAQTYAQAPIVDSIPGIAELGVLALLSSIAGIARFERPEQLASYFGTCGSVHQSGQRLYLGSITRRGNVHVRWLLSQALQHLHRKDARARKRYLKLKRKKPRGVARAAQVRWLTQIIWHLLTKNQPYRSERAA

SEQ ID NO: 185112 - protein, 339 aa, unidentified
MKHTVVGVDIAKRVFQLHWIDIETGEIVSLKLKREKFLEHFANRALCLIGMEACGGSQHWARKLQGMGHQVKLMPGKAVKPFVGGNKSDVHDARAIWTAVQQPKVKAVAVKTEEQQAVLALHRMRSQLVKFRTAQINGLRGLLTEYGEVMPQGKAGIKKGLAEALQLLSDRLPAMVIDTLREQWARIGKLDEQVGEIERRLKTWHKEDVASKRIAEIPGVGLLSATAAVATMGDARAFKSGREFAAWLGLVPGQSGTGGRIRLLGISKRGDTYLRTLLIHGARSVLTHAKEPGPWITELRQRRPLNVAVVALANKMARTIWALLAHDQSYQKGFVSQPA

SEQ ID NO: 185113 - protein, 340 aa, unidentified
MEKRYIGIDLHRNRFTCCIRLENERTYVTEWELAELGKFVKKLRPTDEVAVEITGNTRLFHEAVSGHVARVVVVNTSQFRLIRQSVKKTDPHDARTLALYLSKNMLPEVRMKDKERGQLASLTQTRDTLVKLRTALKNKINNILSARGLNLPKEALSSEKRLAEVLELPFDEIVQIELRVIVGQIRSLNQSIAELEKTIGEEGSKLDGHRNLASIKGIGKITGAILLSVIGDVNDVADEGHLASYFGIVPRVSNSNETEHSGRIHKRGTKLGRTALVQSALIAARYSPYLKRFYEQIKARRGAGKAIIALARKFLGVIYRTLKNGWVFADFPNFVLAEAS

SEQ ID NO: 185114 - protein, 402 aa, unidentified
MRFFVGIDWASRAHAVCIIDQTGRVRWQGSVPHTAEGLTQLVGRLRRFRGRGGLRVALERPSGLLVDTLVDAGVEVVPIHPNALKATRPRYSAAGGKSDPGDAFILADLLRTDGHRFPPLRPPSDDTRALRALVRGRDDLVAQRIALANQLRALLERFWPGAAAIFADVDSPIALAFLARYPTPQSAARLGEKRLAQFLGQHAYCGRRPVAELLARLRTAPASQVGEADAEASGDVVRALVAVLTPLVAQVQHLSAAVEAALAQHPDGPLVQSLPRSGAVNAAQILAELGDDRARFPSDAQFAAEGGLAPVTHASGQHHAVVFRWACNKRLRRALTTFADNSRHASRWAALVYQRARARGCRHQHAIRILARAWARILWRCWQDRTPYDVRRHRAAQALAAA

SEQ ID NO: 185115 - protein, 351 aa, unidentified
MMIIGCDFHTRYQQIAMADDETGELLLERRLDHQRGEAHAFYRTLPGPVRVGIEATGPIHWFERLLTELGHELWIGDSAKIRASEVRKQKTDERDARLILDLMLAKRFPKIWVPTPGERDFRQLLWHRHKLVCLRTTLGNQLHALAMSQGLCRKKKLFTKKGRGELTGLTLGFWASRRRAELLKLLDQVEAPVSELDRAVFDEVQRREEAVRLMSHPGVGPITALAFVLTIGPITRFPRSRKLVSYLGLNPSEDSSGERRRTGAISKQGNTMLRWLLVEAGQKAARSDPALRQDYQRLKFRRGHAVAKVAVARKLAVRMYWMLRSGADYARLVRRQGSPGATLVDASTPRF

SEQ ID NO: 185116 - protein, 315 aa, unidentified
MTSTQVFVGIDVSKKQLDLAFRPEGRFAAPNDEAGFAQVIGRLSTVSPALVVLEATGGIEIPLAGALAAAGVPVVVVNPRQVRDFAKAAGKLAKTDVLDAQTLAHFAEVMRPEPRPLPDEQTQTLAAILTRRRQLVEMLTAEKNRLGQARKPVRQSLRAHIAWLERELAQTDRDLAHAIHESPVWREQDDLLRSPPGVGPVLTTTLLANLPELGTLTGKQIAALVGVAPLNRDSGTWRGKRTVWGGRAQIRATLYMAAVVAARFNPVIRAFYQRLCAAGKAKKVALTACMRKLLMILNAMLKHRTPWRTELVQCA

SEQ ID NO: 185117 - protein, 351 aa, unidentified
MRTFQKITGIVTTIGIDIGKNTFHLVGFDQRGAIILQQKVSRSQLERRVANIPRCLIGMEACSGSHHIGRRLAEIGHDVRLIPAQYVKPFLKGHKNDYRDAEAIAEAVQRPTMHFVTIKTPEQMDLLALHRVRSRLVGRRTGVINQIRGFLIERGITVRQGPMPLRKALSEILSSDTGALSPRMVGLIADLAQDWRRLDERIAAVSAEIEALAEQDDSCQRLMTVPGVGPIISSAVVAAIGNGTGFKQGRDFGAWLGLVPKQESTGDRTILGKISKRGNKYLRTLFVQAAHVVLERRPSAAMRGLWPWAEQASKRLHRNMLAIALANKLARIAWAVLARGGTYQPRITHAA

SEQ ID NO: 185118 - protein, 401 aa, unidentified
MNNVAGIDVSKGKSTVAVLRPFGEVVASPFDVIHNDNDLKRLVKLIRSLPGESKVVMEYTGTYFEPIAQFLHNNGIFVSVVNALLVHNYGGNSLRKVKTDKKDALKLASYALDRWTELDEYVPADEQRKILKLLNRQYNQSIKIQTTMKNNLISLTDSVFPGINRLFTSLERQSDGHEKWVDFLHAFPHKDCVAKLYLSAFKAKYKSWCSRNKYRYSESKAEKIHSYAKSVIAVLPLNESVKLIVTQVVSQLNTILETAFSIRTEMNRIASSLPEYDTVMSMFGVGKVYGPQLIAEIGDTRRFRNRRAITAFAGLDAPPYQSGQLDVSSRHISKRGSAALRKVLFQITEVFILSKPEDEPVYQFIIKKRSEGKHYYSYRIAAANKFLRIYYAKVNQILNAT

SEQ ID NO: 185119 - protein, 350 aa, unidentified
MKLYAGLDVSQATTAICIIRENGERVWEGSSMTEPPAIAEALAKYAPLLERAVLESGQLSTWLTRELRGLGLPVICVDARQAHKALSARLNKSDSANAESLAQLARTGWFREVHVKSPEADRLRVLLAARRRLISCRKDIEAQLRGTLKTFGIKLGGVTAGGNRVSFREKVRAALTTDKILWAIVEPLLVIHKDICVQGSKLDRTVSAMARRSPIAKRLMTVSGVGIVTALTFMAVIDTPARFRRSSDAAAYIGLTPRRYQSGQVDYSGRISRSGNSELRACLYEAGCAVLNRTKKFSALKSWGLRLAARKGFRKAAVAVARKIAVIMHRIWSDGTVFQWTSRKGDVAVA

SEQ ID NO: 185120 - protein, 512 aa, unidentified
MQGSRTVASSTPVRISVPDRGPRATRAVLMVVKGGGDDVVTRAPEVILDEAHEQIVERVCAIDVAKDSGKVCVRVPAESGSGRRVSKVWDVPARTKAVIELGDHLACQGIQKVTVESTSDYWRIWFYLLEARGLDVQLVNARDVKNVPGRPKTDKLDSIWLAKLTEKGLLRPSFVPPRQIRVLRDYTRLRVDLTAERTRHWQRLEKLLEDALIKITAVASRIDLVSVREMIEALIAGQRNPRILAGMARGRMRLKHADLVEALTGQFDDHHAELARMLLDQIDALTVQIDTLTERIDVVLADIPVPAPQPEPDPDDHGPGTSDDAEVTAVIRPSHGGAPRPRTVARAVTALDLVDILDEIPGVGRHNAHEIIAEIGLEMTRFPTAGHLVSWAKLCPRTIQSGAKSSAGKTGKGNRYLRAVLGDAAAGAAKTQTFLGDRYRRLIKRRGKLKALVAVARSILVIIWNLLANPGMRYHDLGVDFHTKRMDTERRTRNHIRQLEALGYTVTLTAAA

SEQ ID NO: 185121 - protein, 359 aa, unidentified
MEAQRKALSFKGQNIYIGIDVHLKSWSVTLMSEATQLKRFSQSPDPDALYAHLVRNYPEAEYHSVYEAGFCGFWIHYRLVGLGIHNIVVNPADVPTTTSEKLRKTDAVGSAKLARRLRAGELKGIYVPGSESLETRSLIRLRDSITKDQTRLKNRIKSHLRYLGIEIPEEFSGPGRCWNRRFVVWLKGAETGTAYGRQTLDFLVRQYEALRGQRLEMLRAVMALSRTERFEKPLENLMTVPGIGQLTGMSLLSEIDDIRRFKSADQLAAFIGMIPMCHSSGEREGVGDITVRRSARLRSVLVEASWVAVRQDPALSMAYGNYCKRMAPGKAIIKIARKLVNRIYFVMKRNQPYVKRVVA

SEQ ID NO: 185122 - protein, 435 aa, unidentified
MKEHIDYLSTLFVGIDIASRIHVISALDFNQDFFIKMKPFENTKEGAGIVEKMIADVLADNHQFKYVVIGMESTGFYGVHLANYLSTSELLAPFSVRVYCLNPKEVKNYKKSFNDIGKNDGIDSFVIADFARVGRIAIKPWRGSQYLALQRLTRHRMHITECITREKTYMLNNIYLKFSEYALLRNGEHPFSNKYGATAEAILTEFTTNEDIVNSSIEELVEFINSKSKGRIADPEETAKIVQAAARNSYRLDKCLYEPLTISIASSFNCISSFEKELKAIDKAILQTVQGLNPEEYTVLNSIPGIGKVYSAGILAEIGSIKAFQNANQLAKYCGIVWNDNDSGDFESEDSRMSKAGNRYLRYYIIEATGSVISHCPEYKAFYQKKYAETRNHQHKRALALTSGKFIRLVCWTKANSTLRKRVGNPYRIPNLRLF

SEQ ID NO: 185123 - protein, 346 aa, unidentified
MLYAGLDLSRKRLDVHILDEDGRTVEVTAVSPDAVGLRRLAAHVLRFGHDVDGAIESMTGARFVHDTLERYGWDVAIADAAKVKGIAPLAAKTDRIDARVLAELARLELVPEIWLPDPTVRAERERARFRLHLVHHRTALKNRIHATLMTFGHPVPVTDLFGVAGRDVLARLALPEPWSGTLATSLRMVDELGAEIDACEAELRRLGADHPSIPLLLTVPGIGPLLAYTIASEIGDIGRFSSPKKLTGYTGLCPIVRQSGNRDVRGPLAKNGPKYLRWALIEAATHAARDAHYRERYERTKRRLGRQRGAKVARIDIARKLAEAIWHVLTKNEPFAPAGPTKLLVA

SEQ ID NO: 185124 - protein, 383 aa, unidentified
MRVVCGLDVHKDSIYLCILHSTGEIFENVFGVLTSLLEEMRDLMLTHHVQEVGMESTSIYWIPVWRILEPHFKLKLINPYFIKQLPEHKSDVKDAQWIAECMIKDLVRGSFVPPERIQQLRLYDRRIYDLDDEIIRKLAKLDAAVQRCNIRLSNYVSNTDSVSYKSVIDKICDGVTDPKILVQEIHGRIINRHGKETIMASLKGCVTEADIDIMAQLKAEIDLAEAHKQKCMDKMQEICEKEYAPQLANLQTIRGIKIRTATSLIAEIGTDMDHFETANHLASWAGLKPRNDQSNKTIKSRRITHGNRYLRRTIIQCTWGASRAKDCFFSRFSYHQTQIRKKNKMKVQVAIARKMLVCVWHILSKNVVYKDFNNKILTSETNG

SEQ ID NO: 185125 - protein, 357 aa, unidentified
MKKVYRLQHCVVRGKEIFVGLEDSKRTWKLAVRSEKMLIHQVSMEAKYPALIGYLRNQFPECTIHLIYEAGFKGFNLYDALTEDGIDCVVIPPHVVTEPKVNRVKTDKRDARRLAKVLENHDFKDACFVPDKERREDRQVSRTLIALQKDVVRTRNRIRKFLQFHGIEVDFPDRWGRNEFRALKKLELSEPLRISLDIFLTQLEELWAHQVSLRAALKKLCKKERYHKAYTIARSLPGIGWFTAIRLVLELGEDLTRFTSGKKIASFVGLTCREDSTGETEHKGRITGMGSGFIRSTLVENSWMSITKDPVLLAKFTRVWHASGSRKKAIVAVARMLIVRYRACLISGTPYVIGVAA

SEQ ID NO: 185126 - protein, 352 aa, unidentified
MTVTTLTRGITGGVDTHLDVHVAAALDERGTLLGVESFATTESGYKKLVAWLSDFGPVELVGVEGTGSYGAGLTRYLQAERIRVVEVDRPNRQRRRRKGKSDPQDAITAARAALSGDASGEAKTRDGNVESMRVLRVARASARKGRTQALNQMRSLISTAPEPIRAELRGLNVFHLLERTSTYRPGAKRDIVSLTKFTLRMLSRRAITLEEEIAEIDSILKPLVKATAPELVASLGIGSDAASALLVAAGDNPERLRNEAAFAHLCGASPIDASSGKQHRHRLNRSGDRQANSALWHIVITRMVYDPRTAEYIDRRTKEGLTKKEAVRCLKRYVAREVYSLLPHEKLGVDSP

SEQ ID NO: 185127 - protein, 374 aa, unidentified
MKQQKKSSDITIGLDLGDRWHRFCVLDKSGGLLEEGSVRNERVFLAQLSERYPGALAVVEAGCHSPWISRYLQEQGCRVLIANPRKLRAIYQHERKSDRRDAQMLARIGRLDPALLYPVRHGTAEAQQDLLRIKLRDSLVRARVAVINSVRFTLKSLGYSVRNPSSERFHKVAMEGLPAALCQMIAPSVAALEELTARIKALEAEINSLARTKYPHAMQLQQIPGVGPITALYFVLKIEDPTRFQNVRDVGAYAGLCPKRDQSGQSDPQLRISKCGDAYLRRLLVSAAQYILGPFGPQSALRAYGLMLAEDGTARAKKRTVVAVARKLAVLLLSLWKHQRPYQPFPLAGSRLNLQQTKEDRRFGTIAVHRLEAL

SEQ ID NO: 185128 - protein, 343 aa, unidentified
MDYFAGLDVSVKETSVCIVDDAGKIVREARVASEPEALLQVLTNTLYRFKRVGLEAGPLSQWLYSVLAEAGLPVICVETRHMRAVLRAQINKTDRNDARGIAQMMRAGLYRPVHVKTLRSQKLRMLLTHRKLLQSKAIAIENDLRATLRNFGLKVGMVGTVKFEARIKELVENLPDLAILVEPLLTVRRVLREQITVLHRRLLAIVRDDDVCRRLMTVPGVGPVVALTFRVTVDVPARFRNSKAVGAVFGLTPSKYQSGESDRTGGISRCGDEMMRAMLYEAAQILLVRSAKWSWLKAWAMKIARHRGMKKAIVALARRLAVIMHRMWVDGTEFRWTREVAAA

SEQ ID NO: 185129 - protein, 366 aa, unidentified
MFYFSIDQHRKQLTISLRDEQGKVVVRQQVSTQWHRVREFFAQVRERCAADGGFVGILEVCGFNDWLLKLLVEYGCKEIVLVQPDTRSKKKTDRRDANRLSELLWVNRQRLLAGEKVQGLRRVWIAPDEVRQDRQLAEFRKRLAAQRTRVINHVSHILRKHNLQQDCPTKGIKTKAARGWLKNLTLPDLDRFEMDQALEQWELLDRQLAQAEERIRRRVEQNPEAQRVASVYGSGGYSGLAIAASVGSIDRFPRPRSLANYWGITPSCRNSGQASDRLGSITKQGSATVRFLLGQMVTQVLRRDAWMRQWYKRIKHRRGSKIARVAVMRRLATIIWHMLKRKQPYLPGDPAKWKKLPPAARGEAAG

SEQ ID NO: 185130 - protein, 370 aa, unidentified
MKSVRYVGMDVHKDTIDCAVMDDLSVETRFEKRLVNELRAIRKFFGRLLEEGPVVAGYEAGCLGFKLQRELAALGVQCVVLAPSRIARAPGDRVKTDRRDARMLTKLLRSGEAQVVQVPDPSDETVRDYLRARTDLKMELKRHRQRLQHLLIRHGYVFTEGKNWTLKYRRWLKDQEFVHPALKDTVDLYYGRILELEAKLVEMDEKIEEIGEGERYAEAVGRLRCLRGINYLTAVAMVSEIGDFRRFASAEQFMAFLGLVPSEQSSGTRRRQGGITKTGNRHIRRLLVESSWHYRYQRPPSKALRRRREGQPEEVVVYADRAMRRLAKKFHRLVARGKSSQVAVTAVARELSGFIWGLMVDRVEPHNQAA

SEQ ID NO: 185131 - protein, 442 aa, unidentified
MAVRKRVLEVAYPNAAGIDVGAKSHFVAVPADRDETPVREFTSFTDDLNRLADWLQACAVDVVAMESTGVYWIPLYELLSAHGFVVHLVNARHVKNVSGRKSDVLDCQWLQQLMSYGLLSGAFRPEDAICHLRALSRQQQMLTRYQSRHVQHIQQKALAQMNVQLHNVISDITGETGLRIVRAILEGERDPAKLAALRHRGILASEEDIVRSLQGNWRDEHVFALRQAVTLYDAYTQALQDCEAAIAGQLDKLSRVTVDEPAAPKRGRRPSSQAHRLRLALHRALGVDLTRIDGIDVGTALKVLAKVGFDLSRFKSAKHFASWLGLCPGTKISGGKVLSGASKRTANRLAQALRMAAMTLRRSQSALGAYHRRMLGRLDKAKAITATAHKLARLIYTMITKGTAYVDQGQTYYEERHRERVVHHLHKKAASMGYTLVPITAA

SEQ ID NO: 185132 - protein, 431 aa, unidentified
MKEQAATASKGTVKEQAATASKGTARARGTRAKQARAGGADAKRSPAAPATAAPRAPRRARPANIFGADPHKRTLTATVLDCRGGVLGTRTFRISGDGHREMQAWATGFGLVERWGIEGASGLGRHTAMYLARLGHDVRDCSPNRTNERRKGRQQGKTDASDSVRIARETQADPAMPRALKRAEGDAGPDETTEMLALWHKARRSVLKSRQHILNEAENLLCDLPLEMRELLPDTKDVKPRLAAVSLIARSGALDAPTRLRLELLDGYAEEVARFDAEEKLAVRQLARLTKAAGSSLDRLCGISTRSGAELLVEVGDPRRFAGEGGFARFNGTAPIPASSAEGDGEPVRYRLNRGGNRRVNAVLHIMAVTQLGHDPRARRIFEEARHRGHSKREAMRVLKRHLSDVVYRRMLADQERRLAAPPNTDLKRAA

SEQ ID NO: 185133 - protein, 312 aa, unidentified
MYYIGIDVSKKDLSVFDGKKDLKFTNKKGLKSFKKYLKKKYNLSEIAIIFEPTGVYSLYLKEFCAENSIKAYIINPKKSHNFTRALGKRSKTDKIDARILYQFHKNIDLKDIKVPKIDQQAKTLASYLVSYEFVLKQRISLSNHLESLRNKSLIFLMKKDLKRAKMLEDKLFHDIKEYVSKNQNLREDYQRLLTISGVGEKTAIALLTLFKTYQGTNRAQITALAGLDPVKRESGTSVKDKAKISKNGKGIYRKIFYLPTICATVHNQKIRVFYQRLLTHHKTKKLAVIASMRKILLIAHAMYRDKTEYIAI

SEQ ID NO: 185134 - protein, 461 aa, unidentified
MARRNPGIPTPAAPASRGPALRITHPNAAGIDIGGSSHFVAVPPDRDNEPVREFRAFTADLMLLADWLRACRVDTVAMESTGVYWIPLFELLSTRGFEVLLVNARHVKNVSGRKSDVLDCQWLQQLHSYGLLRGAFRPGDGVVALRAFARQRHALLRAQARAVQHQQKALVQMNLQLTRVIADVAGATGQAIVRAINAGERDPWRLAALRNCRIKASEEDIALALQGNWRCEHLFALKQALEAFDFCGQQLAALDAQIEAQLQRLQITEEEPAKGRKRSVARNAPKFDLRARLFSMCGVDLTAIPGVDVTTALAVVSETGSDLTAFPSGKHFASWLGLAPGTKISGGKKLSGRTLPSSNRAAQALRLAAAALRTSQSALGAYYRRMCARMDKPKAVTAAAHKLARLIYAMLTRGQQYTDQGQAYYEERYRQRVVANLTRRAQQLGLQLVPMPTPCPETATA

SEQ ID NO: 185135 - protein, 424 aa, unidentified
MKPHADIEFAAFVGIDWSDTKHDICLQAGNSEEREFCVLKHGAVAIDAWACALRQRFQGRPVAVCLELTKGPLVYALQKYDFLVLFPVHPATLAKYREAFVPSHAKADPSDAQFALELLLRYRAKLKPLTPQSVAMRTLLRLVEQRRRLVGDQSRLSNRLTDALKQYFPDVLTWFADRNTLLFCDFLSRWSTLKQLKRARRTTLLSFFHNHHVRSQARIDERLHAIKSAIPLTDDPAVVIPNQLLVHALVEQLRATLQAIERFDTEIATVSETLPDYALFRALPGAGATLAPRLLAAFGEQRERYQSADEIQRYTGIAPVTESSGKKHWVHWRLQCPTFLRQTFVEWAGATIPRSFWAAAYYQQQRAKGCSHQAAVRALAFKWIRILYRCWQTRTPYNESTYLNALKRRGSPLLASMMAPTKNS

SEQ ID NO: 185136 - protein, 355 aa, unidentified
MNSEKYIGLDVHQATISVAVMDSTGKLVMESILETKAATILEFFAGLRGTLSVTFEEGTWAAWLYDLLKPHVQKLVVCNPRKTALLKDGNKNDRIDARKLAELLRLGSLKPVYHGETGVRMLRELARSYLTLVKDLTRVMNRLKAMYRSWGIPCAGRDVYYTRHRAEWLSKIREAGVRRRAERLYQQLDMLQHLRQQARRELLAESRKHAITAKLREIPSLGPIRSALAVALIQTPHRFRTKRQLWAYSGLALETRTSGEHCYVRGQLRRSKKQVSIRGLNKDHNHDLKGLFKAAATRASVLPGPFQDFYQRSLAKGIKPTMVRLTLARKIAAITLTLWKKGENFDADKLKSQAA

SEQ ID NO: 185137 - protein, 335 aa, unidentified
MKHYAGLDLSMEETHVCVVGEAGKLVFQAKVPSDPQAIAAALNKAGGVERAVIESGRMTPAICRGLKRLGVNVVCIHAHQAHLSLKAMKANKTDPHDAAGLAQLARTGFYKEVHVKSAAAHGVKSVIAARALLVGSRVRLDNTIRGLCAAFGIKAGPGQGKEFVGRARQAARTPGLGEAVASLLSVRDRLMAEIGALDALLNEIARTSVACQILTSIPGVGVQTAAAFAAAVDDADRFKRSRAAGAYFGLVPRRHQSGEADWVGRITKQGDATVRKLLYEAANSILTRTRKTFALKSWAMKIARRRGLKKARVALARRLAVIMHAMLRDGTLFEM

SEQ ID NO: 185138 - protein, 376 aa, unidentified
MLYVGIDIAKNKHDVTALNVPGKTVLKPLTFSNNKAGFELLDLSLRQLNQDCLIALEDTGHYAFNLLNFLHEQGYKVYTYNPLLIKKFAKSLSLRKTKTDKKDAHGIALKLLSDPNREQFQHDNRQVDLKILARHIHRLKKKQSDWKVQYTRCLDIIFPELDKIVGKHSEYTYQLLTRYPNPQKRIEAGFDKLIEIKRLTASKIQDILSVAPRSIGTTSPAREFEIIEIIKHYKRLIDKAETCVNDLMAEFNSVITTVTGIGGRLGAVILAEIRNIHAFDNPAQLQTFAGLDSSIYQSGQIDLAGRMIKRGSPHLRWALIQAAKACARFSPAFKAYLKTKLEQGKHYNVAIIHLAKKLIRTLFYILKKSCHLTNKK

SEQ ID NO: 185139 - protein, 340 aa, unidentified
MNVTTIGIDLAKSVFQLHGVDAAGEVVFRKKLRRAAVLEFLRNLRPCLIGMEACATAHFWGREIGALGHEVRLIPPAYVKPYVKRQKNDAADAEAICEAVTRPNMRFVPVKSAERQGVLMLHRTRDLLMRQRTMTLNAVRAHLAEFGIITAQGPHKILTLIRAIRAGEVPGLPPIACAALESMATQLDTLASEIRRLARQLMAWHRADETSQRLETIPGVGIITATALAASVPDPSVFKTGRQFAAFLGLVPRQNSSGGKDRLGRISKMGDGYLRRLLVVGATSVIRRADSNPSATGTWVRGLLERKPARLVTVAVANKTARIAWVILARGETYRAPMTT

SEQ ID NO: 185140 - protein, 402 aa, unidentified
MNAVGIDVSKGKSMVAIMRPFGEIVSAPFEIKHTASDIHSLVELINSVEGESRIVMEHTGRYYEVLAHQLSEANLFVSAINPKLIKDFDNDSLRKVKSDKADSVKIARYALDKWQNLKQYNVMDELRNQLKTMNRQFGFYMKHKTAMKNNLIGILDQTYPGVNTYFDSPARSDGSQKWVDFASTYWHVDCVRKMSLNAFIDHYQNWCKRKKYNFSQSKAEEIYGKAKELVPVLPKDDITKLIIKQAVNQLNSASTTVESLRTLMNETASKLPEYPIVMAMKGVGASLGPQLMAEIGDVSRFTHKGAITAFAGVDPGVNESGSYEQKSVPTSKRGSSDLRKTLFQVMDVLIKTHPQDDPVYQFLDKKRAQGKPYYVYMTAGANKFLRIYYGRVKEYLSSLPES

SEQ ID NO: 185141 - protein, 325 aa, unidentified
MQTLLKKPLGGFIMYYIGIDVSKKDLSVFDGKKDLKFINKEGLKSFKKYLKKKVNFSDLVIIFEPTGIYSLYLKEFCAENSIKAYIVNPKKSHNFTRALGKRSKTDKIDARILYQFHKLIDLKDIKIPKIDQQAKALASYLTSYEFALKQRISLSNHLESLRDKGLIALMKKDLKRAKKLEDKIFNDILEYVSKNQNLNEDYQRLLTISGVGDKTAIALLTLFKTYQGTNRAQITALVGLDPVRRESGTSVRGKVKISKNGKGIYRKIFYLPTICATVHNQKIRVFYQRLLAHHKIKKLAVIASMRKMLLIAHAMYRDKTEYVAA

SEQ ID NO: 185142 - protein, 338 aa, unidentified
MNELKVRITRKGSTKMAKHTTICAGIDTGKRKLDVAIEGNREQLQVENTAEGHAVLLAWLRRHRVKRVGIEASGGYEQPVVAELRRKRFVVVVFQPAQVRAYAKFHSQRAKNDKIDAALIAACTAAVRKIHAAPDPRLLPFAEQLTMIDQINEDTARLKNRIESCRNAQIKKLWNEDIARLEKREKAELKALVASIRKHPDLAKRLGLINSVHGIGLPTAVAILVRLPEIGRITREQAVALAGLAPYDDDSGEQVGVRHIEGGRKRLRRALYTASLAASFRWNQQLIQLYQRLTAAGKEHKRALVACARKMLIFANTVVARGTPWQDCPPEKAALTTG

SEQ ID NO: 185143 - protein, 438 aa, unidentified
MFCGWDWGSTGHAVCLIDDQGAVIKRWLVQHTEDQLMKLFCELAELVEGGDVAQVPVAIERGEGLVVGLIAGAGHPVWMVEPAAFKAARPRWGLAGAKSDLGDAFMLADYARTDGHRLRRVEPVEQATRELAALVRARTALVKARTAASNQLWAVLAEHWPGAAVVFQKLTSQIALAFLSDYPTPQAAALLGERRMGQFCRRHSYRGGKSPAEFLSRGRAAPASASPLAPRILESVVHGSVAQIGLLNTEITRLERDLASALAAHPKTTLLQTLPRAATVSLAALIAETGPLLERCDNPEQVAAMCGAAPVTRASGKSPHRRVPLHRQQACTRRDHQLRRQLPTLLVLGGRRLPTSTCARRPTSSRRPDPRPRMDPSHLGMLDHRQRLRPLATPRRTAPCRSDLTKRAQALHQPADLPNARRSLPWPRGHAVSGLTRQ

SEQ ID NO: 185144 - protein, 403 aa, unidentified
MNNVAGIDVSKGKSMVSVLRPFGEVVAKPFSVGHTGSELKELADYLKSLDGETRVVMEHTGRYYEPVARFLHEEGVFVSAVNPKLIKDYGNNTLRKVKTDKADSRKIARYGIDNWAELRQHTPMDTIRMQLKTLNRQQSLYTKTKTMMKNNLIALLDQTYPGVNALFDSPVREDGSQKWVDFATAFWHVDCVRSMSLTAFAERYRKWCKRHGYNFSQSKAVEVHAGAQDLIVMLPKDALTKTMVRQAIDALNAVSASLERLKAEMRTLAAQLPEYPVVMAMHGAGDSLGPQLMAELGDVTRFTHRNAITAFAGVDPGADQSGTHEAKSTRVSKSGPPELRRALFLVMDCLLKTQPQDDPVYRFMDKKRAEGKPYLVYMTAGANKFLRIYYGRVKEYLASLEGN

SEQ ID NO: 185145 - protein, 361 aa, unidentified
MAKFSLSSLQTFVSGFDGKPFWIGLDVHKRSYYVALLRPDGRSTTWVASASPDEFIKQVLCLGINIAAVAYETGPTGFALARALEKSQIPVIVAAASRIPRSVTAGAKCDRLDCIKLADYAARGMLKSIAVPTPEEEARRSLLRRRHSLVDSVRRSKQRIKSLLLFLGVREPIEVTNWSKKAPDALLRLTLEPFAKQTLESHLRELTFQQTELRTVEDQLRQIVATTEQKQSVAYLQTVPGVGVTVATSYALELFRPERFARAEEVASYLGLAPVVRHSGGKTPNGRLVPTGQTRLRSLLIEAAWMWKAKDATAAELYNKLLSRTGIAQKAIAAVARRLAIILWRLMVEQRSYRMAGITAS

SEQ ID NO: 185146 - protein, 416 aa, unidentified
MSLCVPEAVFYTGIDWAAETHAVCVLDGAGKAVTRFTVAHSAEGLGKLIARLAALGDPADLPVAIERPSGALVDALLEAGHPVVPVSPNAIKTWREGEVVSGAKSDPGDAEVIAEYLRLRQHRLRAAAPYADETRALRTVVRTRDDVVDLRIAAVNQLGALLEAHWPGGKAIFANLDSKIALEFLTRYPTAASAIGLDEAGIAAFCRQMGYSGKRPAAVLLQRLRAAPARHCRDALTAAVRDAVLAMVAVIKAITAATRDLDRSVTARLGEHPDNAIFTSLPRSGQVNAAQVLAEWGDCRQAYDGPDSVAALAGVTPVTKASGKHRGVSFRWACNKRFRQAITTFADNSRHASPWAAQVYAQARASGKDHPHAIRILARAWIRVIWPCWINGIPYDPDKHGAAVALTQHTKQELAA

SEQ ID NO: 185147 - protein, 333 aa, unidentified
MKVILFIGLDVHNDTIAISIASNDSTEVRRWGIMGGSHDDVQRFIKKLQAAHPSAALKFCYEAGPRGYPLCRFIRGLGQECIIVCPSRVPRRPGDRVKTDRRDADQLARLYRAGEISGIHVLDPEDEAIRDLLRSRYQVVRAQHRARQQLKMFLLRHNLRYSGTSSWTPAHLRYLARIKMPFPAQQFALQELMDSISEAGKRLERYQAQIEREVAGWRGEPAVRALMSLRGMGLINAATLIAELGDLSRFTRPQELMSYLGLVPSEDSTGGDRKQGGITKMGNGYARRALVEAAHHYRSSARLTPHLQKRQEGLPKAVTERGVGSAATITLSL

SEQ ID NO: 185148 - protein, 373 aa, unidentified
MGTPSAQTLVDMGVREMLQELEEVPMTMVGGFDVHRQQITFDYVDDDGLVRSGQVRPATRQSLRSWLAEHCPDGEAEFALEGCTGWRYVCEELAAAGVGVHLGDPAEIAAARGPKKRAKTDRADARLLRTLLLEGRFPESWIPPGQVVETRTLGRLYCTLMDERRAWQQRIHAQLFHQGCPPIKALLSATGREAIAGAELSAAGRQYVGTALRRIDELSAEIEPLRTQLVTFARRQRGCQALQRHYGIGWLCAAIIWAEIGDARRFASSDQLVRFAGLDVTVYSSAGKCSPGHLSRQGSPQLRWAAFEAAKCAARRSSPDYAYYHKLAARPHNGKNPTLAVERKLLRRCYHTLRELGDAALALPDARPQETAA

SEQ ID NO: 185149 - protein, 443 aa, unidentified
MAEAAPLASSELEWAAFAAIDWADQKNFWRLRPVGSSQSEHGELENTPEAVEVWAAGLQQRFGGRPIAVCLEQSRGGLVYMLAKYAHLVLFPVHPTTAARYREAFAPSGAKSDPGDTGSLLDLLLRHREQLRPLRPDTVETRLLQFLVEERRRTVDDRTRENNRLTDCLKLYYPQILRWFDNVSSPLVGDFLERWPSLEQAQRTRPGTLREFFRRHNCRSDELIEQRIAEIYQAIAATKDAAVLEAGTIIARGLVAQLKTLREQIGVLDKRIAELVAAHPDGALFASLPGAGAALVPRLIVAFGTDRERYRSAYQIQCYSGIAPVKEASGKTSWVHARYICPKFLRQSFHEFAAHSIAQSEWAKAYYDHLVRDEKKSHHAAVRAVAFKWIRIIFRCWKDRTPYNEEIYLQSRARRGALLGRPLEAVTSVGWKTVAGFQKFSGN

SEQ ID NO: 185150 - protein, 592 aa, unidentified
MWRTHSCVPRRHSWRRPPKHLTRRGVETSSQRCCARREGQKRRENRKARCTASYGRRHTGAFLPVDEYGSGLVDRKIGGKASKEAVRPRWRECFLYRDQAVRSANILGWKGSSMAHTTTQSGTSGWTRKQRKELGRRIWSAHPGLEVIHRDAAGIDIGSREHYVAVGPDRDAEPVRTFGCFTADLHRLAGWLRECGIRTVVMQSTGVYWIPVYDVLEQAGLDVGLVNARETRNLPGRKSDVQESQWLLKLHTYGLLRKSFRPTADIRALRTCWRERAEYVQQAGACIQRIQKALTEMNVQVSTVLSDLSGVTGMRILRAIVAGERNGQRLAEFRDPNVKASPETIAQSLEGTWLPEQLAILKRQLGDWDHLQRQMAGCDADLEALMKRLPDADREPVPPPSASTGTPPQKRKKNGRPSKNEPGFDLSTELRRVAGVDLTRIDGIKVMTVQTILTEAGLDMSKWATEDHFVSWIGFAPRNDISGGKILKKKTRKVVSRLATALRMAATTLRLSDSYLGAQFRRLRSKLGAPKAITAMGAKLARLVYRMLKYGQEYVDKGTAQYEARHREQQIQFLKKKASQHGFTLVSSSNPA

SEQ ID NO: 185151 - protein, 475 aa, unidentified
MARQAASTSSNVVPLFPQETLYVGIDVGKFRHVAGLLSRTLLKRHDHFEGCPTFVFDQSREGFRAFVDRLRELVPLEQVRILLEHTGHYHRLLEQYLLELDITVYRIHVQRRPKGREKSDKRDALGLANRLYTQLELGAQVEEKMQLVRRAYPPTKAASQLKGLIQHRYELSHQSTQLRNKLTAICDELFPEFTTIFRDPNREWALAYRENFPTPQALATASMATLQEVRSRNFPSDAQLLKLQQLARETIGTTDVDRQHGLLIEQGLLIKELRVVQEHLDILQTTISEVVTNSREGQILLSIPPIGPIQAATIIATVGNIANFEKASELKSYFGWAPERSQTGVSFDKSKLSKRGVRPMKQMLFLMVGRAITLECEWARIYQRLLPRLAIYDERTKDYRGKLRVIGRIAGQMATMIFALLKTDDETLSQVPSGQEPPPPMLYDAAIHRRHQEGHYRSLKPGTLPRKIIQLPKKT

SEQ ID NO: 185152 - protein, 424 aa, unidentified
MNNTQNDKLMQIKPETLVVGVDVGKNTHYARAFDYRGIELTKLIKFSNTRKGLEGFEGWIRSLMVLNGKADTIVGFEPTGHYWFALGDFLKSCGYKLGIVNPYHVKCARELDDNSPSKNDHKDPKTIAMLVKDGRYRDVYIPDDLYQELREAVVERERLNEQLAAIQNQVIRWLDIRFPEFNDVFKAWTGKSAMMTLKSFPTPALVCSAGVDEILETWQKASKTASRRKAEMLLELASASIGRVTGSNAALAALRNLLQQYELIVEQQECIECMMQELLLRVPNASKILEIKGIGVVSAVIIISEIGDISRFKDPRQILKLAGLNLKENSSGKHKGKTTISKRGRRRLRESLFRTMIPMLANNPEFRAIHARNTARSVNPMNKMQSIIALCGKLVRVIYAILSKGNNYDSGKLLSDMNLQQEAA

SEQ ID NO: 185153 - protein, 424 aa, unidentified
MKVTYQTCCGVDVHTSFLVATIVKTTGGIEPSYQKKRFSTFNNSILEFKQWLLDNDCHDVCMESTGKYWVPVFNLLEDDINVVIANPKWVKAVKGNKDDTKDSKWIGDLFRLGLVKGSYIPCKKVRMIHWKTRYRYKLVSCRSSEKNRYQNALTVCNVALDSVVSDIFGKSSTSIIDYLLEQSGSSINHEEIASKLLRSLKSKEDAVIESVEGYQMTDAQKYRMRLVRAHMDYITAEINDVDKMIENMISSNTDFENAVQFLCTIPGVKRDSAITIISEIGTDMSQFSSSKRLCCWAGLTPGSNESAGKKKSVRITRAGVYLKPALVQCAHAAVKSDKSPYYKKKYESLVKRRGKKRAIIAIARMILTAIYQMLSTGEQWNPSDLYKIDMPVALVEKQKAKAIKQAKKLLQREGLLPPDEPFAS

SEQ ID NO: 185154 - protein, 379 aa, unidentified
MMMRSTTDVGLDTSKKSIQVAMLVAGRREAVEWEIANEPGAVKRLARRLLRGTVGELRVCYEAGPCGYTLQRQLRAAGVEAIVVAPSLVPVKPGQRIKTNRRDARKLAQALHADGLTEVHPPTLEEEAVRDLSRCREDAREDLLRARHRLAKMLLRRGLVYGAKAWTDAHRRWLRSLDLEHEADRAVFGDYLQAIEHLEERLRALEEKLVALSEKEPYREPVGWLRCLRGIDTVTAMTLVTELHDFRRFESPRALMAYLGLVPSENSTGEKHRRGAITKAGNSHVRRVLVEASWHYRHRPAVGRRLRKRREGQPGWMIAVADRAQLRLHKRFWKLALHGKSTNKAVTAVARELAGFIWAALSLKDAAATPSQVIVGSHA

SEQ ID NO: 185155 - protein, 416 aa, unidentified
MSKLSRTQRGGVPISDPHPWEGLTRIQPHAAGLDIGAHEIMVCAPGPNDTQDVRAFGTYTADLHALVAWLLERQVQTVAMESTGVYWIPVFETLEAHGLRGCLIRATAIHRIPGRKSDVLDCQWIQTLHTYGLLADSFRPDADLIALRTLLRHRAQLIEHRSPHILHMQKALTQTAQRIQLAQALRDVTGQTGQAIIRAIVAGERDPHRLAALRNYRCQKDAHEIALALTGTWRAEHVFVLTQSLECFDFYTRQLNACDAEIERLYASLRPAWGMPEPPLPPQKPHSHNKNTRPDTPLRNQLRRLTGVDLVAVPGLSVALAQTIVAEVGTTLDQFPDAKHFCSWLGLAPHNDISGGKVLKSRTLKNHNRAGQASRSGQAAAALMRAKCHFGAYYRRKKSQIGPAQAAVATAHKNLS

SEQ ID NO: 185156 - protein, 323 aa, unidentified
MTKFTGIDISKQSFDCSITLENEKIESRKFSNDLEGFAKLKKLLCSESHVVMEASGPYYLILATFLHQEGIKVSVVNALIIRRFCQMRMMRTKTDKKDAIMIREYAKLENPGLWKPDEPLILKLKNLNTMVELLDKGITATSNQLEAFKEMPGTDKSVLDQLKSILEFNEKSKENIELEMEEIVKENFSNTYKSLLSIPGIGKKTAALLIAITGNFKKFDHYKQLIAYVGLNPRVFESGSSVKGRGHICKMGTSRLRKTIYLCSWSAKKSNPQCIEMYKRLKEKSKPNKVINVALANKLLRQAFAMGKYQREYEKNYQKIFVN

SEQ ID NO: 185157 - protein, 346 aa, unidentified
MFDNQLWCSRPIDTWSSKTVLERGSLHRLPSNPNGCKGIEARILQGRVQEDLMETKVFVGIDICKDSLDVAIGPGKEIITFANDQKGVNALIKELSRIGPELIVLESTGGYERLATSSFVEAGLPVVIVNPRQVRDFAKSVGILAKTDAIDARVITRFAEAVKPDVRQLKDRETSELTALVTRRRQIVEMIVAESNRLKLANKRNKKDIKDHIRWLEKRLDKIESDIGKMIQNSPIWRCKDDILQSVPGIGPTTSAVLICDLPELGLLSPKKIAMLAGLAPLNCDSGKFRGRRRIWGGRASVRSALYMGTLAATRYNPAIKAFYQRLTAAGKCHKVAITACMRGNC

SEQ ID NO: 185158 - protein, 346 aa, unidentified
MLYAGLELSRKRLDFHLLDGEGATVEVGAAPPDADGLLGLTRRLDRHREPIRAAIESMNGARFVHDRLELAGWQVEIADAQKVKGLAPLACKTDRIDAWVLAELTRRDLVPAIWLPDPMVRAERERARWRLHLVRHRSSLKQRVHAVLLTHGKPCPVSDLFGVRGRQLLARLGLPQPWQATIEASLRLIDELDREITNCERELGRLGADHRYVPLLLTVPGIGWVLAYTIAAEIGDISRFPSPRKLAGYTGLCPRVYQSGERDLRGPLAKQGPKYLRWALVEAATHACTAAIYRDRYQHTKARIGKQRGAKVAQIDLARRLSEAIWHMLSRNEPFAPKGATDPLAA

SEQ ID NO: 185159 - protein, 446 aa, unidentified
MATRTVGIDVAIRGPHVAIILDEQGRPLGTPIRVRLSAAALAELVTKIRAGLQADDTVMVVLEPTGMAWFPLARRLTQAGCTVIRVKGQRVKALRRYLSEYAKTDVTDAQVLGRMLAFGRRGLLPLYVPAAKQQALNCLTKQRARYQDAISSIRRRLLDLIRWAQPTLEPVLPSIGTSVSLAVLEHYFNPAQLQALGARRLTEFIGRHVGGNHPAHGPFVEELARGLLAAAADAVALFGADGVDFELLQLEVRQEIQLLRHHRELLVELDRAIEQLYRELHPVEALRTLPGIGDTLGPALLGVLHTASRFGAQRRLRGFCGLFPRRQESGGVAHPGQPITQDGNNRIKRNLMLAADVARTVDPELAAVYYRCMVEKGHHHRQALCAVATRLVNRIHAVLRDGRPYELRDLDGHPITVSAAKQLIQTHLRVPDVIRRTRKKAPVAAA

SEQ ID NO: 185160 - protein, 510 aa, unidentified
MGPLAYVRGVEVSVSLRSELRGRFWSNHFGWQSLFDVGHAPSWEHWTKSRPADQSLTGHPMSFDRLKRTQGRKRLPGHKLKPSRATLFVQNSKPHLSMKQTYILAIDVAKHKVRAALSGADERLLFEKDLPVSAGGLRELLVRLREHVAEPEGLLVLLEATGMLHLNWSVALIRAGYAVVVINPLIARRLYTLGNSIRDNKSDPIDARQLCGIGRLHGEKLLSLYRFALKPERLCLQRLQSVRKAVRKSLSNLKKSYRSLLDVSFPELGRLLEIDGVGIRQLLSQAPTPCAIARMRRSSLEKNWMLRPKAAQLKKLAAESMADPELAQASRPALLAMLQSIEAMETRLRELDWQIEALTSQSVDPQTKALVESIPGFGALNAAKLLAFLPGEILHAGSNRQAAARLQAYMGNDPRVRQSGQWQGQTKMSKRGVEMLRTALFQCAFSASQHDPELRSFYQRKRAQGKHHEVALSHLMRILTRRLVAVLRSGQPYQPNYNSELKNAAQNTCH

SEQ ID NO: 185161 - protein, 329 aa, unidentified
MKLQHIIGADLSKKSIDLVCHLLITHIQIENSIAGFKDLVVWMRKLKINASETMIVMEHTGLYSYCFEKFLHQHQIAFCKVNALAIKRSIGLVRGKTDKLDAARIAAYGFEKRDKLTIDAPASDALKRLQMLHSTRERLVKQRASIICAIKEYRYIGIPEKDIIMQTQLQLIKSFDKQIEKLMTEIETIINEQEALKQNFHLLQSIKGVGKILALTTIIKTLNFTRFANARKFACFCGTAPFPHDSGTTIKRKARVSHLADKQMKTLLDLSAKSAIQYDKELREYYLNRTEGGKSKMSTINVVRNKILYRMFAVIKRQTPFAENYLQAA

SEQ ID NO: 185162 - protein, 412 aa, unidentified
MDVVVERCAGLDVHKDTVVACVRTPETGGSREQTTRTFKTMTIDLMGLRDWLVAMGVTLVGMESTGVYWKPVFYVLEDDIECWLLNARQLRNVPGRKTDVQDAEWICQLVEHGLVRPSFVPPKPIRELRDLTRYRKAQIDERGREAQRLDKVLQDAGIKLSSVATDILGKSGRDMLMALVSGTREPEVLAELARGRLRTKIPLLRRALGGRFVSHHRLIVEKILAKLDFLDETIEDLSAEIDRLIAPFAAEVDLLDTITGVDRRAAECIIAEIGVDMARFGSSARLASWAGRCPGHHESAGKHKSGRSRPGSKWLAATLAQCAEAAGRSKGTYLGAQFQRLRGRRGHAKARKAVEHSILVAAYHVLDRHVPYQDLGADWFAHRRPEAHARRLAQQIEALGFRVTIEPTEQAA

SEQ ID NO: 185163 - protein, 331 aa, unidentified
MSENKYIGMDVHQGSTVVAVRDESGKVVIQSILETEGGTLLQFLDGLSGTLHVAFEEGVSAQWLHDLLVRQVARVVVCDPRKIAASVKKNDQVDARKLAELLRAGQLSPVYHGESGLHLLKELARSYLALSKDTTRVMNRLKSVYRSRAIRCAGQRVYSQGGREAWLERLLERAARRRAERLYEQLDFLQPLRRKARQELVGESGKHSAAARLREIPFLGPVRVAVLISIVQTPMRFRNKRQFWSYIGLGIESRITGEYELVGGQIQRTKRRVAIRGLNHNHHPELKRLFKSAATETAPGRVLGAIGLRARYSKACVPRWPDSPWRASWRP

SEQ ID NO: 185164 - protein, 334 aa, unidentified
MELKRIAIDTSKYLFTLHGVDHDDRVVLRRELRRDKLKAFFAALPPTEVVMEACGSSHHWGRLLIALGHVVKLIPPQYVKPFVKRGKNDRIDAEAINEAASRPSMRFVAVKGAEQQAATLILKTRDMLVRQRTQLINAVRGHAAEFGVIAAKGTARVEPLLARIAEDDTLPAAARAMLAVLGGQIATLDAQIAELETQMRAAHKANPLSRLLEQIPGIGPISALSLALTIDPAQFRSGRHLAAALGLTPREHSTGGKQRMGGISRAGDERLRRLLVVGATAVIRQAAAGRGKASAWLLNLLQRRPRKVVAVALANKMARVAWAMMTSGEAYRAA

SEQ ID NO: 185165 - protein, 346 aa, unidentified
MMIIGCDYHPSWQQVAWVETETGECGERKLVHATGEAKVFYQQLGSPALIGMEATGNSQWFIELVEDLGHAIWIGDAAQIRASYVRKQKTDKRDAAHILRLVVENRFPRLWTPDREQRDLRQLVLHRHKLVEIRSRVKNELQHLAMNKGMQKKATLWSQAGQQMLRELPLKPWAECRREDLLGLLGMLNQQVGTLDQAVQKAAEEHAQARLLMTQPGVGPNTALAYVLTLGDVTRFQRGKQVASYLGLIPREESSGGRQKLGAISKQGNRLLRSLLVEAAQIAVRFDPGFRKQYLHRCHQKPKGVAKVAAARRLAVRLYWMLRTQVAYPEIVRIESSPRVPRVGAS

SEQ ID NO: 185166 - protein, 370 aa, unidentified
MAKGNVDMSEGIYFAGLDVHARKTAAAAVQLGSDKVWKAQLPGSSAAAIEWLQSLPGQVRAVYEAGPTGFELARSAKAVGVELMVCAPGAIPRQPGDRIKTDTRDALKLARLHAAGQLRAVVVPARELEALRDLVRAREDLRGDLMRARHRISKLLLRQGILWTGPGETWAEHHLHWLSKVRFQQPLQQVLFGEYLAHHEVLLARRERLDGLILEQSIQGPWAPQVARLRCLRGIETLTAVGLVCEIGDISAFSHPKQLSSYLGLVPSEHSSGAKRRQGSITKVGSSHARRLLVEAAWNYRRAPGVSLTLKRRQKDQPTAAIETAWRAQIRLHRRWTHLDAACAKKRATVAVAVARELACFVWEVAQQPD

SEQ ID NO: 185167 - protein, 338 aa, unidentified
MNYYAGIDVSLEALSVCVIDANGKIFRESKVASEPEALIVWFASLGVNLTRIGLEAGPLSQWLYAAMRQAALAVELLETRHVRNAFKIMPVKTDRKDARGIAELMRLGWFRPVHCKSMAAQETRAILTARKLVQKMLHETEMSLRGTLRNFGLKVGKVAAARFEFRIGELVEGHPTLTAIAASLLATRATLRREFNTLEKRLRAIARSDTRARLLMTTPGVGMVVALTYACAIDDPSRFKSSKTVGAHFGMTPTKYQSGETDRTGRISKIGDSSVRMVLYEAAHVILTKPVKGCTALKSWAMRIARRAGMNKAKVALARKLAVIMHRMLADGTTFQPA

SEQ ID NO: 185168 - protein, 470 aa, unidentified
MSQIKIKQKRKKKEAKVLQLPVIREDAAGIDIGATLIHVAVGPGRDEEPVRTFETFTRDLKAIAVWLRTAGVKTVAMESTGVYWIPLYELLESEGFKVLLVNAHHVKHVPGRKTDVSDAQWLQYLHSVGLLQGSFRPTEDICAIRSLGRHRESLVQASSQCIQMMQKALTQMNLQLHNVISDITGASGMRILQAILDGERDTEHLESLCDKGIKAKPEVIMGSLEGNYRSELLFILGQNLKRYKDLQSLIGDCEKEVGRLIDAAPAKVNLADKPLPPATKRGSKRSASAPPCLPDLREKQYRMLGVDLTQVPGINTQTVQDFIGEVGPDLSRFRSASAFSSWITVCPHNKISGGKKLHSKTRKSKSRAAKAFRLAAQSLAHSDEALGEFYRRMRGKFGPPKAITATAHKLARIVFHMVTTAEPYDASVFTRAQEKHRLHQENRLRANARKLGFQLIPIQLTSDNQGVVVP

SEQ ID NO: 185169 - protein, 338 aa, unidentified
MNIVFLGIDLAKNVFQLCGLNQAGKPVYTKRTGRKELLQTLANIPACLIGIEASTGAFYWQREFEKLGHKVKVISPQYVKPFVRGQKNDGNDAQAIAVALMQPIMQFVPPKSPEQQDIQALHRARQRIVNHRTATVCQIRGLLLDRGIPIGSAVSRARRAIPLILEDAENGLSSRMRRTIAELYDLFNDLERRIHFFDKEIETVFRQSEACQRIARVKGIGPKTATAVVAAIGKGTEFKNGRHFAAWLGLVPRQHSSGDRRVLMNMTKKGDKHLRTLFIHGARAVVRVATNNNDGHMNQWVNQLKERRGFNKTTVAVANKNARIIWSMLRNETEYQVV

SEQ ID NO: 185170 - protein, 354 aa, unidentified
MVVSVGIDVSKDKHDCFIVSSEGEVLADAFMIPNNIDGFHCLLQRIQDCATPQDKIKVGLEATGHYSYNLLGFLLDNGLTTYVLNPLRTNLYRKSLSLRKTKTDRVDARTIASMLLSDAGLKPYTNTAYHNEELKSLTRYRFDKVQERAKLKSSVSRLACILFPELEKLVPSVHIASVYALLEEFPGAKQVASAHLTRLKALLETASKGRYKRDMALAIRNAARNSIGSRMPAKSLELQHTIRLIRELDTEITEIEEQIQSIMDELHSPITTIPGLGFRMAAMILAEVGDFSRFDSPDKLLAYAGMSPSTYQSGQLKNCYPHMEKRGSRYLRYALFNATKYVCHWDTNLSLIHI

SEQ ID NO: 185171 - protein, 370 aa, unidentified
MVKLTRTMQYLNDTELSSHEETRCQFNGSTGAIKLGIDVHQDFYVVVKQEGGSNPKPPQRFHKEAFLHWATKLRREERDVHAVYEACGFGFGLQRRLSVLGIQCYVVCPQKLDERNKRVKTDGLDAKALCLRLDRFLHGNREALALVRVPSEEEEQKRAIHRQREQLVKARKVLEAQGRSLMVNHGIEPVNTWWKRRAFARLQVPTWVKELLSNSQPILIALQQKIDALTVQLQNAAASKQPRGFGKLTSVVIDREVGNWHRFSNRRRVGSYTGLCPGEYSSGDTRVQTCVTKHGNPRLRAALVEAAWRLVRFQPNYKPVIKWRRILAQGALATRAARKKAIVAVARQLAVDLWRIRTGRVRTEQLGLSI

SEQ ID NO: 185172 - protein, 387 aa, unidentified
MSQTIAASIPAAVDYERTLVLAIEVSNKSWVLAAQVPGLPHTKAKRTINPEAEALLAAITGYRTRAAATGRSIERVIAVYEAGWSGFWLARWLMRRGVEVHVVQPSSVPVDRRMRRAKSDGIDSELLLRTLLAWPRGEPRVCSMVPVPDEADEDARRCVRERTELISERIGLTNRIGAVLATLGVSNYNPLLRNRCRRLAELRTGLGEPLPANAHAKIKRLLARLELVLMQIAELERERDAVVETEAPDKASKMIQQLTGLRGIGVQSATVLVREAFVRRFANGKALGSYAGLASSPYSSGGTDREQGIGKAGNRRVRTVMVELAWLWTRYQPDAAQVCWFRERVGSTGPRVRKIMVVALARKLLIALWRFVIDGVVPEGAVLKPAV

SEQ ID NO: 185173 - protein, 376 aa, unidentified
MADYTRFVGLDVHKESVSMHVVWASGEEGATARMPNDPDVLGKTMRRVVREAGGTEKVRCCYEAGPCGYMLYRQLKGMGISCAVVAPSLTPVRPGDRVKTDRRDAQKLARLERAGELVAVWVPDEEHEGLRDLIRGRESARQDLLRARHRLSKYLLRHGKTPPAGVRPWSSKYERWLDALTFGVEVHSVMLEEYRQQIRAARAAVERLEKQMQAVGEKSALRPMIEGLQALRGVSFITAATLAAEIGDISRFTHPAPLMSYAGLTPSEYSSGAVQRRGGITKMGNSHLRRVLVESAWHYRHTPSVGAQLRQRQRGQTEQVKAVSWKAQLRLNTRYRQLLGRGKERNRVVVAVARELCAFVWELAWTLKAQSVVQAC

SEQ ID NO: 185174 - protein, 354 aa, unidentified
MKKLSRMSSTLTIGLDLADVWSDWVAIDADGVVAARERVRTSEPQLRRVFGHLSASVIALEVGTHSAWVSRLLESCGHTVIVANARRVALIHRNKRKNNRIDAELLARLARADRKLLFPITHRSKRSQTDLSLLRTRDVLVRTRTKLINHVRGASKSFGVALPKCSSESFATRARASVPKVAAALAMVLDQISTLTEQVRELDRSIDAMLKRHPAARRLTQITGVGALTALAYVLTIEDPARIVRSRSAGAFFGLVPGSADSGEKHEPMKITKEGDGFCRRLLVNAAHYIVGHFGPDSDLRRHGEAIAARGGKNARKRAVVAVARKLAVLMHHLWSTGADYIALYHSADQPAAA

SEQ ID NO: 185175 - protein, 351 aa, unidentified
MDIKTVGIDLAKDVITVCAMDPHGKVVDSRNLRFAALAEWLVQLPTGCIVGMEACSSAHHWARRMLALGLQPRLMAAEFVKPFRKSRRTKNDHNDAEAIAIAVQQPTMRFVTIKSEAQQARLAWHRLREGWKEERTALINRIRGLLLEFGYPLPRGNSALYLGLQVATQHQPLPLAFRRLLIRAQIQLKQLDEQLAACDRTIAESVRQDEDSQRLQQVGGVGPLTADAVPATVGKARDFKNGRQFAAWLGLTPIQFSSGGKTKLGRISRRGDSYLRTLLIQGAKSTLQGARKRAPDRLSRLERWIINLYGRVGYHKTLVAIANKHARQLWAMLAKEERYNPDAWQQRQTAS

SEQ ID NO: 185176 - protein, 489 aa, unidentified
MLHAGLDLSRRRLDYCLLDETGERVEVGAVAPDGVGLRRFTRRVECRHGPVEVRAAIESMTGARHDTLERCGWEVALADAAKVKGLAPLACKTDRIDAWVLAELSRRELVPAIWLPGFGVRQARERALWRLHLVRHRSALKQRVHSALMTLGHACPVADLFGPRGRRLLDRLEFPEPWRTDVLDAVALIDELDRQIIAIERELRWLGADHRYVSLLQSISGIAWVLGYTIAAEIGDIARFATPTKLAGYTGLCPGVGQSGSMDRRGRLTKNGPKYLRWALLEAAINAVKQPVYEDRYQATKQRLGSQRGAKVAQIDIAQRLTEVHAAARTGRPSWTPSSFARERTSRGGSSRSCSARSANASWVSGRRRKFGLVDRRSRWRRGDGPDPERRSYSSFASFNDPDGNEWLLQEVTSRLPGRVDEPDVAELGKLLLETALAHHHVETHAAPHDWWDWYAPYLSARQRGSTPEEATVAADSYMERVRGVAIPR

SEQ ID NO: 185177 - protein, 447 aa, unidentified
MALDVITKTDKTPVLGRMLSKYVGRKTSSIENDITKVRNHSRQRGNIMRVVFGIDVSKASSEVAILVNGEKVHDYTIPNDAIGFNRLLGDLKTVHQPEIVFEATGVYSRRLQAFFENNSYAYTRLNPLESKKQLDSLRVRKTDKIDAEKLAMSQFILNRKPSYVQEALYQELRDLSRFYQNLTEDIVCAKNRLHKVLQVTFPELENILSAPTGEQYWNLVMTFPCNSFVLESDDATLTAIIRQSTVKRISEKRVTYLVDKLTKLANQSYCAVKKTSPVIEEVKYYAGELLRLSEHRQGVLEEMVTLAQSLPEYEILLSIPGIAETTATSIIGELGDIRRFHSANQINAFIGIDLRHYESGNFLAKEHITKRGNPYARKILFKCIHNIASASHTNPCHIADFYEKRKRQSQVTSTKPHTIASIHRLIRTMYYLITHNKLYDYTSTQNR

SEQ ID NO: 185178 - protein, 405 aa, unidentified
MLCVGVDWAEDHHDVCVMDHEGHVLGTRRVADSVSGVGELHALVAQHAEEDDEAVVVGIEIDRGLLVGSLVGAGYEVYAVNPLSVARYRDRHGTSGAKSDPGDAKVLADLVRTDRHNHRPVAGDSDLVEGVQLLARAHQNAVWGRQRQLNALRSTLREYYPGALEAFGTDLASTDALAVLAVAPTPELGRGLSRSKIASALRRGGRQRNIEGRAEEIQAALRSEQLEAPALIASAHGRITRSSVTLIGAFNAEIAELETALSEHFEQHPDAKVVLSMPGLGTVLGARVLGEFGDDRTRFSGPKSRKNYAGTSPVTKASGHSRVVLARFARNRRLADACDRWAFCALSSSVGTRRYYDQLRSRGKTHSQAIRQVANRLVGVLHVCLERRVLYDEEVAWGSDTDIAA

SEQ ID NO: 185179 - protein, 363 aa, unidentified
MGPNRTSVGLDVHARSVVACGLDGSTGELFERRLTPDLREIADWVRSLPGPVAVTYEAGPTGFGLARFLIMNGIVCEVAAPSKLQRPSGERVKTDVRDARHLARLLHLGEIVAVTVPSVEQEAARDLVRAREDVRGDLMSARHRLSKLLLRHGLVYSGGKAWTGSHERWLGVARQTVFDRPGLRWAFDTAYDTVLATTARRDRLDTAIAEMAAASEFTPVVVRLGCLRGVSTLTAFGLAVEIGDWSRLTGRTIGAYLGLVPTESSSGMTRSQGGITKTGNSHARRLLVEAAWHHRPRYRPSAQLLRRQNQAAPGARDRGERANRRLHARWAGFDARRKRPVVANTAVARELAGWCWSLAVLQE

SEQ ID NO: 185180 - protein, 404 aa, unidentified
MPELWAGTDAGKAEHHCTVIDANGTTLLSRRVPNSEAELLELLGDVLGIADGGPVTWAVDLNAGGASLWIALLVNHGQKLLYIPGRTVHHASAAYRGSGKTDAKDAFIIADTARMRRDLQPLQELGEIAIDLRILTARRIDLAADRTRAINRLRAQLLEYFPALERAFDLSTSKSALILLAGYQTPAALRRIGRSRLTTWLKNHGVRTSTAARSTAEAAVTAGEAQFTVVPGERTCARMVHTLAAAVTALDEEISEIEAQIEARFREHPDAEVITSMPGIGMTLGAEFIAATGGDMSVFGSSDRLAGVAGLAPVPRDSGKVSGNLRRPRRYSRRLLRMFYLSAQVATVCCPESKRYYQRKRAEGKSHKQAVLALARRRLNVLWALLRDHKLFETAAARTGVTAV

SEQ ID NO: 185181 - protein, 356 aa, unidentified
MSRDTKYIGMDVHKEAIVIAVLNDSGKLVMESIVETQASSILQFIHGLRGELHVTWEEGTWAAWLYDLLKPHVHEVLVCNPRRNALLKEGSKSDKVDAHKLADLLRTGMLRPVYHGENGLRTLRELARSYQTISKDLNRVMNRLKALYRGWGIACSGTQVYAARYREEWLHKIPHAGVHRRAEVLYQQLDGLQALRRTLRPELLAESRKHKAAKLLRQIPCIGPIRAARLLALMQTPHRFRSKRQLWTYSGLGIETHESAQYRYVRGQLQRSKKPQQIRGLNQNHNHEMKEIFKGAATRASCGVGPLRDFYVALLDKGMRPEMARLTLARKIAAIALTLWKKEERFDAEQLKPQAA

SEQ ID NO: 185182 - protein, 357 aa, unidentified
MGKSIIDTSSVTRVGLDLAKRVFCIHAVDAAGSVVIARSVNRRTLLTFFDALPRCVVAMEACSSAHHWGRRLLELGFAVRLIPPAHVKPYVRRNKTDAADAAAICEAAARPGQRFVPVRSVENQAALMRHRARELMVGQRTAALNALRGHLSEIGVVAAQGVPNAYALKALVDGGVDENGEIVVPDCVRLALAPLVRQIDALDEAIEAIDRELEASARTDETARRLMTIPGIGPVTATALLATVQDFAAFSSGREFAAFLGLTPREHSSGGKPRLGRITKMGDRYLRKLLVQGACSALAARKGHNDALRRWASGMLERKTVKYKFKLTAVALANKLARTVYALATKGGQYDDRPVAA

SEQ ID NO: 185183 - protein, 318 aa, unidentified
MLLDDSVQCSVGIDVSKARLDVHVLPEGRSFQARNAPDQFQTLLDRLPEPGACRVVLEATGDLQRAVVAFLVDAGHYVSVVNPRQVRDYAKALNILAKTDAVDAKVIARFGKDVKPRNITEVPEKQAELDQLVGRRRQLVRARVAESNRLRDDMPKLIRESIQRQLKSIAKDVARLNRAILELVRSDDDWKQRFDLLKSVPGVGDATAAALVAELPELGRLNRQQISALVGVAPFADDSGSRQGRRSTRGGRRPLRSTLYMATVAALRSNPVLKAFAKNLRRNGKRGKVVIIACMRKLVVIMNTMVKENSHWKETTPA

SEQ ID NO: 185184 - protein, 361 aa, unidentified
MLHRTNWNTRLPEPVKGNSLCDIILISKYKSMKNYEEVVGIDVSKKTIDASCHLAQQHRVFTNDVKGYQSMLNWVIKQTKGVSVFYCFENTGNYSLKLASYLSLKGIAYVEESPIKIKRSSGLVREKTDKIDSEIIARYAWVYREELLSSEVKSVVYQELGRLIGLRDQLVRSRSGLFGTLKEIEQLLSSPSTDTSCIVLRRSIENLSKQIKSIEFRMVSLLKEDESLSSNYKLLLSLRGIGFVVACQLLYHTENFKRFATWRKFSSYCGLAPYEYSSGTSIHRRKKCHYLGDRKMKSLLSMASISAIQHDPELRIYYKRKVEEGKPKMIALNNVRNKLLARVFSVVKRETPYVILNQYAA

SEQ ID NO: 185185 - protein, 412 aa, unidentified
METVVERPAALDVHKAQVTACVRVPAAGGGREQHVAEFPTTVAGLLTLRDWLAAHRVRQVTMEATGVFWKPVWAILEDDFECLLVNARHVKQVPGRKTDVSDAAWLCQLAEAGLLRASFVPPKPIRQLRNLARYRKTQIQERAREANRLHKALEDTGIKLDCVATDILGKSGRAMLDALVAGTTDPEVLADLAKGRLRAKLPALREALRGRFDHLHAVWIGAILAHLDFLDEQIAGLTEAIGEQIAPFEQAVELLCTIPGVQRRTAETIVAEIGVDMSVFPDAKHLASWAGQCPGNDQSAGKRRSGKSRKGSKWLDWALEEAAMAAIRTNDVYLAAQYARLRPRRGHKKALGAVKHSIICACWHMLTTGELYRDLGGDYFRKRDPERTTKRLIAQLEALGHTVTLHEARVAA

SEQ ID NO: 185186 - protein, 338 aa, unidentified
MTLYGGIDLHSNNNVVALTDESDRVVYRKRLANDAEMVLAALTPYQDAITGLVVESTYNWYWLVDALMAAGYRVHLANTAAIVQYSGLKYSDDDTDAAWLAKLLRLGLLREGYIYPKAERAVRDLLRRRLRLVQQHTANLLAVQNLFSRNRGRSISANEVRRLTPQAVAELVADPNLALAIQSTVLAMHGQQAAIALLEREAWRQTKETQAWRPLQTVSGIGRILGLTIVLETGPIERFAGVGNYASYCRCVGSTHLSNGKQKGKGNTKNGNRYLAWAYVEAANFAVRYNPQIKRYYQRKRAKTKGVVAIKAVAHKLARACYHMLRDGSAFDVNRAFA

SEQ ID NO: 185187 - protein, 342 aa, unidentified
MKQYVGLDVSQQETSVCVVDEAGRAVYEGRVKSDPGALTELLRKRAPDAERIGFETGAMASWLWHELRRVDLPVVCIDARHAHAALSVRMNKSDQNDAKGLAELVRVGWYREVKVKSEESQKVRAILVARSRLVSIRRDIENQVRSMIKEYGLLFRRAIGLQFRNQVNELVAEGHQLRAVIDPLLSVHEHVCGQQIKFDEEVRRLAKADETTRRLMTVPGVGVITALTFRHTIDDPSRFRSASKVGAYLGLTPRRNQSGETDLNGRISRWGDRMLRTYLFEAATVLLYRTKKWSSLKAWGMKLAKRIGMKKAKVAIARKIAVILHCIWVDGTSFEWGQPKAV

SEQ ID NO: 185188 - protein, 339 aa, unidentified
MQEKKKMIWAGFDVGKETFSASLDQVTENGKAKITSLPCRDFKRTPEGLTKFFQWADGIISGMDLHIVMETTGCYSQQLTDWINLNYPEVKVTIENARNIHAFIESLNLPHKTDKLDAQAIARFGAERQPHPTKRPSKTILTIRELSRERTALIKNRVDLQNRRDTITSSVVRKINAQTIATLTMQIEKIEQEIKACIVEDEEILTEIHIMTTMPGVKFVSAYSILAEIGSLKQYSIKELSAISGLAPRIRQSGSSVHSSFMSRRSSGRLRQILYLDSLPGVPKIPVLQDFQQRLLAKGKTKMTVRCACMRKMLLMLRSMVVHNRAFDEKFLKNLSIRT

SEQ ID NO: 185189 - protein, 367 aa, unidentified
MKKISTVVVEGMQIFKENQLTIGLDLGDRISRYCILDEAGQIILEQELPTTAKGIEQVFSKIPRSRIALETGTHSPWLSRQLGQYGHEVIVAHARNVRLISESSRKDDRLDARTLGRRARIDPALLSPVRHRSAKAQMHLTIIRARAVLVSARTALVNAARGLTKSNGQRLPQCGTEQINREIAQGLSQELRDALDPLRREIESLNERIAEYDTRIEQIAREMYPEVARLRQVKGVGPLIALTYVLTLDDPFRFRSSRDVGCFLGLRPGRRNSGRSEPQLHISKEGDRYLRTLLVQGAHYVMGPFGQDSDLRRWGLKLAERGGKNAKKRAVVAVARKLAVLLHKLWVSKEVYEPLRNNNRKGMAQVA

SEQ ID NO: 185190 - protein, 411 aa, unidentified
MEHQNYVFVGVDTHKNQHTACVLNCFHQKLGLTQTSNNPANYESFIQNINSFKTPDKKIIFGLEDTQGLGHSLSQWLLDQGYTVKEVNPALTKRERHHSANPDKSDEIDAEAIANVLLADLNELPNALYDANFKAIRQLDNQRQTMVKEQTKLKNRFHNLIHQQYPEYQKFFSDPFGKTAMAFYKEFSHPSDLNYYGEKRLQNFLEDHVKSIGNDKAATILSLVDKNKKKTADAEARNTIIKSTIEHLRLIAKSLEKINKQLKKAVEESQYQLTTMPGINFKLAALFISNIKNIDRFESASKLARYAGLAPVEHSSGTSKNLSYKKYGCRDLNHAFYMLAFEQVGKTKNSKIKNPVSYKYYQKKLEEGKSRAVALTCLQRRLVDIIYAMMRDRSAYKLPENIDYEVLDKAG

SEQ ID NO: 185191 - protein, 351 aa, unidentified
MNILAMDLGKSNTVVCYYDCNNGKHRFGKVKTTPMQIHNLLAEHSPDRVVFETCSASGWVYDICSALKLSTQVANPNTQAWRWKNVKNKNDKKDALKLAQLSAMNQLPVVHMPKPVLRQKRTLIHYRQSLVTRAVQIKNNIRAILDKQGYSMPAGKSGWTNKSIEQLNQISLPIENCDANNLWRGQLYVELEMLTANNKALSDVTGKLDELAKSDSHIKLLQTAVGVGPRLAEAVVAFIDEPERFKSGKQVGSYVGLTPKQYQSGSMDHQGKISGQGNKLLRSLLVEVSWLGLRHNEWMRQTYHRLLRGSPSRKKIAITAVARKLLVRCWAMLRDGQPWCDCKIKDDKQAA

SEQ ID NO: 185192 - protein, 373 aa, unidentified
MPRYSTAFGMDVHLRSTTVCALDAETGEAVTRRFRGNPWGEVAEWMSGFPGPSLAAYESGYLGFAPQRELSGLGVDCVVAAVSKVPRSAADLSSKNDRNDAARMAKAILSHDVTPVWVPSPEIEGLRDLAAAHDAATARLAAAKQRLLAFLARRGYVYGGTTPAGNPRKYWTYGFLRWLDGIHPADDGGIRALAALRNEVEAADETREALLAEYRAAVAAGPLSAEVEALQSIKGCGFALAAAFASEVGDFSRFRSGRQVTAYFGLAPKQRSSADSVRLGGISGAGNALVRKLAVEGSWCYAQAGHQPKLMPKGSGVPLEIRMHGRKGSERLLRRRGEMLERGMPQAKANAATAAELVRWLWALGAMCREAGE

SEQ ID NO: 185193 - protein, 454 aa, unidentified
MTSTGTDHNPTTIAARAGIDCAIVANHQCELIEYRDDGTTRTPRKTIPSTAAGMNELTRFLAAVVVAVDVVAEPTSLTWVGIQAAVGAAGGRFYLIGTRHSSRLRAAVAGKNKSDVIDAHLLAKALDLFDLEPLVVADVGSEAIKRSALSRGDARVHYDQCWRRLRSYVAATVPDIDKILAGSRTRTLAVLGRWPDLRALARAHRSTIAAVLRQHSYCSGRQEQIADQLRSAAAAWVSILEDYYDLDFWRLKVAGMLADIDQAADRFDRYTEQLDGLWHAFYGPDDLLLSVPGTGPITAATIRGWLGDGSRFARPEDFASYCGLTPSNWSSGTMEHKHRAISKEGPSALRMAVFLAANAARTSDPQLARVYHRLMVDKGQHHNKAVCAVARKLAERIWIVVHRNAPYEYRDDDGAILDITQARAIVRERYQVPAEVRARHRNHTTAQRRARLAA

SEQ ID NO: 185194 - protein, 348 aa, unidentified
MMIIGCDFHPSWQQVSWLDSETGECGERKLVHAAGDAKVFYQQLAAPALIGMEATGNSQWFIELAQDLGHEIWIGDAAQIRASYVRKQKTDKRDAAHILKLVVEGRFPRLWTPDREQRDLRQLVLHRHKLVEIRSRVKNELQHLSLNKGMQKKRTLWSEAGQKLLRELPLKPWAACRREDLLGLLGMLNEQIGKLDRAVQIAAEEHPQAKLLMTQPGVGPNTALAYVLTMGDVTRFPRGKQVASYLGLIPREESSGGRQKLGAITKQGNRLVRSLLVEAAQIAVRCDPGFRKQYLHRCHQKPKGVAKVAAARKLAVRLYWMLRTQKPYPEIVRIESSPRVPLVARPGE

SEQ ID NO: 185195 - protein, 352 aa, unidentified
MSHITVTMQPVPVVVGVDTHADEHEAAVLDTAGRMLAHRRFAANASGYRELLDWAGSHGPVMAAGIEQTGSYGAGLTRHLSAAGVEVLEIHDAHPAVRARRGKDDVIDAEQAARKVLSGQATAAPKDTDGVVEAIRQIKVARDSAVKSRTVALQQIRDLLVTGPDQLRQELAGRTLPAKARALADRAPAAPAGSPEHAAITALARLGRRVRLLADEIKDADRDLQALVDTTAPALRALPGVGVHVAAQLLVSCGQNDRIRSSAAMARLFGIAPVPASSGKTNRWRLHRGGDRQANRAVYMIAITRLAHHEPTRTYRDRRRGDGLANPDIIRCLKRYIVRDIYQALKADLGWS

SEQ ID NO: 185196 - protein, 368 aa, unidentified
MKKVLFVGIDVDDKQYQCASICQLSNDIRDFTCSPNAKSLINALKKLRDSGAVLKICYEATYLGFSLFRELKKSDFDCVIAAPSLIPQIPGKKQKTNRLDARKLADFYMKGLLTFVHVPDEAQEKDRDLIRSRKFLVNQLSGLKNHIANLCRRMNWDYKTECNKISYWTADHVKWLKNKNKECTNQSLKINLTILIRQLEQTKENISFYDTEVENLAEKEIYKKKVKALNCLRGFDTTTSMTIVTELGDINRFDHPRRLTSYVGFDLIEYSSGDKEKKYKMSKDGNPHLRTTIIEACQFAIKPPTISNQLKRKRQGADKKIVDIADRCMKRLHSKGQRLLYKGKQRNKIKGACAREMLGFIWEILKAA

SEQ ID NO: 185197 - protein, 419 aa, unidentified
MSFKIIKNNCCGLDVHKTWIYACIGITDTHQRTEYKQARFSSFTKGLNELCDWLAKYNCTDICMESTGKYWIPVFNVLEKHNLWITLSHPKYTKPMKGNKTDRKDAKWICDLYMCGMVKPSFIPPADIRELRDLVRYRFKLTCMITGEKNRAHNCLTVSNLKLDDVFSDIFGKSSRSITEQILQHPGETFDVAPFVDGRCKTPIEEIQAAVDGAISKEQAVKLRQCLNHIDELEKHKSEIEREIFRLSEKYEAALDLIRTIPGFDKNPLTAIQVLSEIGGDMSVFPTAKHLVSWAGCCPRNDQSNQKIKSTRISRAGSYFKPVLVQIANALIKSKKHPEFTNRYKRIKARRGHKKAVIAICRMILTAIWHILSDLKPYTSEGYLEPRPAKENKTLTTSQALNLLKQRGYVIKDEPIIVS

SEQ ID NO: 185198 - protein, 360 aa, unidentified
MVKHIFVGIDLGDKNSVARIAVDREKTERFGFVNNRRGRARLFEEVKRRAQEVEGKIVMAYEASACGFVLRDEAENRGIPCWVLAPTKMEKSVEQRKHKNDDRDADDVVEKLRAHVLAGNRLPTVWVPDPQTRDDRELIRTRLELADKQTQLKSQIQMLLKRHGLEKPSGLGAGWTIRYWQWLEGLTELESFGWGGRQGLASLLRQLNSIEAEMQRLQKPVEQLADEPRHKRIVEELTKESGVGVLTAMVYRTEIGQAGRFRRGRQVGKFVGLTPTSYESGEQNDRKGHISRQGPPRLRKMLCQASWVHVCHDDGAKRIYEQLVSRNPKKKKIAIVAVMRRLAVRLWHRMRKVELELGMA

SEQ ID NO: 185199 - protein, 413 aa, unidentified
MTITCGIDWAETHHDVALVDGAGKLVAKRRISDDVEGYRRLLELLVEAGDTAQDPIPVAIETARGLLISCLRATGRSVYSINPMAVARYRERHRVARAKSDHADAMALANILRTDAEMHRPLPADSELVQAVAVLARAQQDAVWNRGQLSNQLRSHLKQYFPAALAAFQVRGIGLDSREARAVLAIAPDPSTAATLTSARLRAVLRTSGRQRNIDAWADRLRGIFTAECLHQLPLIEAAMGRQTQALVLQLDAACRAADDLAAAASEAFAQHPDADIVTSFPGIGPLTGARVLGEIGDDRSRFRDARGLKSYAGSAPITVASGKSLVVHHRKVKNQRLAAAGYVWVFGALPSPQVKQHYDRRRAAGDKHAAAMRNLFNRFLGCLHHCLQTGQLFDPAKAFPSTAIPTTAPAAA

SEQ ID NO: 185200 - protein, 341 aa, unidentified
MDVYFRQCVGIDISKDKFTACLYMYDRASDVGCCTKSIDFANTKSGFNQMVRWSRKEAVKSHPLTYLMEPTGVYYERLAYHLHKIGQTVYVVLPNKARKFCESEGIKTKTDAMDARCLALMGCVSRKLKPWSPPAAIYRELRQMTRFHADLCQVRASVANRMEALDHMEGTAKSVHKNCEKLLQEIDTLMEKNGKAIMKKVAEDKELEAKVKRIATVKGLREPTIVCVIAETEGFHYIENRKQLVGYAGLDVKAEQSGNEDPKHRISKKGNANIRTALYMPALVAVRYNRQIKAAYGRICQKHPNEKMIGVTAAMRRLLLLIYTLWKNGEEYDETRGTMPL

SEQ ID NO: 185201 - protein, 347 aa, unidentified
MNITRVGVDIAKSVFHVHGVDRHDGKQWQAKIARDKWLDALCERVPPGAEIGMEACASSHHWGRELQKRGYHVKLIAAQFVKPYVKSNKNDQVDAEAICEAMGRPGMRFVALKSVEQQDIQAAHRIREELVGQRTAKANQIRGLVGEYGIVAPVGIQKLRCALPRWLEDAENGLTDAFRTLLAGLAEDLRCLDSRITGLDERIAQNVKEDPVAQRLLELRGIGPLTASALAGALGDGSAFSKGREFAASLGLTPRQHSTGGKDRLLGISKRGDSYLRKLLIHGARAVLRHAKDRDDGLSQWLNDLSARKHANIVSVALANKTARMAWAIVHNETAYDPTLAAGLQTG

SEQ ID NO: 185202 - protein, 338 aa, unidentified
MKTYAGIDLHSSNNYIGIIDEQDHRLYQNRLPNKITHIKQALEPFKESLQGVVVESTYNWYWMVDGLQEDGYKLHLANPSAIKQYEGLKHTDDKWDSFWLAHMLRLNILPEGYVYPKEERPVRDLLRRRLLFVRHRTSHILSLQSMITRNLGYTMSGRAIKKLNDSDADTLFHEPFLLLAARNSIATIQFLGTRIHEIEGQVTAQVKLKPEYGYLLTMPGIGTILGLTIMLEVGDINRFPTVGTYSSYCRTVKSEKLSNHKKKGEGNRKNGNKYLSWAYVEAANFAARYYPEIQGFYQRKKAKRNGIVAIKALSNKLARASYYVMRDQVVYERSKLFR

SEQ ID NO: 185203 - protein, 343 aa, unidentified
MTFVGCDLHTRQQQVAVLDTTTGEILEQQLPHEGTTVEDFYTALPRPVTVGIESTGYAIWFHTLLQRLGHTVLVGDAAKIRAMVVRKTKTDRRDALHILDLLRHDRFPSIWIPDPATRELRALLMHRLRLVRIQTMLKNGLHALALNQGLARGSKLLRRAGLAQLQGLPLPPYTAQRRDQSLDLLGTLRTHLDHLDDAIAAAALAHPDAPRLLTHPGVGPVTALATVVVLGTVSRFPDSKHVVSYVGLAPALNASADKYRLGKITKQGSALLRFVLGQAAAHAARLDPDLTRTYRTLAQRRGRAKAKVAVARKLLVRLFIMLRDHIDYDEFRRRGRAPAVAPG

SEQ ID NO: 185204 - protein, 465 aa, unidentified
MKPPKSASKGQRNPSKIEERDLESLPPLHLNAAGIDVGSAEHYVAVPAARDPQPVQKFGSFTGDLHRLAGWLKACRVDTVVMQATGVYWIGLYQVLEDYGFDVQVVNARHTKTLPGRKTDVQECQWLQQLHTFGLLNHSFRPAEQIRILRSYLRQRENLVAAGSTCIQHLQKALTEMNVQLANVISDLSGTTGMAILHAIVKGERDAYKLADLKHSLIRASREEIAQSLQGNWREELLFVLQQNLELYEVYQKKVRECDQQIEAHLKTMPAMVNVSEHPIPPPRRVSWSRKRQPGFDLRGELYRLTGVDLTQVDGLDVQTIQTVLSEVGLDMSAWKTEKHFGSWLGLSPDNRISGGKVLKRGTRKVVNRAATALRLAAWNLIRSQSALGAKFRRLRTRLGAPKAITAMAYHLARLVYRMLKFGHAYVDKGMEYYETKHRQQQFAWLKKQAAALNLQLIPLTEVPA

SEQ ID NO: 185205 - protein, 426 aa, unidentified
MAQVAFSAEKAVLVAIDIAKIRNEVLVQLADGTRKSFKVANNIQDYQDFSTYLQSLKCPCVIGFEATGDYHRPLAYYLQKEGFTLRLISSLAIARTREAMYNTWDKNDPKDCRAILHMLLTGVTQTYYDPPGFNDIKEISGTYYQISLRKVRVYHAILTHFLPLYFPEAERYLHNSRSEWFFSLLLKFSCPASVRKYKKEEFIKIAWSLVARKGKENRKIWLTDFYETAGQSIGLPVEENSEAVYMFRMVLQEYIDLCRMRMEIEKRANCYLESNPDCHRLQTIPGIGPICALTILAEAGDLRRFSHYKKFLKYCGLDLCTQQSGQYRGITKLSKRGNSRMRYVFWMAATVAVRMRENTFRKKYENYIKANPNNKDLKRKAYVAVAAKVARVAYSLIKCGSDYRCFYESATPGGKIPSPRAVEAIY

SEQ ID NO: 185206 - protein, 408 aa, unidentified
MEVVYRCCCGIDVHKKIIVACLNQGGEQSLREFGTTTSEIKSLATWLTESGCEMIAMESTGVFWKPLYNLFELMDLDAMVVNAAHMKALPGRKTDVKDAEWIADLLRHGLLKASYIPSREQRELREITRYRKSLTEERCRETNRLQKILEGANIKLDSVVKDINGKSARKLLEKIIEDDVPTSEEEVSKMVHGRMRSKLGQLVTAIEGITTPLQRKLLAQVIDHIDDLTRRIADLDKLVQDYMDEYEAAIAALCDIPGIARRSAEVILAEIGLDMSRFPSAAHLCSWAGVCPGNCQSAGRRKHGKTTKGNKPLKTILTQCAKSARSVKGSYFSAQYQRIAARRGKNRATLAVAHSMLIAIYHMLKNSAPFRDLGSDYYDSFNRDRKIHSYLKRLKALGWEPDVLPGSA

SEQ ID NO: 185207 - protein, 348 aa, unidentified
MAHFVGLDVSVKETSVCVVDDAGKVILEQKVLTEPDTIIALLTSLGATYGRIGIEAGPLSQWLVNALTAAELPVICVETRHMKALLTAQQISKTDRNDARGIAQMMRVGLFKPVHVKTLVAQEQRMLLTSRKLLQRKLLDVESDLRGTLRNFGLKVGVVSGGRYEARVRELVAGFPRLAAIAEPLLSVRRVMRQQLAVLHKMLLDTVRDDPVCRRLMTAPGVGAVVALTYRATVDQPQRFLHSRAVGAHVGLTPKRYQSGETDYEGGVSKCGDALLRTTLYEAAHALLTRGAKWSWLKAWGVRVAQRRGMRRAIVAVARRLAVVLHRMWVDGSEFRWSKDSTAVPAVA

SEQ ID NO: 185208 - protein, 355 aa, unidentified
MTVTIVEEACPVTCRAAVTGGVDTHADTHVAAALDPVGGLLGVAEFPATTAGYARLLGWLGGFGMVCLVGIEGTGSYGAGLARYVTAAGIRVVEVDRSDRQDRRRQGKSDPLDAVSAARAAQSGRASGAPKGRDGAVEAIRTLMVARRSAAGERTRTINQARALVLTGPDDLRARFAKHKPAALITGLAALRPRPGDVAGHATRIALRELGRRAQFLDGQLVRLDELIVPLVTARAPGLLAVYGAGPRTAALLLIAAGDHPERLRSEAAWAHLCGVAPIPASSGKVTRHRLNPGGDRQANHALWRIVFTRLGSDAATRAYAERRTAEGKSKAEIIRCLKRYVAREVYRQLRPAVG

SEQ ID NO: 185209 - protein, 341 aa, unidentified
MAIKVIGLDIAKSVLQVHGVDEGGQTVLRRKLRRCDVLKLFAGIEPALVGIEACHTGHYWAREIAALGHDVRLMPPQFVKPYVKSQKNDAADAEAICEAVQRPTMRFVPVKSAEQQAALLLHRTRDLLVRQRSSLVSAILAHFAEFGIVVYRRARDIDRLLALLADSQNCLPRLAREMLSILAAQLREIEARVQVVEAELMAWHRSNEISRRLATIPGVGPITASAIVATVADARQFKTGRQFAAWLGLVPQQRSSGGKERLGSISKRGDGYIRRLMIHGARAIVGWRKRSARPRDQWIDGLLGRRHINVATVALANKSARVAWALMMRESSYNHRLARAA

SEQ ID NO: 185210 - protein, 311 aa, unidentified
MTHDTIGIDISKLHFDAHRRATGSHARFDNTAAGFKAFSHWIGADHPDLVVFEPTGPYHRDFEAAFAGRLPLAKVNPLQARRFAQSQGTRAKTDAVDAAMLARMGRALELVPDRPAEEIQNVLRELRVARSGLVRDRTALMNRLSAARLPLVRRLVKARLAQAERQIATLDAEIDGHLEACPKRRRAAQILTSIPGIGRITARSILAECPEIGTLRHKQIAALAGLAPMTRQSGTWCGKARIEGGRRHLREALFMPALVAMKKNPDLSAKYDQMRAAGKPHKVALTALMRKLIQLANTLIREDRTWHPKCA

SEQ ID NO: 185211 - protein, 341 aa, unidentified
MNNAAARNKKQITIGLDLGDRRHTYCVLDEAGKIAREGSLCNTREQLAAMAGSYPGATVVMEAGTHSPWVSRFLQELGLRVIVANPRKTRAIYENERKSDRRDAMMLARLARMDPTLLHPIEHGSQDAQQDMLQLKLRDSLVRARVALINAVRFTLKSLGYPVSNPSSARFHKLVLNEVPESIREMIAHNVAAIAELTERIKALDTSISRLAAERYPQTIYLQQVSGVGPITSLYFVLKVGNPGRFQRTRDIGAFLGLCPKRDQSGETDKELRISKCGDRYLRRLLVSAAQYILGPFGADSALREHGLRLAQGGNSQGQEAGRRRCRTKARRIAPHALEIP

SEQ ID NO: 185212 - protein, 319 aa, unidentified
MSEPAVFVGIDVAKATLEVAVRPSGAQWASANEEAGIQTLLGQLRALAPALVVLEATGGYEQAVAATLATAGVPIVIANPRQIRAFARATGQLAKTDAIDAQILALFAERVRPTPRPLPDDATQALEALLTRRRQLLEMLVAEKNRLGVAPAQLRRDIGQHIRWLERRVADLDRELHAGVRASPVWRAQDDLLQSVPGVGPVLSYTLLAALPELGTLGRKQIAALVGVAPLARDSGTHRGRRTSWGGRAPVRTVLYMATLTATQWNPVLRQCYQRLRAAGKPHKVALTACMRRLLLILNAIVRTQTPWRATPTAARATA

SEQ ID NO: 185213 - protein, 365 aa, unidentified
MLIHVPPEVRVLAMDVHKNTISTGLLEPGSTSPVLDKISADDESVRRLIARFDDPAQVWACYEAGPTGYELARTLRRAGMRCAVIAPSLIPTRQGDRVKTDKRDARRLAVLFRASQLTSVRVPTVAEEAVRDLCRARADMVIDRTRARHRLGKFLLRHGRVWRGGDNWTLKHEAWIRAQRFDERALNETFAHYQATLTAREAAVDAVEADLVPWRDREPFADAVHRLAAYRGITELGGLTLASEVCDWRRFPTAGLFMGFTGLVPSESSSGDRTSRGGITHAGNTHLRTQLVEAAWAYKSRPQVGAVLNKRQDGLDPAVVARAWAAQLRLCGKFRRLDARKTNRKVVVTAIARELAGFVWAEMTA

SEQ ID NO: 185214 - protein, 500 aa, unidentified
MNNKLYIGIDVSKDWVDIAVHGQREVVRIANTACALTDWVGQLDPARIGLICFEPTGGYERTLRHCLTAAPLRHVRVHPNEVVAFRRWRGIKAKTDAMDARLLAEFCAEELAGRGLAGMIEGDEALCALSVRRRQIVGLCQMEACRLAGAQGLPTEDSIRTVLDALTRSAKEIEARIAAHIDSDPRLSAYAANLSSFKGVGPVSVHTLMGELPELGTLNRQQIAALVGVAPRQNESGKQRGRATTGFGRPGVRQVLFNIARVAIQHNPAMREVYRHLTEDNKRPGKVAIMAVMRRILVILNAIARDNQPWKGAEAVTPRSRKAVGKMPARATVQSQAAAGILSTALRDSPHRPSRDEIPAVETTETVVQPAEPQPDSPVIASRDAIHTSPSRRGRKPKGERAMTGAERQARYRARQTSDIAHENPPAPAPRDKPARLTRPRRWNNAIGELKALVDEYTAWHEAMPEQLRNTPTGEALQAIVELDLEDIASIQLPKGFGRD

SEQ ID NO: 185215 - protein, 368 aa, unidentified
MSEVITYVGIDAHKKDLFIAMLIGGEKTPLTWQLANEPQAVRRLVRKLEREAPGPVRAFYEAGPGGYALQRQLTTARVTCDVVAPALIPRKPGERIKTNRRDARKLVELGRAGLLTAVQPPTPEDEAVRDLARARDDAREDLQRCRHRLGKLLLRRGLHYAGRNWTRAHRQWIDSLTWAHAAERVVVDDYLLAIDHTDARLLELDAQLAETAKLDPYREPVGWLRCFRGIDTLTAMLILAELHDFRRFSSPRALMAYLGLVPGEDSTGEKHRRGRITRTGNALVRRLLVETAWHYQHRPSVGVALTRRRKGQPGRVIAIADKAQQRLCRRFRKLTAEHKPAPKIAVAVARELAGFLWAVLQPVASQAH

SEQ ID NO: 185216 - protein, 344 aa, unidentified
MVERFVGLDVSQRSTSICILDGQGARVWRGKCATDPAAIEEIIRLRAGGATRIGLETGPLTPWLVHELRSRGLEVVCLDARQARAALALRPNKTDANDAEGLAQILRLGWHRSVHVKSYDAHRVRAALGARMQLVNMVTELSNHVRGVLKVFGLVVEGARGGVFADRVETLVADRPEVAAVVRPVLEAWRGLRRQVAAYDVALRAEARGRREVRLLMSVPGVGAITALAYASAVEDPARFGSSRSVGAHFGLTPRRHQSGEVDRTGAISRWGDGLVRTYLFEAANVLLGRVKRWSALRAWAVRLAQRAGGTKARVALARKLAVAMHAIWRSGEPFRWTAEPRAA

SEQ ID NO: 185217 - protein, 350 aa, unidentified
MARTSKQSKSVSSKIVSLYVGLDYHESTIRVCVMDDQGDVLVNKNTSNNVWKVRELIGSCDGLVSAVAIEACCGAANFASELIEATEWTVRMAHPSAVNRLKGVEDKTDARDAWHLANLLRVGYLPEVWIADEVTRQLRRLVRFRQGLADQKKDIKLRIGALLREERIENTSKSNTWTKPWMAWLKTAKLGEHSRWVLDREIERLEQVEKEIAAVQQRMELATKDDSVVAKLMEQPGIGIITAVVMRAVIGRFDRFHTGKQLACYCGVTPCNASSGKRQADAGLIESGNDILRPMLIQLAKRLPRQDARWREFHENMRVRKGANVTSAAIANRWLRRLYHEMVTAPQTAS

SEQ ID NO: 185218 - protein, 349 aa, unidentified
MDRTTYGLDIAKSVMQLHWVEAETGEIGRKKLARARLAEYFAQLQPVRVVMEACGSAHHWARVLGKLGHEVELLPAAQVRPFVRSNKDDAADARAIWLAAQQSDIRRVPHKSTEQQAVLSLHRTRSHWISVRTATVNALRGLLYEFGVVLRGGRRAGLKALAEQRAQIDEQVPQIMRSLVDGQLQTLNQVQQRIEQLEHEIEAVQKQLAKAGELRRVPGIGVLGSTALAATLGDGKAWRSGREFSASLGLVPAHSGTGGKVRTGHISKRGDPYLRTLLIHGARSVIEHAKDKPQWLQQMLARRPPNVVAVALANKMARMAWALVAHGRAYQRDWQSARPGCSTAQAAAA

SEQ ID NO: 185219 - protein, 338 aa, unidentified
MDTIGLDLHKRESQLCIGHGDGTITERRIVTSRERFTAVLGGQPPAHVLLEAGTESEWVARHLESLGHRVVVADPNYAPMYATRSRRSKTDKRDARTLMEACRLGAYRPAHRLSDARRHVRAELAVRDALVRTRTRYVALAKALVRRDGLRVPSGAAHRLPVHLRTLPLSPLLAAEVAPLVTLFAPLNEVIAAADQQLDALAATDPIVALLMTAPGIGPVTASALVATIDDITRFASAHQLEAYLGLVPRDLSSGEQRRLGPITKAGNRRVRWLLVEAAWRVLRAKDSATAALRAWAGRLAARRGKRIAVVALARRLAGIVYAMWRDQAPYGGCKVRG

SEQ ID NO: 185220 - protein, 357 aa, unidentified
MEQRNKISFKGQNIYIGLDVHLKSWSVTILSETSVLKKYSQDASPEALHKTLTMSYPDAEYYSVYEAGFCGFWIHDRLTELGIHNIVVNPADVPTMSSEKLRKTDAVDSKKLAVCLRAKQLRGIYTPDAEALEIRSLIRLKNSITKDTTRQKNRIKSQLRYLGIDIPKEYLEPNSNWSKRFIAWLKDVQMKTTSGRQTLDLQIRQLEDLRRQKLEITRALRKLSHSEKFEDTLRLLMTVPGIGQTTGLALMAEIVDVTRFANAEQLAAYVGMIPMCHSSGEHEGVGDITLRKHAILRSNIIEAAWVAIRKDEAMQLCYLNNCKRMVPSKAIVKVARKLVNRIYFVLKHHEPYVNAMA

SEQ ID NO: 185221 - protein, 403 aa, unidentified
MSFNGAPVTAAAVVAVDVGKNKAALAMTSADRHRLFGPADFAMTAPALAAVVERVCAVLPAGPVKVGVEAAGHYHRPLLGSGVWPAGWEVLELSPARVAEQRRVQGRRRVKTDVIDLEAITELVLAGHGVAVKPRAAAVTELTGWAMQRGRRVLTRTATKNQLLAQLDRCFPGLAMVLPDVLGTKVGRLVAAEFADPHRLAAFGFTRFVRFAGNRGLRVRRSAAERLVAAARAALPSPQAQVARQVLADDLVLLACLDAQIVVTEAKLAQLLPDTPFAPLTTVPGWGTVRVANYGAAVGNLDRWPGARQLYRASGLSPAQYESAGKRRDGSISREGSVALRRALIDLGIGLWHADPAARRYGQQLRARGKKGGVIGCAMAHRANKIAYALVRDQSSYDPGRWA

SEQ ID NO: 185222 - protein, 341 aa, unidentified
MDHYAGIDVSLEYSSVCVVDANGKIAREGKVASEPEALIGWLRSVGLGLTRVGLEAGPLSQWLYVGMREAGLAVELLETRHVRHALDTMPVKTDRNDARGIAQLMRLGWFRAVHCKSMGAQETRSILTARKLLQQKLRDVEASLRGTLRGFGLKVGRTTPKRFAGRVKELVVGHASLEAIAEALLAVHAVLLREFNGFERRVRTMARHDAKAQLLMSTPGVGAIVGLTYASAIDDPGRFKSSKQVGAHFGITPKKYQSGETDYTGRISKNGDKGVRTALFEAAHVILTKAVKGSALKSWAMRLARRAGMKKAKVALARKLAVIMHRMLVDGTTFDFAAAAA

SEQ ID NO: 185223 - protein, 389 aa, unidentified
MFYVGIDVAKDKHDCCILSSDGELIYPLFTISNNSLGFEDLMEKLSSLTDDYSEIKVGLESTGHYHLNILSMLLDNGLASYVINPLHTTLFRKGQSLRKTKTDKVDAASIAMMLLTDKTLKPYTDTSYHNEELKSLTRYRFEKVQERSRLKTSVTRLVTILFPEIEKLVPQLHMHSIYMLLSEFPGASYISSAHLTRLKNLLYKESNGRYGRDMAIKIRDAASTSIGSIIPAKSMELKHTIQLIEVLSEEIDEVEASIYAIMEQIDTKITTIPGINYRMAAMIIAEVGDFSSFKSADQILAYAGLSPTTYQSGQLSAAYARMEKRGSRYLRYALFNAAKYVCNWDPTFKNYLAKKRAEGKHYFVAISHACKKLVRVIYRMQLTGEPYHS

SEQ ID NO: 185224 - protein, 355 aa, unidentified
MDSTKYIGMDVHKESISIAVRNADGKIVMECVIETKASMILQFIDGLRGNVQVTFEEGTSAAWLYDLLKPHVTKLVVCDPRKNASMREGNQNDKIDARRLAELLRLNHLNPVYHGEHGLRSLKELVRSYLTITKDLGRVMSRVKAVYRSWAIPCTGKQVYAPRHRAEWLGKVTEPGVRRRAEFYYQQLDALRTVRQEVRRELLAEAKKHKAWKLLCQIPSIGPIRAAVLLGILQTPHRFRTKRQLWTYSGFGIETQSSADHRRVDGQLERAKKRASIRGLNRNCNHDLKNLFKGAAIVASSKPGPFQEFYTALLTKGIRPEMARLTLARKIATIVLIVWKRGACFDAQHLKPQAA

SEQ ID NO: 185225 - protein, 408 aa, unidentified
MSVHVAPATSSTLVVAIDVGKNVAAISATDSSRRRILGPTHVTLNRSGLDAIVTRIQSASDTSTQVRVGIEAAGHYHQPLLGYPWPSGWELVEVNPARVAEQRKIFGRRRVKTDAIDLVALTELLLVGQGIPVLERSDVCAEPSAWSAHRARRVLTHTATMIQLTTQLDRAFPGVGTVISDLFGTGIGRLIIAEFTDPTRLTKLGTAGLIAFAADHGLQLEHPRAERLVAVAADALPTPHAALARQVIARDRTLLIDLETQITEATARIAELIPASPFATLMSVPGWGPARIGNYAGALGDPERWAGSAQIYRASGLVPVQYESAGKRRDGHISGEGSVPLRRALIELGFGLRHNEPAAKRYAAELKLRGKPNRVIGCALAHRANRIAYALVRDQVAFDPGYRRREES

SEQ ID NO: 185226 - protein, 456 aa, unidentified
MQTLIRRAAGLDVHAKIVKACVRVWEGDDRQRQEVREFGTTTAQLLALAAWLGSFGVTHVAMESTGVYWKPIFNILEEQFTVLLCNARHIKHVPGRKTDVTDCEWIAQLLQCGLLSGSFIPPRAQRDLRDLTRHRAQLTGEATRAKNRIQKVLEDANVKLGTVASDPLGVSGRLMLRALVAGQGDPAQLAGLARGRLRAKKSELREALHGHVTEHHRFLLGRLLRHLEFLEQEIEELTRRIEAMMASTDPAPPQGGCPRDEAPAAPEAVPSLDAAAPAPVDPPPAVPAPMGFLEAVAWLDPIPGIDEVSAQALVAELGTNMGQFRTAKSLTSWARLCPGNDESAGKRKSGRTGKGDRWLRRVLVQCAWAASRTKGSYFGAQYRQIAKRRGKKRAIVAVAHSLLIVIYQMLKHHTAYDELGADFFDKIDPIRKTRYHVRRLEELGHKVILEPQPQAA

SEQ ID NO: 185227 - protein, 486 aa, unidentified
MKNQPPHSSKKGKKGSRQRSSQKPWSEMNRKQRREMQRKIQSPDLNLEVVHPNAAGIDIGNEVHYVAVPPNRSSEAVRRFGCTTAELRAMADWLKQCGIQTVAMQSTGVYWIAVFDILEEAGLEVYLVNARETKNLPGRKSDVQESQWLMKLHTYGLLRNSFRPPQEIRTLRTYWRQRSDLVRAAGRHIQRMQKALTQMNIQLANVLSDISGKSGQAIIKAILQGERDGGELATLCDRRVQASQEEVAGSLEGNWQDDLLFVLQQEQDGYEFCQKQMADCDRHLEQCLQQRADRSQSASLPVEKRKERRKKKKGNHPQFDLRTALFRMAGTDLTLIDSVDVMTAMTILSEAGWDMSKWKTEDHFVSWLRLCPDNRISGDKIIGKGRLPTNNRVTIALKMAASTLRTSQTYLGAQFRRLRTKLGSPVAIKAMAAKLARLIYRMLRFGMQYVDQGAEFYEAQHRKLQISHLKRKASQLGFQIIEAAAA

SEQ ID NO: 185228 - protein, 345 aa, unidentified
MKITTIGIDLAKSLFQVHGVDERGKTVLRKQLKRKEVVSFFANLDPCLIGMEACGSAHYWGRKLSELGHTVRLMAPQFVKPYVKTNKSDRNDAEAICEAVGRPNMRFVAVKTAEQQAVLALHRARQGFVKARTAQGNQIRGLLAEFGLVIPKGIGHIAKRLPEILEDGENGLPGMMREILERLGENLKELDKQVGELERQIKLWHRENEQSRKLEAIAGIGPITASAFVATVGDAKSFKNARQVPAWLGMVPRQDGTGGKAKLGRISKRGDVYLRTMLIHGARSVIAQIERKPDQADGWLKKLLARRNKNIAAVALAARNARIAWALLAHERGYQRDYVATRPAA

SEQ ID NO: 185229 - protein, 317 aa, unidentified
MPTTLDPTADSAVSTTYIGIDFSKDKFDFNNLQISGSYPNDPSHHRRLLAKLPKDAHLICESTGAYHRPLVMAAHAAGFKVTVANPRQVRDFAKGLGRRAKTDSIDAQTLFLFGVKVEPKSDQPPTPAQVELNELSVVRQQAVLERSTLKVQLPSQSIKLTRSLTKARIDLLTTQIKKLEAAIKKAIASEEKLAGAAARLVQIKGVGFITAASCLAFCPELGSLSRNQASALLGVAPFNEDSGNVNGPRHIAGGRMRLRNVLYMAALSAIRFNPILRAFYTKLRTAGKPAKLALTAVMRKLFMLINHLIKDPEFQLA

SEQ ID NO: 185230 - protein, 370 aa, unidentified
MSEPTTLFVGLDVHKDSIAVAHAEAHRADPPHYVGSIGTRQVDIDKLVRRLHSKASNLVFAYEAGPCGYVLHRYLTAQGLDCQVVAPSLIPKRPGDKVKTDRRDAVEIARLLRSGDLTRVYVPSVEDEALRDLCRARDAALVMLKAAKLRLKSFLLRLGLHYTGRADWNEAHRRYLAKVVCPTAPQQIVFQESVHAVDEQVERLRRVEKELLDVIPKWRLYPIVEAFQALRGVQWTVATIVASELGDMTRFDNPRQLAAFVGLIPSEYSSGENRRQGGITKTGNGRARRALIEAAWAYRHNPKISVQIQKRIESLPKPIQDIGWKAQLRLCKRFRRLSARGKHSNIAVTAVARELIAFMWAIAREVPINS

SEQ ID NO: 185231 - protein, 360 aa, unidentified
MAPTNLTNPAQTDQPDVVIGVDTHKDFHVAVALATNGGRLGECSIPANRLGYAVLQDWALEMGRRPVFAVEGTGSFGAGLCRELMAVGYSVVEINRPDRSTRRRLGKDDAIDAEAAARSLLAGTATITPKGGTHLVEMIRLLKGNKDSASKSRTRAINQMKAILITAPAVLREQLEPLVHDALMATCAAFRVAMVDSPGTAAKKALCFLAQRVLGLEREIAGLLDDLNQLTQQACPGLRQTYGIGTDGAATLLITVGDNPERLRSDAAFASLCGVSPLPASSGKTNRHRLNRGGNRQANATLHRIVVVRLRWHEQTKAYASRRLKEGRSKAEIMRCLKRFIAREVFHTLLGRPPVRTAAA

SEQ ID NO: 185232 - protein, 357 aa, unidentified
MEKVITHAGLDVATLKGQAREGTILDIPNDSKVIRRTFKRLAAEAYELRCCYEAGPCGYEVYRQLAAMGIACEVIAPALIPVRAGDRIKTDRRDASKLARLHRAGELTAITVPTEDQEAVRDLVRARDDVRKDLTAARHRLGKFLLRHGRAFHDGKNWTQRFWAWVGGQKFERVCERLTFDHYITEVKHLLSRREELDREIEQVAQTKPYAVSVGKLTCLRGLSTLSAMALLSEIGDFRRFDHPRQLMAFVGLVPSEYSSGGKEKRGRITKTGNSHVRRILVEASWTYRHRPAVSPGARKAHTGQPATLVEYTKRAHHRLHRRYARLIGKGKKPQLAVTAVARELCGFVWGVMTMAA

SEQ ID NO: 185233 - protein, 352 aa, unidentified
MAATAQSAIAVIGIDIGKNSFHVVGLDGRGAIVLRQKWSRGQVEARFANMSPCLIGMEACVGAHHLSRKLKALGHDARLMPARYVRPYSKGQKNDFRDAEAIAEAVQRPTMKFVVTKTADQLDLQALHRVRERLVSQRTGIINQIRAFLLERGIAVRQGQRFLRVELPRILATPPDVLSPRMVRVIEGLASDWHRLDERIEVLSSEIEELAKRDAGCERLMSIPGIGPIISSAMVAAIGTGDSFSKGRDFAAWLGLVPRQISTGDRTILGKISKRGNRYLRVLFVQAAWVVLVKVKPTRWQGHGLRPWIEAAKKRLHHNVLAIALANKLARIAWSVLAHGRAFETNKLQAAA

SEQ ID NO: 185234 - protein, 347 aa, unidentified
MRFYTQQHKHYCGIDLHARKMFVCIISHRGKVKVHQNINTDPELFFELVFAYIDDIIVGVECVFCWYWLADFCAQHHIPFVLGHALYMKAIHGGKTKNDKIDSYKIALLLKGGNFPVAYPYPAKWRATRDLLRRRMYLSRRCGELVVHIQNTNTQYNLPAFKKKLSRKYNHEGVAERFPDPQVRQSVQVDLAVIESLNQILKKLEWHIEKTARQHDYHTLYLLRSIPGVGQILALVILYEIHDIKRFPRVQDFSSYARLIRPVKESNGKWAGHSNKKIGNHHLKWAIKEAAILMLRDSHQAKYYVSKLEHRYNKGKALGIFTHKLGRAIYFMLKNKEAFDMKRFFDQ

SEQ ID NO: 185235 - protein, 391 aa, unidentified
MIRRVPALTTSMLVPHCFGNWMDSPLAEASGRHGGTLWPTTARDEPMNKLTPTYVRLAVDLAKQVFQVAGEDASGRVVYEERVKSRAAFTKLLEGLDPKVEVLLETGPGAQAWARLIQGVGAKVRILPAQRVAEHRSGAKNDRNDCLAILRAGRDEMLHDVPVKSIEALGMQAQHRIRTGYIRRQTFISNQLRGLLMEHGIAVSKSNAALSLWVGRIQTDTSYPIPPMLRELIADLWAEWGHLAQRRERIDKQLEQTAKSDELARRLMTIRGFGPIMVTALIAKQSQPERFPNARQFAAYFGLVPDQHSSGSRVRLGRMTRRGDAYIRSLAVTGAQSVLHHVKADATETDDKRLQRWCRQHGKKGAAIRLANRNLRIAWVVMTTQSEYRRQ

SEQ ID NO: 185236 - protein, 414 aa, unidentified
MEGEINKSCGLDIHKRFVIATILSRSGEKQQQRFARDNDGILNLKNWVTSEKCDVVACESTSDFWVPIYESLIDHLPVIVGNARDMKAFTHKKTDKIDSEVIAQLALNKMVQPSRIFPKKHRDYRSYVRLRLTLVRKRTDIKNGAHAILSSEMLHLGDVLTDIFGKNGRAILAGISSGKNVDQIIESLSSNVRKKSVQIREILDREISQSAAIRLQICLNLIKNLDDEIEVLERQIFNYAYQKHKREMEILMSVPGIGELGAAILIAEIGNFRDFLSGDKLASWLGIVPNVYQSADKYHNGRITKRGSKVARWILTQIAQAAARKKNSKLKEFFNRKKKSIGHAKAIIALARKIATIIWHLITNDEMYEDETGYQKGEVQKRKIVETEIFSVDERITIISGIIAIMGKKDGEST

SEQ ID NO: 185237 - protein, 339 aa, unidentified
MPIVGGLDIHRAQITYDYLDLRTGEEVRGVIKPATREAFAAFLDTIGRKKAAFALEGTTGWRFVVEELRARQMEAHLAEPAETRALRGPKRRAKTDRADARLLRDLLVAGRLPESWIPPDHLADLRTTVRLRKTLVGERSAWLRRMHAQLFHHGLALPPDLRTQAGRDYLSRAPLPSAARNVLDAGCAIIDQLDEQLDSIDARLIPLARRLPGCQVLCRQWGIGPVLAATILAELGDTRRFSSSRQSVRFAGIDVTVAESDGKRSRGHLSRQGSPTLRWALYEAAGAAWRVASPDHAYYLEAKARLGTKRARLAVARRILRRVHHDLADAGDVAFSTAA

SEQ ID NO: 185238 - protein, 415 aa, unidentified
MEVVHPRCAGIDVSKRDAKLCIRIQGSSGRKTSSTVTTWGAMTNQILALRDHLAAQQVTVVIMESTSDYWRPFYYLLEADFEVMLVNAHEVKNVPGRKSDVSDAAWLADLGAHGLLRASFVPPEPIRQLRDLTRARTHITAERTREVQRLEKLLESAGIKLSSVASDITGVSGRLMLQALIDSHGAADPAVLADLAKRRMRSKIPVLTEALNGYFTEHHAFMTRLFLDRIDAHTRDIELLSQRIDGLMTPFLPARALLESIPGFSQTVAEIFIAETGGDMTQFPTPEQLASWAGVSPGSNESAGRVKSTKTRPGNRYLKGALGVAALNQAKSKKTYFSAKFRHLAPTRGPMKAIVAVERAMLIAAWHMLTNAEFYRDPGADYYTRRDPARTKARAVKQLEALGYTVTIQPLPQAG

SEQ ID NO: 185239 - protein, 313 aa, unidentified
MSQFVSSAFLGVDVSKTSLDLSFGSSDPARTILNQPRSIQKLVRELRDQSPKLIAMEATGGYERSLMHALIDARLPVVRLNPLRVRRFAQSRGLLAKTDRIDACVIADFARLNADRLSPMQPIGETACMLRELTTRRRQLVEQTVASKSQLEHVTLKPIRQSIDRTIKHLCKEIHQIESLIQELIDNDAALQTRQQKLLAVKGIGPRVSRVLVSELPELGQLGRRQIAALVGVAPFNDDSGSHAGQRRIQGGRATVRAALYMATLVAVRHDPILKARYDHLKQRGKPKKLALVACMRSMLNYLTSILADKETT

SEQ ID NO: 185240 - protein, 343 aa, unidentified
MQAITIIGLDIAKSVFQVHGVDAAGQVVVRRQLKRRQITTFFQNLPPCLVGIEACASSHYWSRELQALGHSVRLMPPAYVRPYVKRQKNDMADAEAICEAVTRANMRFVPTKTPEQQSGLMLHRTRHLFMRQQTSVINAIRGHLAEFGVVAPVGRRGVEELLRVVADPSDKRVPELVRACLAALSSQLLGIKKQILDFDRMIMAWHRSNQTSKRLNCIPGVGPLLATALVASVPDPKTFRSGRNFSAWIGLVPKQHSSGGRERLGSISKQGDRYLRSLFVTGALAVIRYAKIHGTKHRPWLTALLARRPTKVAAIALANKLARMAWAMMATGARYNYPASLRP

SEQ ID NO: 185241 - protein, 418 aa, unidentified
MNVKTRRTKKQVNVENQAINLLSKEELNKKIEVVEKELRSYTWRELETNGKFAKNDKLSFITDDMLIVGCDIGSENHYIRAIDVRGRELSRGAFEFSNTSEGFENAKAWVLALAAKHDKKQIVLGLEPTDHYWFALAAWMISNGISVVQVNPYAVKQSKEIEDNSQLKDDRKDPKLIANLVKDGNYGMPYLPEKVYADMRRLSMFRDQLTEDRIRNINRLHKELKIYFPEYMDAFGKIDGAFTLEVLKVSAIPSDITALGAEGIKNIWHNVKLRGCGYSRANEIVSYAEKSVGLTDGIDAGREAVKWYAEQILKLVACSSGKHKGQTKISHRGRKRLRYWLFQAAKSAVSHADEFKQLHEYYTTRTNNPLKKMQSLVVIACKILRVIYTILKTGTTYDPQKLLEDIKRPTASQTPMAA

SEQ ID NO: 185242 - protein, 341 aa, unidentified
MKQVVLKQNVGIDISKNGFAVAFMYLLDNQRVKIKGTRSFSNNEKGFSEFLNWCSKFQIKGLSLHFTMEATGVYYEQLAYFLNQKRFIIHVVLPNMAKKFAQSYNQKIKTDKADAKVLAIMGIERSLRIWKPSSAIYRKLRALTRERELLIVERTKIKNQLHSQEHSVNAARTTIARMKEHIKYINKLLEKIEKELYKESKKDQLVWNKIEKIISIPGVSFITAITIIAETQGFVNIRNIKQLISYAGYDVSIKESGKWKGKSRISKKGNSHIRRVLYMPAIVSVRYSEHFNNFYNRVNKNKVSTMIGATAVQRKLLALIYTLWKNNTTYNEKIQNVKLVA

SEQ ID NO: 185243 - protein, 362 aa, unidentified
MYVAGIDAHTTYLVVAVVSKEGVLVQAPVQVRVRQAEKLLALLASYRPLEAVVETSGGWPWLRELLVGQGIGFVLAHAKKLRAIAEATFKSDEISAELLARMRLAGLIPQVYARPPEQREWAILVRHRTRLVRLKTLYASRIHAELHAVGLRLPRGRLLTRAGRRWVKQEAWARLSPEQRQLVATHFRLLEELRPHVQRLDHRVTARSERIPEARLLQTIPGIGPFRSLVLCAEILPIQRFATPAQLISYAGLAPRTAKSGLGPIWHGAIPQAANRWLRGVLVKAVVQHVQGAPQRALARYYAERKPRLGWPVARVATARKLARVIYAMLRTGTPWQDPGRALPEDAEPKSGRGELADEQVA

SEQ ID NO: 185244 - protein, 329 aa, unidentified
MFVGLDLHKNYLQTAVMDDQGRLLSQERIPNKDENIEEFARKTLKDSHAEIVIESSSTWYHVYELLSKNQNCHVVLSNPVKTKAIASAKVKTDKVDALTLANLLRTGYIPESYIPPRHIMDLREMVRYRTSLVRIRVEAKNKIHAILLQNGTKISEKPFTIGFVEELRRLGDYRIDGYLSVISSLSHQIQTVSNTIKREATEDESTRLLMTIPGVGYFSALLILSELGDINRFPDSHHLCSYAGLTPSTHSSGGVTYHGSITRTGSRYLRWIVTECAKAHIRSRRDSQLTRFYTRLAKRRGGSKATVAAASKLLRIVYWVLKEKRPYHS

SEQ ID NO: 185245 - protein, 317 aa, unidentified
MTNKSRNFIGIDVGKKKLDLALWGDSSSWQADNNEEGIEELLGWMQSIPNCLVVAEASGGLEMKAVTAISLAGIPVSVANPTRVRAYAKAIGQLAKTDAIDAQMIAQYAAVIQPEPQRVKDEQELTLSALVTRRKQLVEMRTAEKNRLSTATTSIKEHILEHLAWLKESINSIDEEINLLISSHPEWKEKAVRLTTVPGVGFVTAATLLADLPELGIVNRQKIAALAGLAPYNRDSGKKSGRRRIFGGRSSVRRVLYMAALSGSSNNPVIRNFYQRLVDQGKPKKVALTACMRKLLTILNAMARDETDWAPSIGIPA

SEQ ID NO: 185246 - protein, 371 aa, unidentified
MKKCTRFVGLDDSKHSIDVAVAAEGREGEVRSYGTIPNTTEALKKLVRRLGVPKELYFVYEAGPCGYGNYRDLLTLGANCMVAAPSKTPRRPGDRIKTDRRDAITLARLHRAGELQPVWVPDEETEAMRDLTRAREDAKYAQTKARQRLGSFLLRHGRRYPGRSHWTKTHLRWLSEQRFAQPSQQICLDEYVGAVEQATDRVQRLEAELRELVSVWSMGPVVSAMTAHRGVSLVVAATVCAELGDLTRFDRVRELMGFVGLVPSLQATGLGRRVGAITKTGNGHVRRVLVEAAWSYRHPARRTVHLRRKLEDQSEEIQAISWKGQVRLCGRFRRMIARGKHPNKVTVAIARELLAFLWATARMVTPMSPAA

SEQ ID NO: 185247 - protein, 320 aa, unidentified
MDAVLGIDIGKAKFHVTLLFSDGTRRRKACANSPAGCTELLAWLARHRAARVHACLEATGAYGELLATTLVDAGHLVSILNPAIIHHYAKSRLSRAKTDPVDADIIADYAAKEHPPLWTPLPREVRELQGLVRRLDALIGMQTDERNRAQAGALTPAVQQSIEAVLVHLAAQIDTVRQQIRQHMDHHPGLRAQRDLLTSIPGIGESTAALLLAELFNKAFTSARQAAAFAGVVPRPHDSGLHEGRRVMCKLGPARLRKGLYFPAIAAIRFNPSLQPLAHRLRGAGKPPMLIIGAAMRKLIHLAFGVLKSGRPYDSSLAGA

SEQ ID NO: 185248 - protein, 392 aa, unidentified
MIFVGIDVAKDKHDCFIISSEGEILADVFTISNSKEGFEHLLQTINTCTGIRGSKIKVGLEATGHYSYNLLGFLLDNDLPTYVINPLHTNLYRKSQSLRKTKTDRVDARTIASMLMSDVSLKPYTNIAYHNSELKSLTRYRFDKVKERATLKTSVARLVNILFPELEKLLPTLHTATSYALLSEFPSAKHIAEVHLTHLTNLLHLASKGHYDRDKAVQIREAARNSIGTYMPAKALELKHTIKLIKEFNNEIAEIESAIQSIMDKIASPITTIPGISIRMAAMIIAEIGDFNNFDSPDKILAFAGLSPSTYQSGQLNNCYAHMEKRGSRYLRYALFNATKFVCNWNPLFADYLAKKRSEGKHYNVAISHAAKKLVRLIFALQKSGQPYIAKN

SEQ ID NO: 185249 - protein, 370 aa, unidentified
MQFIGIDLHTNRFTCCYREGKSPADGKDEKRTETFELSAPGLASFYTTLTKETYVLVEATITSFCFVRLIQPRVKEAIVANSYELKQISLGRNKTDKIDADRLCRILKMQVLSGEKTISPVTVPPVEIQELRGLFSTYRLLKKQSTQYKNRIHSLLKEQLHGYTQEQIFGKSSRKEIREMEGDPVLSFQLNHLFNLLENLEASTQVLEDKIKEQAEPYMREIEILTSMKGVSVFIAIAIIADIIDVSRFKNSKAFTSYLRSAPRVENSNTSTKTKGTNKKGRKLSATLLTQSLNHVLDASPKLAKWYNRLTRYKKAGLVRTGLRRRVLAEMFQMLKKGEYHYGREADKHEAKLSQYRKLLTKRKNSIKRA

SEQ ID NO: 185250 - protein, 366 aa, unidentified
MMSAPVAGIDPHQSTFTVAVVDSNGVEMIHASFANTAAGYLEAIELLTSQQVGVVGVEGSASWGSHVAIALVAAGFDAREVPPQRAARQRRSRRLDKTDHVDAVSTARAVLAEPSLGPVQALEVYDPLVAELEAVLEHRRILVQARTLALHHLADQLAKLPTEIRDRLGTHGNVEARLARLGQLDTDTAAPTLTPAGRYRLSWLVAAVDQDRRARAEIRRLERELSRLLDEHGTTLRDEPGIGPIAAATLLVEVGDPFRFARESKFARWCGTGAVAVSSGEGDNTPIRHRLDYGGNRRINSVLYTASITQQRYLPDARAYLDRKLSEGKTRRAARRAHKRHLANRIIRRMWHDETQRTNRTALPAA

SEQ ID NO: 185251 - protein, 355 aa, unidentified
MKYYTSTTEFNCGIDLHARQMYVCVMDRQGKKLVHTNVKNNDFAFFLKLVQPYRHDLTVCCECMFGWYWLADACQAAGLTFVLAHALYVKAIHGGKNKNDRIDSEKLTHLLRSNLIPPAYVYPAQKRPLRALLRQRIFYVWRRAELLARIQSHQLAHNRIPAKQTRRVRDPWEEQLLAAEDHPLRQLALKNDLAMIRHFDHQIFQLEEELQRQTKQLASGEYALLQTVPGIGETLGLTLLYEIGDIERFPTVKDFLSYCRLVKGTVASAGKIKGLRGAKLGNPYLRWTFGEAAVIAKRDHFKIRPLAQQLEARMGGNKFKANTVVAIKLARAVYFMLKNKTVFEPERLVAALARN

SEQ ID NO: 185252 - protein, 427 aa, unidentified
MNDSRYKPTLCVGADVHLDEIVLRAVDKALGHEVLQQFRVTNNLPGAQLAASTIAQTATDLGYARIEIGWESTGMLWIPFHRYLSTEPLLQPFELDLVCFNPKLVAKFKDGLVLRSPKNDDRDAFDIAARLRFGELPVSYVPSDFWQGLRRLTRYRYRLSKALSQEKNRFQSYAFLKCSDWNRVQAFSDFLGATSVALLTEFTVAEVQDMTHDQLVDLISHRGRGRFDDPTATARAVRQALRTSYPIDPQMDEMVTAALAASWDHIHYLNRSMKRLDHLIARYIDLVPNPLITIKGLGAVITAGILAEIIDVLRFPEEKHLAQFMGLTWQKSSSGGFVSQNTRLTKVGNVYLRYYFIMGANLLRQHNLEYKAYYWRKYQEVSKYQHKRALVLTARKLVRLVHALLTKNEPYVRPRMTDPGQEDVGLQ

SEQ ID NO: 185253 - protein, 372 aa, unidentified
MNYNTVYVGMDVHKESFSLCAYTIEAEKASHYQRTEADYKKVLNYLEFLRTIYGDDANFICGYEAGCFGYTLYHQLTANNVKCIILAPTTMLEQRSKKRIKTDRRDAEIIAKCLAQHNYSPVHIPTAKDEETKEFLRMRDDHKLALKKVKQQILAFCLRHNYRYDGKSHWTAAHLKWLKALTPEALYKEILDEYLLTYQTLSDKIERLDKRIEKLATQDEYKEAVKKLCCFIGVKTHTALSVLVEVGDFKRFASAQHFASYLGLVPGEDSSGDDQNRLGITKAGNRHVRLLLTEASQCYARGQVGFKSKELKSRQSGNTPAVIAYADKANERLRRRYYKMVLNKYKKHNVAKTAIARELACFMWGMMTDNIA

SEQ ID NO: 185254 - protein, 382 aa, unidentified
MIVIGVDTHKGSHALAAVDDGTGRVRGGREIKADDAGHLAAVRWARGLDEERVWAIEDCRHVSGRLEQALLAAGERVIRVAPKRMGASRRGERERGKSDQIDAQAVARAVVNDGVDRFPAAYLDERAMDIRLLSDHREDLVAERTRIQNRLRWHLLELCPELEAKLPRRSLSNLRQLERLDRRLRRLAPNVRLRVAREELAHIRALTRQAQELERELHGLISAYRPGLLEEPGCGTLTAALLIGHTAGAQRFRSDACFGRQSGTAPIPCSSGQRTQHRLDPGGDRQLNRALHTIAITRAHYDPVTREYLARKRAEGKTPKGALRSLKRHLARRFWRLLAEPPLAKQPTPRQPGEPIAIPERPAPRREVDRTITGPIPMVCIS

SEQ ID NO: 185255 - protein, 366 aa, unidentified
MVSSLFLIGVKRATMRVQTVIGPKREETEMKITTIGLDLAKTVFHVVGLDEQGKEVMRRKLRRSQIPAYFAKLPACRVGMEACGGAHHWARKLRAMGHRVDLIPAQHVKPLVMGNKNDYNDARAIAEALGRPKIHFVAVKTQAQQDLQAVQRMRSQCVKDRTALCNGIRGLLSEYGIVLNQGVSTIRKGIPRLLEDAENGLSDPFRSWLHQSYQRLVELDGHIEFYTRELEQAVGQDEGCRRLQAIPGYGPIVAGAFISAVGDAAAFRRGRDVSAVLGLVPAQHSSGGKDRLLGISKRGDRHVRFLLVQGARSVVLRAAGKEDRLSRWINRIRQDRGTNKAVVALANKMARIGWAILRNGTEYQPA

SEQ ID NO: 185256 - protein, 481 aa, unidentified
MSQQEKRTNQPGEEKTAVGKGKRGRKRKGMCLEDRPILEANAAGIDIGAREIFVAVPPDRDEHPVRVFSTFTEDLEKMAEWLVSCGITTVAMESTGVYWIPPYDVLEQHGVKPCLVDARGMKNVPGRRTDWHECQWIQFLHSVGLLRAAFRPDGDVCAVRSVMRHRTELVEMTSQHIQHMHKALTQMNVQIQHVISDLTGVTGLAIVDAIIAGQRDPVALAKLRDPHIKASEEAIRKSLVGNWRPEHLFTLRQSRKSYQHYQEQIAACDEEIERLVLAFVPRVDPAERPLPPDRKRKQRGRKKKNVNPKTGFDLRTESYKLFGVDLTQIPGLMAMVLTLFSEVGRDMSRWPTAGQFVSWLALCPDNDISGGRVLWRGMRRVHNRAGDLFRMAAYALHHDQTPLGDYLRRMKSKLGPAGATTATAHKIAIIFYTMVKKQVEYDGTIWEQRDAQREKRFEAKLKRQAQQLGYKLVPIEEKPAA

SEQ ID NO: 185257 - protein, 383 aa, unidentified
MKAVCGLDVHKDSIYLCILHPDGELFEQVFGVLTFQLHEMCKLLKKHHVSEVSMESTSIYWVPIWRVLSPHFTLRLVNPYFIKQLPGHKSDVKDAQWIAECTKKELVNGSFVPPEIIQQLRQYDRRIFDLNEEIVRKESKVDAVLQRCNIRLSNYVSNIECKSYRTVVRRLSEGVTDPQELIKEIHGRIINKHGRETILASMEGVVSQAEIDVLRQLREEIDIAESHKKECQDKMSEICQKYFPEELRRLQTIPGIKERAATSLIAEIGTDMSKFETANHLAAWSGLRPRNDESNKKVKSRKTTHGNSYLRRTIIQCAWAASRQKDCFFSWFSYHQTVVRRKNKMKVIVAVARKMLVSVWHVLHDNVEYIDFKHDCEESANNG

SEQ ID NO: 185258 - protein, 362 aa, unidentified
MQYIAFDAHKHYTLASVEREDGRLVREQQIPHERGALQAFLQGCDPGSPVAVETTGNWYWIVDEIEGAGCRPRLVHARKAKLMMGMINKTDKLDARGLNRLQRAGTLPAVWIPPSALRDQRDLHLTRMVLVRQRTRLKNRIHAALAKYGVSRSDVSDLFGRQGTRWLQEHLGQLPPQTAYAAQRVLEQIETLDRQVAQLEQRMSELFTPTAQLELLRSLPGVGFILGVVILLELGDVRRFPRSAQLAAYSGTTPRVHASGGRTRYGPLRPDVNRYLKWAFVEAANIICRRRARAPDRHVCQLYARIAHRRGHQTAIGAVARHLAEATYWILTKEQPYREPQSRPPQGPAAGIVHGGVSAPMP

SEQ ID NO: 185259 - protein, 388 aa, unidentified
MQTAADHPEAPTAIRHDLGAIFISLELSRSTWLITSLSPGGGEKMSKHSVRGGNVAGLLERFAQLQEKARARTGRTFPIIVIQEAGLDGFWIHRVLQNEGIESHVVDPASVATSRRRRRAKTDRIDGEALLRTLLAYKRGEPRVCAMVKATTPEEEDRRRLCRERKVLTNERVQHVNRIKGLLFGQGVSGYEPLRRNRRQQLNELRTGDGRPLPKHLKTQISRELDRLELLLEQIKAVETERDALLAAQKVALPGPAAMLLDFNGIGPEFTAVLWSEGLFRHFDNRRQVASYAGLAPTPWQSGSVDHEQGVSKAGNPRLRTTLIQLAWLWLRHQPQSALALWFKERVARNGGRHKKTTVVALARKLLVALWKYVTAGVVIEGAVMKTA

SEQ ID NO: 185260 - protein, 414 aa, unidentified
MTNSLDKFSVLIGLDWASKKHDVCIQKSNTDTRQFKVIKHSPEDIDDWLCSLHNEVKGPIAIAVELSSGPIVYALQKYSYVTVFPIHAATLARYRQAMFPSGAKDDPSDAELALDLMLKYPEKIKPLKPSSDASRALNLLVEQRRVLVEDKRRAVNRLINALKQYYLLPLAMFSHRGSDLFCEFLLTWPTFKQLKRAREKTIRAFFSKRGGNAVANTDKRIKAINDAMALTEDSSVIEPYSLLSVSLCNQIILLNKSIKAYDVKIDELFNQMPDADIFASLPGTGPCLAPRLLAAFGEDRSRFSSAQEIQNYAGLSPVTERSGNKEWIHWRWQCSTFIRQTFVEWSAKSVHQSYWAGLYYEKQRAKGKAHQAAVRALAFKWARILFKCWQTKTPYNEARYLKALKERNSSLLST

SEQ ID NO: 185261 - protein, 401 aa, unidentified
MTDDARWFVGVDWASQAHQACLIDAGGKIIGEQAFAHGGAGLADLCTWLLAKTGAAPTAIAVAIEVPHGPIVETLLERGFQVYAINPKQLDRFRDRFTVAGAKDDRRDAHVLSDSLRTDRHCFRRLAAENAVVIELREWSRMAEELQQERNRLANRVREQLWRYYPQALAIGEDLAADWFLELWAAAPTPAKAARLRKSAVERVLKAHRIRRITVPEVLRILRQPALAVAPGTAEAATAHIRALAERLKLVNRQIGEAHRRLEGLCAKLAGDGGENAPGQATEQRDVTILRSLPGVGRVVLATLLAEAAEPVRRRDYHALRRLSGVAPVTKRSGRRCIVIMRQACQMRLRTAVYHWARAAIQHDELSRRRYTAIVSDTSSAASSRHCTRVAAAANANHTER

SEQ ID NO: 185262 - protein, 326 aa, unidentified
MNAIIGIDVSKAKIDVAWLRDVATVKVKTKVFENSSSGFSALQEWLSANTKQPITECHCVMEATGIYHEPLALWLFEAGAQVSVCNPAHVKSFSKGLGVQHKTDKIDSISLARYGALAMPSHWQPEIKPIRELKALLSRLEALEVDLMREQNRMEKAEFSSSSSQVVESIKTMMEHLAKERDRLDQEIDDHIDRHPDLKRDQELLLSIPAIGRVTSRLMLAVIRGKDFKTAGECAAFIGVIPKIQESGIFRGRSALSKKGNPLIRAKLYMAGIVAMQHNPTIKAFVQRLIDNGKNKMQALGAVMRKLVHICFGVLKNQQKYIPQGA

SEQ ID NO: 185263 - protein, 354 aa, unidentified
MPSNAETAVARTIGIDTGKNTLHMIGLDEKGAIVLREKVSRTRIAARFVNLPPCLVGIEAGMASHYVARELVALGHEVKQVPPTYCKPFRQGHKNDFRDAHAVAEAVERPSTRCVPIKTDGQLDLQALHRLRSRLIGNRTAVINQIRGFLLEHGIPVRQGHRFLRQQLPQILATRTDVLSPRMIRIIGDLMTDWKYLDKRIEGVTDEIEALAHTDEGCQQLITVPGIGPIISSAMVAAIGNGAAFCKGRDFAAWLGLVPKQMSTGDRTILGRITKRGNRYLRMLFIQGARAVLLRPASWAKHSFGSWLAAATRRLHRNVLAVALANKLARIAWTVLAQGRRYEARVELRVEVAA

SEQ ID NO: 185264 - protein, 352 aa, unidentified
MDKGNKLDFRGQHIYVGMDVHKKSWSVSIHTEQFEHKTFTQPPEVEKLTHYLQRTFPGATYHTVYEAGFSGFWLHDRLKEKGIDCMVVNPADVPTKNKERTGKTDRIDCRKLARGLRNGEIKGIYVPSRMKVEDRSLVRTRQSMVRKQTRCKNQITSILFFYGITIPEESHWSRQFINWIESIRMERASGDFALKAHLEELKHLRQIIANLNRAILSLSRTEEYRADVLLLKSVPGISTLTAMILLTELADISRFSSLDKLASYAGLVPDIKSSGETEYSTGITFRRNAALRGLLIESSWVAVRKDPALIMAFNKLSMRMKKTQAIVHIARKLLNRIRFVLKNRQKYVPAVV

SEQ ID NO: 185265 - protein, 344 aa, unidentified
MKYYVGLDVALRSLALCIVDSDGRTTIEKQLFCDVADVVDCLRKFDRPVEIIGLEAGTMSQHLFHGLSAEGFNVVCMETRQVNAALSAMRNKTDRNDARGIAQIVRSGWYNPVFMKSKISHCERALLTSRKTVLNKCLDLENEIRGLLKVFGICLPKFIKRYNFSKLVRPILEADEDLSHALMPMLDAHNAMLVTFAELDRRVKKHARQDKVCARLMTVPGVGEITALSFKSAIEDPARFTSSRNVGAHFGLTPRRFQSGEMDNHGHVSRAGDATVRANLYTAANSLLMRTRDPSNLKSWGLKLMRKKGRRRATVALARKIAVILHRIWVDETEFCANGCEVTA

SEQ ID NO: 185266 - protein, 460 aa, unidentified
MNRKQSKSKMDRTMPTVYPNAAAIDVGATMHMAAVRADSAREPVRSFGTFTADLHRLVDWFTECGVETVVMESTSVYWIPIYELLDVRGFTVFLVNARDAKHVPGRKTDVSDAQWLQRLHSFGLLRASFRPKGQIAELRAYVRQRERLLQYAASHIQHMQKALTEMNLQLHHVVADITGATGLRIIRAILAGERDPEALAGFRHYSCHSSAETIAKALTGSYRAEHLFALEQALALFDAYHEKASACDIRIEAVLKELSTHRGRGHGAVPPASRRRNRADQANALAFDVRAALFALLGKDITTIDGLGPYLSLKLIAECGDDLTSWPSAKHFTSWLGLAPSNKISGGKVLSSRTRRSGGRAAALLRLAAVTVGRTDTALGAFYRRLSSRIGKAKAVTATARKVAVLFYNAVRHGMEYVDPGASSYETRYRTRVINNLHRRAKTFGFVLQPLEPKAGAAVS

SEQ ID NO: 185267 - protein, 387 aa, unidentified
MSKQNDLSRCLVALEQDATLIAVVEMGQASWLVAGIVPGLDRYPLKKLGPDRDALLQLLHRWRSEAEKSGHAIDRIAVAYEAGRDGFWLARWLRSQSIEAHVIHPSSVPVSREHRRAKTDRLDTELLKRAFLGWLRGEPKHCSMAAIPTLDDEDARRPGRERQVLVEERTRILNRLKANLARLGIRGFRPNLARAPSQLEALRTPEGVAIPMNTLAEMRRDLDRLRFVKQQIKEIEKTRAERLAKAPDERRHVAARALIRVVGVGVETADMLVQEVFSREIRDRRALARYAGLTGAPDESGQRRRERGLAKAGNARVRRGMIELAWGHLTHQKGSPLSAWYRMRTADARRGTRKTMIVALARKLLIVLWRLATTGEAPEGLQLRPAA

SEQ ID NO: 185268 - protein, 343 aa, unidentified
MNTVCRIGMDTAKNVFQVRGLDATGATVTTRRLRRTQVLEWFARLDRCDDCLVGLEATGGSHYWARELQRLGYRVRLLNPKAVKPYRQGQKNDARDAAAIAEAVAREVVSEAPIKSAEQQALLARQGYRRRLVERRTALGNQLRGFLAEFGIVVPKGWKKLREHLAHAAEDADNGLPADVRAVLADGGEELRDLERRIDAQDRALAHQARADERCCRLMELDGIGPLTALRLVAICGDGVAWRNGRGFAVSVGVTPAQHSSGEHVRLGAITKQGDVELRTLLIHGARSTLRRADHGVALDPWTERLRRRRPHNVAAVALAHKRARIAWAMLAHGTHYQAPMAA

SEQ ID NO: 185269 - protein, 406 aa, unidentified
MKQIVSVGIDVSKGKSTVCAMIHPNTIIKESFEVLHTVEEMSMLADYIGSLDGEIRIVMESTGHYHLPVAQFLYQKGFFVCVENAYIIRQFSRIMLHGAKTDPLDAKKLAKYGLAYWSELKPYKFHPSCYTELSLLSKQYQTYIKLLIAAKQNVIHLMDEMLPGFKEALDTASSVQFSKVKYVDFAKEFYHVDMIKSMGKEIFRENYKQWCKEKGYRFQSEKADELFHLAEDGIPTLPTEFPSTRLCMEVATEQVSQLGYALEQILSQMQNLAKTLPEYQTIRQMGGMGEKLCVRFIADIGDVRRFHNGKALVAYAGIDAPPYQSGQYTGTKRRISKRGNSVLRKTGYEVMKSLKSHPPKTDTRVYDFIIKKENEGKSKKQAKIAGLNKFLQIYYARVIEIYKNIV

SEQ ID NO: 185270 - protein, 360 aa, unidentified
MFTERTSVGLDVHARSVAAAAIDGVTGELFQSRLTPSFDHIRSWLADLPGPVAVAYEAGPTGFGLYRSLTAAGIRCEVAAPSKLQRPAGDRVKTDAKDAVHLARLLRLDEVTSVVIPTVEQEAARDLVRAREDCRGDMMRARHRLSKLLLRHGIVYYGGTAWTGRHDLWLRHQRFENPTTQVTFESDYDAVLVTTARRARLDTQIETMAADSEFTPVVRRLWCLRGISTLTAFALAVEIGDWHRFTGSTIGSFVGLVPSEYSSGSSRAQGPITKTGNGHARRLLVEAAWHHRPRYQPGKTIRDRWDLASPAARARGDLGNRRLHARWVKYIDRKKKPTVANTAIARELAGWCWSLALLEE

SEQ ID NO: 185271 - protein, 297 aa, unidentified
MSPSRTRFIGMDVHKDTMAVAYVAQEHGAEVTSLGTIGTRQCDIDQLIRKRQSKATHLIFIYEAGPCGSWLYRYLRKKDDDCWVVAPSLIPAKAGDRVKTDCRDAMQLARLARSGDLTAVYVPQVQAEAMRDLTRAREDALSDCKDAKFRLKAFLLRHDIRYTGRANWGPAHLRWLSEVVCPTPTQQIVFQEDVRAVQEHTERLQRLEHELHEHVQAWRLYPVVEALQALRGVQCTVAVTVVAEMGDLTRFDTPRELMQFLGLGPAEYSSGEQRRQGTMTKAGNTHARRVLVEGAWA

SEQ ID NO: 185272 - protein, 344 aa, unidentified
MKHYAGLDVSVKETSVCIIDEAGKTTREVKVASEPEAILAILMNEALTIERVGLEAGPLSQWLYSGLAETGLPVICVETRHMKAALSAQLNKSDRNDARGIAHMMRVGLYRPVHVKTLASQKRRMLLTSRQLLQAKALDIENDLRGTLRNFGLKVGMVGVAKFEARIRDLVVDHPDLAAITEPLLIARRVLREQLGVLHRRLLAVVRQDEVCRRLMTVPGVGPVVALTFRATVDVAARFKNSKAVGAVFGLTPRRHQSGEIDRMGSISKSGDAMVRTVLFGAAQVMLTRTIRWSWLKAWGMKIARHRGMKRAIVAVARRMAVIMHRMWADGTEFRWSNTNAATT

SEQ ID NO: 185273 - protein, 387 aa, unidentified
MQSVTPATVVAAAARTNDITLFASLELSQSKWVVTINSPGSEKFSKHLVEGGDGAGLIDLLSRSRAKAEQRYGVPVKAIVIQEAGLEGFWIHRLLIANGIESHVVDAASIAVPRRHRRAKTDSIDGETLLRTLMAWARGERRVCSMVQAPSPEEEDRRRLTRERGALLEERIRHTNRIRGLLSGQGIRDYNPLRRDCLKRLEGLRTGDGRELPAMLKEEIRRELDRLALATTQLAAVERARDALIRADAEERNNPAAMLLKLKGLGPEFASLLWLEALFRSFANRRQVAAYGGLAPSPWQSGGVERDQGISKLGNRRLRKTMIELAWFWLRHQPDSALSRWFQARVGAAKGRVRRIGIVALARKLLVALWRYVTQGVVPEGAVFKAA

SEQ ID NO: 185274 - protein, 370 aa, unidentified
MSQIQTNKNPEAMETQSNELDFSQQNIYVGFDVHLKSWKVTVMTEEVTYKTFAQDPKPEILYQYLRKNFPGGNYFSAYEAGFCGYWIHNKLKSLGVNSFVINAADIPTSNKEKVQKEDKRDSRKIARSLRNGDLIPIYVPTSKTIEDRGLVRARSTLVKDQTRYKNRIKSFLYFHGIDIPESFAKPESHWSKRFTSWLESIRMEEESAQITLSSLLTELNHLRASVLDISKKIRKLSETTGYKENVLLLRSIPGIGLLTSMELLTEIETIDRFTNLDKLCSYIGFVPSTHSSGEKDRTGDITPRGHSVLRSALIESAWRAIKCDPALLKSYLDYCKRMDSNKAIVRIAKKLLSRIKYVLKNKQPYKYSIV

SEQ ID NO: 185275 - protein, 393 aa, unidentified
MNQTSVTDRVVIAIDPHKASWTAAAVDAALQPLEVIRVAVSAEGYRRLRRFAQRWHDHSWAIEGAAGLGAPLTQRLHTDGIEVTDVPAKLAARVRVLSTGHGRKTDEADAISVGIAALTATRLNTASVDAAITALRAVVEHRDDLVKTRTQTVNRLHVLLTHLIPAGAARGLTADHAANILRQIRPRDPAAKTLRSLAVDLVAEIRALDRRITKAAIDITAAVESSGTTLTELSGIGILNAAKILARVGKIQRFRSADAFASYTGTAPIAASSGEVTRHRLSRAGDRQLNCCLHTMAISQISRDTPGRAYYRRKRAAGKSHREALRCLKRRLSNVVYRQLVRDADTLTGAGPAGHTGATPTSSAAGSHPITSTSDKSLTGPAKLYLTNGDRTA

SEQ ID NO: 185276 - protein, 361 aa, unidentified
MQSTTVIAFDQHAATTVAAVLLPGHRTPALHTLGSDSPTIVKFVERLRRQGPITSCYEAGPCGFALQRALSARGIPCDVIAPALIPRRPGDRVKTDRRDAGQLAVLYRAGALTAIHIPTDQEEAARDLLRCREDIRADLLRARHRLSKFLLRHGRRFTGTKRAWTRAHAAWLRTQTWPLSALEQTHTACLRAVDEAVARLRSVEQDLRTLVDLEPLRPRVRRLRCFRGIDDLTALTIAAELGDPRRFSSAPRTMAFVGLVPSEHSSGSRQARGAITKTGNAHLRRVLVEAAWHYRHRPFVGGALRRRQQGAPAAIIAHAWTAPQRLYRRYHRLAARGKPTPHVITAVARELTGFVWAALTQ

SEQ ID NO: 185277 - protein, 368 aa, unidentified
MKKNNTCPKSSKRSKTRKQSITIGMDLGDKTSHYYVVDSAGEMVREGTVATTKKGMKQKFGPLPRCRIAIEVGTHSPWVSRLLSSLGHEVIVANARQVKLISSSSRKSDRLDAQTLARLARVDPELLRPIRHRSEKAQGDLMQVRVRAALVDTRTGLVNTARGLAKAMGERLPACDADQMGVEKMQGLPAVLVEALTPLLETVESLTKQIKASDQKLEQLAGREYPETELLRQVSGVGSLISLTFVLTLEDPNRFRKSRDVGCYVGLRPRRSDSGESQPQLGISKEGDVYLRKLLVQGAHCILSHRSPDTDLKRWGLKLAGKGNKNAKKRALVAVARKLAILLHHLWVSGEVYEPLRNSGPLERKAVA

SEQ ID NO: 185278 - protein, 373 aa, unidentified
MAYQHYWVGLDAGHLETAVCLIDAEGGILFEAICETKSGPIRDILRRFGVEAVQCLTIEAGNGTQMVRELRSYEFPVQVVDVRKSSKFLAIRRQKTDVHDARGLAELGRLARSIGSQVFVKPMEHQNIRTLINVRRTMLKNRARTDALIQSIFRLYGGNVKLLNGRGALAAEVNNQVRKMRQHGLEIGVNLQPLVETSEALRAQIATLDRQMRDIASNNPTCRNFQTIPGVGAVIALSFYSAIGDPHRFGRSRDVGAYLGLTPTLYQSGATSRRGRISRHGNKLTRMHLITAATVLLCRIEIESRLRTWGLELTQRVGFLKARVAVARKLAVIMLGMWKSGSPFRPDGAPSLFLRQEEAGLDPVLISGTQISL

SEQ ID NO: 185279 - protein, 391 aa, unidentified
MIYVGIDVAKDKHDCFITNSDGEVLFNVFTIANNLDGFNDLCQKIASVMEDVTKVKVGLEATGHYSYNLLGYLIDKGLPTYVINPLHTNLYRKSLSLRQTKTDKVDARTIASMLMSDVNLKSYSDTSYHNEELKSLTRYRFDKVKQRAKLKSSVSRLVCILFPELEKLVPTLHMASVYTMLSEFPDAKQVANAHLTRLTNLLSESSKGRYGKETAITFRNATRTSIGSNMPAKSLELKHTIKLIQELSSEIDEIENEIKLIMDEINSPILSIPGINYRMGSMIIAEIGDFNRFDSPDKILAYAGFSPSTYQSGQLDGAYSHMEKRGSRYLRYALYNAAKYVCNWDPTFAEYLAKKRAEGKHYNVAISHAVKKLVRVIYHLEKTNQQYIKAV

SEQ ID NO: 185280 - protein, 414 aa, unidentified
MEQIHERVAGLDVHRDSVVACFRQLGPRGGVVREKERFTTTTAGLRVLEAWLADRRVQLVAMEATGVYWKPVLYALEGRFTVWLCNARHVKKLPGRKTDLTDAEWLADVAAHGMVRPSFVPPLPIRELRELTRYRKTQIDARAAEKQRLEKVLQDAGIKLTSVASRVLTQSGRSMIEALADGERDPARLAELAKGKMRPKVPALTEALAGHFGSHHAVACRRILAHLDFLNDTIGALTEQIDARTASFEAVYKSLLPVPGFDRLTIDVIIAETGADMTRFPTAADLASWTGVCPGSYESAGKRRNVSTTAGNQWLRRALIESARAAARTKGSYFGAQYRQITRRRGPNKAAVAVAHSLIELVWHLLSTGEVFNDLGDDYFKTRQDPERQARRLLAQLEDLGYTVTVTAPPAITA

SEQ ID NO: 185281 - protein, 378 aa, unidentified
MSSTPIIWIGMDVHKDTVMVAVFKDGNHEAEIVKQLPNDDRKLRRFFERWSRQGEIRSCYEASGAGYVLHRSITVWGYDCEIIAPSLIPVRPGEQRKHDRRDAMQLARLYRAGELVTIRIPTAAEERVRDLVRCRQCFQREILRSRHYVTKFLARRGFVYREGKNWTQRHWAWLRRLLRDGGLGQADRTVFGEYLALLEYKISRREDLDEQIEKLALSPLYKSAVDRLRCFRGISTIAAMTLATEIGDWRRFERPGQLMAYLGLVPSEHSSGNRERRGPITKAGNSRCRHVLVQAAWHYRHRPTVGLELRRRQRDHPPEVIGHAWKAQHRLYKLYHRIAAKKSSNIAVVAVARELVGFLWAVMHELEIEQTTSLSEAA

SEQ ID NO: 185282 - protein, 355 aa, unidentified
MMVIGVDPHKGSHTAAAVDELGRERGRKTVPARRDGHRELIAWGRGQCPGGRRWAVEDVRHVASGLVRELLAAGEEVVFVPTRMMAAARSGGRERGKSDPIDALANARAALREQEFLPPARLPAAVLEVRRLADHRDDLVAQRTRDVNRLRWLVHDLDPALAPPPRALTRTAGAARRLEAGLLALPACAGRRVALSLLAAVTAATAEVAQLEADLTALLSELCPQLLAVCGIGVVTAARLLGEAGDARRFRSPAAYARHNGTAPVPASSAAGAAAGPQRLNRGGNRQSNAAIHRAALTQSRYHPGARALLERRAATIRETRKAALRVLKRHLSDVIYRALLADAWRLDHPLQQAA

SEQ ID NO: 185283 - protein, 322 aa, unidentified
MEEPTVVGIDIAKRKFDVVLLSEGKEKSGTFQNTPGGFSMLARWLERYGASQVHACMEATGVYGDELARYLHGAGHVVSVVNPAKVKGFAQSELSRTKTDKADARLIARFCRTMRPEPWQPPAQHEKQLQALVHRAQSLKDMVSQERNRRETTEGPARASIERTIRHLEEELRITRELIRDHIDQHPDLRGKRELLESIPGIGPATSAMILAEFGDVMRFQDARRMAAFCGLTPRQRQSGSSVRGKTRLSKTGSARIRRALFMPALVAMRRNPAIAAFCERLRSYGKCPMVIVGAVMRKLIHIAFGVLKSGKPFDPAIAMTA

SEQ ID NO: 185284 - protein, 343 aa, unidentified
MDHFAGLDVSVKETSVCIVDGTGRIVKELRVASEPDALLRVLGNPAYRFKRIGLEAGPLSQWLFSALAEAGLPVICVETRHMRAVLKAQINKTDRNDARGMAQMMRAGLYRPVHVKTLRSQKLRMLLTHRKLLQSKAIAIDNDLRGTLRNFGLKVGVVGTVKFEARIKELVESFPDLAELVEPLLIVRRTLREQIGILHRRLLAIVRNDDVCRRLMTIPGVGPVVALTYRATVDVPARFRNSKAVGAVFGLTPSRYQSGEIDRPGAISRCGDEMMRVMLYEAAHIMLVRLAKWSWLKAWAMKIARHRGMKKAIVALARRLAVIMHRIWVDGTEFRWSREVTAA

SEQ ID NO: 185285 - protein, 344 aa, unidentified
MQITILGIDLGKNSCSVVGLDDSGRIVVRRRMHRVSVIKFAGGLTPCVVAMEACCGAHHLGRLLRAQGHEVRLMSPEYVRPYVKAQKNDDRDAEAIAEASTRPTMRFVELKAEEQLDMQTLHRVRDRLVGERTALLNQLRAVLLERGIAMPQGRRKLEQRLDAMLGAAEWSGVAPRMRSLLQDMRAEWQALDRRIEAFDEEFAVRARTDPDARRLATIPGIGVLNATALVAAIGNGQTFARGRDLAAWLGLVPRQATTGGKPRLLGISKRGNKYLRKLLIHGARAAMPSLARSATVLGGWLRGLLARAHPNTVVVALASKLARIVWAVLRHGREFERADVVASA

SEQ ID NO: 185286 - protein, 354 aa, unidentified
MSNKSNSPVATIGIDIGKNAFHVVGLDRRGAIVLRQRWSRGQVQARLANMPPCLIGMEACVGAHHLSRGLHLQGHDARLMPAKYVRPYSKGQKNDFRDAEAIAEAVQRPTMKFIATKTAEQLDLQALHRVRERLVSQRTGIINQIRAFLLERGIAVRQGLRFLRTELPIILATRSDLLSPRMLRVIEELMADWRRLDERIEGLSEEIEAVARQDPACERLMTVPGIGPIISSAMVAAIGNGAVFTKGRDFGAWLGLVPKQISTGDRTILGPISRRGNRYLRALFVQAARVVLVRTKDSDRYGLKAWIDAAKKRLHHNVLAIALANKLARIAWAVLNKERAFECVSTRATSSQPA

SEQ ID NO: 185287 - protein, 344 aa, unidentified
MTNIQDKETTREAKPDLFAGIDVGAEELILAVRKNGKPFDPQKFANTPADRSRLVKKLVKLPGIIVCLEATGIYHFDLSLALHDAGVLLMVVNPKASHNFAKVLMKNSKTDVVDANTLAEYAARMDFVAWTRPSDETIALRSFARRINALTDQKAAAKNHLHALTATSETPKAVLKDAKLAITQLEKRIDRLTADARVLIGKHPELKRILALLTGIKGVGETSAIALMGELLLLPPDLSHREWVKFAGLDPRAFDSGKSVHKKTRISKAGNRHIRAALYFPALSAKQHDKHVKAYFQHLMDNGKTPLKGVCAVMRKLLHAIHGMLKNNEPFDNTRFYAIPESIG

SEQ ID NO: 185288 - protein, 351 aa, unidentified
MNTTTVGVDLAKNRFELAVADAEHRIQRRARLTRAQFAGFFGNHPASRVVMEACGSAHHWARTLQAQGHQVQLLPAQYVRAYVKRNKTDAADAGALLEAARCAEIRPVPVKSIEQQAIQQLHRLRAQCMGTRIARINWLRGALREFGFCIPLGARRGISAVRQALAACEPAVPALLRPGIEDTLVEIAALEQRCTRIERELAGLTHDDVVVRNLLAIPGIGLLSATALTAAIVDIQRFRSGRHLASWLGLTAREYSSGERRRLGRISKRGDVYLRTLLIHGARAVLNAALSAAHRGRPLDRLRTWALATQQRCGYNKATVALANKLARIVWATWKYQRSFDGNWALRTGSA

SEQ ID NO: 185289 - protein, 278 aa, unidentified
MYKSKEFIGIDVSKDTFDVWSLSFGHLCLDNTRKGFRKLKKQLKENSWCVMEATGSYHQLLARYLYDSKVIVSVVNPMVIKRFIQMKLQHNKTDKSDAKMIALYAQQQPLKVWEPDPHYIEQCKILNTNIALYFKQSTALKNKLHSLTSKGVKGFLLQSLKRQVKQLQKEIVMLESHVESLIKEHESEMLTNISSISGIGKKTAMMLISNTYAFKSFDNYKQVTAFFGLSPIERTSGSSIRGRSRISKKGNPLVRNHLFYAVLQLVNIILNAELYMRE

SEQ ID NO: 185290 - protein, 354 aa, unidentified
MEKTTTIAVDLAKSVFEVAVSEAPGRVSERKRLSRGGLLAFFAKRAPAVVLMEACGSAHHWGRELRKMGHEVRLLPPASTAKYRIGNKTDRTDADALLEANRNEKILPVPVKTTQQQSLLSVHRLRLAWMAARTARLNALRGLLREFGVAIPLGAKLVLPRMAEAMAEGRVPEELHTLLGVSATEIRKLEENVKECDRLLARMARSIPVAAALQEIPGIGPLGSTAIIPAVGDPHRFRSGRKMSAFFGIVPREHSSGNRRRLGSITKRGDTYVRTVFIHGGRSVLLAAHRRKNPDRLHRWALEVERRQGRNRAAVAIANKMVRIAWAVWTRGTRYNGALAGPPTQKTPQTTRDF

SEQ ID NO: 185291 - protein, 357 aa, unidentified
MAEGSWVGLDVHARTTLAGVLDGASGELSSQRVSPRSEETVAWLVSLPQPVRVAYEAGPTGYGLARACARAGVACTVAAPSKIPRAPGDRVKTDRRDAERLARLLRLGELVGVRVPDPVEEAARDLVRAREDARGDLMRARHRLSKLLLRHGLVYEGSAWTLAHDAWLRRQRFESRVLALAFDESYGAVLQAKGRRDALDRAIAELASEAPFSDVVSRLVCLRGVSTLTAFALTVELGDWERFRPQSLGPFLGLVPSEDSTGERRRQGAITKTGNTHARRLLVEAAWHQRRPLRASAALERRRQGQPAAVRARADESARRLHARWHALEGRGKRRTIVAVAVARELAGHCWALATMS

SEQ ID NO: 185292 - protein, 348 aa, unidentified
MTVFIGLDISLDETHICVVDEDGKTLKESKVMTEPEAIAPVLRRFEGRIKRVGFEASSLSPWLSNELIKLGFPAIIVETRHMASALGAMRNKTDRNDARGLAQMMRTGWYRSVHVKSDDSHRLRILLTNRRILKRKFLDIENAIRGTLKVFGIKMTRTTRGRFEQDLMVKLAEADPMLCEMTQSMLEARRTLLEQHNRCHKLVLQVVRGDDVCRRFMTVPGVGPIMALAFKTTIDDPTRFKKSKTVGAHLGLTPKRYQSGTVDYEGCISKCGDPEMRTLLYEAASSLLTRVQSWSVLKAWGMSLQKRAGKRRATVAVARKLSVILHRMWVDGSEFIASREDLNAAKVA

SEQ ID NO: 185293 - protein, 355 aa, unidentified
MNDAKYIGLDVHQATISATVLDSTGKLVMESILETKAATILQFIHGLRGSLHVTFEEGTCAAWLHDLLKPHVTRVLVCDPRRNALLKVGNKSDRIDSRKLAELLRSNLLRPVYHEHTGIRTVKELARSYLTITKDLTRVMTRLKAIYRSWAIPCACQQVYAPRYRAEWLAKISEAGVRRRAELYYQQLDALRPLHQEARRELLAEGRKHKAMNLLRQIPSIGPIRAVLLLALIQTPHRFRTKRQLWSYCGLALETRNSGEYRMVHGQLKRSKKVVAIRGLNKNHNHDLKNIFKGAAIRAAAVAGPFQEFYAALLAKGMKPPMVRLTLARKIAAITLLVWKKGVLYDAEHLKQQAA

SEQ ID NO: 185294 - protein, 323 aa, unidentified
MAKRITICAGIDTGKRKLDVALDGSSERTQVDNTPEGYTVLLEWLKRHKVRRVGIEASGGYEQAVVAELRRKRLVVVVFQPAQVRAYAVFHLKRAKNDKLDAALIAACTAAVQKIHPAPDPRLQPFAEHLTMIDQIGEDIAKLKNRLESWRNERIQKLWKEQIALLAKHKRAEFKALLAAIRKHRDLAARLDLIHSVGGSGLPTAVTILIRMPEIGQITREQAAALAGLAPYDDDSGNHLGVRHIEGGRERLRRALYTAALPASFRWNSQLIALYKRLIAAGKGHKRALIACARKMLVIINAVVARGTPWLADLPETTRTPAT

SEQ ID NO: 185295 - protein, 399 aa, unidentified
MIKNHAEVDVFLGVDVGKGEHHAVALDRTGRKLYDKALPNDEAKMKAVIEKLAKHGAILFIVDQPATIGALPVAVAQAAGVTVGYLPGLAMRRIADLHPGEAKTDARDAYIIAEAARTMPHTLRSIQVADEQVAELSMLCGFDDDLAKQITATSNRLRGLLTQIHPALERVLGPRLDHPAVLDLLRTWPTPGALKTAGRKRVGARLKRLAPRMYARLTEEIFDALDQQTVTVVGTNAAAVVVPQLAGMLGDLRASRETLHAQVEALVEAHPLHSVLSSIPAVGIRTEARILTEIVGKEFATAGHLASYAGLSPVTWRSGSSIRGDHSSRRGNKILKRALFLSAFAALKDPLSRAYYDRKRAQGKKHNQALIALARRRCDVIFAMLRDGTLYEAQTPAAA

SEQ ID NO: 185296 - protein, 451 aa, unidentified
MARKGKARKTDGAVLPVMRPHAAGIDIGATEIFVAVPADRDAENVRSFPTFTQDLYALADWLKGCGIETVAMESTGVYWIPLFQILEDRGFEVCLVNARHVKNVPGRRTDVSDCQWLQFLHSVGLLRASYRPDQEVCAVRSLLRHRESLVQMGATHVNHMQKALDQMNLQLHHVISDITGLTGLAIVDAILSGERSPFVLAKLRHERIKASEELIAKSLVGDYRIEHLFTLRQSLAAYRSYQQLINECDREIRRSLDAFQPPQTPVGSDLQPESRKKTTSADAGLRTELKRVFGVDLTKIPGIRTGIAQTLFGEIGPDFTKFRSASAFASWMGLCPDNDISGGKILWVGTRKVNCRAATALRMAAQSLHHSKSGLGDFYRRMRAKLGAPKAITAAAHKLARIIFHLITTRQEFDDTRFAADQLHHLKRQENKLRAKAHALGFQLTPLENAR

SEQ ID NO: 185297 - protein, 420 aa, unidentified
MKDSKPADFAALIGIDWADKKHDICELTVGAARYHYSVIPNTPAGIHNWANDLTKRYPKKRIAVACELTKGPLIYALAQHKHITIFPINPSTVAKYRQAFTHSGAKDDPSDAFIQAEILEHHMGKLRKIEPETADVRILAQHVVNRRKLVQERVKLSNKITAILKNYYPQVLDWFKEKDTHIFCHFIARWPSLPEAKKAQKRTLIKFFNDHNSRYADVNDCRLKAIKGAVALTNDRAVIEPNRMMVEVLIPQIEILMGAIDRLDIEIRRLYKQQPDSTIFDSFPGAGPKLAPRLLVAFGTNRDRYRTAAEVQMYTGVSPVIERSGQKSWTHWRYSCPKFLRQTFVEWAGQSVRFSFWAKAYYMQQMEKGKSHNTAIRSLAFKWIRIAFKCWKSKTPYDESRYLEALKSKGSPLLSYAVNG

SEQ ID NO: 185298 - protein, 434 aa, unidentified
MLWSKHRFRTDVDDLEALWARLPVDAEEVMVVMEPTRNAWVPLAAWFRRKGAKVVIVPAEQSSDLRDYLSKHTKTDRLDAELLARLPVLHPDGLHPAEHLGPGDPLKRAVKIRAGLVHRRTTAMHRLDALLEILGPGWTDALGTAMTQTTFKFLAAYANPHQVKRLGAARLARWFQHHTRKAWGPERAQNVIDAANATIALWGVDGLDFEALAADIATEATIALEVSEQIALLDRRIRDLYAEADPAGIVLSAPGVGGILAAQILGRLGDPHRFTSLAAARSFSGLIPRRNASGLTNQAGGPTKRGDACLRAALFQAADRARKVDPQLAARYQRLMCDTGRHHNSATCTIAAVLLTRIVSCLRNGVAYQLRDVDGTPITPSEGQAIVADRYQIPLQIRVARSSISNSRNIKRRDERVTKGVAQRSKTPPVPTPA

SEQ ID NO: 185299 - protein, 462 aa, unidentified
MPGRDEIASSGKSRRQLASLPIIRWNVAGIDLGSERHWVCAPTRDRSGREVTSFGATTAELLRMAEWLKARQVESVAMESTGVYWIAPHEVLEAQGLPLLLVDTRQLAQVPGRDKKSDPTDCEWIQRLHSCGLLRGSFRPEEAVCMLRTLVRDKANLVAESGDWLRRMQKSLDQMNVRVHRAVSDIDGVTGMAILRAIAGGERDSQKLAQLRDRRCSKTEQEIAEQWSGHWREDHVFSLQQALKMYDAVQERIAAYEQEILRKLGEMEREEPHEPTAPPLQNANKARSIKNRGQEAKRQALYRMSGVDITQIDAIGVETVEVVVSEYGSDLSRFPTEKQFVSHVTLAPRVPKSGGKPVKKKKRNSASTRVAAALRMAALSLRHSQTALGAYYRKIAQRRGGDIAVFATARKLATLVYRLLRWGQPYVDEGAAAYENRYRQHRIGRLAATAKELGYLLTPVSA

SEQ ID NO: 185300 - protein, 356 aa, unidentified
MTSTTKYIGMDVHKESVSIAVRNAGGKIAMESVIETKANTILEFIDGLRGEVHVTFEEGTWSEWLYDLLKPHVRKLVVCDPRRNALLKEGNQNDRVDARKLAELLQNNQLRPVYHVDHGLRAMKELVRSYLTITKDLSRVMTRVKAIYRSWGIPCSGTQVYSSSHRSEWLEKICEPGVRRRAEHYYQQLDALRLLRLEVRKDLLAESKKHAIWKRLRQIPSIGPIRAAVLLGIVQTAQRFRTKRQLWTYSGLGIEGHSSADHQVINGQLQRRKKPIEIRGLNKNCNHHLKNLFKGAATVASTKPGPLQEFYTALVAKGIRPEMARLTLARKIATIVLIVWKRGVCFDANHLKPQTA

SEQ ID NO: 185301 - protein, 389 aa, unidentified
MLHDHPSDGPSAIRTHIAAIFVSLELSRSTWLVTSLSPGKGERMSRHSVTAGDMAGLLALFAELRRKAEVRMGQSYPIITLQEAGLDGFWLHRVLQQNGIESHVVDPASIAMPRRRRRAKTDRIDGETLLRTLLAYKRGEPRVCALVVAPSPEEEDRRRLCRERATLIAERITHVNRIKGLLFAQGISDYAPLRRERRARLETLRTGDGRELPSHLRTQIGRELDRIELLLEQIEAVETERDGLLAAARKPASEEAAPDAVTMLLALKGMGANFAAVLWSEAFYRQFANRRQVAAYAGLAATPWQSGGIRHEQGVSKAGNPRLRTTMIQLAWLWIRHQPQSALTRWFKERSPQGRKRAIVALARKLLVALWKYVTQGVVIEGAVMKPAA

SEQ ID NO: 185302 - protein, 320 aa, unidentified
MRNTVGLDISKLTFDASAMVGKTEHSAKFDNDSKGLDQFSDRLKSLGCQNLHICMEATGNYYEEVADYFAQYYSVYVVNPLKISKYAESRFKRTKTDKQDAKLIAQYCRSAQESELVKRQKPTDEQYRLSRMIAAYAQIKSECAAMKNRHHAAKDEEAAKAYAEIIKAMNEQLEVLKEKIKEQTEKPNCKEGVKRLETIPAIGRMTAAVLFHHLTSSKFETSNKFAAFAGLSPQQKESGTSVRGKGKLTKFGNRKLRAVLFMPAMVAYRIRAFPDFIKRLEEKKKPKKVIIAALMRKLAVIAYHVHKKGGDYDPSRYKSA

SEQ ID NO: 185303 - protein, 386 aa, unidentified
MQASSMDTPTAGYCGTIFVAIELSQRSWLVTMHCPDRDKISHHRLEGGDHAGLLALVDRMGERATRALGVTPAVVSCYEAGYDGFWLHRLLMAAGITNHVFDPASIAVDQRARRVKTDRIDGEKMLRTLMAYLRGEPRVVRIVRVPTPEQEDARRASRDRGRLTKEQTAHTNRIKALLRLLGMAIGNPRRRDWLSWLATQKDWQGQAVPPQIMAEIKREHARLMLVREQLEALARPLAAADLTPAAAQMAQRSELLLRLKSLGPAFATTLTHEVFYKDFRNRREVASYFGLTPSPWQSGGTDRDQSISKAGNPRARCAAIEMAWLWVRHQPDSKLTQDYRRRTLNASKRIKRIAIVALARKLIVALWRYLTTGLVPEGAMLKAVEM

SEQ ID NO: 185304 - protein, 425 aa, unidentified
MNSKVNHKINQVTEQTLVVGIDIAKYKHYATFVDERGREIKKAFLVPQSLEGFEELYQAILDAMKVFQKSEVLVGVEPTGHYWLNLAYFLEDRGIPLVIVNPMHVKRVKELDDNLQTKNDKKDALTIARLMKDGRYSHPKLLRDQGAEIRTGYSLRESLMKERSMLKNKLHRWIDKYFPELFHVFSDFGAMLLAVLEETPLPVDIVDMTPTELADICAKAGNMKQRRPTKAAELIQAAQSSIGITIAPWGARREVASMMRQYRLIEEELEAIEAELEERITQTADYEFLISVPGISHGTIAGLLAEIGSFDDYESPRQLIKLAGLTLRENSSGTYQGQKKISKRGRKRLRSLLFKAMLPILRNNEAFLTLHHYYTQRQVNPLRKKQSMVVLCGKLLKVLHALCTKKRRFDSHQMLTDLHCLQLAS

SEQ ID NO: 185305 - protein, 348 aa, unidentified
MLIIGCDYHPGFQQIACVDTETGEADERRLTHREEAEQFYRTLKTRKVRIGMEASGHGRWFERLLNDLQFELWIGDAAEIRTKRVRKQKTDRQDAQLLLKLLMEDRFPRIWVPDAENRDLRQLLWHRHRLVQMRTRIMNQLHVVALNEGVRRKKALWRPAGRSELESLVLAPWALRRRRDLLDLFDQLTPKIHDLTRAIEEEVEKRPIARRLMTHPGVGVLTALAFELVIGTPERFACGKQIASYVGLVPTEESSGDRRRLGHISKQGNALLRFLLVEAAQVTVRSQSQWRSKFFHLAMRRGRKIAKVAMARKLAVHLYWMWRQGLDYGQFEKLGSHAGEPGNRHGEQ

SEQ ID NO: 185306 - protein, 368 aa, unidentified
MIAIGTDTHKRTHTCGAVDAFTAAARGELTAPARTGSFGVLLRWARALDAERVWAIEDCRHVSGAFERFLIARGERIVRVAPKHMAGARRSSRERGKSDSIDAFSVARAALKEGIENLPGAHLDGAALDIRLLVDHREDLIAARTADQQRLRWHLHDLWPELEIPAGALDTGKWLGKISRRLARAQQTTRVRVARELVRQISARTTRIRELQAELAALVDSYAPQLLERGCGPLTAAKLIGEIAGADRFATDAKVARNAGTAPIPASSGNNTSRHRLDRGGNRQLNCALHRLAINKGKWDPDTAAYLARKQTEGKSRKEALRCLKRHLARRVWKLLQTPAPATAPAAAQPTPPPTIAASAPTPMRCLT

SEQ ID NO: 185307 - protein, 364 aa, unidentified
MKIVGCDLHARQQSIAMVDTETGELTEKRLLHEGNAVRDFYASLEGPVVVGIEATGAMQWFLELLEELGIECRVGHPAKIRAAETRKQKHDRRDAEVILDLLVMKDRFPDIWMPSTEQRDLRTLLRDRHQWVKMRTRLQHTLQAIALNHALREGRALWTAAGQRALQGLALPPYTDQRRDELLGLYIQLDKRILQLDKPVEREAQQRPHARRLLTHPGVGPVTALATEVFLGDPNRFATANQVASYIGMIPCEHSSGKRQRLGKLTKEGNSLLRYLWIEATLHAVVKDAELKRFYRRKLIQKGMGKARVAAGRKLGIRLWIMLRDEIDYEEFCRRGKLRQKGEAHAGMPDYNSGPARAVTGSTE

SEQ ID NO: 185308 - protein, 343 aa, unidentified
MKYMGIDYHKQYFVATTMDEKGKVISKEKVSTDRDSIKSYFEKAGSEGEVKAVMEACYGWEYFYDEVDELVDELIMAHPLKTRLIAEARIKTDSIDSETLAHLLRADLIPPAYAPSSETRDQKNLLRYRSSLTAMKVRIKNMIHSVLTRNHIEDEGFQGLSDKFGKKGIAYMRAVTLKGNDTAILHDYLDLLEETEKRIKSAESRIRAVCRQDEICRLLSSIPGIGDILAVTIRYEIDNIERFISSGKLCSYAGLVPSTYSSGSRTYQGRITKQGNKWLRWALIEAAQRAPLSDMWLKTFYARVSKKGKKIARVAVARKLLEIIYRVWTERRPYYKKPVTVAL

SEQ ID NO: 185309 - protein, 412 aa, unidentified
MKDLLEISCGLDVHKEKIVACILTGPLGKPTRSEIREFSTLIPDMIALRNWIVSKNCHHVAMESTGIYWMPIYEILEDAFYGDITLLVVNARHMKNVPGKKTDMRDSEWISTLLRAGLLNGSFIPEKRIREFRDLNRYRKSVIRDITSQKNRIEKFLQSSGFRLSSFISDIFGASGRNIILHLIEHGQIDKTALDSCLKTKTRNRIDEILMSVNGTLSEHQKAFLRILMTHYDSLKEHLTEVETSLEEDMAPFTLQVEQLNSIYGISTTASCAIIAEIGIDMKPFKTAEHICSWAGLCPGNNESAGKRKSTSVTKGNPYIKSMLCEIAWVIAGKRNTYLSAWYWRIKQKKGAKKAIVALARKLLVIIYTMLKQGTLFDESCFETRRKNCEQKQLSRYIRELEKHGYHVEAQS

SEQ ID NO: 185310 - protein, 316 aa, unidentified
MEIAPIFIGIDVSKARLDVAMRPSAEKLSVSNDEAGIQALVKRLSELKPVLIMLEATGGLERSVSGTLGSAQLPVVVVNPRQVRDFAKATGQLAKTDRIDAEVMARFAEVIRPPLRPLPDEVSLELRALIARRRQLIEMMVAEKNRLSAASKAVRKRIEAHIRWLETELDRADKDLDHSIRQSPIWQEHEDLLRSAPGIGPVVSRTLLAELPELGRLNRKQIAALVGIAPLNCDSGTFRGRRGIWGGRATVRAVLYMAALVASRRNSVIRDFYKRLRDKGKAPKVALVACMRKLLIILNAMIKHKTRWSEIIPQTS

SEQ ID NO: 185311 - protein, 326 aa, unidentified
MTPSLSTDNLFIGIDVGGASFEAAWHRGGIAHHENRPDAIAAFVERLRAGPAITRIVIEPTGGYEKPLVTALRKAALPVEMIHTSRFKGYRDMVGARAKSDTSDARLLAAYAAAPDEIRGRRADRVVLPEDATREELAELAARRDQLKHMIHAETCRLNTARSPRIREDILQHLEALKAQDRQTHRAMLDLVRQRDDLSHAKRLLQTIIGIGDKSALVSIALLPELGRISNKAAAALVGVAPFLRQSGTSNAPARIHGGRAPVRHIFYMAAVTASRHNPMLRAFYQRLIAAGKPVKLALVAVMRRLVVFANAVLRSNQPWKGAIAT

SEQ ID NO: 185312 - protein, 465 aa, unidentified
MAELRLGIDVACTAKHQASLADETGRFLWQGWKFRTSSEELGALWEKIPGGHDVVVVMEPTRNAWVPLAAWLRAKGARVSVVPPEQSADLRDYYNKHTKTDRLDSKMLARMAMLHPEGLREMQDLGPADPLKRAVRHRSALQKRRVACTMRLDALLELMGPHWLGVFGTVSYNKTAVSVLERYANPHALNKLGRSRLTKLLIRVSRGAFREAKADELLAAADETLKIWAAGGLNFEELADDIAIEARMIKHIDTEIVALDDRSAHLYEERDPNGIIRSAPGVGPTLAAGILGRFGDLNRFHSLAGVRAFTGLVPQIDQSGIANAHKGVTKKGDPGLRLNLFLAADFARKVDPTLAARYQRLFIDQGKHHNSALCTIAAVLATRIAACWRNGQHYVLRDVDGRPITETEGKQICATRYRIDPAQRAAKRKNTSAKQPKKVRTGPDKKESQSAPGHEPAPHQTTKAA

SEQ ID NO: 185313 - protein, 353 aa, unidentified
MIGSGFFIWPEWLLELRVRFHKEGSTKMSKTNTPARSSQLSDSCAGIDVSKAWLDIAVLKTNSVDRFANSAAGHADLITALRKQSVRRVGLEATGGYEQDIVLALRTAGLEVHVFQPKQVKAYATFKLQRAKTDQIDARLIAAATAQLDAVRPAPDSRFHGFAALLTLIDQLSEDVIRTKTRAEHVKEPVVRAHHAAELKRLRATMRQIYAELANRVKAHADLKARLELIESIDGIGERTALALLIRMPELGAISREQAAALVGVAPVTRESGQSAKESHIEGGRMRIRTALFACTQAAIQWNAALKDFYARLMQKGKHHRAAIIACARKLTIFVNTVLKRQTKWQSQPANPT

SEQ ID NO: 185314 - protein, 358 aa, unidentified
MQVQRKELNFKGQNIYVGLDVHKKDWKVSIRSEELAYRTFSQPPKVKDLVSHLHRHFPGATYYSAYESGFSGFWAHRELIGQGVNSIVVHAADVPTTQKERTFKTDKRDCRKIARSLSKHELEALHVPQVKTQEDRSLVRMRLTIRKDLNRQKNRIKSMLNFYGREIPEQYLCSSHWSKVFIDWLKGIKFETGSAETGLKLLIGEVEHLRSSLLEVTREIRKLAASESYCSDMKLITGIPGIGSVVGIAFLTQLETIDRFPSTDSLANYLGLVPNCHSTGDKENTGEMTYRGNKWLRELLIESAWMAARRDPILHLSYLNLCKRMKPNNAIIRIARKVLNRIYYVLKNKREYEIGIVQ

SEQ ID NO: 185315 - protein, 364 aa, unidentified
MKRKVYVGMDVHKETIQLASLTSNTNERVKEEQIKHEEGQIKKFIQKLKSEGNEIYCCYEAGVTGYPLYRYLKTLGVNCTIVAPGKIPRQSSDKIKTDKRDAIKLAKLLRSEELESIHVPSEEDEAVRDYLRSRDSLRLDLGRNRQRLMKFLLRKGIKYSTTKYWTASHYKWLNNLHFENEILQATFNDYYSRVRVQEENLKAMDQKIREIAESEPYREKVGILRCFRGVDYLTAMFLLSEVNDFKRFKTAGSFMSFLGLVPGEYSSGSKRKQTGITKTGSPRLRRILTEAAWQHRFSETGSKVVVSRRVGQSALVVSLAEKASLRLHKKFKNMQLRGKTPQVMITAVSRELSGFLWAAMNLVA

SEQ ID NO: 185316 - protein, 317 aa, unidentified
MSFVGIDVSKRTLEVAAIDSEGEVQYQSFDNGSVGHERLVSWLKSLAVQRLVMEATGSYHRRVQQHLQAAKVPLSVLNPAQVSHFAKSHYRRNKTDQADALLLAMYAKERSGAPTPPTPFAYQSLARELAALQQDLERLKNRLEAADSGVSHPEVSRSLERRIAALEEEKQVLAKQLEQATKQTHEQQLTLLCSIPGIGVKSACFLLAELGEIDRFDNAAKLVAFAGLSPTRFESGSSVFRQSAISRMGSPHLRRILYMPSLVAIRHNPLLAHFYHHLTARGKAKKAALVACMAKLLRIIWAVLRHRRPFDPNYASP

SEQ ID NO: 185317 - protein, 333 aa, unidentified
MNTIAITHTLGIDVSKRTLDFCLLDNDSGSILWEGRLPNDPAAMQPLIAALQRVGTTPETALCVMEATGRHSERAAAALRDCGFRVAIVNPAQIKHFGRSLNVRTKTDKADARVIARYGRERLPVPTRPLTALEKELRELMRELSAQVEDRRRLTLRRSEAQSPWLDGQLAKQIHEVDHRIAAIEARAQALCNAEAAMSKNLALLCTIPGIHTRTALRLLSEIAGKDFQSARQMAAYAGVTPSDHLSGSSVRGRTRISKIGNARLRKALYMPAHVARRYCQPIRQWADDLLERGKAKKAVVVAVMRRLLQIAFGVLKHQTPFDPNKAAIRYTP

SEQ ID NO: 185318 - protein, 475 aa, unidentified
MNIKGSKKKNQVLSVNIFEQQEIIAKADAIKAELKASTWHELETKGKFDKNDKLSFVSDDMLILGCDIGSETHYVRAIDTRGRELSKSAFGFSNTAEGFESMLDWSTKLAAANDKKQIVLGLEPTGHYWFCLTTWLVAKEISVVQVNPYAVKQTKEVEDNSQLKDDKKDPKLIANLVKDGNFGMPYLPEKLYADIRRLSMFRDQLNEDRIRNLNRLHREMKIYFPEYKDAFGKIDGAFSLELLKAAPFPDELAALGTEGMKQIWHEAKLRGRGYANASSILEYAGKSVGIKDGADAGRQAVKWFVSRIIELDEQLSDIENQLNQRCNEIPYAKNILAISGIGENILSGILAEMGDISRFDNVKEIQKLSGLGLVACSSGKHTGETKVSHRGRKRLRYWLFQAAKSAVAHSEEFKELHVYYTTRKQNPLKKMQSLIVIACKILRVIFTILTKGTTYDPKKLLGDIVRPDQAIPQAA

SEQ ID NO: 185319 - protein, 351 aa, unidentified
MLIIGCDFHTRYQQIAMAEDSTGELLVERRLDHESGEAQVFYRSLPKPVRVGIEATGPIHWFERLLAELGHDLWIGDAARIRASEVRKQKTDERDAALILDLLLAKRFPRIWVPTPAERDLRQLLWHRHKLVSLRTMLGNQLHFLAMSQGLCRKKKLFTKRGRRELVALPLGPWARRRREELLKLLDQLEPPIAELDRAVLEEAKRREDAVLLMSHPGIGPVTALAFVLAIGPVARFRRSKKITSYLGLNPSEESSGGRRRLGAISKQGNTMVRWLLIETVHHAVSQDPELRQDYQRLKFRRGHAVAKVAIARKLAVRMYWMLRSGADYAQLVRKQGSPGGTLMNANSSLA

SEQ ID NO: 185320 - protein, 345 aa, unidentified
MQTMYYIGLDVHKRMISYCVKDGSGAIHAEGAIPATRFDLDRWMKTLPQPWTAAMEATVFTGWIYDHLQPHAAALKVAHPLMLRAIAAAKKKNDRIDASKICDCLRCDFLPECYMASTAIRERRRTLRYRNLLVRQMVQMKNKISGLLMEAGVSYNKQRLHRAGYFRELLATNPGIDEGLCSLLRLCRETVVRLQKTESALVRSLERDSLLMDRVERLMTVPAVGPITALTWALEVGDAQRFSSIKKAISYCGLCGAEKSSANTVQRTPLSKQRNKHLQTTLIEAAKMAPRYSPNLAMLYDKEKQKGNANRATLAVARKLVAYLMAIDRGQRNFQAVETANCVAA

SEQ ID NO: 185321 - protein, 408 aa, unidentified
MVMSTEAVVTQAVWAGIDAGKSDHFCVVIDAQGKRLLSQRVANDEATLLKLISSVATMADGGEVTWAIDLNAGGAALLITLLIAADQRLLYIPGRTVHHASGSYRGEGKTDAKDAAVIADQARMRRDLQPLRPGDDIAVELRILTSRRTDLVADRTRTINRLRAQLLEYFPALERAFDYSTSKAALLLLTGYQTPDGLRRAGTARLAAWLGKRKARNADAVAAKALQAAHAQHTVIPGQQLAAAMVARLAKEVMALDTEIGDTDAMIEERFRRHRHAEIIVSMSGFGVTLGAEFLASTGGDMSAFDSVDRLAGVAGLAPVPRDSGRISGNLQRPRRYNRRLLRACYLSALYSIRSDPASRTYYNRKRAEGKRHSQAVLALARRRLNVLWAMLRDHTTYQPTTPTAAAA

SEQ ID NO: 185322 - protein, 318 aa, unidentified
MPRKELFIGIDVAKDVLDVAVRPTGDAWQVTNDEAGINALVERLKTLRPTLIVLEATARLHVAAVASVAAAGLPIQAVNPRQVRDFGKATGKMAKTDAIDARILAHFADAVRPAIRPLPDTQTQALSMLLARRRQLVEMMTAERNRRSGVSPSIRAEIDEHLTWLKTRLDQADRELVRLLRGSPMWRERDDLMEGVPGVGPILTATLLADLPELGTLSHKQIAALVGIAPLNRDSGRQRGKRVIWGGRSAVRAVLYMATVSATRFNPVIQAFYQRLVASGKLRKVAIVACMHKLLTILNAMVRSNTPWDLTGRSQIAS

SEQ ID NO: 185323 - protein, 410 aa, unidentified
MIEAVVERCAGIDVGKKFVLVCVMPGAAKDEPHTKIKKFGTIVSEFERLAAWLVDEGCTHAVMESTGSYWKPVFNLLEAHARVILANAADVQNRRGHKTDPNDSRWLAHLLRHGMIRPSFIPPLPIRELRDLTRRRRQLTGENSRERNRIQKVLEDANVKLGDVLSDVFCVSGRLMLQALLDGNLSPAQIAELAKKKARAKIPQIAAFVTGHRLTEHQRFLIHHALRHLQFLDEEVEALNQEIRCRMEDPALGEAFLLLQSIPGIKEESAASILAEVGADMQQFPTAAQLSSWAGLCPAHHESAGVKKSVRTNRGNVWLKTTLTQRAWAATNRKGSRLQSRYHALRARCGNKRAIVALGHTLLKTIYTVLSAGTPYLEAPIGEEAERQEQRARYHLRCLRKLGYPTLAAE

SEQ ID NO: 185324 - protein, 338 aa, unidentified
MLYVGLDIHCKSIAICALDENGKVYGRWTVRQLDQLMRRLGQLPRPLHICFEASTGYGVYFEMLTEVAEHVAVAHPGQLRWIFRSKQKNDRRDAEKLAKLLYLGEVPCVHVPSPEVRAWRELITFRHRLVEKRTRAKNGIRGLLRSLVIRPPQPAGLWTRRGIAWLKQLTFGHRLYALRRDVLLEQIENLTRQLSRVEAELARYSSASVAVTLLRSIPGVGLRTAEAVAAFIDDPRRFRDAKCLGAYFGLVPKQDQSSQTNRLGHITREGSATVRHLLTEAVWQAVRRSPTVKACLKRIQRDDPGRRKIAIVATAHYLIRVMWAMLKKQTTWCETEAT

SEQ ID NO: 185325 - protein, 334 aa, unidentified
MNYSHFIGIDISKLTLDVSILDQKGTQVFYAQIKNTRSDLAKLVKELTKKSIPVQTSLICVEHTGVYGNHLRNWSEQRGFTLWQEQALQIKRSQGIQRGKNDKIDAYRIAMYGFKNKTSYKPTIKQRDNVLLLKELLSHRRRLMKAKMQISQLLTERSFYEKEVIKAVKSNMTHSLKGINLDLKETEKAIRKLLQEDAEFKRLYTIMNSVDGIGLISAAMILVASNEFKSITEGKKFSCYAGLVPFEYSSGTSVRSKSRVSQMANKKVKSVLHLGALSAIRIPGDLREYYLRKVGEGKNKMSVINAVRNKLVLRVFACVKENRLFEKKFNYSLA

SEQ ID NO: 185326 - protein, 388 aa, unidentified
MMDVLYQSCAGIDVHQANIVVCILHGPLTSTRPKREMATFDTTTKGLRACHDFLSQFHVEAVGMESTGVYWRPVWHALCDDFELILAQPAHMKAIPGQKTDKKDAHWIAKLTRIGLLPRSFVPDETIQELRELTRQRKHYVESRNRETNRIHKFLQSGGIKLTTYIEDIMGLSGRNLLQLLVDGTPITPRIVHQSVYTSLKKKVPQLLEALDGYFSDHHRFMLKQSLEIYDFYQKQIELLEERITVYLSQYENHVETLDSIPGIDVITASVIISEVGVDMSQFPTSGHLASWAGLCPGNNESAGKKRSTKIRHGNSYLKKCLCQAAFAARNQKGSTLADRFYQIQSRRGSQKATIALAHQLLKIAYILLKEQMTYPEFLAQKRLLGTS

SEQ ID NO: 185327 - protein, 404 aa, unidentified
MEFTAIYQCVAALDVHQAKLTVCILHVDEAGQVITELKEFGGFKKDRRAMAKWVASFCPDVVVMESTGVYWKSPYAALEKHGLNIEVVNARYVKQVPGRKTDIADAQWLAILARNGLLRGGFVPPVEFRELRLISRQMQKLSGILSSEKNRLHKLLTDAGIRLSVVLSDLNGKSARAMIKGLLAGETPQQVLQYASKRLKATQEELLDALEGEISPSHHFVITEVMAHIEELEIRIKTFQQALLQGLSPFKTVMECLQTIPGVDEMGAAMLLVEIGDDMSAFGTASNLASWAGVCPGNNESAGKKKSGKTRKGNPYVRRILCEAANAASRTQCSLQDKFKGLLIRRGRKRAIFAIAHKLLKIVFLLIDRGEYYRDAKIDYEALSVQRNAPRWIKKLRQYGYITA

SEQ ID NO: 185328 - protein, 351 aa, unidentified
MLIIGCDFHTRFQQIAMMDGTTGELVERRLEHGTGEAERFYAALAAPARVGIEATLATQWFEKMLSRYGHELWFGDAAEIRAAMVRKQKTDTRDALHILDLLIQDRFPRIWVPSPAARDVRQLVRHRHKLVRLRTSLMNQLQALALGQGLCLRKKLWTTVGRQKLESLTLDPWASRRRRELLELVDQINPSIEELDRAVITEAESRPAAVCLMQQPGVGPVTALAFVLTVGPVSRFANSKKLVSYLGLNPSEESSGGRQRLGAISKQGNTMLRCLLVEAAQTSVRLDPELRRDYQRLKFRRGHSGLAKVAMARKLAVRLYWKLREAARPTPPARMQGSPASPVVGESLSSY

SEQ ID NO: 185329 - protein, 422 aa, unidentified
MKVVHSICCGLDVHAKTVVACLIKGGEKERRTFSTMTDDLVRLKEWLIAAECPRVGIESTGVYWRPVFNILEDRVEVLLLNARDVKGRRGRKTDMLDSEWIAEMVQYGLVEGSFIPPANIRELRELTRYRESLVRHRTSLANRIQKLIESGNIKLGQVASDVFGASGRAMLRALADGQSDAHGLASLARGSLKKKETELARALQGQLTEAQRWVLKALLNQYEQTEIEIAEVQERLSAEVADNADPFAPDAVALLQTVPGIGEKVAMVIIAEIGLDMTRFPTAGHLASWAGLCPGNHESAGKRSSGRTTKGNPYLRTSLVQAAWAATRTRNTYLAAQYRRLVKRMGAKKALVAVAHTMLTMVYYILKRREPFRELGGDYFERRNIDDQRKSLVRKLESLGFSVTIAPLLPDPTIAQASPSEA

SEQ ID NO: 185330 - protein, 337 aa, unidentified
MLIKELSVRFHVGIDVSKLTLDIFILECNIHKKVSNNPRGFNDLLQMIEKNTHVSPELVVFCFEHTGLYSLSLALYLEERNLHYAMVAPLELKKSLGITRGKNDKVDSARIADYARRFGDRVPLTKLPAKDIRKIHYLLNMRERLVKNIHGHLVTYKETLRVMRPFDFPELFSFYESTISMLKAKIKEVEHLIKTILKENSALWSSYRLITSVKGIGLIVTAYLIVYTCNFTRFGTWRRFSCYSGIAPFEHQSGTSVKGKTQVSPIANRQIKMLLHLSAICALHTDTELREYYQRRQAEGKSKMAIINILRNKLIARVFAVIKRGTPFVDIKRYAAT

SEQ ID NO: 185331 - protein, 450 aa, unidentified
MSNGNGVSRGDRNRNARLDRLRALVPVTNAIVGIDLADKKQMVVVCDHDSKVLARRTYRCRAWDLGTALDWAHERAAAKGFAGMTVSCEPTGHRWRVLAQLAADRSMPFVCVQPAVSSWSRRAEDLTHDKTDEKDAVLIARLTAQLRCYEPEPVDETWGRLRHLGARREQLITEISGQIQQMRDLLECVWPAALECAQQPFRSRTWIAALTVIVDRDGGEFDRTRRLGLARFERAVLREISKRGGQKPCRRITRGVFAALSDLAGVIAHRAGALERVQLLVEDWQHAHDRLTDTETRMIGVLDELELTVLVTSITGISAVGAAAILAQTGDPRRFTTARALVKHAGLAPREKLSGTFTGRTKLTGQGRPGLRLAAWRAVWGAQRANPVYGARYRHLTTREHNRLKPTQAQTVIAAAILRHLHAVITTGQAWNPSIATHGTRSAIRTTAAA

SEQ ID NO: 185332 - protein, 345 aa, unidentified
MKIVGCDLHTRYQQIAMLDQETGELIERRLEHETGEARAFYAALSSPARVGIEATGHTRWFERMLAELGHELWIGDAAQIRASVVRKQKTDARDAAHLLELLLSERFPRIWRPTMAERDLRQLVWHRQKLVWMRNAVGNQLHALAMGEGVCRKKKLFTKKGRAELESLGLGVWASYRRQELLTMLDRFDGSLGELDRAVAEQAEQNAAAVLLMTHPGVGPVTSLAFVLTLGPVERFERSKQVVSYLGLNPREHSSGGRQRLGAISKQGNPMIRSLLVEAGHTAARLDGELRQDYQRLKLRRGSGVAKVAIARKLAVRMYWMLRGQASYAQLVRMQGSPWATLVTE

SEQ ID NO: 185333 - protein, 353 aa, unidentified
MVVVGADVHKRTHTFVAVDQAGREVGHRTFDAVTVGHQRAVAWVREQFGTEVVWAIEDCRHLSARLERDLLTAGQAVVRVPPKMMAEQRRIARTRGKSDPIDAAAVARAALREPDLPVASHDAQSRELKLLVDRRDDLVKHRTATINRLLWRVHELDPAWAPKARSLDLAKHRRILADRLDGVAGVVAELARDELDDVTDLTTRINELGRRIAGLVERAAPTLLALPGAGALTAAKLVGEAAGITRFTSEAAFARHAGIAPIPVWSGNTRGRVRLTRSGNRQLNAAIHRIALTQIRLDGLGRTYYEKKKTEGMSTPEALRCLKRRLARVVYNQLTTDAHHHNTVQPMRQPAAA

SEQ ID NO: 185334 - protein, 423 aa, unidentified
MAYRIAGIDVHKKMLAVVVADVEVHSEYEFERRRYGSNPEHLRSLAEWLMEQQVEEVVMESTAQYWAPVWGALERYWKPTCQEREGAGPMSGTLHLAQAQSNRGRRGRKKDFPDAERLIKRLVANELILSFVPDAEQRLWRTITRRKYQLTRDKVRLQNQLEALLEEIHIKLSSLVSDLLGVSARRMVKALSEGETSPEALAAMADKQLRATQAQLCDALGACAELKPIYRRLLKMCLEQLQMIEQQISQLDQEMANLLSPHQDAVKRLAEVPGLGVDSAQQIIAEVGAQAATFPSAKQLASWVGACPGDEESAGVSKGHRSPKGNRQMRRILNQAANAAARSKGTIFEIVYRRLVSRLGHNQTIGAIAHRLCQLIWIILHRNVRYEERAPSVNARSRQRRTNKMIRELRNLGYRIEPVPIPA

SEQ ID NO: 185335 - protein, 338 aa, unidentified
MKVTTVGVDLAKSVFSIHGVDERGNTVLRKSVRRAKLLEFFAQLPACLVGMESCSGAQHWARELLKLGHDPRIMAAEFVAPYRMSGKNDANDAEAICEAVGRPKMRFVPLKSTEQQAVLAVHRMRQGLVEERTALANRMRGLLTENGIVFAKGIDQLRRAMPVILEDPQNRLPELAREVFADANRHLAELDARIAEYDRRLAALARASEPAKRLMNIQGVGAVTATAIVATVGDAKAFKNGRQFAAWLGLTPLQRSTGGRQRLGQITKRGDVYLRTMLIHGSRSVMRLTPQRADANSRWVETLRTRRPDNIAAVALAAKHARIIWALLARGQDYRPAV

SEQ ID NO: 185336 - protein, 366 aa, unidentified
MKKISTVRVNGNIIFKGHKLTIGLDLGDRWSCYCVLDEAGEILLEQKVAMTPEAMKQTFERIPRSLIAMETGTHSPWVSRLLKELGHEVLVAHAQKVQLITKSNRKDDRHDARTLARLARIDPELLGPVRHRSAKAQIHLTVIRARAELVGARTALVNAARGLVKSYGQRLPKCGTRQVSRELGAGLPAELHAVLEPLLKEIESLNERIEEYDERMEKIARESYAHVELLKQVKGVGTQIALTYVLTIDDPHRFAKSREVGCFLGLKPGRRDSGQSQPQMHISKEGDRYLRTMLVQGAHYILGPFGEDSDLRRWGLKLAARGGKSAKKRAVVAVARKLAVLLHRLWVSGEVYEPLRNSQKAVRAAA

SEQ ID NO: 185337 - protein, 351 aa, unidentified
MSTIIRFGIDLAKNSFAVSGVDEHGNIAFRKTLSRAKLLESFANRPRALVAMEAGSGAHHWARELRALGHDARIIDPRLVAPYRHQGRTGKNDLNDADAICEAAGRPRMRFVPVKTKQQQAILLVHRLRHACVPDHTRLINRMRGFLAEFGVVAPKGAATFKTQWTLIRQRHDLELPPLAWHVLDELYAELGRLHQKLLAYDRQTNTFVRDDPRAKRLTQVHGIGPITASAIVATIGNGRDFRNGRQFAAWVGLTPKTKHHRREAQARPHLQARRRLPQNPPRPRRSQRIEAHLSARRSQEPLGRIAQTHQELEQNRRRARQQACTHRLGAAREGVDPQLLNFPSNCSLLM

SEQ ID NO: 185338 - protein, 313 aa, unidentified
MYLGIDVSKATIDCCLISGGIFFDRRFTNNTSGYRKLKEWLDGHKATETLHCCCEATGTYYEALAEYLCCYYKMSVENPRKIKGFGSAVLQRSKTDKQDAKLIAQYCKAMTPEAWQQQSPEQKQLQELTRYIARIKKQRASESTKLQAASSHIRPHIKETIQYLDSLITKLKKELQNFYRQNKEYQKNRQRLKTITGIGDSAASVLLATITNRFQNAGQLVAYLGLDPRKHQSGTSVNGRSRISKVGKSDIRASLYMPAMVAYRMNAFPDFIGRLKAKGKPPKLIIVAIMRKLVVIAFHLLKNQTEYDKSRYK

SEQ ID NO: 185339 - protein, 355 aa, unidentified
MSQEKYIGMDVHQATISVAVMDAGGKLIMECLLETKAATIVEFIRGLHGTLSLTFEEGTSAAWLHDLLKPHVSRLVVCDPRKNALLKDGNKSDRIDARKLAELLRGNQLHPVYHGEHGVRTLKELGRSYLAITQDVTRVMNRIKALYRSWAIPCAGTTVYAPRHRAEWLAKIAEPGVRVRAERLYQQLDLLQPVRLEARRQLLAESHKHSAVKLLRQIPSIGPIRSALLVALLQTPHRFRTKRQLWAYSGFAVETHDSGEYRSVRGKLQRNRERMTVRGLNDNHNKDLKNLFKSAAISASTRPGPLRDFYVARVEKGIRPTMARLTLARKIAAISLTIWKKGVEFDAQQLQQRTA

SEQ ID NO: 185340 - protein, 379 aa, unidentified
MLVVALALHTNLFCNNLKLRPMLKLKEKVDFTGQNIYVGMDVHLKSWSVAIVYERRFIRRFSQPPSVEALSTTLNRDYPGACFYVAYEAGFCGFGIQRECTERGINCIVVNAADIPKSDKEKKSKTDNGDAKSIAENLAAEKLVAIHIPDTKIESDRQLVRCRLSTLRDLQRTKIRIKSALRFMGIEIPERFDKANWSKLFVKWLKDIETTHPSGKLMLTRMIERLEWQRSHLLQVNLDARNLLKEEDYKANAKLLQSVPGIGPMSAVTLLTEIGDIKRFSRAIHFSSWIGICPTQHSSGEIERKGGLTLRSNTILRALIVEAAWVAIRLDPALTLAYEEYKKKHVSPKRSIVKIARKLSNRVYHVLKKHEAYEMGTVK

SEQ ID NO: 185341 - protein, 345 aa, unidentified
MSVSEYDGRQFVGIDLHRRRTVIVRQGESGEQLGSSRIVNDPLALAAEIGKAGPSPEVVLEATYGWYWAADVLAEAGARVHLAHPLGIKGFAARRVKNDLRDAADLADLLRMNRLPEAWIAPPEVRELRELVRHRAKLVAVRSGFKAGVHAVLAKQGLHIAVSDLFGPRGRAELAQAPLDTAYRARVNAYCRLIDTLDREIELAAGWIAARLATHPGYRAIQQIPGVGPTWAAVFVAEIGDVTRFASARHLCSWAGLTPRHRESDTTVHRGPITKQGATLVRWAAVEAVQKLPPTAGWLVSTHEQIAARRGRNIAKVAVARKLLILVYYGLRDGHIRALHNVGAA

SEQ ID NO: 185342 - protein, 504 aa, unidentified
MDWFGFGWRASEVGHRGKRRLAPVDKSAPEVIPDAEHELVIERVAAVDVAKAAGKVCVRLPAKTGRRFSRVWDVPARTGAITELGEQLVELGVEKITVESTSDYWRIWYYLLEAAGLSVQLVNARDVKNVPGRPKTDKLDAVWLAKLTEKGLLRPSFVPPAEIRRLRDYTRLREDLTHERTRYWQRLEKLLEDALIKVSVVASRLDTMSTRDMIEALIAGERDPRRLAELARGRMKAKRSELITALDGRFDDHHAELARMLLAQIDALSAQINTLTGRIEDLIAELPEAAAVDHGGGDDTDTTAPDAGDGPDAGPPPARGAAGLTGGTPRRVDPAIEAECARLSAIERLDEITGVGEHNAQVIIAETGLDMTRFPTPAHLVAWAKLCPRTIQSGPVTRSGRAGKGNPYLKGALGQAAAAAAKTDTFLGQRYRRIVKRRGKLKALVAVARSILVIVWHLLADPLARFHDLGPDYHARRIDIERRMRNHIAQLTALGYRVTVEPAA

SEQ ID NO: 185343 - protein, 338 aa, unidentified
MKYKRIAIDTSKHVFTLHGVDEQERPVLRRELRRSQVEAFFGKQEATEVVLEACGGSHHWARMLSRLGHRVRLIPPQYVKPFVKRSKNDRNDAEAISEAASRPSMRSVAVKTVDQQADGIILKHRQMLVGQRTQAINALRGHAAEFGVVAARGTGNVADLLSTLAADASVPANARSVFNQMAMHIEALDQRVAAIDAELAALHKANPVSQLLAEIPGVGPLCAITMALTVEAQNFASGRHFAAWLGLTPKEHSTGGKQRLGKISKAGDERLRQLLVVGAMAVIRFAKPGSKSASAWLLKLLERKPRKLCAVALANKMARIIWAMMARGEAYRRQPVAA

SEQ ID NO: 185344 - protein, 374 aa, unidentified
MAKIARIGIDTSKGSFELHGVNEKDEVVLRRTVRRRQFLEFMAKLEPTVIGLEACGASHHWARELGRLGHRVMLIPPQAVKPYVSPGRKNDKNDAEAICEAMSRPRVRARLVPVKSVEQSASQMLMGVRDSLLKRRTQLCNTIRGHAAEFGLVAAKGLDKIEPLLARIAEDDGLPALAREIFGDLGQEHAELSKRIAQIDRKLAAFHRSNELSRRLMEIPIVGPVGAGLLITRIINPRGFRSGRLCAAWVGLTPKDHSTGGKQRLGGITRAGDESLRAVLVSGATAYIQQVRRGRIVPSPWLAALLERKPPKLAAVALANKTVRIAWKLMTSGGRYDPTHRVDREGPGASLYGGLRAEPLAPSPTAGHSHAVAA

SEQ ID NO: 185345 - protein, 313 aa, unidentified
MIISLRYVGIDVSKQYLDIFDEVLGVPECIANATQAITQLVARWRCETLVVFEATGVYDLELREALRQAGIRFARINPARARDFARASGRLAKTDPIDARMLAAFARAMQPVTEQLADPARNTLAKLAKRRDQLVLMRAQEKTRRSEAEDHAMAGRISRLIEVLDSEIAEIEADISALIKAEPEISDDAQFMRSLPGVGPVACMQLIAQMPELGKVGPKQVAALAGLAPFNVDSGAFRGKRKIAGGRKRVRDALYMAALNAVRRASPFKTFYSRLRQAGKPAKLALIAVARKLLTVLNAMMRDRKSYLQTNPT

SEQ ID NO: 185346 - protein, 323 aa, unidentified
MDKSTNYFGIDISKDVFDIVDINDHHYQFSNDTKGFRGFIKLLDKNAHCVMEATAQYYSRLAYFLLEKGIKVSVENPLAIKRFIQMKLSKIKTDKADAKMICLYAQQVELKLWKGQSKNQIQCLQIKRLLDVYTKQTTALKNKIHGEEALGNPCKIVVSSLKRSLKQIKREKEELEKKLLELVKIEHQQTLTVLESIPGLGRKTAIALIIITDGFKRFDSAKALCSYSGLTPMIKQSGSSVRGKPRISKMGNAMLRNLLFMCSFTACEHNKACKDIYLRITAKGKSKKLALIAVCNKLLKQAFAIAKSGIPYDAQYKSRLVIK

SEQ ID NO: 185347 - protein, 339 aa, unidentified
MELYAGMDLHARNTYVGIMDSNSRRIFKKRVANDLELILSTLEPFREDLRGIVVESTYNWYWLVDGLMDAGHGCVHLANPSAIKQYEGLKYTDDRHDAFFLAHLLALGILPEGYIYPKEDRPVRDLLRKRSFLVKQRTEHIHSLQSMIERHTAQRLNGNEVKKLYLPDLERIFEEQYVLLSAKANNATIKFLSEQIQQIEKAVKEKVKLSEPFKLLLTVPGIGEILALTIMLEVGDIHRFPTAGDFASYARSVPTDRLSNGKSKGKGNRKNGNRYLGWAFVETCHFARRFYPKFRSYYQKKAATTNPFVATKAICNKLARVCYYVMRDQVSFREEAIFC

SEQ ID NO: 185348 - protein, 339 aa, unidentified
MNYVGVDLHKKLITACVMDANRKIVREAKLYPSEPHRIVEFFEAVGEYKVVLEATASYYWFVELLEPTAAEVVLANPAKMRVIAESTKKTDKLDARVLAEFLARDMVPRAHMPTPRQRQHRALVRHRKYLRERATSVKCKIRHVLADSNADRRDLFSAEAGKAYLKGLKLNEVDRFRLADLWKEWETIEARLKKTAAKIKAFAKKAPRAEAEARELIKTAPGVGVVTAEAVLCELGDVRRFRNAKAVCAYAGLVPVVRQTGGKKARDGRITKQGSGLLRWALVEAAWRLVASVPRWRSTYDRIKKRNGVKRAIVAVARKFLCVLYAMLRDSKPYRPLAA

SEQ ID NO: 185349 - protein, 359 aa, unidentified
MTENTNMESPLLWIGVDVSKKTFTAAARLLWEEKAVYPKDCAEFENNRSGARRLCKWIGELEKESGGPFGVAMESTGAYSLRLYDNLKKCRPELHVAICNPLAVSYYMRSLGTNKTDRADAAVIARFAAHRRPARYAEPSADQAELRRLSRDRGFLVDSRTEYQNRIEGERDASSIRRMKSVIKAINAQIDDIDAEIERHLSTTASLECRQEIELMQTMPGVGRLSAAIIYGELGSLAAYSRKQLSAMSGVCPTTRQSGTSLNKGGLSRRGSKWLRRILYLDSQQTILRSQKMAEFHEKMLSKPDSSKMSARVACMRKLLLVLRGMVVSGKPFDPNHISARPTFPVKITNDQEKSEVTA

SEQ ID NO: 185350 - protein, 338 aa, unidentified
MNIVFLGIDLAKNVFQLCGLNQAGKPVYTKRTGRKELLQTLANIPACLIGIEASTGAFYWLREFEKLGHKVRVISPQYVKPFVRGQKNDGNDAQAIAVALMQPTMQFVPPKSPEQQDIQALHRARQRIVNHRTATVCQIRGLLLDRGIPIGSAVSRARRAIPLILEDAENGLSPRMRRTIAELYDLFNDLERRIHFFDKEIETVFRQSEACQRIARVKGIGPKTATAVVAAIGKGTEFKNGRHFAAWLGLVPRQHSSGDRQVLMNMTKKGDKHLRTLFIHGARAVVRVATNNNDGYMNQWVNQLKERRGCNKTTVAVANKNARIIWSMLRNETEYQVV

SEQ ID NO: 185351 - protein, 347 aa, unidentified
MKFYTTLHKYYCGIDLHARLLYVCILDEHGNKVVHQKIKADPHQLHKLLKPYIGQVVVGVECMHCWYWVSDFCREMNVEFILGHALYMKAIHGGKAKNDKIDSYKIASLMRGGNFPLAYNYPAETRATRDLLRRRTYVMRHGSELKAHVVNTDSQYNLPAQSLNLKNVSARDGLRHYYDDPVVQRMIALDMNILDCYIRELKHVESFIEGKAKEHYGALLNIVRTFPGIGQILALTILYEIGDINRFPTVQQFASYSRLVKCKAESAGKTYGTSGNKIGNGYLKWAFSEAAVLYLRGNDNAKRYLAKLQKRMSKGKALSALAHKIGRCVYFMLRDRQVFDEDKFLNR

SEQ ID NO: 185352 - protein, 345 aa, unidentified
MIYIGLDVHTKQSYFCVMDKMGQCLEHKSMVTTEEGFRDLVRRYKVGEEVKVALESTGISWWIANVLSRAGADVHVVNAYQLKLIAHSKRKTDRYDSKVLADLLRCNGLPPKVYIPTEETFRLRRLLKLRKSFIRLRSRAIVQAKSFMRQQGEKVGLRDFCSRGSWDRIKEERSELGFYLSSLDQFYQCADEQVGNLEVQVKEIISDDDSTLRLLETIPGISLLGGRVLMAAIGDIGRFRRSDQLVSYAGFNPSERSSGEREQKGSISKQGRSELRELLVQGAWAVLRSSRPDTALLKKFFYRVMHKRCSQVAITALARKLLVIAYQVMKTNKPFDSSLYLEKAA

SEQ ID NO: 185353 - protein, 368 aa, unidentified
MSKLRFVGLDVHKDTIVIAVAEEGQAVPSVLGTFPHDVAKVVKQLGKLVSEVSLLRVCYEAGPTGFGLCRRLQAAGMECVVVAPSLVPQQAGARVKTDRRDAARLAHFLRSGDLTAVWVPDEQTEALRDLERSRDDAKNAERVARHQLEKFLLRNERVFRSGRHWTMRHAAWLRQQKFTDACKQCVMDDYFQAVENATERVKRLSKEIERFVEGAVVEPLIRSFRAFRGISTLSAVVIAAEIGDLRRFPTARQFRAFLGLVPSEHSSGKTIKRGALTRTGNGHVRRILVEAAQHYRHRATLSAALRKRQEGISKEVTDIAWKAQQRLTKRLTYLTERNKPRHKAIAAVARELAGFLWAAGQKPQPLAT

SEQ ID NO: 185354 - protein, 343 aa, unidentified
MNEVTTIGLDLAKNVFQVHGIDASGRVVVRRQLRRSQVLPFFERLAPCVVGLEACATAHHWAREIAKLGHEVRLMPARYVKPYVKRNKNDAADAEAICEAVTRPTMRFVAVKTQEQQSVLMLHRTRQLFVRQRTTLINAIRAHMAEFGIVAGVGRNGVERLLRLIDEGSDGRVPPAARECLQALRTQLVLVKRQILEADRRILAWHRSNELSRRLETIPGVGPLIATALVASIPDPHVFASARDVPAWIGLVPKQNSTGGKERLGSISKAGNRYLRSLLVVGALSVIRRAKQVGYTRRSWLAELMARRPVKVAAIALANKIARIAWALMVNGTRYREPVPQAV

SEQ ID NO: 185355 - protein, 320 aa, unidentified
MNSIIVGIDISKETFDAAVLINHKVQTRKFNNNSEGFNKLVTWLKSRETGHVCMEATCIYWKSLAKYLYDYGYKVSVVNPARIKGFAMSKLSRTKTDKADSVLIADFCKAMKQEAWYPQPHYIQELQQLVNRLNVLIKHKTQETNRLEGASKAIANNIQMHIEFLETQIKEIEQLINDHIKNNKDLHNKAMLLESIPGIGAKTQAIVLAFLADIEKFSSAKQVVAFVGLNPKHRQSGSSVRSASRISRTGNSDLRKSFYMPAMSALRHNCIIKHFSQRLSNTGKPKMLILTAAMRKLLHIIYGVLKHNSPFNPNVSIQQK

SEQ ID NO: 185356 - protein, 355 aa, unidentified
MDSTKLIGMDVHTEAISVAVRNSAGKVVMESILETKANTILEFIEGLRGNVQVTFEEGTWAAWLYDLLKPHVTTVVVCNPRKNALLKDGNKGDKIDARKLAELLRLNNLKPVYHGEHGIRTLKELSRSYLTITKDLGRVMNRLKALYRSWSIPCAGQQVYAPRHRSEWLSKITEAGVRRRAEYYYQQLDALQALRHDVRRDLLAESRKQTATKLLRQIPCIGPIRAALLIALIQTPHRFRTKRQLWNYSGLGIQTRDSAQYRFVGGELQRSKRPQQLRGLNENHNHDLKNIFKSAATMATISPGPFHDFYEGLLVKGRKPTMARLTLARKIAAITLIVWKKGDSFDAKHLKPQAA

SEQ ID NO: 185357 - protein, 470 aa, unidentified
MVAVMIGIDPHKASHTAVAIDPAEVPLGQLRVRASAVQAERLLGWAQAWPERAWAVEGAGGLGHLLAQQLLSAGERVLDVPPKLAARVRLLATGNINKNDPNDARSVAVAALRSAGVREVRRDDHAAVLKVWSKRYQDLGRARTQVACRLHQVMCEQTPGGVPGEITAGQAERILASITPAEAVQAARWELAAELTEDLRGIDARIRQARTKLAAAVRAAGTSLTGLFGVGPVIAAAVIGDVRHVARFPDRDHFAAYNGTAPIEVSSGGRKIWRLSRRGNRRLNHAIHMAAVTQIRHRHSQGHAYYQKKLAEGKTGKEALRALKRQVSDAIYACLQADARRDAAHVKSPGGQPGNGSDSSAAGSHPGHRLFGQATPGLRHHTTTAASDPAPGPASARGRAGHSSIAATSPLAKPQVQVQRPQRSEDERPGGAASQRPYSAARKARGQGSQAKPQRPKTASRAHENDRRNP

SEQ ID NO: 185358 - protein, 460 aa, unidentified
MEQALAQRNPAVSLKPGKSRAAALSITHPNAAGIDIGSASHFVAVPADRDDETVREFASFTADLNAMADWLKACRIDTIAMESTGVYWIPVFELLESRGFTVMLINARHVRNVSGRKSDVLDCQWIQQLMTYGLLRGAFRPADQVCVLRSLWRQRGMLLRSQSRHVQHMQKALTQMNVQLANVISDVVGVTGQKILRAIVAGERDGHALAGMKDARIRASVDEIAKSLQGNWRAEHLFALRQAVDAFDFIGTQLAECDREIEQQLQRLQTREGEPARGKQRGRTRNAPKFDLRTQLFRMCGVDLTRIDGIDVTTALAVISEIGADMSRFPSAAHFASWLGLCPGTRITGGKVMSGKTMRCANRAAQALRLAATALRTSQSALGAYFRRMCSRMDKPKAITAVAHKLARLIYTMLTKGEEYTDQGQDYYEERYRERVLRQLSQRAQKLGMKLVATEQPQPV

SEQ ID NO: 185359 - protein, 302 aa, unidentified
MSKRRLDAHVEPLGTFASFDNDAAGIAELAIFCRRHGVQLVVMEATGGYERTAFLLLWEAGIACGLTNPRSVRRYAEAMGFLEKTDRLDARIIARFAIAKDLKPNTPPTPGQQRLNALVARLCQITDDLVVQKQRRSCAMNSEMVTSIDEVIALLKRQTRTLEGEIASLIDDDPLWARLDEALRTKGVANRTVARLLAQLPEIGIYSNKAIAKLAGLAPLPDDSGTRIGKRHIRAGRAGVRSILFLVADIARRYDPSLAAFHQKLIKAGKEKMVVRIALARKLLVRLNARAREARESYALAT

SEQ ID NO: 185360 - protein, 406 aa, unidentified
MMNAVGIDVSKRKSTVTIRRPGDEIILDPVDIPHTRSAIDELIGQIKSLDGESRVCLECTGRYYEPIASSLSDAGIFVSAVNPLLISMFGDESLHAVKTDKADSSKIARFALARWTKLPQYGHMDETRNQLKTMNRQFGFYTDRKTAMKNNLIALLDQTYPGANSFFDSPTRDDGHQKWVDFVYTYWHVDRVRGMSLNAFTRDYQKWCKRAGYNFSPSKAEKVYEASSDLIAVFPKDDTTKLLIRQAVTALNAVSSAVETLRMKMNQTAATLPEYPVVMAMRGVGPSLGPQLIAEIGDVTRFEKRGSLIAFAGVDPGKDDSGDRNRKSVSTSKKGSPHLRKTLFQIMEGLIQTSPVGDPVYDFLNKKRSQGKPYYVYMTAGMNKFLRIYYGRVNEYLAQLEEGKES

SEQ ID NO: 185361 - protein, 375 aa, unidentified
MTITTATTEETAITSISQNPAPDRHCTIGVDTHKDVHVAVALDQLGARLEELHVPATAAGYAQLEGWATGLGPVKVFGVEGTGSYGAGLARFLSTRGHLVVEVNRPDRATRHRIGKSDPIDAEMAARSVLSGVATGTPKHGDGEVEMVRMLKMAKDSGVKARTQALNQIKALLVTAPAELRETLDGLPVGKLLDRCAALRPGELSCPTAVAKHTLRLLARRNLELRVEVKGLEEQIRLLAAVAAPKLLDVFGIGPDGAARFLVTAGDNPHRLRSEAAFAALCGSNPIPASSGKTQRHRLNRGGDRQANAALHRVVVVRLRWHEPTQAYLTRRLAEGKTKAEIIRCLKRYVAREIYAILCPPLAAASTGKNLARAA

SEQ ID NO: 185362 - protein, 344 aa, unidentified
MVYHTALDVSLRSVSICIIDGDGNICFEDKVVSEVDEIVTALKQFSPEICSVGFEAGTLTQYLSYGLQAAGFEVICMEARQVSAALSAMRNKTDRNDARGIAQILRSGWYSRVYVKSMESHLTRAMLSGRKAVLKKCVDLENEIRGLIRLLGIKLPGTLKHGAFDDLVRPIIEEHGLMVDSLIPLLDARLMLYQTYLKLDAQVTAMARKDEVCQRLMTVPGVGAITALTFKAGVDNPSRFKRSRTVAAHFGLTPRRFQSGELDNPGHISRAGDADVRSALYIAAHSLVIRSDKWTYLKAWGLRLSKTKGHRRAVIAVARKLAVILHRMWIDNTEFRYNSTEVKL

SEQ ID NO: 185363 - protein, 356 aa, unidentified
MQRYLGLDVHAASSTLVVLSQSGKRLGQSVIETNGRALVEAIRAIPGRKQLCFEEGTQSAWLYEILSPHVEDAVVAMVGRTPGQKSDALDAHGLAEKLRSGQVERSVFKAPGQFSLLRERARMHSTISRDLVRVQVRLKSLYRSRGIRTPGASVYGRRQREVWRNQLPRAARTSAERLYVQLDFLVGLKEQAEQDLIRESKRHRITPLLETIPGLGPIRVARLVPIVVTPYRFRTRQQFWSYCGLGIVTRTSSDWVQTPDRRWMRAEVQHTRGLGRRHNHVLKDIFKGAAMSVLVHHRDDPLYRHYQRLLEGGTKPTLARVTLARKLASTLLALWKKEEPYQPERERSVQRSEPGR

SEQ ID NO: 185364 - protein, 417 aa, unidentified
MEVVFAHCAGLDVHKKMVVACVFVSDPQGKIQRLIQTFSTTLVGLEALAAWLSGLGVTHVAMESTGVYWKPVFNVLAPLCEVWIVNARDLQQVPGRKTDVKDAEWIAQLMRHGLLKRSFIPDVEQRDLRDLTRYRTRLIAERSSASNRLQKILEDANIKLSSVATDIRGVSARAMLEALIRGETDTAQLAELARGRLRSKIPELEAALAGRIREHHRFMWREVLHHLDELNARLATLDVQLRQLTAPYESIIERLDAIPGIDRRTAEVILAEIGPDVTPFPTAQHLASWACLCPGNNISGNKRRSGKTRHGQNWLRTALVEAAWAAARTKDTYLGSQFHRLRARRGDKRAAVAVAHSILIVVYHLLAKPEAIFHELGGDYFLKRNAEQEERRAVRKLTSLGFTVTLTPAQAASAAPS

SEQ ID NO: 185365 - protein, 411 aa, unidentified
MQTMIARVCGLDVHKAQLTACVRLLVNGVVSEVIQTFGTTTSDLLALRDWLAAHGVTHVAMESTGVYWKCVYYMLEDEFELLLVNATHIKHVPGRKTDTIDAQWIAQLLACGLLRGSLVPPKPIRELRDLTRYRKALIYERGRAVNRLHKVLEDAGVKLACVATDVMGVSGRAMMRELIEGHADADALAELAKGKLRKKLPELRKALVGRFRTHHAFMLEQMLAHIDVLEDDIAALSARIEEQISPFATKVQLLCTIPGVQQRTAEVIIAETGGDMSAFPSAKHLASWAGVCPGQRESAGKRKSSKTRKGSPWLRATLIESARAAARTNETYLSERYRQLARRRGDKKAIIAIAHEILTASYHMLSTGELYRETGPAPLREHAAERARNRAIKQLERLGHKVILEPLPEAA

SEQ ID NO: 185366 - protein, 379 aa, unidentified
MATTKQALLNDTSVTLMLYMALELSGAKWKVAVADGKRAASQHALVAGDVGGLLLLIDKAKKRCGVQGKVRVMSCYEAGRDGFWLHRWLLEQGIDDVVVDSSSIEVNRRKRRAKNDALDAAKLYEMLVRYVAGEKRVWRVVRVPSVQQEDERRLHRELERLKRERNAHVNRIRSLAVLHNVRLQRVGGRDWSERLEQLKGQLPAGMVAEIERQSARAKLVGEQIAQLEKSRQEQLQTMIEQQQDGPLLALLKLRAIGVQTAWVLVRELFSWRRFSNRRELAGCVGLNPSPYDSGASQREQGISKAGNRRVRALLVEIAWYWLRYQPHSALSAWFNRRFGGAGKRMRRVGIVALARRLLIALWRYVEQGVIPEGAQLKRP

SEQ ID NO: 185367 - protein, 322 aa, unidentified
MSQPNPLCVGIDVSKATLDIAASSDVAQFTVSNDSDGFNAIITGLRRHSVALVLMEATGGLEVAVACSLQAEGFEVAVVNPRQARDFARAMGYLAKTDRIDARVLTQMAEVINRHPERKRFIRALPDAERQALAAMVVRRRQLIAMLVAERNRLHPFHPQNKKSINTIIKALEDELVRLEKEMDSHIRNHFKEIAERLSSIKGVGTMTVSAMLAEIPELGTLSRREISALIGVAPVNRDSGTMRGRRTIFGGRAGVRSALYMAALVATRFNPVIKTFYVRLLAAGKAKKVALVACMRKLLTILNAMLRKNEEWDESYHQVAP

SEQ ID NO: 185368 - protein, 350 aa, unidentified
MTTMTETARRITGGVDTHRDVHVVAALDERGGLLDTNEFPATAAGYHDLLVWLGWFGPIDKVGVEGTGTYGAGLARHLLDHDVEVVEVDRPNRQRRRRAGKSDTTDAISAARAALSGEASTTAKTRDGNVEKLRVLRVARRSIRQDRIRALNQLRSLVVTAPDELRVELSDLTSIGVSQAVAKFRVADPTTTLGAIKYAMRSLGRRAEALRWEGKEIDKIMRTIIEDTAPVLIDQGGIGVDAAGALLVAAGDNPQRLHSEAAFVRLCGAAPLEASSGMVTRHRLSRAGNREANAALYRIIINRMANDDRTRTYVTRRRAEGKSSLEIIRALKRYVAREVYPLLGNNHLTT

SEQ ID NO: 185369 - protein, 298 aa, unidentified
MRFYTTQHQYYCGIDLHARSMYVCIQDQSGKILLHRNYRAGPDALLGAIDQYREDLVVAVECVFTWYWIADLCSREGIAFVLGHALYMKAIHGGKTKNDKIDSNKIAALLRSGMLPMAYVYPQGMRSTRDLLRRRLYLARQHAELQAHIQNTNTQYNLPYFEKRIDRNSNRAGIAMRFTDPAVRTSVEVDGALMDALHQQILAIERQINAQVPEHDPVALHLLRSIPGVGKTLALVILYEIHDISRFPAVGNFISYARLVKCTHESGGQAQDRPKQQDRQCPPEMGLQRGSLPVSPEK

SEQ ID NO: 185370 - protein, 427 aa, unidentified
MPYRIAGIDVHKKMLAVVVADVEIDGDFHFERQKVGTTPADLRRLADWLVEHEVEEVVMESTAQYWRPVWEALEQHWRPRRRARDGAPRLAGTLHLAQAQSNRGPGGRKRDFPDAERLVKRLVAQELTLSFVPDVEQRLWRTVMRRKYQITRNRVQLHSRLEALLEEAHIKVSSVVSDLLGTSARRMLQALADGETDPTALALLAAPRLRATPAQLCDAFHASPTLHPVYRRLLKLTLEELRLIEDHLSQLDQQMADLLAAHHDAVQRLAEVPGLGVDSAQQIIAEVGATAATFPSPKHLASWMGACPGNEESAGVNYSHRCPKGNRQMRRVLNQAANAAVKAKGTIFAVVYRRIVPRLGHAQAIGAITHRLCRLIWKILHERVRYEERGPAVSIEAKKVRARKMIRELRTLGYRVELLPPLSSNPA

SEQ ID NO: 185371 - protein, 440 aa, unidentified
MAMRKREDLVFPNAAGIDVGASSHWAAVPGHVTDAPVREFGAMTDDLNALADWLLACGVDTVALESTGVYWIPVYEVLEQRGLSVWLVDARQVKYVPGRKSDVQDCQWLQKLMSFGLLRAAFRPGADVCVLRAVMRQREVLLSQQASWVQRMQKALVQMNIQLTEVITDVMGMTGQAIIRDIVAGERDPQALARHRHRRVKASERDIARALSGNWREEHLFVLGQALAMYDDIGRHLAACDARRDELLAAASSASVDLGRAPRAGTKARAGHDMRQSLANWAGVDLTRINGLGLDSVMTILSEIGPDLKHFANVKHFCSWLGLAPATKISGGRVISARTKRSANRARQALKLAAMSLWHSDSALGAFYRRLCTRMDKARANTATAHKLARMVYFMLTRGEAFVDQGQQRYEEQQHQRAVAALQRRATALGFQINPLGTPA

SEQ ID NO: 185372 - protein, 345 aa, unidentified
MDHFAGLDVSVKETSVCIVDDTGKIVREVKLESEPEALLTVLTNPAYHFKRIGLEAGPLSQWLFSALAEAGLPVICVETRHMRAALKAQINKTDRNDARGIAQMMRVGLYRPVHVKTLRSQKLRMLLTHRKLLQSKAIAIENDLRATLRNFGLKVGVVGKAKFETRIKELVENVPDLAMLVEPLLIVRRALREQIGILHRRLLVIVRDDDVCRRLMTVPGVGSVVALTYRATVDVPARFRNSKAVGAVFGLTPSKYQSGEIDRTGAISKCGDEMMRAMLYEAAQVMLVRSTKWSWLKAWAMQIARRRGLKKAIVALARRLAVIMHRIWVDGTEFRWTREQAAAAA

SEQ ID NO: 185373 - protein, 408 aa, unidentified
MEPKVLIGDDWSQDHHTICFMNPLTGGVAMTFDIPQTPEGFRRVCTERDKLGVRPQDCRVGIETAHNLVVDYYLDHQYQVFVIAPSVVKGCRKRFGASGAYTDESSAMLLADLLRTDRARFSPWRPPSPLIQQMLVQVRLIETLRREINRWTNRLEATLLRVNPYPLGLFNELECEISLQFLLRYPTYEAVQALTLDEFKVFCREQHYTHPRRVPKLYAHLQIPTPTPSPAVAQAYADQVPFFAQTLLPLVQQRKQSLKALQTLFVQHPDHPIFDSLPGAGKLLAPSLLVKFGDDRERFPTSKSVQTLAGTCPVTRQSGKYKGIYFRKACDKEFRRISDQFAWLSLDESVWAATYHTELQRRGIVGSHAIRCLANRWLAITWRLWQDRAPYDEGYHLQRRALRRRPKP

SEQ ID NO: 185374 - protein, 355 aa, unidentified
MSKQIVALGKPAISSEQYPYPQVKKLFCGIDVGAETLAVAVLEPDRPSVQREFANTATGHKALLGWLGKMRAQVRVSLEATGIYSMDLALTLDATECVRVHDFARTLRRSKTDSADAQVLAEFSLRMPFAAWQKPSQSALALRAVSRHLEALVVQQRRETNRLHAAKGSMATPRCVIADLKRSLAGVGRRIVKLRREAMTLIAADAHLSERFRLLTGVPGIAAVSALQILGELVLLAPDMKVRQWVARSGLDPVHQDSGTSVHKPARISRAGSRHLRRALYMPALAAVRWDPHLKAFYEALLARHKRKLQALVAVARKLLHAIYGIFRSRTPYDGRKLFPAMTLAENSNPLPAAI

SEQ ID NO: 185375 - protein, 344 aa, unidentified
MSKHSLPSGDVAKLLQRFSLLKQKARTRTGADFPIIVIQEAGLDGFWIHRVLESEGIESHVVDPASILTSRRRRRAKTDTIDGETLVRTLLAHKRGEPRVCAMVRPPTRQEEDRRRICRERRTVLAERIEHVNRIKGLLFAQGVFDYEPLHRNCRARLDALKTGDGCVLPDHLKAQIGRELDRLELVVTQLKAVEAERDALLEQTREIVTVPARALANLKGIGAEHAAVIWSEGFFRSFANRRQVAAYAGLAPTPWQSGSVDREQGVSKAGNPRLRTAMIQLAWLWLRHQPGSALSQWFHERVRRHGGRSRKTTIVALARKLLIALWKYATAGVVIDGAVMKAS

SEQ ID NO: 185376 - protein, 435 aa, unidentified
MNFIGVDLHKKSITICVMDEKRKILARKTLACTQTDEILEFFRQFRPFKVVVEATASYVWFVELVEPLAERVVLANPKKLRVIAESTKKTDRLDAQVLTEFLVLDMIPESYQPTPRQRQHRALVRHRQYLQGRITSVRCKIRHILSNYNADRKDLFSANCGPAYFKEVRLSDVDRFVLKLLWAEWQDHLAQRLAVSKKIKAFVAKAPQREAEAREILKTAPGVGPVTAEVVLSELGDISRFRNAKTVCAYAGLVPVVRQSGERKSKDLKITKEGSGLLRWALVEAAWRLVGKSPKWAALFSRLMHRSGKKRAIVAVARKLLCVLYAMLRTSTPYKIVTTQTTAPRTTGKKLVRASAPDQTTTTATTAPRTTGKKLVRASTPDQTTTMGTTAPRTTRKRLVRASTPDQTTTTGTTAPRTTRKRLLRTSTPDQTITT

SEQ ID NO: 185377 - protein, 355 aa, unidentified
MNDAKYIGMDVHQATISVAVRDSRGNLVMEAILETKAETILQFIRGLRGSLYVAFEEGTWAAWLHDLLQPHVARVLASDPRKNALLKAGNKSDRIDARKLSELLYLNKLSPVYHGEQGIRALKELARGYITITRDLTRVMSRLKAIYRGWGIPCAGQQVYAPRYRAEWLAKISEAGVRRRAELYYQQFDALAALRRETRRELLAEARKHPAMRLLRQIPAIGPIRAALLIALIQTPNRFRTKRQLWAYCGLALRTYTSGEYRFVGGQLKRSKKVLAVRGLNINHNHDLKNIFKGAATRAAATAGPFQDFYQATVARGMKPHLARLTLARKIASITLLVWKKGARFDAEHLKQQAA

SEQ ID NO: 185378 - protein, 335 aa, unidentified
MKVFYLGVDVSKKKLDLCLRSNGKDILYDVIPNDLSSIKSWLTRTFEKFFLSEDSLVVCAEHTGQYTYPLVCATKSIGVYLCLEDAAKIKYCHGIPRGKNDKIDACRIAMYAERYNDCLQPYTASELIIQKLKNLSTERSMLVADRAKYQSQLKDQVDYMEHSIYIAKCNRVEGIINTFTDYIAQIDLEIKELINQAPVIAHQMDLLMSVDGVGERVALKMIMETDAFTSFTDPRKFCCHAGVVPFVYVSGSSQRSKNRVSNRADKGIKHLLHMAALSVSQVKNSPLKKYYDRKVEEGKNKMSVLNAVRAKLVTIMFAVIRTDAFFSRNYQNSLA

SEQ ID NO: 185379 - protein, 310 aa, unidentified
MDAIFVGIDVSKDRLDVHVLRGGEAFGVARHGQGLEELVDRLRALSPTLVAVEATGGFETIVAAAIAGARLPLAVVNPAQVRHFAQAVGKRAKSDPIDAFVIARFAEAVKHEPRGIPDEAARLLAELVGRRRQILEMLIAERQREKRAANPRVTKSLARTIKMLQKELVDVDGDIDTAVRGSPVWRDKEDLLVTFPGVKNILARTFLAEVPELGSLDRRRIASLAGLAPYTRQSGRWKGKSMIGGGRAVLRSALYMAALSASRCNPDLKLFYQRLLASGKPKMVALIAVARKTLTILNAMLRDQKPWQYA

SEQ ID NO: 185380 - protein, 406 aa, unidentified
MNQLYVGIDVSSRNNVTYVMKPDGSKHSEFSVANNLPGAKELSFRVCQALDELQLDSVIFGMEATSIYGEHLARALREDGSLGKFNRKIFVINPKQVRKYREILPELPKNDFIDAYVIADSLRFGRILPREYAENNVYESLKTLTRTRLALIQKQAEAKQKLTNLLFQKCSSLAQDNVFGGISTTFLNLMECFDSVDDLANLSLPELTSFIADSGRGRFKDPDAIAKAVQAAVRGSYRLPKVMNVSVNQALSLYVSLIQTLKAQIDALDTSIEKHFDIIPNELKTIPGIGKVYSAGIIAEIGDIGRFDSHASLAKYAGLVWSQHQSGNYEAESTHLIKSGNRYLRYYLLEAANSVRRCDSEFKRYYDLKYKEVNRGQHKRALALTARKLVRLIFRLLKDNRLYSAR

SEQ ID NO: 185381 - protein, 413 aa, unidentified
MDWVACVGVDWGDKKHAYEIRGGDGSKTSGTMDTTPEAIHEWVRSLRERFPTGTIAVAFEHGRWSLIYALMMYEFLALVAINPRASKAYRDALRLSGASSDQADAALICEFAAKHPSELRVWQPEDPVTKKMRLMVESRRTLVDQRTGFTHTLTDTLKQYFPQALQWFAGETSRKLRAFLTRWPTLEPLRQAKVDDITAVLRTLRCRKVAAAAQELVEKIRTAVPLTRDQAIIDGYAIYAQSLAAIIEPLELQIAKYDKAIAAAWAVHPDRQIFDSLPGAGVVMAPRLAVAFGTDRSRYQAAHDVECYSGIAPVIEQSGNQRWIHARWGFPTFMHQTFHEFAQASIPYSAWAKAFYEDQRERGAGHHAAVRALAFRWIRIIFRLWTNRDQYDEELYIEALTNKQSPIVRRLVA

SEQ ID NO: 185382 - protein, 329 aa, unidentified
MQTVFIGVDISKEWLDYSIVQGPGGIPSKSSQLSNNVKGITQLIKKLSKAYDANLLWFCFEHTGHYGMLLSSLLQTHGITYSAVPAMEIKNSIGMQRGKTDAVDAQRITQYASLKATSLKPSSLPVKVLLQIKSLLAYRQQLVKSRTQCLNSLKEYKVAQQVIDVKMIIKAIKRKIDALSKEILSIENEVKKLIEMNSTLKKNFNLATSVKGVGFIIAAYMLIYTNNFTSFQNPRKFNCFTGLAPFEHSSGVWKGSTKTSHYRHRHLKSLLFNGANSAVQHDPQLKAYLARQIEKGKHRQSVMNAVACKLVYRVFAIIKRQSPYVLLAH

SEQ ID NO: 185383 - protein, 466 aa, unidentified
MRDAIGIDPDSKGFICAYVRATSAPVKTRGYLVTEADLGKFVKWVRGERDVIVAIEGRNGLSRPLERTLREAGIIFYSFKPADTDKFRKAVLGQNKDNQKDAEGVARYAMALEAQGKLERYRRVWFVDVELQLLTRGYERKTQAMTAEVNRLWKLIRHASSELYLAFGGNHPEVELKENMLKNLGTLSLLAQRPDLGEWKELSDEELLAAMGGNRNGRRELIQQLRKVAGKLPAVTPAMALMIQDSARTIQRLKREEDDIRKMLEELTQDSPEVQALKEKRGIGTITAATMVAEIIDIRRFSREDNLAGYIGLGMREYSTGDTTRMITSQLFNHRLKDAFMTAARNYVHFNPGSHLAGYYRNLVKAGMTPLEATKRVARALVRVIFRELYALQGTEANPQQLEEAKEGESDVASGVTRSEQSHSSNTSPSSLASNKAPRARKVKVRNTGRSRTTRRRKNAVSKKNA

SEQ ID NO: 185384 - protein, 441 aa, unidentified
MAMRKRDDEAAFPNAAGIDVGASSHWVAVPKHLADEPVREFGAMTDDLNALADWLLACGVDTVALESTGVYWIPIHEVLEQRGLKVWPVDARQMKYVPGRKSDVQDCQWLQRLMSLGLLRAAWRPGDEVCVVRAVVRQRDVLLTEQGTWVQRMQKALVQMNIQLTEVLSDVMGMTGQAIIRDIVAGERDPLVLARHHNRRIKASKDEVTKALTGNWRDEHLFLLMQSLAIFDDLAKRVQECDSKIEALLAPLQRHTVKLKASLKGKGKNNPSFDVRQAMANWAGVDLTRIDGLGVSIVMKLLSEIGTDLSRFANVKHFCSWLGLCPGTKISGGKVLAAGTKRSANRARQALKMAAMSLSRSDSALGAFYRRLCSRMDKPRANTAVAHKLSRMVYFMLTRGEEYVDQGRERYEEQQRQRSIAALRRRAAALGFQVAPVDAAA

SEQ ID NO: 185385 - protein, 456 aa, unidentified
MSKKKSASAKGLEMINLDAAGIDIGSKIHYVCVPEDRDSVRIRSFGSFTEDINMMATWLKKCGIKSVAMESTGVYWIPVYQILERAGFEVNLINAQHVKGAPGRKKTDVEDCGWLQKLHSYGLLRASFRPDDQICVLRSYIRHRARLIESASSHVLRMQKALTEMNIQLHNVISNITGATGTAIINAILTGERDPIKLAKLRNNGIKSSEDVIAKSLNGDYRQEHLFVLKQEFESYNFYQQQIEDLDKVIEVYYQELDKKENKEPLKKKKRRLSSSNIPKFNLRESLYALIGVDFTAIPGLNELTVQAITAEIGTDMSKWPTEKHFTSWLGLSPANKISGAKILGSKTRKVKNSASKAFRLAACSAGKTQTAIGAFMRRVKSKAGAPKAITATARKIACLFYRLLKYGQDYVEQGIECYEKKYKANLVGKLEKLAKHLGYDLIEKIEKQGFNIGVS

SEQ ID NO: 185386 - protein, 341 aa, unidentified
MKHHISVLGIDIAKRLFHVVGMNERGQIVLRKRLARNALMPFIAALPPVLIGMEACGGAHYWARRFREHHHDVKLMAPQFVKPYIKSNKNDMRDAEGIGEAVTRPTMRFVPTKEVDQQDIQALHRVRERLIGARTALVNEIHGLLHEYGIVVPKGVSKFRRTVVGKLEADKAKLTPLSQEMFGKLIDEFAALEKQLAYDQEKLEALATTHPECQRLMTIPGIGPFTATALVAAVSDASAFKNGRQFAAWLGLVPRQHSTGGKERLLGISKRGDSYLRKLLVHGARTTIRWVGRKTDRRSQWMRQLVERRGKNRTAVAVANKHARIVWALLTSHQDYQLATG

SEQ ID NO: 185387 - protein, 433 aa, unidentified
MPTNHPYDLVIGLDRSDRKADLHLIDTRTGTVQKQTVATSPEALHDWLAQLRQDHPQARVALCLEQPAANLIVFLETYSWISLYPINPITLQKFREAFVTSRAKDDGKDAQYQAELLLSHHDKLKAWQPDDSPTRQLQQLVLHRRAVVDQRTGLTNRLIALLKQYFPQALDLCGEDLWRPLATAFLLKWPTLQSLQKVRKESLKQFYHLQGSRSQTLIEQRLERIDKAVPLTDEIALLQSYTLRVQLLCKELQLLLKTLQQFDQQIANRFQQHTDRHIFEALPGAGPVLAPRLLASLGSERERFARPENLQSFSGVAPVTKQSGGKCYIHRRYCCPKFLRQSFHEYAKESILHSRWAAAYYLQQRTKGSKHHTAVRALAYKWQRIIWKCWQTRTVYKEAIYEAALKKNKSPLVGLLDQIELGKSPVKTRAKKS

SEQ ID NO: 185388 - protein, 331 aa, unidentified
MSMHVGLDVGSRTTAMGWRNDGRFAGACNIDQTPAGRKAAVNKLLELKPLSVVMEATGIYYLDLAMELTAAGLPVSVINPKSFHNFAKLMLKNSKTDAIDAQLLAEYGERMSPKLWTPPTTIQLELRAIGRHINRLTCHRTRAKNELHALKATQTTVKMLIEDEEEAIEAFDKRIERFRLAGRALIDNCPTLSAQFGHMIAAPGMGEISVFAALAELTTLPVTLKSAQVSRHAGLDVRLTQSGTSIDKPGRISKGGNAYLRSAMYMPALTAIRCDSNVKAFYEALIGRGKRKMQAIVAVMRKYLTGLWACMQAGEDFDTAKLFSAKDLAKA

SEQ ID NO: 185389 - protein, 389 aa, unidentified
MKIFVGIDIAKLNHFAAAISSDGEIIIEPFKFTNDADGFQLLVSKLESFDKNSIIIGLESTAHYGDNLVRYLVTELYQVCVLNPIKTCQMRKNNVRKTKTDKVDTYVIAKTLMIQDNLRFVSFFDLDMMDLKALGRFRQKTIKQRTRLKIQLTTYVDQVFPEIQYFFKSGLHQHAVYALLKEAPSPKEIASMHMTHLANLLKVNSHGHFTKEQAKELRVLAQKSVGANDSAISIQITQTIQQIELLDSQLEKIEAEMTDIMKFNDSVIMTIPGIGYINGGMILGEIGDIHRFSNPNKLLAFAGLDPSVYQSGNFQAKTTRMSKRGSRVLRYALVNAAWNVVRNNATFKAYYDAKRAEGRSHYNALGHCAGKLVRVIWKMLTDEVEFNLE

SEQ ID NO: 185390 - protein, 313 aa, unidentified
MTEHTIGVDISKSHLDVFRLQDEAVRRFENSAAGFRALVKWLGKAAVARIVFEPTGPYHRAFETALSGKFPLVKINPLQARRFAEACGTRSKTDAVDARMLARMGAALALEPDAPVSEKLNELRDLQVARTGLIKERTRLHNRGHVQANPVLKRQTKARLALVERQIAELDAEIARQIAEDQPTARKRQILCSIPGLGPIAAALILTFLPEIGTLDRKQAGSLAGLAPHSRESGQWKGKSFISGGRKPLRDALYMPALVAMRFNPDLKAKYTALRHVGKPAKVAIIAIMRKLLETANALVKGDHLWAKKSSCS

SEQ ID NO: 185391 - protein, 400 aa, unidentified
MRLVDAVIGVDAHKRSHTLVAVNPLGRKLAQLTVATTTEGHSEALRWARARFGRDLVWGVEDCRTLTARLERDLLAAGQQVIRVPPHLMSRSRASSRELGKSDPIDALAAARAVLREPDLPVACHDAHSMELRLLVDRREDLVQHRVALISRMLERIHQLDPAWAEPRNWEYRKPREELRTWLATQHGLLAELARDEFDEIVALIDTAQALERRIDGRVHEAAPALLGIHGCGNLTAAKIVAEVAGIDRFKSEAAFARHVGVAPIPHWSGETTRPLRPIRHGNRQLNVALHRIAMVQITHPGPGRDYFQRRIDEGDSRQRALRSLKRRLARVVYARMKADSRNGGRNGRGLDPGRADYHSRRLAAGALRQMTQLRSRPPQRLALPPRDGKRTRPGRKRYL

SEQ ID NO: 185392 - protein, 413 aa, unidentified
MHVVHERCAGLDVHKKTVVACVLTPEGKEIQTFSTMTSDLLRLAEWLQERGCRAVAMESTGVYWKPIYNLLEAGDFEPMVVNAQHIKAVPGRKSDVRDAEWIADLLRHGLLRPSFIPDRGQRELRELVRYRRALVQERAREVNRLQKVLEGANLKLSSVASDVLGRSGRDMIAALCRGIEEPASLAALARGRLKQKSEQLQEALRGLVGSHQRFVLQEQLSHIEELERRIDRLNGEIEARLAPFAPIVPLLDTIPGVGQRTAEDLLAEIGTDMGRFPTHRHLASWAKICPGNRRSGGKAKHEHIGGGNPWLRSVLVEAARTAARCKDTFLASQYRRLVGRLGDARAIVAVAHAILVIAYHIIQDGKPYQELGATFHDQRSQKAIVRRLTQRLEDLGFVVNLQLKEDPPTAQAA

SEQ ID NO: 185393 - protein, 340 aa, unidentified
MAIVTIGIDLAKNCFAVHGVGPSGKPELLRPEVRRGKLLELIANLPPCLIGMEACSGAHYWAREFQKFGHTVKLMAPKFVAPYRMGGKQGKNDAADAAAICEAVTRPNMRFVPVKTVEQHGQLFVHRARQAYVDERTALLNRIRGLLSELGIVMALSANTVRREACKYLEDLPGWCNRVIGDLLSDLDKLDERIAQYDHHIARMAKEDDRARQLMNLSGVGPITASAIIATIGNGNGLDFKCGRQFSAWVGLTPSQHSSGGKAKLGHITKAGDSYLRRMLVQGARSMLLRAKNKEDAVSRWAVQLQERRGYWRAVVALAAKNARMCWAMLQRGEAFKMPA

SEQ ID NO: 185394 - protein, 441 aa, unidentified
MPTDLSIIGTKVTHTVFLGFIFTSKVSFLLYETICNDPQVCRIVDLPVYYELETNNGNRDYRIQIGGHYMNYNTVYVGMDVHKESFTLCSCKYEDEKASHYQRTPASYKNVLRYLAFLRTIYGEDTRFVCGYEAGCLGYSLYHQLENFNVECVILAPTTMLEQRSKRRIKTDKRDAEIIARSLAQHNYSPVHIPTETDNQTKEFIRMRDDHKAELKKIKQQILSFCLRQGYQYDGSGNWTAKHVKWLRSLKPAGLYKEILDEYLLTYTILTDKLNRLDQRIEELASKEEYKESVSKLTCFLGIKTHTALSVIVEVGDFQRFVSARKFAGYLGLVPGQHSSGDDRNGLGITKAGNTHVRRLLVESAQSYTRGKIGYKSRVLRSRQAGNSPQVINYADRANERLRRRYYKMVLKDGKKYNIAKTAIARELACFIWGMMTDNIY

SEQ ID NO: 185395 - protein, 347 aa, unidentified
MRFYTKQHPFYCGIDLHARTMYVCILSQDGEVRLHRNMKASPDALLKAIAPYRDDRVIAVECIFTWYWLADLCAQEGLPFVLGHALYMKAIHGGKTKNDKIDSQKIAVLLRGGMLPQAYVYPAAMRATRDLLRRRTHLMRKRAELLAHIQNTNSQYNLPEIGKKIAYKANRDGVAERFPDPAVQKSIEVDLALIGHYDQLLRDVELSILKTAKQHHAQTLYLLRTVPGIGEILSLVLLYEIHDITRFPRVQDFLSYCRLVKCTKESAGKRYGTSGTKIGNAHLKWAFSEAAVLFLRANPAGQKSLTKLEKKHGSGKALTLLGQKLGRTVYYMLQRQTAFDMGKFLNG

SEQ ID NO: 185396 - protein, 370 aa, unidentified
MGNRSMFVGLDVHKETIDVSIAEGQRGGDVRHYGVIASDLEPLDKVVRALRAPDRQLHFVYEAGPCGFGIYRHLTKRGEHCVVVSPSMVPKRSGDRVKTDRRDSLALARLHRAGELRPIDVPDDADEAMRDLVRAREDAVVGGTQAKYRLKAFLLRQGRRYPGREGWTLPDRRWLTDLSFPTAPHHITLQEYRDTIDETARRIERVTEQLRQLAPTWRWAPLVAALQALRGVSFITAVALVAELGDLTRFGHPRELMAYLGLVPSEYSSGPSVRRGAITKAGNPHARRLLAEAAWAYQGMPRIGRQHAYRQEALPKVVCDIAWKAQLRLTTRFRRLVARGKAKPKVATAIARELTGFIWAIAREVSPTPQ

SEQ ID NO: 185397 - protein, 386 aa, unidentified
MPQSNDLSRCLIPFRQDETLVAVVEMSKTSWLVAGMIPGVARHPLKKLVPDEKALFELLERWRDEAVKAGKIITRITVASEAGRDGFWLARWLRARGFEVYVVHSSSVAVTREHRRAKTDRLDCEMLKRVFIGWLRGERDHCRMVAIATQTQEDAKRPNRERENLVGECTRIVGRLKAGLARLGIRSFNPKLRNAAERLESLRTPEDVPVPANTLCELRRDMARLRFVKDQIKQIERARVRQLEQAPEQGPQQMVRLLARVLGIGIETADMLVHEILSRNLRDRRAVARYAGLTGSPDESGQKRREKGLSRAGNARVRRGMIQLAWRFLMFQKTSALAQWYRVRTKDAGGAVRKTLIVALARKLLISLWRFVTTGEVPVGVTLRVA

SEQ ID NO: 185398 - protein, 493 aa, unidentified
MGACELESGDVALAAIPIRKMTIGIAQTLLLIIDWRIAMPKRTTSSRPELKAVNVGAAAIDIGSKMHMAAVNSACADVPVRSFGTFTQDLHDLADWFKACSVTSVAMESTGVYWIPVYEILEQRGFDVILVNARYAKNVPGRKTDVSDAAWLRELHSFGLLRGSFRPDAEIATLRAYLRQRERLVEYAAAHIQHMQKALMEMNLQLHHVVSDITGATGMRIIRAIVAGERNPDVLATYRDVRCHSSIETIRAALVGNDRHEHVFALTQSLELYDVYQAKMLDCDRKLEVLIAALNNKGEKSVGKLSKPRIKTKQVNAPTFDVRTALYGLLGVDLTEIHGLGPSLALKLVGECGTDLRAWPSAKHFTSWLCLAPGNKISGGKVLSSRTRRSSSRAAALLRLAATTVGRSDTALGAFYRRLSSRAGKSKAVTATARKIAVLFYNTLRHGMSYRDPGADHYEQQYRNRVLANLQRRAKSLGFVLQAIPGDADPAVS

SEQ ID NO: 185399 - protein, 355 aa, unidentified
MSQEKYIGMDVHQATISVAVMDAAGKLIMECLLETKASTIVEFIQGLQGTLSLTFEEGTSAAWLHDLLKPHVSRLVVCDPRKAALLKEGNKSDRIDARKLAELLRTNQLKPVYHEEHGIRALRELGRSYLTITKDVTRVMNRIKALYRSWGIPCSGAGVYAPRHRAEWLAKLVEPGVRVRGEHLYQQLDSLQPLRLQARGELLRESYQHPAVKLLRQIPSIGPIRAALLVALLQTPQRFRTKRQLWAYSGFAVETHDSGEYRCVRGKLQRNRERITVRGLNDNHNKDLKNLFKSAAISASTRPGPLHDFYVARVEKGMRPTMARLTLARKIATITLTMWKKGVGFDPQNLYRQAA

SEQ ID NO: 185400 - protein, 362 aa, unidentified
MKEKKTRFIGIDLGKRTYEMAITGKGIKVAMSNGTTSVEGRLKLYKKLQPTDKIALEAGTLAFIMAKELEAAVGCKVYVLNPYRLSVIYKSMKKTDKEDALKLAHIIEDFQEERLPLVNVPSDKEMDRRKILAAYRRAQQGRGREINRLHALFVNQGITTVVKKDLASDEQRQASIKMLSGLDREEAEYLVKIIEHHEARIENLEMKMKEESEGNEMIHRLQEIPGVGPMVSFAFSAHVGAERFENAGQLSNYLGLVPRVYMSGDTVRYGSITKRGNSYIRALLVQASWALIRSRNGGKLKERYEYMTIVKSISKKKAIVAIARRLAEMMYVLMRDGTRYRTTCFIHNNEMVTDISGVKFCA

SEQ ID NO: 185401 - protein, 476 aa, unidentified
MAVPNEDSKKPAKSKKPTNPNRARERSLAVPVPASAAPLTVVNPDAAGIDVHSDMHMVCVPADRDANPVRQFGAYTADLHEIVTWLHKCGVKTVALESTGVYWIPLFELLESEGFEVNLAEPGQLSRCGARPKTDVLDAQWIQRLHSYGLLRGSFRPPESVLALRAYFRQRQMLVRYAASHVQHMQKALEQMNVKLPEVVTDITGLTGMGIIRAILDGERDPVKLAKLRDARCHHSEEEIALALQGTWRPEHLFELRQAYELYQFHHRQISQCDQQLETELGRFPNRAGEKTRTVKPRGRGRKSNDVRFEAKGPLFQALGVDLTMIEGIDVGTVLAIAAEIGPDVSRFPSEKHFASWLRLSPPQNQSNKTNKRRDHRKSTSRVTIALRLAARSVGKTKTPLGMFYRRIRSRIGGLGAVKATAHKLACLVYRMLKYGQEYVTQSMEEYKAKMETSVLNALKRKAAAMGYQLNPLPAK

SEQ ID NO: 185402 - protein, 321 aa, unidentified
MNLHQTTTEFNCGIDLHAKNMYICVMNKQGKKLLHQNVKGNDFSYFMKIVSPYLHDLTVACESTFNWYWLGDACMANGIKFVLGHALYMKAIHGTKTKNDRVDSEKIAHLLRSNMLPEGFCCSPEKRPVRDLLRRRACLVRHRTGILSHMSESVQVHGQEKLTRQEKRKSSRAEAVPERFVNPVLKFSMKIDAYLARQYDLVIKELEKEVITHTRLLGSKEYALLKTAPGIGKTLGLVILYEIDDIGRFQNSNHFCSYAMLTPSRATSDGKNVGSQGRKIGNHYLKWAFSEMVVIAKRNPFIKKYSNRLEKNTEKEKLTLF

SEQ ID NO: 185403 - protein, 311 aa, unidentified
MNNTIGIDISKDTLDVYRLTDGQHRQFLNGKAGHTQLLKWIKLRPGQLVIFEATGAYHRQLERALGSQSVPFVKVNPKQARRFAQASGKLAKTDRVDCEMLAKMGAALQLVPQPPFAESLYDLKELLSARRALIKDRTAAKARKATVSNALVKQQLEKRLRQIESDIEKIDALMLELARQDQHMGERLDILFSIPGIGMITALMILVDMPEIGTLGNKQVASLAGVAPMSQSSGKWQGKARIQGGRPNLRNAIFMPALVAIRFNPDLKAKYNHLVAAGKEKKVAITAVMRKLLVLANALLRDQRKWAEKVT

SEQ ID NO: 185404 - protein, 463 aa, unidentified
MKRKKASGKGARRSRPLLERVNPNAAGIDCGSEMHYVAVPAERDPEPVRCFKTFTGDLHQLVDWVVSRGVKTVAMEATGVYWIPVYEILEARGLEVLLVNARHVKNVPGRKSDVSDCEWLQELHSVGLLRGSFRPVAEIAALRSYVRHRETLIESAATTINRMQKALVQMNVQLHVVISDITGATGQRILRDIVNGQTDPQHLAKHRDGRCQASEAEIAAALTGNYRPEHLFVLKQNLELYDEFQRQIKACDTQIEDHLKALAGKAAPPLAPLPAARTRHKPRRNEPRFDVRTPLHQLSGVDLSQIDGIGPYNSLRLISEIGTDMSRWPTENHFASWVTLAPHNRITGGRLISSRTQPSANRAADILRVAAMSVGYTQTALGAFYRRLASRIGKAKANTATARKLAILVYRVLKGEIVYKDPGAAAYDARHRETVLRKLRRQAALLGFGLVNGQTGEILEGVS

SEQ ID NO: 185405 - protein, 330 aa, unidentified
MNSICLSTDQLTAALPVLGLDVAKKSVQAELRTNGKRVRFGFENNAKGFAQLARMLKEQGALKVWAGLEATGPYSHALALWLHGQGHRVSLLNPRRVKQYARSAGNRNKTDLLDAAIIADFVCAHLPAAWQPPTLEVAQLQALVRRREELSLMLQAEKNRLEGVASHVRCSLERIIDTLSAEKTRLEKLITQQIRSHQQLSRDHQLLCTIKGIGSLTAAILLAEMARPGQVERARQAAAHAGLAPRREQSGTSVRRNRGLGKEGNRYLRKALYMPALVAIKYNAPLRHFASRLRTAGKPKMSIVCAVMRKLIHIAFGVLKHQKPFNPSLA

SEQ ID NO: 185406 - protein, 385 aa, unidentified
MDLTSCSAASRQTLHCALELSKSSWLLAIQFPDREQPSVYSIEGGNTEKLMAKLTAARDCWAKVSGSLPVITLCYEVGYDAFWLARFLNAQGIACHVIDPGSVQVNRRGRRVKTDRVDVKMLLRTLIAWCRGERHVWSLVRVPSIDEEDLRRSHRERSRLVRERTAHINRIKGLLFAQGIRGIKVKSQCKTLAVDKLLTGDGHRLPPRLACEIARELQRLAMVQEQIAEIERERDTAPTPCEATERKRQLLLQLKSIGPAISALLSREVYYRQFVNRRQVGSLLCLTPSPYNSGEEERCQGISRAGNAHVRAIMIETAWLWIRHQPKSALTRWFVERTAGQSTRMRKIMIVAVARKLAITLRRYVEHGLVPQVAIRNPPTTGKAR

SEQ ID NO: 185407 - protein, 369 aa, unidentified
MKRKVYVGVDLHKGQFTVYWLREGEEKGRFERYPTKLSGYEGFERKLQAEQEAGYAVEVAVETTGNARYFKNRVERLGIRVRVINTLKFKVVTESAKKTDKHDAATIAEFLAKDMVPEAWVCSEESEELRRLLKSRRSLVRTIVSIKNQIHGLLWGMGLESARRSLQSKKSRRKLLHVLEEQGLAGGAVEPLVGIIGRLEEEVKKLEGLIEERTKADRTVELLRTIPGTGLITAATVRAFVDDRGRFKGYKQLCSYAGLVPWVQNSHQRERYGRITKRGPEELRTALVQMVLGMVRNQKRTLGYRLIQRYRAMKQVKGSGKSIVATARKLAKVIYYMLKKNEPFDPGRMTDPELRKAAVELDVATMSVA

SEQ ID NO: 185408 - protein, 408 aa, unidentified
MSSARQLWAGIDWSTTHHDLAVISPTEPVLQLRVPHTTDGLTQLIDALAGVHRMWRRIPIGIETNDGLLVTFLRQHGARIVPIPPQQAHAHRTRHGNPGRKSDRGDAVLLAHVVATAPCRPAPDITPAVRAIRTAVRAQRRTSHNARLHTSQLRAHLTTYFPAVAVAWPGRSALQRPAPRLILRIAPSPAAARRLTVRRLERLLERSGRVRGVAGEAVRLHEVFHAPALHEHAEVTAASAAITGALLDQIATALDAGDRLQQHTNRLFDSHPHAPIYTSFPGLGPHLAPRLLGELGDDLTRFATARALRAYAGAAPLTWASGSHTRIRHRRHTNTILAETGHLWAYASLRASPGARALYDQRKAAGDRHAAALRRVYSRFLGQLHHCLAHQITYDEHAAWYGRDSDAS

SEQ ID NO: 185409 - protein, 360 aa, unidentified
MFATLGGIHMLICIGMDVHAKKLTCYGIPFDEGDVEAEEFCTEFNREFKVMSGEKKDMIRLSKWLKDVDHSILIESGSKTHEVFWTLTDNGCTVVVANANDLFRITMSVKKTDFHDCRELASYMRRRMLGEKEFSVCLMVDSVWLNRRQMCRLYAAAASDLSDLRRRIRSYMLVRGITIEDLGRDIVSEASLKKLEEVADVPMGFLIEEARWKTAEQKRILKAIEKEFADVPYYNLLKSIRGFGPVTSSYLTAMIIDIKRFDSPAAFAAYFGIVPKQRESAGHSKHCGITRRGDDVARQMLLTATMVHVGNDRDRVSSITNMYYRLRARGMPNKKAMTACTNKMTRIIYVILKDGREYRE

SEQ ID NO: 185410 - protein, 742 aa, unidentified
MATWVAGVDLGKKGAHVAVLADESGQQIGPALSFFTSPDDLDRMRAEFKARAPEGTEFVFVMEPTPTWRPVARYLKACGHRVFLANQSQAKSLRNLLKRHAKTDRLDALALAKLPLVSPQAVHPAPVPDDPRWEVLLRGVKREYKLSLLIADLLKWIKEDAEECIPGVADLFPEPERPLDNLVYRDYCALERHRGMTRERLREEIQARLGRPLDPQETRRVDRLFSLAQQALRLHGKLAPATTAVAEATREDLEFLRLLKAEQKRVTEKNYELYRELDKKGCVRSLRGVGRTLAPVLLAVAPVVACMTSAKQMRKFSGYVPRVDNSGLKEGKGQSMTKEGPAWFKRALFLASDTGRKCDPQLARIYWRAMVEKGFPHVKAVCEVAAHTADRLFRVLKDNRLYELRDPEGNPVSAREARQIIATRYTVPEEVRARLRRQKKHGRGSSDERDGANQHLPAMPTPSGPQVSTEAAPRSTGTGQAQRVAAILAEHLGPEFLARLATRQPDSLAPGMQPRQDDLPLRRAETATQGRTTALEPSEVATGQQDSPCSEAEDAPQPRPAHVPQPPAPPRATAGEIPENGRRQGTQSPLKESATAPIESRPDQAPAVGADAATSATDLLRAISHQQASEQPLEQPVAAPEGVQHGTSAPDSSGDAPESPGPRGLHPFLPPPGKPVATAAQASPLDPVTACPQARSMHLAPSPFRNAAETAATPPPVGAILTRRDPTGNGHHPRDHPIPGYP

SEQ ID NO: 185411 - protein, 454 aa, unidentified
MLVLHPSCAGLDVHKKSVVACCLKLEADGTQLQKTRTFGTTTIELLELLDWFSQEEVTIVAMESTGEYWKPVHNILEGQLEILLVNAQHVKHVPGRKTDVLDAQWLAELLQHGLLRASFIPPRAQRDLRDLTRQRSNLVRERASVINRLQKVLEAANLKLASVVSDIRGVSARQMLEAIIAGETDPQKLAELARGRMRAKRAELAKALKGQVRDQHCFLLTQHLAHLDFLDEQVEIFSSEIERQLKEGPSVNLVSPDPATKIGQALESSQNNFTPDPSTPATAVATLNWEEAVALLDTIPGIDRKVAQLLIAEIGIDMSRFPSAAHLASWAGVAPGNNRSAGKQLPGRISSGDRPVRKGLIQASHAAAKSKKSYLGALYTKLAGRRGKRRAIIAVAHSILVSVYYMFTRKEEYKELGYDYLDERKRGTITNRLIRRLERLGYQVNLKNPEPKLA

SEQ ID NO: 185412 - protein, 348 aa, unidentified
MIVIGVDTHKRSHTLVAVDAATGGVLGERTVSANDDGALVALRLVAGLGDERVWAIEDCRHVSGRFERSLVAAGERVIRIPPALTANARRSAREPGKSDRIDALAVAHTALREGVERFPAAFLDEQAMEIRLLSDYRDQLVVERTRMTNTLRWHLLAIDPALEASLRPSGLVGPRIRARVARRLARLGDGAQIRVAKGLLRRINEITRQELELRGELNTLIEAHSPQLLAEHGCGTITAAILIGHTAGAERFATEAAFARHTGTAPIPASSGNTIRHRLHRGGDRQLNRALHTIALSRVRTDPLTRAYFDRRVAEGKTKLEALRCLKRHLARHFWKLLYRNPQIPDLT

SEQ ID NO: 185413 - protein, 367 aa, unidentified
MKKLSTAAMIAKSRTERQELTIGLDLGDRTSWYCVLDESGAVVLEQRLNTTPKAMREVFGGMPRSRIALETGMHSPWVSRLLAELGHEVIVAHARNVRLIGESRKKDDRLDAQTLARLARIDPQLLCPVRHRSARAQADMTLIRARAGLVRARTALVNTARGLVKSYGERLRGCNVRNMNPEKAENLSPELQVALEPLLNAIESLSERIAEYNERIERLAQQSYPQVGQLKQIKGVGTLIALTFLLTLEDPHRFRKSRDVGCYLGLQPGRRNSGQSEPQMHISKEGDPYLRTLLVQGAQHILGPFGEDCDLRRWGLKLSERGGRNGKKRAIIATARKLAVLLHHLWVSGEVYEPLHNSQHRAVMAAA

SEQ ID NO: 185414 - protein, 426 aa, unidentified
MLNSQINKIQAITSDTLIVGVDIAKNIQWAQFINFRGIEVSKHICFENNYSGFNSIMEKIEEIKSKNNFLSVIVGMEPTGHYWKTFATFLHNNGIKVVQVNPYHTKKAKELDDNSQTKSDKKDVLVIAKLIKDGRYSAIYFPEGEYADLRNLSNTRLEVSRLLNICKNRIHTCVDEYFPEFETVFKSFIKGKVALHILKKIPFPTDILGLALEDIISVIREAAKKSVGKKKAEELIRAAKVSIGVKVGLEGARIRLNNLLEEYELYHNQLEKIEKEMAQELEKTGYKDILTSIPGIGIISVASFIGEIGDPKRFSNPQQIIRLAGYNLVEDSSGKHKSKTMISKRRRKILRTILYKISLIVVCKNQEIKLLYKYLITRKENPLKKKQALIVISGKMVKIMYSLIKKEEVYDKEKVLGIYRKQQIVA

SEQ ID NO: 185415 - protein, 338 aa, unidentified
MKYFVGMDLHSSNTVLGIIDEKGNRVYKAKVANFLPLILNELELFRRGIVGVVVESTFNWYWLVDGLMEAGYKLHLANPSAIKQYEGLKHTADYHDAFHLANLLRLGILAEGHIYPKQERAIRDLLRKRLMLVRHRTAHILSFQSLYNREKGCRIGGDDVKKLGEEDINELFDTDYVVLSAKVNISTIGFLKRKIEEIEKIVLGTMKLLPEFQKLKTVTGIGDILGLTISLETGDIRRFAKVGNYSSYCRCVGSQRLSNEKKKGEGNRKNGNKYLAWAFVEAANYTKRYCSYARRFYQRKTAQTNKIVAIKALAHKLARASYFVMRDRVDYDPMKAFG

SEQ ID NO: 185416 - protein, 343 aa, unidentified
MYVGLDVHKRYCYYAMVDGRGTVVKKDRFRTTGEELEEFASALPEESEVAIEASASGSFVYEQLDGQGINVHLAHPTMVRPFAKQHVKTDKIDAIVLAQLLRMEYLPESYVPNEEMRDLRTLVRHRANLVRTRTSLKNRVHALLTMEGVQPPAVSDLFGKRGREFLEAVKLRETRRVALDDCLEVLDVLSERIAVVEEILEEKAEVTKGVEWLRSIPGIGVQTAVLIQSEVGEMRRFSRPQGFVCYTGLAPKVAQSGDQIRYGHINRQSNGFLRWALIQSAWAAVRSSTPNRFQRIYRKVKARRGSKVAIVATARHLAESVYWVLIKEEAYREIKAGEASSLS

SEQ ID NO: 185417 - protein, 355 aa, unidentified
MNSIKYIGLDVHQSTISLAVLDNNGKLVMQSVIATHASTILDFLHGLRGSLQVTFEEGTHSAWLYDLLVRRVAKLVVCNPRKNALLKAGNKSDTIDARKLAELLRAGLLSPVYHGQNSTAAVKHLGRSYAALTEDTTRIMARLKALYRSQAIACAGKRPYGSRHREEWLAQLSESGLQRRARRLYQQLDLVQELRREARHDLILECRKHSETKLLRTVPWLGPIRVALLIGRVQTPHRFRSKRQFWAYCGLALETRSSADYQMVNGQLERRKKPVFIRGLNLNHNHDLKNLFKSAATTASGSSGPFRPFYENLLGKGMKPELARLTLARKIAAITLHVWKKGEPFDAEYLKPQAA

SEQ ID NO: 185418 - protein, 351 aa, unidentified
MNILAMDLGKSNTVFCLYDSESGRHRFGKARTTPQQVHNLLVEHSPDRVVFEICSAAGWVYDIAASLGIEVQVANTNHQAWRWKNIKNKNDRNDALKLAQLSAMNQLSLVHIPRRSVRQKRSLIQYRQSLVGRRTRIKNSIRAILDREGLPVMPQGKSGWSKAAVERLRKLAMPMERCDAGNLWRGQLQVEIEMLESVEGCIRGVEGKLDELGRDDAQVRRLRTVSGVGPRLAEAVVAFLDEPGRFRSGKQVGSYVGLTPRQYQSGQMDHQGKISGQGNKILRSLLVEVSWLGLRHNRWMNETYHRILRGSASRKKIAITAVARKLLVRCWAMLRDEREWMDEVKSKELAA

SEQ ID NO: 185419 - protein, 365 aa, unidentified
MNHIAIDLGSRESQICVRNSEGVILEEERRPTTGLGKYLAGKEKCRVVLESCAEAFAVADAARKAGHEVAVVPTSLVRALGVGSRGIKNDVRDAQNLSKASCRMEDLPSVHVPGEVSRARKAMSAMREALVETRTKLVNTARSWLRTQGVGVLAGGTLPTFPGRYRRHVEKRGRTLPSYVERMLQAIEELNPTIAEADKELEATAEQDPTCKLLMTAPGVGPVTAVRYAAAIDEVSRFHDAHGVESYLGLIPGESSSGDAKKKHMKGITKAGPPRVRWALTQAAWTALRCRKHDPMVEWARQIEARRGKKVAVIALVRKLAGVLFAMWRDGRAYDPKYESKRAALAEKNGKATVGCGETATQILP

SEQ ID NO: 185420 - protein, 364 aa, unidentified
MANSITWVGIDDAANKFDIAIFHDQDENPKEEFEVMNDPDGLGRFVKKLKSQSGQVRCVYEAGVLGYTLQRYLKKKGVSCEVVAPSLTPRRPGDRVKTNKRDARKLAKLYRAGELTSILIPTEKQEALRDLIRAREDVMEDLTRQRHRLSKFLLRNGLRYRMGKAWSKGHWQWIRNCHFEDAHRQLTLTEYRRIVEQTQEELKTFDEAVEELAEKPEYVRAARRLMALKGVKAITAMTIIAEAVDLKRYVSAPAFMDANGLVPSENSTGDKERRGSITKTGNSHLRRVLVESAWHYRHSTVASRTMKQRCKGLPEEVIRIAETADRRLHKKYSKIVYKGKRPTIAVVAVARELAGFVWAIGQAV

SEQ ID NO: 185421 - protein, 358 aa, unidentified
MQRNKISFKGQKIFIGIDVHAKNWEVAIAPEIGIVRRHSQKPSAKELFDFLKKNYPDGKYQAVYESGFSGFSTYYALKDVGIECMVIHAADVPTTQYEEVMKTDRVDAVKLARSLKAEHLMGNYILEKQYIDDRSVVRIRRTIQKQLGAYKSRVKHMLHCHGVEYPERFSKKQTHWSRAFITWLVKDVRLMSDTRASLDLLIRQVEVIRGTLLEATRQLRKMSQAERYKCRHDLLRTIPGIGLITTMCILTEVCDVKRFHNENQFAAYLGLIPTSHSSGEKIVHGEKTFRGNKQLGPMIIEAAWIAIGRDAGLGAQYFQYKKRMEPQEAIVRIARKLSNIIFSVLKNEKEYVPYQTGN

SEQ ID NO: 185422 - protein, 370 aa, unidentified
MKEGLLGGTLCVSPKSESKKEARFQMLHAGLDLSRRKIDVCLISNDEIVDEWASPPDADGLRGLAARVAMWGPGVRGVIESMNGARFVHDRLEEHGWDVLIADATKVKGLAPLACKTDRIDARVLATLSARDLVPEIWLPDPQIRRERELARFRLHLVRHRSTLKNRIHASLVAFGHPCPVSDLFGVAGRRLLDRLQLPDPWRANIDISLGVIDDLDRRISALTVELKRQGAEHRYIPTLITAPGVGWINAFTIASEIGDISRFASPAKLCGYTGLCPRVRQSGAVDARGPISKHGPKYLRWALFEAALNACKHPYYRDRYQHTKRRLGRQRGPKVAQIDLARRLTEAIWHMLTRDQPFAPAGAPFRLAA

SEQ ID NO: 185423 - protein, 342 aa, unidentified
MKDTMIGVDLAKNILQVHGASMTGQMKFRKKLTRLQFLKFMAEQAPAVVVMEACGGAHHWARVMAEFGHEVRLIPTQYVKPFVKRQKNDAADAEAIVVAAQRPEMRFVQPKSEQQQARGMLFRSRDRLVRQRTELVNALRAQLYEFGHTVPQGIGHLKRIEAIIAAPDSDLPLLVREECRESLELVAETTARIVAKTKKIEALAAETDTARRLQTMPGVGPMTALAVEAFAPDMTSFKRGRDFAAWLGLVPRQRSSGGKERLGRVSKAGQADIRRLLIIGAMSRLNWLGRKSIVEGSWLARMLAKKPRMLVAIALANKMARAIWAMLTKEEDYRAPAMAAAA

SEQ ID NO: 185424 - protein, 427 aa, unidentified
MMEQVDESGELVERVAALDIGKAAVMACIRVPHEDGRRRCQEVREYGTTTGALLALAGQLHRHGVTLVVMEATSDYWKPVFYLLEAEGFTCWLLNARHVKNVPGRPKTDKLDAVWLAKVAERGMCRPSLVHPRPIRELRDLTRYRRSLIRERTAEKQRVEKLLEDAQIKLSSVASNIFGVSGRQMLAAMLDGQRDPQVLARMAHGRMRAKIPQLREALAGNFTAHHAFLLQMMLDRIDGLTARVDEVTARIEEQIAPYARAVEQLDEIAGVGITSAQELIAEIGIDMTRFRTAGHLVSWAKFAPIDRSSAGKSKGGSTGKGNPWLAATLGEIVTAAARTDTFLGERYHRIARRRGKRRAIVAVGNSILTIIWNLLSDPDASYHDLGHGYYQARSDSRHRERDLIRKLERLTGKTVTLQPVAGQEPAA

SEQ ID NO: 185425 - protein, 329 aa, unidentified
MNVHQQGREAATAPRMNAGIDVSKDWLDVCWGDQNRRFAHDAEGIKQLAASLQEAQVDLIVVEASGGYEVAAAAALQAAGFAVAVLNPRQTRDFAKSMGVLAKTDRVDARVLRDFANVIAVHAERPRYLQALPDEQRALLAALVMRRRQLMEMRIAEANRLALAHKSAKKSVTAVLKTLDRQLMKVDADIDSYMREHFKEILAWLDTVKGAGPVLKSTLLALVPELGCLSGRRISALIGVAPMARESGKWRGKRQTCGGRQEVRKVIYMATLAAVKHNPVLKAFHQRLIAAGKPKKVALVACMRKFLVILNAMVRDKACWDPQKAGQPA

SEQ ID NO: 185426 - protein, 344 aa, unidentified
MNHFAGLDVSVKETSICIVDDTGKIVREVKAASEPQALLKVLGNPTYRFKRIGLEAGPLSQWLFSGLAEAGLPVVCVETRHMQAVLKAQINKTDRNDARGIAQMMRAGLYRPVHVKTLRSQKLRMLLTHRKLLQSKAIAIENDLRGTLRNFGLKVGMVGKMRFEARIKELVESLPDLAELVEPLLIVRRTLRGQIVILHRRLLAIVRDDEVCQRLMTTPGVGPVVALTYRATVDVPARFRKSKAVGAVFGLTCARYQSGEIDWSGRISRCGDEMMRVMLYEAAQSMMRSKKWSWLKAWAMQIARRRGMKKAIVALARRLAVIMHRIWVDGTEFRWTREQAAAAA

SEQ ID NO: 185427 - protein, 343 aa, unidentified
MKIMTGIDLHSNNALCGLMDESGRRLLHKKLPCDLPSILNLLEPYKKRIATIAVESTFNWYWLVDGLQDHGYHVVLANPAGMKPYSGKKHTDDVSDAYFLAELLRLNLLPTGHIYERQTRPVRDLLRRRMLLVRQRTTLILSFKSLHERTLGRRVATYQIKTMKAEQAQACFSHPADQLCSAQQIELMSHFTDAITKLEKHILKAVNQWPSYQGLQTLPGIGKILGLTMALETGQVQRFASAGNFASYCRCVKSVRQSNHKKKGENNRKCGNKYLAWAFVEAAHFACRYDEQCRRFYDRKKQQTNAVIATKALACKLAKAAWHVMAQDVPYDAARVFGSASKE

SEQ ID NO: 185428 - protein, 465 aa, unidentified
MRTDKMLWRNRKLKKELARRLQSENPSLEVVHPHAAGIDVGNSAHYVAVRPDRDSQPVRRFECFTADLHRLANWLQDCGVKTVALQSTGVYWIPLYDILEERGFEVYLVNARHTKNLPGRKSDVQESQWLLKLHTYGLLNNSFQPLSKIRILRTYWRQRLQHVTGAATCVQRMQKALTQMNIQLANVISDLSGVTGQLIVRAIVGGERDPWKLAELSHPRIQASRGEIAKSLEGNWRQELIFVLQQEMEMYDTYQRRVAECDQELQKHLRAFADTVPPPVKEELPPKKKKKQNKNNPHFHLAEELQRITGVDLTRIDGVDVIVAQTLVSEVGLDMSRWKTEAHFASWLGLCPDNRISGDKVLARGTRRVLNRAANALRLGASTLLKSQTYLGAQYRRLRSRLGAPKAITAMAHRLARLVYRMLKYGQHYVDKGAEYYEQRNRQQQIEFLRKKAAKLGLQVTPAHA

SEQ ID NO: 185429 - protein, 366 aa, unidentified
MKKISTVAMERIQIFKESQRTIGMDLGDRSSHYCILNEAGEVIWESKLPTTPKGMEEVFGRIPRSRMALETGTHSPWVSRQLTELGHEVIVAHARNVRLIGESSRKDDRLDARTLARLARIDPGLLSPVRHRSAKAQVDLTVIRARATLVGARTALVNAARGLTKSYGARLPKCGSEQMNREIAKGLNQELREALDPLLAEIESLNERIAEYDRRIDKVAKEVYPEAALLRQVKGVGPLIALTYILTLDDPHRFRRSRDAGCFVGLRPGRRNSGMSEPQRHISKEGDRYLRTLLVQGAHYILGPFGQDSDLRLWGLKLAERGGKNAKKRAVVAVARKLAVLLHKLWVSGEVYEPLRHSQKAMRAVA

SEQ ID NO: 185430 - protein, 442 aa, unidentified
MSKMIRYVGLDVHKRVVEACVVDAQGKVVLRHRFALDRRTLELFAKKFLRQTDRAALEATTNCWIVAELLKLHVAEVVISNPMVTKAIAQAKIKTDKVDAHVLAQLLRCDFLPRVWQPDEATRRLRELTSRRSTLVAERTAARNRIHSVLAMRLVVPPVKDMFRTEGIEWLRTAALDEQARQLVNSDLRLFEFVRKEIELVEEELARHGYADKSVKLLMTLPCVDVTTAEAMMAAWGDPKRFADGAHAASYLGLVPSTRQSAEHCYHGPITKQGNSLARWTLIEAAQHLDKNPGPLGCFFRRLLRKKNRNVAVVAVARKLATIGWQMVIAGEPYRYAMPESTQQKLSRLRIRATGQRRKSGLPKGQKAVAKLPGGGRSIHSLAEICQSENLPTPQALAPGEHRMIGERGCTAFVEKIGRSQVVPLRRAHNGKSYAKTSVRHN

SEQ ID NO: 185431 - protein, 342 aa, unidentified
MESAVTIGLDLGKSVFQVHGVDAGGAVVVQRRLTRGKLLHFFGKQAPCLVGMEACAAAHHWGRELRKLGHRVRLIPPRYVKPYVKRQKNDAADAEAICEAVTRPNMRFVEIKTCEQQGTLVLHRVRLMLMRQRVQLSNAIRGHMAEYGLVAPVGRNGLQRLIAILGNPDDERVPAVARASLAQLVCQFGLLNDQVLENDRRVRASARSTELGCRLMEVPGVGPVLASAMVATVPDPAAFKSGRNLAAWIGLVPRQNSSGGKEKLGGITKQGDRYLRQLLVAGALAVIRYAQRHGTKRPWLVQLLSRRTPKIAAVALANKMARMIWAMMMTGERYREPTVAAA

SEQ ID NO: 185432 - protein, 375 aa, unidentified
MVKANTLFVGLDVHKESTDVALVSDTVGDAVCYYGTILTNLRAFDKLLKQQAAKANKLCVVYEAGPCGFWLYRHLEKRHIDCWVIAPALIPRAPGDKVKTDKRDAMTLARLARSGDLTSIYIPDQRDEAIRDLIRCREDAMLDLRKARQRLKSFLLRHGHPCSGRNNWNDAYKRHLADIHFLEPAQKIAFQDYIHTVTERHERLQRLEVEMETLAESWRWYPMVQQLTVLRGIRFLSAITLMAELGDLRRFSNPRQLMNFVGLTPSERSSGQREKRGGITKCGNTHARRILIEAAWAYRFSPKVSRELQVRQQHHSVTLQRRSWEVQLRLCSRFRKLQARGKEYNKTVTAVARELTGYIWDLAQRFEPEGQVRLG

SEQ ID NO: 185433 - protein, 371 aa, unidentified
MDAPTFDGINVPEWKCQQPLEPEGAPTMQITTIGIDLAKNVFQIHGADQRGKAVLRKQLRRDQVAPFFANLPPCMIGIEACSSAHHWARKLQALGHTVRLMAPQFVKPYVKSNKNDVADAEAICEAVGRPTMRFVPIKNAEQQSVLSLHRVRQAFVKARTAQTNQIRGLLAEYGLIVPKGIGFIATRVPDLIEDASNELPGLFRQLIDRLLEHLKLLDQQVDEIEVQIKAWHRDDETSQKLQKVPGIGPITASALAATVGNAKNFDNGRQLAAWLGLVPRQNSSGGKQTLLGMSKRGDAYLRTLLIHGARSVLYRASQKNDPESWLVKLTTRRNANIAAVALANKTARIVWALLAHDREFRPDYTSATAAA

SEQ ID NO: 185434 - protein, 363 aa, unidentified
MDSSHSTASQCAKLKILAIKEGEEIMNIARIGIDLAKQVFQIHGVDRTEKVLVRRQLRRSQMLGYFSKLTPCLIGMEACGSAHYWARELGKLGHEVRLMAPQFVKPYVKSGKNDANDAEAICEAVGRPNMRFVAIKTAEQQVIQAEHRIRARLIKSRTALSNEIRGLLAEFGIVVETSIGRLRKALPELLEDSENGLPRSFRVLLAGLGEELRALDDSITAFDAGIAQRAREDGRIRRLLDVEGIGPITASALVAAVGNGTQFNSGRDMSAWLGLTPRQYSSGGKNRLGGISKRGDKYMRMLLIHGARAALNAAKNKEDGRSRWVKSLATRRNKNIATVALANKNARIAWSILSRGESYRKAA

SEQ ID NO: 185435 - protein, 437 aa, unidentified
MPDVPWARRKKGGASMSKKNSSPAGLQALYARVCGLDLHKKLIVACVRILNAKDGTVQSTQRKFGTMTADVRELREWLTEQQVTHVAMESTGIYWQPVYNLLEGHFKLLVINAQHLKKVPGRKTDMKDAQWIAQLLQCGLLRSSFIPDRQQRELRDLTRQQTKLVQQRNAVDNRIQKVLESANIKLGSVASDVMGVSGRKMIEGLIAGQTDVAALAEMAQRRLRDKIPQLQRALEGDLTEHHRFLLRELLEQYDYFEKKIASISERLTTVMPQPFRAAVKEIDPIAGIAERGAQALLAETGIDMSRFPTHKHFTSWAGQCPGSHESAGKRRSGKTPAANRHIDAALTEIAHAAVHTKNSYFKAQYHRLAGRRGKKRAIGAVKHSLLVTVYYILRDHKPYKDLGVDYFDKLNPQQRIRYHVRQLQALGQEVELSPMAA

SEQ ID NO: 185436 - protein, 370 aa, unidentified
MENRSMFVGLDVHKETIDVSIAEGSRDGEVRHYGVIASDLEPLDKVVRALRAPDRRLHFVYEAGPCGFGIHRHLTARGEACVVVSPSMIPKRSGDRVKTDRRDSQMLARLHRAGELRAIYIPDAADEAMRDLVRAREDAVVVGTQAKYRLKAFLLRQGRRYPGRDGWTLPYRRWLTDLSVPTAAQHVTLQEYRDTIDETERRIERLTEQLRQLAPAWRWAPVVAALQALRGVSFITAVALVAELGDLTRFGHPRELMAYLGLVPSEYSSGPSVRRGGITKAGNPHVRRLLAEAAWAYQGIPRIGRQHAYRQEALSTVVCTIAWKAQLRLTARFKRLVARGKAKPKVATAIARELSGFVWAIAQEVSPAPR

SEQ ID NO: 185437 - protein, 417 aa, unidentified
MEIVHTHCAGLDVHKKTVVVAIIVPDEQSGLRREVRTFGTMTADLLALSDWLLGWGVTDVAMESTGEYWKPIYNILEENFEMLLANAQHVKKVPGRKTDVSDAEWLAELLRHGLLRGSFIPPVGQRELRELTRHRTNFVRERVTLVNRVQKTLESANIKLASVASDVVGVSGRAMLEAIIAGNASSAEMAELAKGRLREKREQLDRALTGRVKPHHRFVLSELLCQIDSLDESITRFDAEIEKYGRPFEQAVELLDTIPGVARRTAEVIVSEIGKDMDRFPTADHLAAWAGVAPGNNESAGKRYSGTARKGDRALKVALVQAAHAASHSRDTYLSAQYHRLAGRRGKKRAILAVAHSILVISYHLIQRNEPYCDLGIDYFDKQRPEATAQRLMRRLQRLGYDISRVQQLTTIPVAAG

SEQ ID NO: 185438 - protein, 370 aa, unidentified
MSPSRTLFIGMDVHKDTMAVAYVAQDHGAEVTAIGTIGTRQCDIDQRIRTMPSKATHLICVYEAGPCGSWRYRSLRNKDDDCWVVAPSLIPKKAGDRVKTDRRDARQLARLARSGDLTVVYVPQGQDEALRALTRAREEASSDCQDAKCRLKAFVLRHDIRSTGRANGGPAHLRWLSAVVCPTPPPHMVFQAYVRAVQEHTARLQRLEHARHEHVQAWRLYPVVEALQAWRGVPCTVAVTLRAAMGDLTRCDTPRALMPCLGLTPSEYSSGAPRRQGAMTQAGNTHARRVLVEGAWASRSPAKVSRHWQLRLATQPTIIQDISGKAHVRLCNRSRRLVARGKHATIVTVAMAREWAGCMWAIAREVPIIP

SEQ ID NO: 185439 - protein, 375 aa, unidentified
MNCVIVNTELSSLEETRRQFNGGTGDIKSAEGRIRPVCALGIDVHQEFYVVVMQEGSSNPKPPQRFAKEAFLHWAAKLVRSGAQVYAVYEACGFGFSLQRRLSAVGIECYVVCPQKLDEQNKRVKTDSLDAQRLCLRLDRFLQGNRAALALVRVPTEEEEQARAIHRQREQLVKVRKVLEAQGRSLMVNHAIEPVQQWWKQRAFAALSVPDWIRVLLQNTQPIVLSLQSQIDQLTLQLQNAATPEPPRGLGKMTSVIIDREIGNWHRFNNRRQIASYTGLCPSEYSSGQKRLQRCVTKHGNPRLRAALVELAWRMIRFQPHYQAVRKWNERLRKGQLTTGAARKKAIVAVARQLAVDLWRIRTGRLTADQIGLTI

SEQ ID NO: 185440 - protein, 351 aa, unidentified
MLIIGCDFHTRYQQIAMAREETGELLVERRLDHESGEAHEFYRSLVGPVRVGIEATGPMHWFERLLAELGHELWIGDSGKIRASEVRKQKTDERDAAHILELLLAHRFPRIWVPTPTERDLRQLLWHRHKLVRLRTMLGNQLHFLAMSQGLCRKRKLFTKAGRGELQQLPLGPWASRRRQELLRLLDQIDPAIAELDRAVFEEAKRREDALRLMTHPGIGPVNALAFVLTIGPVTRFQRSKQIASYLGLNPSEHSSGGKRRLGAISKQGNTMVRWLLIEAANHTVRFDPQLRQDYQRLKFRRGHAVAKVAIARKLAVRMYWMLRSGADYARLVRRQGRPGATLVDASPSLG

SEQ ID NO: 185441 - protein, 456 aa, unidentified
MPEKQKRPRARLTGRLSTINEYAAGVDVGSTFHVVAVRGDQDDEPVRTFRSFSGDLHQMADWLTNIGIKTVAMESTGVYWLPVFEILEDRGFEVLLVNARDVKNVPGRKTDVNDAQWLQQLHQHGLLRGSFHPRADIAQLRTYLRLRERMVEYAAAHVQHMQKALMQMNVQLHHVVSDITGATGLRIVRAIVAGTHAPEQLATYRDVRCGATEETIREALTGNYRAEHVFGLKQALELWDFHQAKVAECDIEIEAVLKSLNQTQAKPERPIPAVRHAKARNEPKFDVRSALYTLLGADLSQIHGFGPYTVLRLVAECGNDMKKWPTAKHFTSWLTLAPGNKISGGRVLSSKTRRSSNRAAALLRIAAVNIGKTQTALGAFYRRLSARAGKAKAVTATARKLAVLFYRALRFGLEYADPGAGYYEERYKRRAIENLQRRARGLGFTLVEIPESGGVS

SEQ ID NO: 185442 - protein, 399 aa, unidentified
MISVGIDVSKGKSMVCIMKPYGEVVASPYEIYHTEPEVTKLSQRLLALEGEVRVVMEATGAYHLPLLCSLKQAGIFVAVVNPLVMKKYASAAIRKGKTDKLDSIKIANYGLDNWFHLEDYRPPEEIYADLKLLGRQYQHYMTLSVMSLNSLTHLLDGVMPGIKALLRTTNGDRKKSKLCDFVEEFWHFSAVTKMNEQRFINTYCRWAKKKGYHPDERKAHEIYAVAQNGIPTLPATPLTKTLVLEAVRVLCELDKTLESILSQMQRLASSLPEYPVVMAMKGVGATLGPRLIAEIGNVRRFHSGSALVAYAGIDAPPFESGAFVGVQRSISKRGSPILRMIGYEIMKALKTTKPTEDAAVYEFMLKKEAEGKHKKSAKIAGLNKFLRIYYARVMEVYSE

SEQ ID NO: 185443 - protein, 383 aa, unidentified
MAQVNDLSRSLTAFDPISTLVVVVEMSKASWLVSGAVPGVERQPLKKLEPDATALLRLIERWRSAGWPISRIALAYEAGRDGFWLARWLIARGVEAHVIHSASVAVSRDRKRAKTDRLDAAMLMRVFLGWLRGERGHCGMVVIPTMEEEAARRPSRERESLVNERSRITNRMKSALARLGIRGFKPHLRKAPERLAGLRTAEGAGLPVNVIEEFRRDMARLALVREQISSIEKTRAERLERAPDTGPHAMVRLLARVIGIGIETADMLVREILSRKLRDRRAVARYAGLTGSPDESGLKRREKGLAKAGNARVRRGLIQLAWRFLMFQKDSALARWYRTRTEGPSGARKTTMIVALARKLLIALWRLVTTGEVPDGVELRPAA

SEQ ID NO: 185444 - protein, 430 aa, unidentified
MEQFDSSRLKEFRQAKAEIRGSDQHLIVGIDVAKERHNAFYGTATGRALYKGLVFDNTVEGFQKLLTLTEGLKVQYDLKKVIFGLEPTANYHKPLGEHLIKCGHLVVLVSAAAVKNNRQLLDGRWDKHDTKDSANVADLISQGKCLYYEYPDPKVRDLRNLLSLKRRLKKEEHGLRVRIRNQLLAQYFPEMDSWFGPAVSLAVISRCIDPSVIAGMEYDDFCRSVVTGKLTIAQQKRLQAIWRMAPESIGCRVGDAVPFEAKVMVSKLHQVRETIKAVEDKIEDICMQFPEYPYLLSIPGFGPDVSSKLLGAIGDPFRFSSGKQILKMAGFDLCANRSGKTSYSATPVISKQGKADLRYALYQAALVASYSNKDFMTYYTNKLRGRQREKGIGTKMRVKLAAKLLIIAWTLMKKKEPFDTKYLNKGDTQV

SEQ ID NO: 185445 - protein, 459 aa, unidentified
MQRFYLGIDASKGYADFVILAANKVIVQRNFQLDDTFHGHGCLTERLRLFFKKHPDAQLCAAIESTGGYEKNWLNTLDTWRSLWNLRTARLHPLSVSHNLKADLKRNITDKISAQSVAEYLIVHPEKVRYKIDDPQAALRRQWHFVNTLTKQKTQLLNQLQTLIYTANTELCSYCKDGMPQWLLKLLERYPTARKLARGRAATVARIPYISRDKAKKLIAMAKTSIAADSDPITENTISMMAKQINALGQSIDAQATIVEKHASMSEVNLLKTFKGIGNFTAVGLMLEIRSVKLYASSKKLAAFFGLHPIYKISGDGQGCFRMSKRGRKEPRRLLFMVAMSATESNPLIRKLYLQKLGEGMTRMAAIGVCMHKILRIIYGMLKHNRPFDPQVDIQNTKATRKRWDKSRVAKSRRYQDYDPKAPISRRQKAKRMERKRSQSVNNTKCGIQTPVPLDSLAN

SEQ ID NO: 185446 - protein, 311 aa, unidentified
MVCAGIDTGKHLLDAALHKRRERLAVENSPEGHSKLSAWLREQGVKRVGIEASGGYEIDVVAKLRRDGFKVVVFQPAQVRAYAKFHLQLAKNDKIDASLIAACTAAVVNIHAPPDPRLAPLAAHLTWIDQISEDIKCHKTRLETCRDPRAREFWKQEITRLEKIIKAERAALEKAIRQHRDLAERLDLIASVDGIGLKTAVIILVRIPEIGRLSREQVAALVGLAPYDDDSGDRHGRRQIAGGRKRVRCGLFAAALPASFHHNPQLIAMYQRLIAAGKEHKVALVACARKLVIFANTVVARGTAWQPQGAP

SEQ ID NO: 185447 - protein, 403 aa, unidentified
MLLVGIDQSQRKHDVCLMNEVGVHLARFEISHNARGFQRLHGERQRIEVSPRDCLVALESGYSLLVDYLLDQHYQVHIIPGKAVDRYRDRHRQSCSASDRSDAVVLAHILRTDRHLYTPWYADQPLTRQICSLVKLVHDLKHSVVQFTNRLRNLLWRYYPLAAELFSDLNLPISLHFIQTYPAPQQAKQLTKAQFAAFCRDHRYYRSDLIARRYGQLLNAQTFASSYVAAAYASQAQTLARVTLDLVQERDQAQKQLTQAFAQHPDSFIFEPLPGAGEFLAPALLSKFRDCRARFPTAAVAQAIAGTSPVTIQSGKRRRVQFRRACDKDFRYYATQFAKCSTQESAWAAAYFDTVRPRCEKASHAYRCLANRWLAIIWRLWTNRVEYDEAVHLRNRHTGRRPH

SEQ ID NO: 185448 - protein, 313 aa, unidentified
MDAIAPIVGIDVSKDRLDVHVRGPDDRFDVPRDTEGIATLVERLRAVAPKAIGLEATGGLEAVVVASLAEAGLPVVVVNPAQVRAFAGALGKRAKTDAIDAAVIAHFIEATAPEIRPLQDAETRLLADLVARRRQIVAMMTSERQRRAGAPERVRKSIDRLLKALARELDSLDGDIDGAVRRSPAWREKENLLTSVPGVGSVIARTLIAELPELGTLDRRAIAALAGLAPWTRQSGRWRGKSFIGGGRASVRTALYLGALVASRHNPALKAFRDKLVAQGKPKMVALVATARKLLTILNAIIRDSTPWQMQDA

SEQ ID NO: 185449 - protein, 342 aa, unidentified
MDHFAGLDVSVKETSVCIVDDMGKIVREVRVASEPEALLQVLSDPAYHLKRIGLEASPLSQWLFSALAEAGLPVICVETRHMRAMLKAQINKTDRNDARGIAQMMRAGLYRSVHVKTLRSQKLRMLLTHRKLLQSKAIAIDNDLRGTLRNFGLKVGVVGTVRFEARIKELVVDLPDLAVLVEPLLIVRRVLREQLSILHRRLLAVVRDDEVCRRLMTVPGVGPVVALTYRATIDVPARFRNSKAVGAVLGLTPSKYQSGEINRTGAISRCGDEMMRVMLYEAAQSMLNTNKWSWLKAWAMKIAKHRGKKRRIVALARRLAVIMHRIWVDGTEFRWTREVEAT

SEQ ID NO: 185450 - protein, 348 aa, unidentified
MNYYTGIDVSLECSSVCVVDASGKILREGKVASEPEALIAWFGSLGLPIERIGLEAGPLSQWLCAAMREAGLAVELLETRHVRDAFKAMSVKTDRNDARGIAQLMRLGWFRPVHCKSIEAQEARAVLSGRKLLQSKLLDVENSLRGILRGFGLKVGKTTARTFGGRVNELVAGHPALEVVAQALLAAHAVLLREFNGLDKRAARMARSHPRAKLLMTTPAVGPIVSLTYAFAIDDPKRFKSSKAAGPHFGRTPKKYQSGQTDISGRISKVGDASVREALYQAAHIMLTKPIKNCSALKSWAMRIAKRAGMRKAKVALARKLAVILHRMLADGQPFNPAARTTTMTAAA

SEQ ID NO: 185451 - protein, 365 aa, unidentified
MNKCHSNTELSSYEGTRCQFNGGPGAIKLGIDVHQDFYVVVEQVGGSNPKPPQRFQKEAFLHWAGRLKEKSGAEVHAVYEACGFGFSLQRKLSALSINYYVVCPQKLDERNKRVKTDGLDAKALCLKLDRFVQGNRDALAIVRVPTEEEEQLRAIHRQREQLVKVRKQLEAQGRSLLVNHGIEPVKNWWKPRTFAALQVPQWMKALLGNSQPILAALQEKIRALTVQLQAAARANQPRGLGAMTSVVIDREIGNWKRFNNRRQVASYTGLCPGEYSSGNTRLQSCVTKHGNPRLRAALVELAWRLVRFQPNYKPVVKWRETLRKGALATGAARKKAIVAVARQLAVDLWRIHTGRLSAESLGLSH

SEQ ID NO: 185452 - protein, 467 aa, unidentified
MTPHKDYCLDPRPSPPTPTLPLSPVLSDALQVCHPHAAGIDIGEAEHWVAVPPGRDPQPVCRFGTFTADLDALADWLIDCGVTTVAMESTGVYWIPLFELLEARGLQVLLIDPRQAKRVPGRPKTDRLDCKWLQRLHTYGLLAGAFRPEAHVCVLRSYLRHRQMLLTYAAHHIQHMHKALEQMNLKLTQVVSEITGVTGMAILKASIAGERDPQRLAKLRNPHCHHDEEDIAKALQGTWRAEHLFTLRQAVELYAFYHQQITQCDQQIQAHLKTFSDKSAGQPLPPKAHRHKKTNEPRFDARTPLYRLAGVDLTTIEGIEEGTALVILSEIGTDMTRWPSVKHFCSWLGLCPQHTISGGKVLSRRVRPGAHRVTVALRLAARSLHHSQSALGAFFRRMKARLGTPKAITAAAHKLARLVYSLLKHGTAYVQQGMEAYETHYRERTVKAMARHAKTLGYVLVPLAAQS

SEQ ID NO: 185453 - protein, 337 aa, unidentified
MKTKLFMGCDISQESFNYCLRNESDIVLEGKVDNGIKSIKSWLHQLRKEHGLKLGDILFCMEHTGVYGAILLRELSQRSLTICVESAVNIKLSLGMQRGKNDKVDAQRIAEYARRFTDRLKQWQPKREVLSKLQLLNRMRERLIKAKTDLSRFNHDAQRFLTKQESKIVIEGTKKPVAALNEQIHRTDSEIERLIKSDDHLKRLSELITSVDGIGMVTCCAMLVRTNEFKSFKNHKKFACTAGIAPFEHTSGKSVRGKARVSHHAHKDMKKLLHMCAVSAISRKGTLQDYYLKKVAEGKNKMLVLNAVRNKLTSRVFAVVRDGVMYEKNYQYRFSMS

SEQ ID NO: 185454 - protein, 418 aa, unidentified
MTVDSVARKRSVIKPDTLVIGIDLAKHTHVARARFYDGSYTRPVKVPNTRAGFLALTEQIGAWKPRPDSAVIVGVESTGSYGVNLVRWLSEYGCRVVLVPSLHVCREKELLDNGRGTNDDKDALIIADLVARGQYLGFVALSGACLELRPLVSLRARLVREQTGWLNTLHQTVDVLFPEFETIFADLSRPSARLVLGRFGTVAAAQAHSPTAMRRLLARDGAARVSLAKLKRLQAAAAESIGPRQVSAGQERSRREMLETLAMIEGRIAGLEAEIVRLLAQLPEAEYLMSVKGVGAMTAAVILAETGGLVQYSCARAVLKLAGLNLYQNSSGQYQSGRRISKRGRSQLRRALYMVAVQHAKRGWPLQPYYAALVARGKPKTVALTAVCCRLVRLLYALVRDGRCYSECPPEAGRMAAA

SEQ ID NO: 185455 - protein, 402 aa, unidentified
MGLFCGIDWATEHHDVAVIDDDGHVVARGRVSNDAPGFAALLTLLAQAGDSAADPIPVGIETDRGLWVAALRETGRTIYPINPLAASRYRARYGVSGAKSDATDAVLLANIVRTDPGAHRPLPADTELAQAIRVLARAQQDAVWARQQIGNQIRDLLKDFYPAALTAFADLPEGRLARRDARTVLAAAPTPAQAAKLTPARLRRLLIKAGRKRYLDRDIARLCEVFTDTYLHQPPVVENAMGIHLAALLGQFEAACTAADALAEAAVAHFEQHPDAEIITSFPGLGMLVGARVLAEIGDDRSRFADARGLKAFAGSAPITRASGKKTVVLHRYIKNRRLAAVGPIWALGSLRASPGARRHYDARRAAGDWHQQAQRHLFNKFLGQLHHCLHTGLRYEGSNRP

SEQ ID NO: 185456 - protein, 353 aa, unidentified
MHEHVVQREVILGVDTHLDLHVGAVIDGAGKFLGTLATATTAGGYQQLIAWARTLGCLRRAGVEGTGTYGAGLARALGEQGIEVLEMNRPDRSKRRLVGKSDPVDAESAARSVLSGQATAIPKSHDGVAEALRIISVARRSAVKAKTQAINQLRAILVSAPDEIRDRLWKTKAEQCVPSCANLHQLGTSTHLIALTSTLRLLAKRWLLLKAELKEIDSQLEQLTLAFAPNLREQFGVGPLTAATLIVVAGDNPERLRSEAALAALCGVNPLQASSGKTARHRLNRGGNRQANNALWTIAMVRMRSEPRTRAYVEKRTTQGLSNKEIHRCVSRYVVRELYPYILADLKATAEIP

SEQ ID NO: 185457 - protein, 338 aa, unidentified
MDRQYVGIDFHRRRSVIVRLSADGERLGVHRVVNDPCELVNVVGLCGEAPEVVIEATYGWYWAVELLQELGATVHLANPNALNWGDRRVKNDERDAHDLADMLRLNRLPRAWIAPPAIRELRELVRYRAKLVQLRTGLKAQVHAVMAKEGVLPAVSDVFGPAGTRQLDAMELGAPFAQRVQSLRALIAVYDREIVRLERDIHQHLKHDVGYRAIQVINGVGRISAAVLVAEIGDVTRFPTPQHLCSWCGLTPKHRESDLKTRRGRISKQGSRLIRATLIEGISRYHGGSVLDAQYRRIAKRRGRNKARVALARKVLTLVYYGLRDGEIRCLAPAEAAA

SEQ ID NO: 185458 - protein, 412 aa, unidentified
MKDLLEISCGLDVHKEKIVACILTGPLGKPTHSEIREFTTLIPDMIALRDWIVSQNCHHVAMESTGIYWMPIYEILEDAFSGDITLLVVNARHMKNVPGKKTDMRDSEWISTLLRAGLLNGSFIPEKRIREFRDLNRYRKSVIRDITSQKNRVEKFLQSSGFRLSSFISDIFGASGRNIILHLMEHGQIDRAALDSCLKTKTRNRIDEILMSVNGTLSEHQKSFLKILMKHYDSLKEHLNEIEKGLEEDMAPFAPQVEQLSSIYGISTTASCAIIAEIGINMEPFKTAEHICSWAGLCPGNNESAGKRKSTSVTKGNPYIKSMLCEIAWVIAGKRNTYLSAWYWRIKQKKGAKKAIVALARKLLVIIYTMLKQGTLFDESCFEARRKNCEQKQLTRYIRELEKHGYHVEAQG

SEQ ID NO: 185459 - protein, 411 aa, unidentified
MQVMYERCAAIDVHQKTAVTTAMITQPDGSLHKQTRTFATMTRDLLALDDWLRAQDITVVAMESTGVYWHPIFNILEEGRTIILVNAQHMKAVPGRKTDVKDSEWLADLLRHGLLKASFINPKPIRELRDLTRYRKTLVQERSQEVNRLQKLLEGANIKLAAVATDVLGKSGRDMLEAVMGGEQDAQALAALARGRLRAKLPDLRLALEGRVQAHHRFLLQRILAHIDFLEQSIAQVEHEIAQHLSPFEEAMDLVQSIPGLQATTSAGILAEIGADMTRFPSEKHLASWAGVCPGNKQSAGKRLSGKTTQGNTHLQALLGEAAWAAARTKGTYLSAFYHRIARRRGKKKAIVAQEHKLLVIIYHVLLTKKPYSDLGADYFDQREKTRLERHHIQRLEHLGYTVTLTPKEAA

SEQ ID NO: 185460 - protein, 338 aa, unidentified
MFYIGIDIAKHNHEVSIIDDNGKALGKSFSISNSQKGVDKFNTYLDSFNITSENCVIGMESTGHYWINLFSFLVNLKFNVFVINPIQSDAFRKMYIRKTKNDSKDSYIIAQIMRFGEYSSSNISDENIFALRQLSRYRTSLVDECSSWKRKIISILDQVFPEYSNLFSDTFGVTSKELLSKYPLPENMLELSTEELTNLLTKASKGRLGNEKAQEIKEFAKNSFGVSFAKQTFSFQIKQIINQISFIESQLKELDNEISNMLKELNSEITTITGIGDVLGACILSEIGDISRFEKASQLVAFAELDVAVKQSGEFTGTEMKKKLNYLILMSYVHRFIV

SEQ ID NO: 185461 - protein, 320 aa, unidentified
MMAQNDLVVVGIDVAKDKVDACIRSLSLKGTWPSTVQDRRKLIAWLRKHKVGKAVMEASGGYERDWAKALREADIEVRIVDPKRVRSFARSAGRLAKNDAIDAEMIAWFAETFGEAPGQAYDAAREKLSQIVNARQGLLDLQTNLQNRGEHAGPEPVQKMRARLLKQLALEIDKLEAVITAMIRATPYFAERAEIIESVPGVGGITSAGLIAAMPELGQVSNKVAAALLGTAPYDDDSGRRRGERQIKGGRRKVRNLFYMACLGAATRHNPALKAFYRRLIAKGKKAKVALVACMRKLIVILNIMIARGEKWDAHRYAVG

SEQ ID NO: 185462 - protein, 316 aa, unidentified
MKSSQSFVGIDVSATRLDVAVLPAGTHFTVPYTDDGIAALVHTLRDLAPQTVVLEATGGYEIPVVYAMSGASLPVVIMNPKTLRHFAKSTGKLAKTDKLDARVLAHYAQSIQPPVRPLKDPEQLELSTLMSRRRQLRDMIVMEGNRRRTSTPKIRHNIDQHLTYLRQLLKDLDREIHDFIRRTPLWHEKSAILQGVVGIGPKVSASLIADLPELGTVPRPQISALAGLAPMNRDSGKWRGKRTIQGGRPTVRQALYMAALVASRHNPVIRVFYQRLLAAGKPKKLALTACMRKLLVILNAMLKNRLHWNQQLPLAA

SEQ ID NO: 185463 - protein, 341 aa, unidentified
MLYAGIDIHKTVFQAVVLDPDTGELSESRFAPSRERLGEWAGAWQGKLAAVAIESTTGWRWVARELEQRGFEVHLVDPGRASALRGRRRRPKTDKLDARWLALVLARRLLSECEAWMPPAEIQLLRDQTRLRKSLVDNRTGWAQRLHALLAHEGWPCNRGRLLTPEGRRWVIALQLDPCVRAQVDVMLTLIVALDEQLKVVETELRRFARSDARCQALETIFGVGPIFACHLLAGIGDARRFKRSRQVVRASGLDPAVIESADSKRRGRLAKQGSPYLRWALVEAATHSSRSTSPDHDLYASTAHRCGRGRARLTVARKIARRSYHLLSAVEAATLETQKA

SEQ ID NO: 185464 - protein, 447 aa, unidentified
MAAVMIGVDPHKASHTAVAISAAEEPLGELRVRACVAQTERLLAWAAAWPQRTWAVEGAGGTGHLLAQQLVSAGERVLDVQPKLGARVRLLAAGDVNKNDPNDARSVAVAALRSAGVQQVRPDDHAAVLKIWSKRYRDLGRTRTQVVCRLHAVLGELIPGGVPKAITAARAARILRAIRPDGAVQTARCELAAAFLDDLRRIDARIRETRKKLAVTVAAAGTSLTGLFGVGPVIAAIVIGDVRDVSRFGGRDHFAAYNGTAPIEVSSGPRKVYRLSRRGNRRLNHAIHMAAVTQIRHRHSRGRAYYDKKLAEGKTPREALRALKRQVSNAIFACLQADARRAAARGGGPGGQQGNDSAASAAGSHPRHRLFGQATPGPGHHPTTVTGGPPPGPARGRGAAGHSSIAATLPPATPQVQVERPQRSEDERPGGTARRRPHSAARKARDR

SEQ ID NO: 185465 - protein, 423 aa, unidentified
MEVIHERVAGLDVHKDSVVACVRNMSGGKAKRECRTFGTTTAELEALRDWITSWECTLVAMEATGVYWLPIWKILLGGAFEMNIANARHIKAVPGRKTDMNDAMWIADLAAYGLIRASFVPDEEFHELRTLTRTRKQLVRDQTSHVQRIQKTLTEANIRLDSVISDIMGVNGRRMIEAMIEGVRDPGKLAALGDRRLKATRKELHDALHGRLTDHHRFLLKLHLDQHDALEKTIRVIDAEVERRIARLDKQAKPAETPLSRLIELLVSIPGVSYLSAITIISEIGSNMSRFPTAGHLIAWAGLCPGQNESAGKRKRSRLRKGAPWLKTMLVQCAWAAKRQKNSYYRAQFYRLQARRGPQKAICAVAASILTAIYHILKDGVPHQDLGIDYFDKRKPEAKVKRLVAQIAKLGFEATLQPIAKAA

SEQ ID NO: 185466 - protein, 321 aa, unidentified
METTDYAAAPAVCAGIDVSKAALDVALRPSGEHWRSANDEAGIAELVGRLRPLAPRLIVLEATGGLERLVVAALALAGLPLAVVTPRQVRDFAKATGRLAKTDALDAAALAHFAEAIHPEPRPLPDAASQALAALVERRRQVVGMLTAEKNRHQQALPPGRAKVAAHIAWLEQALKELDTELEQTLRASPLWREREQLLRSVPGVGPTVSLTLLAHLPELGSGSVKRVATLVGLAPLNRDSGAWRGSRAIWGGRRQVRAALYMAALVGVRHNSVLRSFYEGLLARGKPKKVALTACMHKLLTILHALLRDGTPWQPTLLAT

SEQ ID NO: 185467 - protein, 435 aa, unidentified
MQELTDEPLYRDRVCGIDIGKAELYATIRVPSDKNPARRASETRSFGTTRRGVLALADWLRCWQVPAVVMEATSTYWMGPFFRLEAEGFECVLADAKQVKNLPGRPKRDPSDSSWLAQCFERGAVRPCFVATAQFRVIRLHTRYRRDLIDDRTREKNRAEKLLESAAIKLSSVVTDLHGVTGRDIMNQLIAGHRDPKALAQLARGRARRKISELEHALEGAEFFTDHHARLLKTMLERIDRIDAEITRLSEVIETLLTPYEEQLQQAESMPGWGRRSAEDAVAETGPDMSRFPTPAHLASWAGRTPLDHQSGKRAGRARHKKGNRYLGAITGETAVAAGKTATREGARYRKLARSRGKNKACVAVGNTQLRVYHKLLSSPGIRYADLGPDYYQRRAQNRRTIDYHVRELEALGLEVTLCRLPDPEPGQAATTPAA

SEQ ID NO: 185468 - protein, 351 aa, unidentified
MWIIGVDYHPSVQQIAFVNTDTGECGERRLSHREGEAEKFYRELKAAGCRVRVGMEATGHGRWFERLLAELGFELWIGDPTKIKAKRVRKQKTDRLDAELLLQLLLEDRFPRVWVPSPENRDLRQLLWHRHRLVQMRTRIMNQLQAVAMNEGVRRKKALWSKSGRAQLESLPLAPWAARRRQDLLELLDRLNPTIEELSAALEQEAKQRPEVLRLMTHPGVGPITALAFVLIIDSAERFACGKQIASYVGLIPCEDSSSDRRRLGHITKQGNSLLRFLLVEAAQTVVRRDPDWRRRYTHLAMRRDKRIAKVAMARKLAVHLYWMMRKEWNYEQSKKFGSYAGESDYSHGVQ

SEQ ID NO: 185469 - protein, 340 aa, unidentified
MYYIGLDVHKKTISYCIKRVDGKVHAEGTLDALRVSLDAWLTTLPQPWTAAMEATLFTGWIYDYLQPHAAVLKVAHPAKLKAITAGKKKNDQVDARLIADVLRCNLLPECYMAPSEFRERRRTLRYRNLLVRQSVQMKNRISGMLMETGVVYNKQKLHQKRYFTQLRDSAEVPACLQPLLKIGRETVEHIDRTGRALMRTLERDPLLQARVERLLTIPGIGPVTALTWALEIGEVSRFSSVKDAVSYCGLCSAERSSAGIQKRMPISKQRNKHLQTVLIEAAKLAPRWNPELALLHEKALLKGNRNRATLAVARKLVAFLLAVDRREKPFQAGKESGEAA

SEQ ID NO: 185470 - protein, 347 aa, unidentified
MIAIGLDVHQRRTSLALLDTETGLMEDQQVPSEELVEHLAQMIPAGTPCRVVLETGSGSALLARRLAAQGLEAVVVDAFKAHRHAEGLPGSAKTDRLDARALALLAASGPERQAVWVPEETLEDLRALTRVHRQLTEQGTRLRNQIRGLLRHDGLRCPFTDLMGRRAQQWLEEAAGRLSAAKACALRQLRLAMADNLARRRELSGALRQMAHECEAVQRLMTLPGCGLLLATALVAEIGDLERFPSARNLRSYSGLVPTVHQSGERRHTGPLVTRGNRFLRRALVLLAQHVACSKALRGTALTRTYYRHLHRHGPNPAKVALARKLCDILFAMWRDRTDFDLQRMVA

SEQ ID NO: 185471 - protein, 344 aa, unidentified
MITIGIDPHKTTLTAVVLSPDGTVLASTRLPVNAATPAELLAFAKAWPERQWAVEGAAGLGLGIAQRLLAHGQDVLDVPATLSARARLLSPGQGRKTDVTDAQAIAVVAQHNTRLRRVEPEDPTTVIRLVSDHRDDLVREHTSGMNRLHRLLRDLIPGGAKTGLSSRQAAALLRGVRPATATATTRKQLARELITGLRALESRIKALTDQLTTLVFQSGSALVEIPGVAAVVAAKIIGHTGDVARFPDAHHFASFNGTAPIDASSGEQTRHRLSRRGDRQLNAAIHVIAIYQISHPGPGRDYYLKKLAQSKTPKEARRALKRRLSDIVYRRLTSDQDSSLPAAA

SEQ ID NO: 185472 - protein, 394 aa, unidentified
MAFKIFRKNCCGLDVHKTWIYACMGITDTNGRTEYKQARFSSFTKGLQELADWLAKYDCNDVCMESTGKFWIPVFNILEKTCWVTLAYPKYTKPQKGNKTDRKDAKWICDLYMCDMVNPSFIPPPDIRQLRDLMRYRSKLTNIMTSEKNRALNCLTVSNLKLDDVFSDVFGKSSCSVIRYILEHPGETFQVAPFIDRRCKHPVEEIQAVIDGTISHQQAVKLRECLQHLDELEVHKTNVEKEILCLVQQYPYQLELLQTVPGFSGNIMTAIALISEIGADMSVFPSAKHLVSWAGCCPRNDQSSKKVKSTRISRAGVYLKPLLVQVAIQPFTANADKLSAAGALEIRCQICDGRFLSMWAALFIFLGCPLPPCPKNLHVHNGRIVILASVAWIF

SEQ ID NO: 185473 - protein, 321 aa, unidentified
MNLTKIFVGVDISKNSLDVHLLPEKKYFRVQNDASGLQKLMQNLSEYTVARIVCEASGGYETLLIRTLSQANYPIWLIEPKRIKAFIASEGIKAKTDKIDAAMIALFAQQKELSEQTRIKVSKLNEELLKELVKYKNNLTGIAAQEKTRMSHPQAIFCKEKMQQHIAFLNEQIKKIEKEIEQLIKSDDDWQQKQTIITSMPGAGKSTASALIAFMPELGKIGNKQAAALAGLVPYTKESGTYTKTATIREGRPLPRKALYMSTLSAIQHNQDFKIFYNRLRESGKKPKVAIVAVMRKFIVLANVLLTENRTWTISKNIYTA

SEQ ID NO: 185474 - protein, 363 aa, unidentified
MRMKRKSQDLIAEAPYSSSKVEMTIGIDLGDVWSHYCTLNQEGEVVDRGRFRTTLAGVERWFTDLPPVRIAMEAGTHSIWVSQQLQEMGHEVIVANVRELRAISHSDRKSDQVDAEKLARFARLDPKILRPIAHRTVAQQETLTLIRARNLIVRLRTAAVNAVRGLAKPCGYRLPASSTLCFAKRCRSVLPPGLVQALGPVLEQIADMTVKIKAYDRAIKRLTETEYRETQALIKVYGVGRLTALTYVLTLGSKERFQRSRDVGCYLGLRPRRSQSGARDPQLGITKAGNVYLRSLLVECANHVLGRHGKDSSLRQWGLSLASRGGKQARNRAIVAVARKLAVLLHRIWITQEQYVPFYAVAA

SEQ ID NO: 185475 - protein, 403 aa, unidentified
MAPWALFNGYQWSSPMSQHSRFDASRSLTALEQDSTIIAVIEMSQTKWLVAALVPGVERQPLKKFDAQEEMLLKLLHRWRHEAGQAGRNIKRIVVAFEAGRDGFWLARWLRARDVDAYVIHPTSIAVSREHRRAKTDRLDTELLMRVFLGWLRGEKRHCSMVAIPTIAEEDARRPNRERQNLVTEQTRIINQIKAIFSRFGIRSLRPTKRKLAEGLEDLRTAEGTPLPQNTLSELRRHLARLRFIRDQIRAVEQERQRKLAVAPKSADAMVYLIARVLGAGVETADMLVNEIFSRHWRDRKAVARYAGLTGSPDESGSRRRERGLARAGNVRVRSGMIQLAWRFVRFQKHSALAQWFAARTADGRAGTRKTMIVALARKLLIALWRLATRGEVPQGVVLRPAS

SEQ ID NO: 185476 - protein, 316 aa, unidentified
MSEQAQTSRSVGIDVSRASLDVAVHPTRDQWQVSNDPSGISQLVEQLTQLEPERIVLEATGGYELTALATLAQAGLPVVAVNPRQVRDFARSTGRLAKTDALDAQVLAHFGAVIQPALRPLPDAATRELSALLARRRQLVEMRTAETTRLATAHERVRASIRELIHFLDTRIKELDRELHDRLRSSPVWREKENLLRSIPGVGPVLSATLLADVPELGKLGHKQLAALIGVAPLNRDSGRWRGQRSVWGGRGHVRAVLYMATARAVRCNPVLAALYERLVRVGKPRKVALVACMRKLLRICNAVIAHQLAWRTQPA

SEQ ID NO: 185477 - protein, 316 aa, unidentified
MTTQECYVGIDVSKKNLDIAVRPGDEHWTVANDEDGIGELATRLKSIGPRLVVLEATGGIELAVTGSLADAGLLVAVVNPRQVRDFAKAMGQLAKTDRLDAQAIARFGEVVQPTPRPMRDAEAQALSALLSRRRQLVGMLTQEKNRLHAAQPAVRRDIRQHIVYMEKRLEKLDDDLGSTLRKSPLWRERDDLLRGVPGVGQVLSVTLLAELPELGTLNRKQIAALVGVAPLNRDSGLLRGHRTVWGGRARVRATLYMATLSATRHDPVIRAFYEHLCASGKAKKVALTACMRKMLTILNSMLRHHATWQPDYALNA

SEQ ID NO: 185478 - protein, 345 aa, unidentified
MKKIIIGIDFSKETFDATLFDCRNSELSEALQSAVHEKFTNKKEGFQAFLTWIKSFVKKINSAELLLCGEKTGKYSLALSNFLYAKGYSIWLDSGLRIKRSLGISRGKSDKADSLKIALYAYRYQDMAVCYVPLSKNVSRLKELFLYRQHLVSQMKAMAVRKTVTDDFKKELGDVKFIVDSATEIIQQIKATIKKCEEKMQELIEEDEELKTTHDSITSVKGISLINATAFIAYTNNFKDFGGNAKKIATYWGVAAFAQESGTSVHKVARVSKIASKMLKSLLTQAARIAVRWEPKFRQYFEHLISRGKHQGVALNNVKNKLIHVITALAVSKEKYNPEYECINR

SEQ ID NO: 185479 - protein, 322 aa, unidentified
MSGSSVMVGIDVASAHVDVACVGAALPAELAHVGNDADGHSILADALAKLQPGLVLMEATGGYEAALACALQAAGLRVAVINPRMARDFARAMQRLAKTDRIDAATLAEFAAVLAQRPDCERFVRPLSEPEQQDLAALVTRRRQLVTMQLSERQRLRLARPVTRPSIEALLEAIARQLDGVDAEMVSHVEQHHAVMAKLLQSVAGIGRVAAATLIAELPELGRLNRRQICALVGVAPYANDSGSSRGRRRITGGRFEVRRALYMATLTATRFNPAIRAFYERLVAAGKLKKVALIACMRKLVTHLNAIARDHLNAHYQLLTA

SEQ ID NO: 185480 - protein, 374 aa, unidentified
MVDHSEVFVGFDTSKLRNAVAIAEAGRAGEVRYFGEIDNSAEAVRRLVKKLSSKHDRLTFCYEAGPTGYGLYRLIRGLGHECLVAAPSLIPKKPGDRVKTNKRDAKALARLLRARELTAVWVPDERHEAMRDLTRARGAAVVDLRTKRQQVTAFLLRLGRHYVGKTTWGKAHLAWLMSQRFEHAEQRIAFEEMLLAVRQAQERIERLEEAIRAAVPDWSLEPLVISLMALRGIDLVAATAFLAEIGDLTRFRTPRELMGYLGLVPSEDSTGDTIKRGPITKAGNRRARRILVESAWSYRYPPRVGRAKQARVEAAPQAAREIAWKAQARLYARYRTLIRRGKLKTVAITALARELAGFIWAISREIAPPRAQAS

SEQ ID NO: 185481 - protein, 347 aa, unidentified
MNINKNQKNYQNQYDYYIAIDWSVEGAAIARMRSNSLRPVVNDIDSNIKVIREYLKNLKGKKILTLEETTGAHWLYVELKDSVDKVVICNPSRNRLLEEGSKTDKIDAEKLCQLLRAGLLKEVYHTNNEENYRIRKLVSAYDDLVKAKVRLKNQYRAIYRSIGLKKRQTDQYDKKDQIMNFIIDDQLSIMNLMDKEQEKFEEVFKETIKNNEVIRYIKEISGFGEILSVKAYGIIIEAGRFKNKYRIWSYSGLVKNKRESGKISFKKKNPSYCRELKSIFKMATHAALSGKNDIRDYYEYLLANGCTAKEAYNKVTRYLATSVYAVMKNKTRYVPFSWRKESTKIVA

SEQ ID NO: 185482 - protein, 319 aa, unidentified
MNETPVFVGIDVAKATLEVAVRPSGAQWASANDEAGIQTLLGQLRALAPALVVLEATGGYEHAVAATLATAGVPIVIANPRQIRAFARATGQLAKTDAIDAQILALFAERVRPTPRPLPDDATQALEALLTRRRQLLEMLVAEKNRLGVAPAHLRRDIGQHIRWLERRVADLDRELHAGVRASPVWRAQDDLLQSVPGVGPVLSYTLLAALPELGTLGRKQIAALVGVAPLARDSGTHRGRRTSWGGRAPVRTVLYMATLTATQWNPVLRQCYQRLRAAGKPHKVALIACMRRLLLILNAIVRTQTPWRATPTAARATA

SEQ ID NO: 185483 - protein, 301 aa, unidentified
MEIKTVGFDLAKNVFQIHGMDERGKPLLRKQLKRDQVVVFFANLPPCLIGMEACSSAHYWARKLEALGHTVRLMAPQFVKPYVKSNKNDAADAKAICEAVNRPTMRFVPIKNVEQQSVLALHRARQGLVKARTAQANQIRGLLAEFGLIVPQGIAHITTRLRSVIEGATNELPVSFRQLIERLIEHFKVLDKEVEELEAQIKAWHRADEISRQLERIPGIGPLTASALVASIGDAKNFTNGGQLAAWLGLVPRQHSSGGRPTLLGMSKRGDAYLRTLMIHGSRSVIYRAGQKTIPIAGWSS

SEQ ID NO: 185484 - protein, 331 aa, unidentified
MEIKETIGIDVSKATLDASIHSNKRSATFENTEKGMSLLVKWVLANTVHPREMIFFAFEHTGLYSERLSEFLSNNKLPFSIIPGLEIKRSLGISRGKDDRVDAEKIATYAYRLREEIQPSQVAPKEIRTLKKLLSLRERLVRQRAGYKASLKEQKKVFGKEMPKLLLGVQKKMIKELSVQIDAIGTEMEAIISSDREMARKFELLLSIKCIGNQAALHLMVFTEGFTKFKNSRQFASYCGVAPFPNQSGTSLKGRPRISQLANKKMKSLLDMCAKSSIRHNLEIREYYQRRVAMGKNKMSTINIIRNKLLSRVFAVIQRGTPYVNLYGHIT

SEQ ID NO: 185485 - protein, 343 aa, unidentified
MKLMRIGVDLAKNVFQIHGVDRHEQPVWRQRLPRDRWLQTVLDKIEPGCEIGMESCSGAHHWARQLQARGFQVRLIAPQFVKPYVKSNKNDANDAEAICEAMSRPSMRFVAVKTIEQQDIQATHRIRAGLIEQRTAKANQIRGLIAEYGLIAPKELLMLRRAIPCWLEDADNGLTVRFRRLLKGLWDDLRALDERVSELDGEISAIAASEPAAVRLQQLRGVGPMIATALIAAIGDASQFANGRQLAASLGLTPKQHSSGGKDRLLGISKRGDAYLRTLMIHGARSALRTAKSKDDRLSRWAVRLAERSHPNVAAIALANKTARMAWAMLRNGTDYQPDRAAA

SEQ ID NO: 185486 - protein, 354 aa, unidentified
MHTHQKSSDPVATIGLDIGKNTFHLVGLDKRGSIAMRIKVSRNQLARRLANLSPCLVGLEAGSGSHHIARQIQALGHDVRLLPAQYVKPFLKGHKNDYRDAEAIAEAVQRPTMNFVAIKTPEQSDLLSLHRVRSRLVRQRTAVINQIRGLLIERGITVRQAPGPLRKVLPEVLSSPPEALSPRILRLIAELDQDWRRLDQRLEALSAEIASLSEDDCACQRLMSVPGIGPIISSAVVAAIGTGSGFKQGRDFAAWLGLVPKQESTGDRTKLGRISKRGNKYLRTLFVQAAHVVLERRPAAATRALLPWIDQAARRLAHRNLQLGKAVPRGSDRGSRRQLPPVQRSPAPPHGRNP

SEQ ID NO: 185487 - protein, 469 aa, unidentified
MQLLYRCCAGLDVHRDTVSACIRRQVRGKAEAVIEEEVFGTFTEDLERLGRWLKKHHIQQVAMESTGVYWIPVWNVLETKVELMLVNPATVHALQGNKTDRIDARRIAEYLQHGLLRGSFIPAKPIRELRELTRMRVHGQQDRNRVVNRIARLLETANLKLASVISNIVGMSGLEMLRLLAKGQTKPERLAECARGHMRVKIPALVQALDGRTDEHFRWKLSELLRKLDALDAEQGRLDARLSELAAPYADVLRRLDTIPGVDRIAALALLAEFGSDMAQFPTPAHLASWAGLCPGNAESAGKRFSGRTRKGNRYVRRMLVQSAWAAARTNDCFLAALFFRTAQRRGMKKAAVAVAHRILIIAWHILAEAGVEYHERGGDYFDRRNPQRTAKRLTERLQAIGYTVTLTPRSDTHALPKKTKPARAKPPRPCIDPAICQRCARRQLPRCICLLKPKPRNPSVVSSVVSTT

SEQ ID NO: 185488 - protein, 412 aa, unidentified
MKVVYPRCAGIDIHKESMTVCVIVDRQDGSTPEYQKRKLATHTEGIRELSTWLEQCQVTDVGMESTGVYGKPVWNALEGKWGLHLCNPQHMRAIPGAKTDMRDGTRVGELLAYGKLPESFIPPQWQRELRDLTRLRARFTQETTRAGNRILKVLEDAQIKRDCVASDALGVTGRRILNRLVEGETDAGKLAELAVGKLKKKKAQLQQALAGNFTEHHRFQVRLLLTMIAEYEEKIFQMDRRIDQYLEPYAEMVHRLDTIPGVDPLAAATILAEIGPEMSHWEDPRKLASWSCLCPGNCESAGKRLSGRTRQGNRWLRRAFCQMAWAATRKKNSYFKTQYRRLAGRRGKQRALLAVAHTWITVVYHLLRQPTLEYRELGEDYFDKRDAERTATHLIRRLGKLGYEVTLKPKEA

SEQ ID NO: 185489 - protein, 322 aa, unidentified
MIFVGIDISKLTFDVAVLIDGKYMSRQFENKQSGFLKLSQWIKSFKKPAYFCLEATGIYGLALAKHLYQTNQKVIVANPLQTHAFAKMEMARNKTDKADAMSIARYCQYLFNRGEIDKGLFIPRSAAFERVQFLVTRLDQLSKMKSQENNRSGVSLDKAAARSIQSVLTFIDKQIVVIKKEITMIIKQDEQLTVQLKLLVSINGIGDKTAWALLAYIGDISLFENSKQISSYAGLNPSIDQSGTSLNRSSLSKTGSTRLRKSLYMPAMVAVRYNPLMLAFYNKLLTKGKPKKVALIAVMRKLLVLAYGVLKSRKPFDVNYQH

SEQ ID NO: 185490 - protein, 387 aa, unidentified
MSEMFNPRMPATAFDHVTTIVAVLELSGKSWLFGAVAPGLERRAKRSFAARDLAGVTKALEQLKARSAEAGAAVTRIVLAYEAGRDGFWIARALARQGVEVHVMHPASIPVERRGKRAKTDRIDLDLLLTTLIGWLRGEPGRCTMAPIPTQEDEDMREPGRRRKALVQSRLKIENQIEALLARYGAPAFRPRLKNAEKKLAELKAYDGAPLPPQTRDSLQLLLAQHRLLSQQLKHIEDARAQVMQVETPDRLQRRIQRLANLFGVGVETATVIVHEVLSRRFRDRRALGGFVGLTGTPYASGGSNTEQGISKNGNPEVRRLLSQLAWRWLRHQPDSELTRWFRRRLGGAEGRMKKVLIVALTRKLLIALWRYVETGEVPAGARLVAR

SEQ ID NO: 185491 - protein, 368 aa, unidentified
MKKVSTAVTIERRNFSRQQKLTIGLDLGDRHSWYCVVDEAGQIQVEQRVRTTAKELREIFGAMPSSRIALEIGTHSPWISRLLCELGHEVIVANARKVRLIGESRKKDDRLDAQTLARLARIDPELLYPVKHRSAKAQADLMMIRARAGLVRARTGLVNTARGLAKSYGERLRGCNVRNMDPEKAESLSPELQAALQPLLAAIASVSERIAEYNGQIEKLAQQSYPEVALLKQVKGVGTLIALTFLLTLEDPHRFGKSRDVGGYLGLQPGRRKSGQSEPQLHISKEGDPYLRTLLVQGAQHILGPFGVDCDVRRWGLKLAERGGRNGKKRAIVATARKLAVLLHHLWVSGEVYEPLHNSSRMTVAAAA

SEQ ID NO: 185492 - protein, 403 aa, unidentified
MNAVGIDVSKGKSMVTILRPFGEIVSSPFEIKHTSSDIHSLIKLIHSIEGESRVVMEHTGRYYEALAHQLSAADLFVSAVNPKLVKDFNNDSLRKIKSDKADSVKIARYALDKWQSLEPYSITDELRAQLKVMNRQFHFYVKQKMAMKNNLIGLIDQTYPNANTYFNSPTRSDGSQKWVDFVSTYWHVDCIRKMSLNAFVEHYQNWCKRKKYAFNKSKAEEIYTKTKELVPVFPKNEITKHIIRQAIDQLNSTSVTVETIRTLMNETASKLPEYSIVMQFKGIGPSLGPQLMAEIGDVTRFTHKGALTAFAGVDPGVNESGSYAQKSVPTSKRGSSHLRKTLFQVMDVLIKTMPQDDPVYQFMDRKRTQGKPYYVYMTAGANKFLRIYYGRVKEYLSVLPDPS

SEQ ID NO: 185493 - protein, 405 aa, unidentified
MGKVFVGHDWAETHHDVYVEDGAGQRLGKARLDEGVSGVARFHELVSSFVDDPGEVTVATETDRGLFVGALVAAGYRVLAVNPMSAARYRERHSTSGAKSDPGDAFVLAELARTDGHHHRPVAADSELAEAVKVLARAHQSMIWTRQRQVNQLRSTLREFYPAALAAFDDLASSDALAVLALASTPSLGRGLSRSKIASALRRGGRQRRIDERAAEIQTILRADTLQAPGLVAEAMGASVRALVAVISEQVAQTARLEAELADHFELHPDAKIIRSLPGLGTILGARALGEFGDDPNRYTDAKSRKNYAGTSPITRASGKHHVVLARHARNRRLADVCYQWAFAALTASAGARAFYDQHRAAGDTHHQALRALANRLVGILHGCLRHRTPYDEHTAWGHRTAAAA

SEQ ID NO: 185494 - protein, 359 aa, unidentified
MLTQSNKIYFNGQRFYVGLDVHLKSWKVSIMTEKLTLKTFSQDPKPELLHHFLVKNFPNGIYHSAYEAGFCGYWIHNKLTALGIDSIVVNPADIPTTDKEKVNKTDKRDSKKIARSLRNGDLKGIHVSSLKTLEDRCLVRMRRTLAKDLSRNKNRIKSFLYFHGIDMPEALNKSATHWSKRFMNWLRSIEFTESSAKKSLSLLINESQHLRLTMLDAIRGIRELAQSEEYCNLVKLLQTIPGIGTLTAMIILTEIETISRFSSFDQLCSFIGLIPSTNSSGEKEITGKITHRGNNFLMSIIIESAWIASRWDLALNKSFHDYCKRMEPNKAIVRIARKLLNRIRFVIKYNQPYVCSVVK

SEQ ID NO: 185495 - protein, 388 aa, unidentified
MTQASCSLSPPVTLDYENTLVLAIELSKTKWVLSAQVPGLLRVKAQQTIEPKAEALLAAIDGYRNRSRAAGRTIERVVAIYEASWSGFWLARWLGRHGVETHVVQPSSVPVDRRARRAKSDGIDAELLLRTLLAWLRGEPRVCSMVPIPTEADEDERRRVREREDLMAERVSLVNRIGAVLATLGVGDYNPLRRDRRTRLESLRTALGDPLPPHARARIRRMLDRLDLVCAQITELEQERDAVLDKEAPDRAEKMIQQLVELRGIGVQSATVLVREAFVREFANGKALGSYAGLTPTPFSSGATEREQGIDKAGNRRLRTVMIELAWLWQRYQPGSAQVRWFRERVGITGRRMRKVMVVAMARRLLIALWRFATQGVVPEGAIVNPAG

SEQ ID NO: 185496 - protein, 320 aa, unidentified
MTILTSPTVVGVDVAKAEIVVYREDLKAIQFINNDRAAIGRWLKSLPAQSSIALEATSLYHLDTAELAHGMGHRVYVVDPYRVSHYRESIGQRAKTDPCDARLLARYLTSEQDRLRIWSPPPKLYTVLKSLLNKRAELMKARVSIMLSWSSEPLLKDLLAQQLEHFKQGDQAIQKLLREISQEAGITENIRRCKAIEGIGELTATGLATTFMRGQFASADAFIAFLGMDLRPKDSGKKHSPRHLSKKGDGELRRLAHNAAMAACRSPVWKPFYESYLARGLARTQALVILARKLCRVAFALMKNQSEYQPNLKLQGSPAT

SEQ ID NO: 185497 - protein, 384 aa, unidentified
MPRPMKESAEVEHHVATLYASLELSRSTWLVTSLSLGSVTMSKHSISAGDGAGLLGLLARMRAKAESSAGVPVEIVVIQEAGLDGFWVHRLLEANRIKSHVVDAASIAVPRRRRRAKTDAIDGETLLRTLRAWTRGEPRVCAMVAPPSPDQEDQRRISRERAILLRERVRHVNRIKGLLSSQGITDFEPLHKDRRVRLDALRTGDGRPLPPRLKAELLRKIELIELLLLQIAEVETERDSAAEFDTAQNPSPIALLTRLRGIGSQIASVLYFERLYRHFGNRREVAAYAGLAPTPWRSGTIDREQGISKAGNPRLRHIMVELAWLWVRHQPDSALARGFRARVGTETGRVRRIAIVALARKLLIALWRYVNLGEVPEGAVLKSA

SEQ ID NO: 185498 - protein, 293 aa, unidentified
MTLYIGVDFHPHQQTVSYCNTEHGEVEQTTLVHNVELVRRFYEQLPKAIVGIEASCTAGWFEHLMKDLGHELRVGNPTLIRARARSRHKSDKRDADLILDLLLKDEFPSLWRRSLEGQAVLEQLRFRHQLVKHRTQVCNRLQALAHSAGLPRRGMQTKRARLALMEANFTETQSFQRAQLFELLDDLTARIKVLEEMLEKSAAGDAKVERLLTHKGIGLLSALAVVHTLGDITRFPSSKEVVAYAGLDPLERSSAGKVRFGAISKSGSSVLRHLLGQAVYVAARYGRRTESVL

SEQ ID NO: 185499 - protein, 376 aa, unidentified
MSKDTLYVGLDTDKKSIEVALAEALPGGEVRAWGKLANDARSVLRLVKRLQAGGRPLEMCYEAGPCGYGLDRLLNDQPGVRCTVVAPSLTPRRPGDHVKTNRRDAIMLARLLRAGELTAVWVPDPAHEAMRDLVRARGAATGDLVRCRQRIGGFLLRQGIGYAGKPWTRKHRAWLGQLVATLPLAAHRLMLGEALQALDEATARRDRLTDHIAELVPGWSLAWLVDALQALRGFALINAATLAVEIGDPRRFATPRQLMAYLGLVPSESSTGDKVRRGGLTKAGNGRTRKALIEAAWTYSRPARAPSDNRRHAPAVVAIATKARHRLSQRYRRLTARGKRPVIAVAAIARELSGFAWAIAQVAGPTATTPQPPAKC

SEQ ID NO: 185500 - protein, 305 aa, unidentified
MFIGIDVSKDHLDIHVRPSGDAFGVMHDAEGITTLVERLGKLRPELIVLEATGGLQTRVAATLAAAGLPTAVVNPRQVRDFARSTGRLAKTDALDAAAIAHFAEAIKPEPRPLSDESEQALQALVARRRQLVEMRTAEKNRRQQVKDAQLCKGLDAHLEWLAQAIADIDNDLDDHIKRSPIWRAKEDLLISVPGVGNTTARALIADLPELGTLSRRRIAALAGLAPFNRDSGKMRGKRSISGGRSSVRNSLYMTTVTAVRWNPAIRTTYQRLIDAGKRKMTAIVACMRKLLVILNAMMRDRTVWA

SEQ ID NO: 185501 - protein, 412 aa, unidentified
MEILYAICCGLDVHKDSITACLRRLGAAGQVTKGLRSFGTTTGALLTLCDWLVEAGCTHVAMESTGQYWKPVFQILEGHFAQVLVVNARHIKALPGRKTDMLDAEWIAQLLQHGLLRGSFIPPAPIRELRECARYRTQVIRARADEANRIQKLLEAANLKLGSVASNVLGVSGRAMLAALVRGETDPTALAGLAKGRLRKKQDQLVAALTGRITPGQRALLGQQLAHVEYLDRAIAELDALIATQMAPYQAEAARLQTTTGIDTRTAEALIAELGVDMAVFPSDRHCASWVGLCPGNNESAGKRKTGKTRKGNKWLRSALVAAAWAATHTRTYLGAQYHRLARRRGKKKAIVAVAHSLLVIAYHILKEGTVYRELGHDYFDKRDTVRLQRRLITRLESLGLRVTVEPLPQAA

SEQ ID NO: 185502 - protein, 316 aa, unidentified
MSEPQVFVGIDVSKAQLDVALRPTDDCWHVSNDEAGITSLVGRLQAVQPTLVVLEATGGLEVPVTGALAAAGLPVVVVNPRHARDFAKATGRLAKTDSLDARGLAHFAEAVRPTPRPLPEAQAQALSALLMRRRQLVQMLTAERRRLQSAPQRIGADIQAHIAWLERRLARTDDDLAAAIRSTPLWRAKDEMLQSTPGVGPILSRTLVAEVPELGALNRQEIAALIGVAPLNRDSGTWRGKRAVWGGRAHVRAVLYMSPLAAVRHNSVLKAFYERLRAVGKAPKVALTACMRKLLTILNAMLTHQTPWYENYANHS

SEQ ID NO: 185503 - protein, 381 aa, unidentified
MKRNKKLTPTSHQQTEATAEVIKLGIDIHKSKYVAIRQIDNQAAQSPQKFSPDEFIVWVQRQRSLAKRVVSCYEAGCFGFVLHRKLAELGVENYVVRPRNWDEYGSSVKTDARDARELCGHLDRYLAGNERALCVVRVPSEEQEQARALSRQRETLAKERKRLQNVGTSSGLYHGVDVPANWWKPKVFAKLSTEIPEFMKLILDPFQQVLEIIDKQLRETTAREERKANRKIPVGLGALTTSILDQEFVDYTRFSNRGQVSSFTGLCPGESSSANKRQQGSINKHGNPRIRHMLLEAVWRMIQFQPDYKPVLHWKARMANEPFGAAKKKKMAVAIARQFAVDWWRIQTGRITPEDVGLRVDFPSAYSTRALREGRVSKVYA

SEQ ID NO: 185504 - protein, 312 aa, unidentified
MDFLHTPPLRCLGVDVAKDSLVASEGSRILTVDNNRCGVRALLKTMRPDFVICEPTGGYELMLLEECLRVGIACHRADVMKLKAYIRSLGTLGKSDAIDARQMAAYGCERWTRLPLWHAPDADEVELQALVRRRTDLVALRVAEQNRSKAPGAKAIAASFKAMLGAIQRKIDALDGQIAALVERSDRLARRIRICTTVSGVGTLSAANLIAQMPELGSLHRRQAAALAGTAPHPSESGNAKGRRRQRGGRPQAKTALFMPAMCAAQGKGQFAPFYERLIRNGKPPIVAIAATMRKIVVTINARLRDDLLQQS

SEQ ID NO: 185505 - protein, 435 aa, unidentified
MIDTILPGFAALDLGATKLFAATAETPVKVFGTFTCELRALCAWLEQHQVRAVAMEATGVYWIPVHDLLQAKGFKVTLFHGAHARNLPGRKSDVSDCQWHAMLHSHGLLRACFIPAEPIRKLRSFYRLREDHLSMAGAHIGHMQRALDLMNVRLHHVLSQLHGVSGLRVLDAILAGERDPVVLSLLCEAQVLKKKKAQVVASLEGDWQEHHLFALRQALEAYRFYQVQISACDGQIEALLHALTAQLPVQAPRPGQKIKIVRHNAPAITNLHGQLLTLAGGCDATLVPGLSPLGWMKLTGEVGTDLSAWADENHFTAWAGLAPQRHQSGRRRRRLPRPKPVVGQIFREAVLSIAKSKHLALGGFYRRIKGRRGAAVAVVATARKLAVLFYRAMTRGLEYVERGLAEYEAAYRKQSERHLRKMAARLGFTLQPKTT

SEQ ID NO: 185506 - protein, 459 aa, unidentified
MTKGKKKQKPNRIRQQVSEDMPVINRNAGGIDVGASEMWVSVPPDRDAEAIRRYEVYTRDLCAMADWLKQCGITSVAMESTGVYWIPVFQILQKRGIEVILVNAKYAKNVAGRKSDWLDCQWLRILHTFGLLAGSFQPAADIGVLRSYLRHRQMLIQYGAAHIEHMQKALTQMNVQLANVVADITGLTGMRIIRAILNGERNPERLASMRHWRTNNDEATIAKALEGTYAPEHIFALKQAVELFDFYQQQIAACDQQIADYLRSLESKINTEVNPIPPARAPKSNHRNCPKFDCRNEAFRISGVDLTQIPGINESAALTILSEIGIDMGPWKTEKHFASWLTLSPNHKITGGKIFQRSTRKSYNRVRDVLCVCAQTLFNSRSALGAFSRRMRSRLGPGKAIVAIAHKLALLIYRLLRFGKAYVDIGQDCYESQYKERSIRIIARKAKEFGFQLVALAEA

SEQ ID NO: 185507 - protein, 414 aa, unidentified
MFAVGVDVSNGRSTVAVLQSKSIVTLKPFEVSHTPEALGKLVEKLNSLGGETRVIMEHTGRYYEPIAMFLNSSGFFVSALNPILLNRYQENPSLHNVKTDKADAVKIAKFGLDNWDQLRQYEPMDTIRYQLKTMHRQFQLASKSEVAFNNNLIALLEQTYPGIRKLLSSPARPDGSQKWVDYVGTFWHADCVRKLSLKAFTERYQKFCERHKYYFSEEKAAELYRHAQNVVTLVPKSDVTKMMVKEAVSQLNAISRTVETYRAEMNRLASQLPEYETVMGMYGAGPSTGPQLMAEIGDIRRFPKKNSIIAYAGIDPEKNDSGDVTRKSNKSSKRGSPYLRKTLFVVMDVLIQRKPVDDPIYQFIDKKRSEGKPYYVYMTAGGTKFLRHYYGKVRDCLKEKGLWDQSVNDSQDSE

SEQ ID NO: 185508 - protein, 454 aa, unidentified
MGKPRVVPDEDHEVVYERVAAVDVAKASGVVCLRAPDPARPGRFASRIWDEVPAMRAAIEAVGRELLAHRVQMVTLESTSDYWRIWYYVLESLGLAVQLVSPSQAKNLKGRPKTDRLDAMWLARLTQWGMLRPSFVPPAAIRRVRDFTRARTDLVAERTRCLQRVEKLLEDAMIKVTSVARDGMKAKSVVAMVAALAEGERDPRALADLARGPLRGKRDALAAALDGMFDSHHGVIARALLDQVAFLDQQITVMEDQATAALAEVPQSWGVDPDGQAGPRCGITPGSPVLAAARRLAEIPGISVWLAIVIIAEIGLNMALFPTPAHLVSWMGLCRSAAQSGTRAGKGKPKKGNSYARAAAGQAAIGAARTATFLGERYRRIARRRGKAIAQAAVARSIMVIVWHLLNDPAARYHDLGPDWHASRINRDKKIRNHIQGLKALGVTVAITENEQAA

SEQ ID NO: 185509 - protein, 338 aa, unidentified
MTIVMGLDQHRAQITAEWLDTETGEVSRGRVRPAHRESVRRFLERFRGQELEAALEATTGWRFVVEELRRAGAVAHLAEPAETSAMRGNKKRAKNDRADARHLRELLQAGRLPESWIGPDHILDLRARVRLRHSLIDDRGEWQQRMQAVLYHHGVPKRADLLTRENRAWVQELPLPAAGREQIAIGLAVIDAIDLRLAPFDRELCRYARRQPGCKALMVHYGIGALTSVTILAELGDVRRFDSSRQVVRYGGMDITVHASDKRRAPGHLSRQGPPALRWALYEAAQAASRERSPDRDYFLQAAERLGRNRACLALARKLLKRCYHTLKDLGEEGLAPA

SEQ ID NO: 185510 - protein, 387 aa, unidentified
MPQLNDLSRSLVALDQDSTIIAVVELSQSSWLVAGVLPGIERQPQKKLEPSAERLLGLLHRWRDEAVRAGKKITRIALAFEAGRDGFWLARWLNARGVEAHVIHPSSVAVSREHRRAKTDRLDTEMLKRGFLGWLRGERGHCTMARVPTMAEEDAKRPNRERECLVGERTRIVNRIKATLARMGIRNFKPTLRKAAERLATVRTPEGMPLPPNTLAELQRDMARLGFVVSQIREIEQARQKRLEQETETGPHAMVRQVARVIGIGIETADMLVHEVLSRPMRDRKAVARYAGLTGSPDESGARRREQGLARAGNARVRRGMIQLAWRFLRFQNQSALAQWYRARTADSRLGTRKTMIVALARKLLIALWRFVTTGETLDGVILRPAG

SEQ ID NO: 185511 - protein, 311 aa, unidentified
MTSPTYIGADVAKAEVVVATATAVLGTFTNDRGGHRALVDRLRGMTLAAVVIESTGCYHRELAIALSAAGLPVAIVQPGCVRHYAKGMGQLAKSDAIDARMIARFGAEREPRLWTMPQAETAHLRALVDRRDQVVEMRTSEQNRLEACADPFIARDLRRSIARLEKAVCALDATIAAHIAAHEPLKRVSEALQTEAGVGAQTAAVLLAHLPELGHINRQRVAALVGFAPYVHESGQRKGTVGIVGGRRRLRRALYMAAISAARWNHWIAPLYRRLRERGKPAKVALVACGRKLVIRLNTIAARTHANTQPA

SEQ ID NO: 185512 - protein, 343 aa, unidentified
MYYIGLDVHKKTISYCVKDAAGCVHQEGRIGSTRRELDAWIRTLPQPRMIAMEATIFTGWIYDHLLPHAEKVKVAHPLMLRAIAAAKKKNDRIDAGKIADCLRCDFLPECHMASTEIRDRRRTLRYRSLVVKQMVQMKNRVSGLLMETGVSYNKQRLHKVGYFAELMTTNEDMHESIRPLLKLSRDMISRSQKLDYTLISSLERDPLLKERLRRLRTVPGVGPITALTWALEIGDYTRFSSIKQAISYCGLCGDENSSADKVMRMPISKQRNKHIQRVLIEAAKLATRESPELAMIRARELERGNPNRATLAVARKMVTYMLAVERRQQDFVPAEQFSRTAAA

SEQ ID NO: 185513 - protein, 346 aa, unidentified
MKIMTGIDLHSNNALCGLMDESGQRLVHKQLPCDLPAILQLLDPYKERIATVAIESTYNWYWLADGLRDHGYNVVLANPARMKPYDGLKHTDDVSDAFFLTELLRLNILPTGHLYDRKTRPVRDLLRRRLLLVHQRTSLILSFKSLNERTLGQRVALARVKAMKAEEARALFTDPADQLLSGTEIELMGHLTEAIHKIEAHVLSVAGKWRTYQRLQELPGIGKILGLTIALETGDAKRFAGAGNFASYCRCVKSLRTSNGKKKGENNRKCGNKYLAWVPRLRDGSGALCLPLRRPVPALLRPEEATNQPGHRHQSAGLQTGQGRVARDGRGCAVRQRARLRAGPEN

SEQ ID NO: 185514 - protein, 381 aa, unidentified
MEATRANQAYCVLKVLYMALELSVKKWVVLFSDGVRRRQVTVDAGDRTALLAQIGLAKARLKLAPHTPVVSCYEAGRDGFWLHRWLASVGVDNCVVDPASIEVPQHAKRVKTDRVDVHKLMDLLVRWHGGGERRAWRVVRVPSVHDEDQRQLQRERARLLGDVTRAGNRIGSLLATQGLRLALNKGFTQALAQLRCWDGTALPVQLRAAIEQEWLRRELAGRQLAALQAQQRRRLSQPAADDVMAQQAKQLMQLYAVGVQSGWLLSAEIFAWREIHNRRQLGALAGFTPTPYASGQSQREQGISKAGNARVRKAMIELAWLWLRWQGASALSQWYQRRFGSTGSTRSRRIGIVALARRLLVALWRYLEQGVIPEGAVLKTA

SEQ ID NO: 185515 - protein, 312 aa, unidentified
MANLVYAGIDVGKDKLFVNIHLDSQVRDFPNTRSGLERLSRFLIKNAVNLVVMEASGGYERLPASDLRARGLSVAVVNPTYVRRFAQGMGTLAKTDTIDARLIAHFASVKQPKPQQAKTVEEEELAALVERREQLVSLLSVEKNRLSKASDYSKASLQISIQFLTGQIASIETEIKALVAKSPERLARMRCMCSFIGVGDITAVTLLTEMPELGMESGKHIAALAGVAPINRDSGKMKGKRRTYGGRARVRRTLYLAALSASRHNPIIRAFYERLLAAGKEKKVALVACMHKMLTILNAMLKKGELFNPEYS

SEQ ID NO: 185516 - protein, 425 aa, unidentified
MRSIALDIHRDFCEVAIKDGDEVRSAGRIKTSAKELERFAQSLAPDDQVALEASGPALQIARVLERHVGRVAIANTRKVRAIAESKVKTDRVDARTLCELLAAGFLPEVFGPDEDTRAQRRRLARRAALVRQRTRAKNELHAVLARNLKGRPPMSDVFGVRGRQWLKALELPADERETVDGCLRQVDFLDREVDALERGLARMALACEETRRLMSVPGVNLVSAATFIATVGEIGRFPTPGKLVSYVGLDPRVRQSGEAPARHGRISKQGSAAARHMLCEAAWIAVRTPGPLRAFYERLRARRGAQIALVATARKLCVLFWHLLTNEQDYAFGRPSLHRHKLRRLELIAGDPSRRGRRSGSAASKREQAHERELSEQFERAYRRLVSDWQQDPKKEGAGATRGRASRGPSSGQAARQGSAPEPAL

SEQ ID NO: 185517 - protein, 451 aa, unidentified
MSKQRNKAVSLPVIEPNAAGIDVGATEIFVAVPADRDPEPIRCFPTFTVDLERLADWLQQYHIRTVAMESTGVYWIPLFQILEKRKIDVRLVNAHHVKNVPGTKTDVSDCQWIQHLHSVGLLRGSFRPDDEICAIRSLWRHRDNLIQLATLHLQHMQKALDQMNLQIHHVISDLDGTTGLAIMDAILAGERDPHKLAQLRHPRIRASEETIMKSLVGDHREEHLFTLRQSLKAYRYYQELIQEVDAQVKQMMQRLPSKVAEGEEPSQGSKRRARKTPWRNEPPQLREDLYRAFGVDLTEVPAINSLTAQMLLTEIGPNLDRFPTAAAFCSWLRLCPDPKISGGQVLSSRTRPTKNRAALALRVATQALYHSDSFLGDYFRRMKARMGTPKAMTATAHKLARIIYHMVTTQQQYDSTIFQKQEERRRHQKSARLHAQARELGFQLVPINCVP

SEQ ID NO: 185518 - protein, 349 aa, unidentified
MWAGLDTHADSHTLAILDAGGGVITTRTFPTDQAGIDELVTALDSSGVTAVGIECTASYGATAAQALQDAGHKVLEVNGGHNRPRRRRVGKTDALDAIDAARAVMSGTGSPVKSPTGPGAALRPLRTARRAVIKARCQAINTIRSLLLIAPAPLRRAGAGTPSPSWAARLADAAADLDGPDADLGAAITALARAVSRAYDDATNLTRRINRIITQAAPALLDIQGVAAITAADLLIAVGDNPQRLRSEASFAALAGTAPVPIRSGHSNHHRLSRGGDRALNRAIHTIVMVRKRRDATTRAYIQAHTAKGMTNRDITRRLKRAVARNLHHALKQALNNPTYHPTTLTPTT

SEQ ID NO: 185519 - protein, 483 aa, unidentified
MVLRVPIGSWMPYKRINIPKANRHGAIFQTLKFKIMSKSKTKKEKVKRISQLTVINPTAAGIDVSDTEMMVAYPISPEQLEIRVFGCFTRDLHSIANCLKENGTTTIAMESTGVYWIPLFLLLQEYGFEVYLVNAKHVKNVTGRKDDESDAEWIQKLHSCGLLSASFQPDNMVRTLRSMVRHRKNLVRTSSTYLNRMQKAMELMNIKLHTIISDIDGKTGLLILEAILAGERDPEVLADLRDKRIKASREDIIKSLEGHWTTEHLFELGQCYQLYCTHRQMIDECDKEIEKQLVIQIASKNEGVIPDIPKVKRKASGKHKVQFNLTADLKEILKVDVTEVFGINELSALTILSEVGCDMTKWKTEHHFTSWLGLAPNTKISGGKVISSRIMKKKHHAGQAFRMAANGLYNSKSPLGDYFRRLRAKAGAPKAVVATARKLAIIYYKMVANKEAFNPKALDDYRKKYNEKKINQLKRKIAQLEAA

SEQ ID NO: 185520 - protein, 425 aa, unidentified
MSFKIFKFNCCGLDVHKTWIYACIGITDSNNRTEYKQARFSSFTKGLNELCDWLAKYNCKDVCMESTGKYWIPVFNILEQHSFWVTLSHPKYTKPMKGNKTDRKDAKWICDLYMCGMVKPSFIPPADIRELRDLVRYRFKLTCMITGEKNRAQNCLTVSNLKLDDVFSDVFGKSSRSITEHILQHPGEKFDIAPFVDSRCKTPITEIQAAVDGAISKEQVVKLRQCLDHIDELNKHISEVEQEILRLSDKYEAALNLIRTVPGFNKNPLTAIQVLSEIGGDMSVFPTAKHLVSWAGCCPRNDQSNQKIKSTRISRAGSYFKPVLVQVANALIKSKKHSEFTSRYKRIKARRGHKKAIIAICRMILTAIWHILSDLKPYTPEGFLESRPVKEGKVLSTSQALNLLKQRGYIIKGCLLYTSPSPRDS

SEQ ID NO: 185521 - protein, 351 aa, unidentified
MMIIGVDYHPSFQQIAFLIEGTGECGDQRLNHEGGEAERFYRDLKRRCLSVRVGMEATGFSRWFERLLAELGFELWIGDPAEIKAKRVKKQKTDREDARLLLRLLREDHFPRIWMPSPENRDVRQLLWHRHRLVQMRTRIMNQLQALAMNENKCWKARLWSELGRVELAKLPLAPWASRRRQELSELLDQINPIIDELTTAAEQEARKCPEALRLMTHPGVGPLTALAFVLIIGMPTRFTCSKEISSYVGLIPSEDSSGGKQRLGHISKQGNSLLRFLLVEAAQAAVRCNPEWRRRYRHLVMRRQRNIAKVAMGRRLAVRLYWMWRNDCEYSPSFEFGSHAGKLGTGNGVR

SEQ ID NO: 185522 - protein, 355 aa, unidentified
MDRTKYIGMDVHQASISIAVRDASGKLVMESLIETKAATILEFLQGLKGTLWVTFEEGTSAAWLYDLLKPHVVKVIVCDPRKNALLKTGNKNDRVDAQKLSHLLHAGLLTPVYHGESGVRTLRELARSYLTLTKDLTRVMNRLKALYRSWAIPCVGEKVYSPRHRSAWLEQLSEAGVRRRAEQLYQQLDILLQIRRDARQELLRESRKHPAHELLRQIPQLGPIRVALLIALVQTPHRFRTKRQLWAYCGLALQTRSSGEYRFTAGQLQHSNRLPALRGLNTNHNHDLKNVFKSAATHVSTSPDALGDFYRSLLAKGMKPAMARLTLARKMAAIVLTIWKKGERFDPGELKRQAA

SEQ ID NO: 185523 - protein, 347 aa, unidentified
MKFYNQQHQYYCGIDLHARKMYVCILDQKGKTMVHENIKTDPEAFYQLISPYLEDIVVGVECVFCWYWVSDLCAKHKIPFVLGHALYMKAIHGGKTKNDKIDSYKIALLLKGGNFPTAYPYPAEWRATRDLLRRRMYLVRRCGELVAHIQNTKTQYNLPGFTKRLARKYNHAGVAEQFENPEVRKSVEVDLAVIASLNQILNQLEWHIEKTAEQHDYHTLYLLRSIPGVGLILALVMLYEIQDIKRFPSVQDFSSYARLIKPVKESDGKWAGKSNGKIGNHHLKWACNEAAILMLRESEKAKQYVAKLERKYNKGKALGIFTHKIGRTVYFILKNKEAFNMEKFFSQ

SEQ ID NO: 185524 - protein, 329 aa, unidentified
MTSTICGIDLSSTALDARIGRDGPCQRFSNTASGRDGLAAFCRANTVDLCVMEATGGYEQAPFAHLWAAGLPAAIVNPRQVRHFANAMGWLEKTDKIDCGMIAWFAETKRIKPTPLAPKTQAQLTAWVTRLRQLTQAGVEQKNQRRLVTDALVLASFEAMLATIARETRALETKIAAAIQDDPLWAALDAEWRTIKGVASRTTARLMAQLPEIGTLDGKAIAKLAGLAPIACDSGARTGKRPVRGGREGVRSILFIVASVVRRHEADFRDFSDRLSKAGKPKKVVLVAIAHKLLTRLNAKARDVRATLAKAARAAEQANQARNNVATVT

SEQ ID NO: 185525 - protein, 426 aa, unidentified
MKVMHDRAAAIDVHKDMIKVAVRVPGEKRGKRKTDVLEYRTFYGVLQEMGRELRRRGVTHVVMEASGVYTDPVYYALAELDFTEVMVINPSHLKALKGHKTDARDAIRLLEVYECGLLSGSYIPAPDLKEVRDLARYRVKTVQARTSEIQRLQKTLETAGIKLSSVISDVTGVSATAMIRALIDGERRGAVLADLAQTRMRTAGKMADLSMALAGRFTDHHAMMCRLHLDRIAGLDAAVTDLDAKIAPRVARYEREAQLLKTIPGFGDVIVAGWLGAIGPAPHRHFATAARLASWATLCPGNYISARKSKGGRTGDGGAYIKPLLVQAAWAAVRVPGRLQAKFHRLVRRFGGARNKGAAKRAIIAIAHALLKIAYHILKTGQPYTDLGADFYTRRETPQARQDYLIRELRQLNPGCVITITPPEAA

SEQ ID NO: 185526 - protein, 377 aa, unidentified
MNITNEAVSDNSEAVSRAERGGKGVLKLGLDMHYRQVTVAMQGESGPIKAVGRMSHDGFGNWVDKKLREGWEIHSCYEAGASGYWMHRDLVKVGVKNLVIAPKAMGRDKRQKTDRRDSAELADSLDRYLRSKDKRALCPVAVPTVQQEQDRALVRFHRQLMADRNRYEARGKGLLCAQGIEVSGKWWSADGWKELKTHPRFKSWMVVQLRTWRSKLLGVERHQGLVRKQIEAMAPPELPKGLGAYSAVALECEMKGITHFESARAVSSYTGLCPGIHSSNGNGKEGSINRCGNASVRWNLVETVWRMLKWQPDYEPVRQLRHDLVRSKRARKRLVVKAARQLAVDLWRLQSGKVTAQELNLVMQPITPPTKAAAKSR

SEQ ID NO: 185527 - protein, 339 aa, unidentified
MTMIGIDPHKATYTAVAVDDAERVIGEFTLGASSDQAERLCDWAEGLGKREWAVESANGLGYLIARQLVACGETVFDVPPVLASRVRLLGSGRSQKNDPNDARSVAIAALRSERLATVRSDDHVTVLRLLVKRHRDMARLRNKHCSRLHALLIDLEAGGIGGKISVTNASELLDGINVTSDVTRYRALVAREVVDDIAQLDEKLKASKKRIAVAVTASGTSLTNIVGVGPIGAATIIGYTKDITRFPTRGHYATYNATAPIEASSGGNKRHRLNPRGNRILNHAIHIAAVTQLRHDTNGRIYFDKKIAEGKTPKEAIRALKRRISDAVYRQLKLDASRI

SEQ ID NO: 185528 - protein, 321 aa, unidentified
MPKDSVLAAGIDTAKDKLDVAVHGQAAALSVDNCRAGWRAVVRHLAGLGVARVAIEASGGYERGVVAHLRQAGFVVLVVQPLQVKAWARLHLRRAKNDAIDAALIAACAALLEPAAIAPDERLGVLADHLTYIEQIEDDIARHKTRLEHLHDTRLRRCIGSDIKRLEKRRERELHRIVAQLEDHADLKRRFELVLSVRGIGLRTALAIVIRLPELGRISREEAAALAGLAPFDNDSGRHKGERHIAGGRGRLRRSLYAAASIARRWNPALEALYKRLVGRGKAHKAAVVACARKLLVYANTVVARGLAWRPNPQDAKTLIV

SEQ ID NO: 185529 - protein, 379 aa, unidentified
MTEITGGVDAHSDTHHAAALDERGRLLGDAAFAASLEGCRELLAWLESFGPVGCVGVESTGSYAAGLTRFLAARGIAVVEVNQPHAHTRRRRGKSDPLDAEAAARSVLAGEATASPKHTGGIVESIRQLRVAREGAVKATTAALNQLHGLVISAPDELRQQIAARKTSRGKVALCLRLRPDRTRLHEPLQAAKLALRTIAERVRDLDRQIELLDRHLVQLVATAAPRTTSLLGVSTQHAGQLLTTAGENIERLANDGAFARLCGASPIPASSGRTSRHRLNRGGDRNANRALHLIVVCRLRYCERTRAYATRRTAEGLTKPEIIRCLKRYIARELYHTLRADLADLNPSIPPTGHAVTISCGAGPTGTTRTSRRRRART

SEQ ID NO: 185530 - protein, 443 aa, unidentified
MSRKKRTHLRGKRGQAFANKIRGIPLDQILCVSMDVHKYFHVVIIHNALGEIVTPSFEIDIFQTGFDHLCRAVDETIVRTGAQVVLTGIEPSSHYFENLARHLHKRPQPVTLVNSFAVKKNRDQQMMQYEKDDEIDTAAIGDLLQRGEGSPFNPPTGIYLQLQHLSRVRFSKVKMRTALQNQIIGHLDRIFPGLIIIGEEAKERYEPLFATDFWKCQTLQHLIRICPNPHDLIAMSPHDLIKAFHARNYRMGPVRATKIIAYAKKVLLPDPELAAIRCHLLPHDIALLEDVERHIAQLERDLYTLLAETPYLVWTKLKGLSDTQVASLAGAIGDPANYKYAAQVFRRSGLVSGRNDSGTRQRKGKGKRVVKVGDVYLRRALMNGLATLILHQPVLRDYCNKLKVSKHAGVARVATARRAMGILWAVLRDRRSETLILKKGAKM

SEQ ID NO: 185531 - protein, 407 aa, unidentified
MNAVGIDVSKGKSMVVALRPLGEVAISLCEIPHTYADLERLGYQIIGLGGDTRVVMEATGRYHEPVAAALHEMGIYVCVLNPIVIKQSGAGSVRKVKSDKKDALKIAKYGLDNWNVLREHTPMDSVRQQLKMFSRQYNLYMKTAVSLQNNLISLLDKTFPGANDFFDSPARDDGHQKWVDFVTDFWHCDCVTRITPKTFTERYQKWCKRKGYNFSALKAENVYVSSAGHFPTLPKNDNTKLLITSATAQLTATTKVLMTVKAEVIRLAKLLPEFDTVLAMYGVGEITAAQLMAELGDVRCFNNRGSIVAFAGIDPEVNQSGSYQRESNPSTKRGSPHLRKTLFQVVSTYLKRSPVDEPVYQFLNKKRSEGKPYYVYMTAAANKFLRIYYARVKEFLNEHDPYPTSEQ

SEQ ID NO: 185532 - protein, 352 aa, unidentified
MIVLGADMHKSSHTVAAVAAGTGELLGGKTIVVGARGFGEVLRWARELHGERVWALEDCRHVSGSFERFLIGRGERVVRVATKLMAGSRQSSRTRGKSDQIDALAVARAVLREGVGSLPAAQLAGPELDLRLLVDHRERLVRQRVAVNNTLQWHLHDLWPELTFPIGALFSVKWSTKIARRLARAEQSTRVRIARDELRRLRDLTQTIKHLEGEIADLVTDVAPQLLAEPGFGPLTAAKLVGEIAGAGRFATDAKLARCCGVAPIPVSSGKTSRHRLDRGGNRQINAAIHRVAITRARCHPETKAYIARKTAEGKTYREAIRALKRHLARRIWHLLQPPNTCQDIAQSSMTP

SEQ ID NO: 185533 - protein, 445 aa, unidentified
MTPCAPLLSTAEPDWAAFAAIDWASRKHFWSLAPCDGGPPESGTLDNTPEAIELWAMALRQRFAARPIAVAIEQKRGAVIYLLAKYAHFVVYPVPPSMAASYRQAFFPSGAKNDPGDAGLLLEILLHHRQRLRPRQPDTPATRLLQFLVEQRRQLVQQKVQQVQRLTDCLQQYFPQLRLWFDSLDSPLVTALLDRWPVLPQLQRAHPGTLHRFFVEHNCRREELIQQRIQAIYTAVAAIDDPVVIEACTRKTETLLHLIRCLRQEVAGLEKRIRTLTEEHPDAPIFASFPGAGPATVPRLIAAFGTCRDAYANASDVQRISGVAPVNITSGNAKSTRMRRACPKFLRQTFHEFAAQSIPYSTWAKAYYQHYLQQNKSKHHAAVRSLANKWIRILYRCWKDHRLYDESIFLESQRRRGSLLGAELASLGTVQWRSQAGFQKLDDQP

SEQ ID NO: 185534 - protein, 363 aa, unidentified
MVDVTAGREFVGIDLHRRRSVIVRMDAAGNWLGEPVRISNDVESWDRVIASLGPAPEVVVEATYGWYRYVDRLRAAGARVHLAHPLGVKGFAYRRVKNDVLDAAGLADLLRMGRLPQAWIAPPQTRELRELVRYRHKLVGDRSRWKAQVHAALAKCAVLVPVSDLFGIEGRARLAQAELGEAYRVRVDSLLGLIDYVDVEIDRIAALVADRLKDHRGYAAIQTLPGVGPVLAAVLVAEIGDVTRFGSPAQLCSWAGLTPRHYESDTTVHRGHITKQGSPFVRWAAIEAVQRASTDKIKSDRARIEARRGGNIAKVAAARKLLTLVFYGLRDGRIRATAKPTNPPPEPQPERAPAGPQPASARS

SEQ ID NO: 185535 - protein, 452 aa, unidentified
MVKKKKSGRKKAIKYLHVLQPNSAGIDIGATEIYIAVPEDRSSKPVRRFDTFTDDLHDAAKWLKECGIESIAMESTGVYWIPIFQILDIYGFEVILVNARHVKNVPGRKTDVIDCQWLQYLHSVGLLRGSFRPAQDICAVRSLLRHRNNLVKAASSHIQHLQKSLTQMNLQIHNVISDITGITGLAIIDAILSGERNPKILAELRDPRIKADKKTIVKSLTGDFRSEHVFTLKQTLQSYRNYRQLIQDCDGEIENHLNEFESSIDLDDSPPIPPSTPKRKPKGNELNFDLRKHMYRLLGTDLTQIDGISSLTAHVIFTEIGPDLSKFKNVKYFCSWLGLCPNNKISGGKILSSHTRPGSNRAAQALRISANSLWNSKSYLGNYFRRMRSRHGAPKAITATAHKLARVIYHLVKNQKLFDDTIFAEQEKNHQKRFEKKIITQAKSLGFKLIPV

SEQ ID NO: 185536 - protein, 339 aa, unidentified
MKKRYMGVDLHRNCFTVYTRQEDGSGESREWSIHHLKAFAKTVKAGDEVAVEATGNVRMFCAALKDRGCRTVVVNPHQFQVISRSVKKTDEHDAKVLAEFLSKGMLPEVRMKDEVHARVASLAQTRDKLVKLRTTLKNKVNNLLAARGILIRKESLSSEKGLAEVLASPVSELERMELEVLVGEIRHLNESIQKLEGLLRDQGPKLPGWENITSIKGIGDTGASILLSTIGNINDFADEGKLAAYFGIVPRVSNSNETERSGRITKQGCKLGRTALVQCALIAARYSPYLQKYYRRIAAARGTGKGIIALARKFLSIIYKTLKNDWVFEDFPSFKLVQA

SEQ ID NO: 185537 - protein, 450 aa, unidentified
MSKLSRELHPLQLAVINEHSAAIDIGSMMMMVSYSDRNGVPQFLECSAYTESLDSLAQTLQQEGVTHVAMEATGIYWIVLYEILERYGMKITLINPKHFKNVDAQKTDVKDCQWLHQLHASGLLRASHIAPEIFRELKNYLHERDILQKQKSDTLNRIQRILSQMNIKFQHLISDIEGVSGMKLLHGISSGITDPQKLLLLIDTGKLKASADDLVKSLTGIYKQQFITILKNLLKAYHFFKDEMKAYETIIEQVLKKMLPEDKDGNKPLIEPKKTYTRKNQYSINLKSYLNHILGVDLTKVDGLDEISILTILAITGVDMNKWPTADHFVSWLNLSPRPKITGGKRIGHDKRFTNNPATQAFRMAAQSMWQNKGPLGHLYRRLSAQKGSKKAIKAIARKLAVIFYNMVKNKSEYDKTRLQQNTHRQEQRRIARLRKEAAKYGFKLENLIA

SEQ ID NO: 185538 - protein, 337 aa, unidentified
MNIVFLGIELAKNVFQLCGLSQAGKPVYTKRTGRKELLQTLANIPACLIGIEAPTGAFYWQREFEKLGHKVKVISPQYVNPFVRGQKNDGNDAQAIAVALMQPTMQFVPPKSPEQQNIQALHRARQRIVNHRTATVCQIRGLLLDRGIPIGSAVSRARRAIPLILEDAENGLSSRMRRTIAELYDLFNDLGRRIHFFDKEIETVFRQSEACQRIAKIKGIGPKTATAVVAIGKGTEFKNGRHFAARLGLVPRQHSSGDRQVLMNMTKKGDKHLRTLFIHGARAVVRVATNNNDGHMNQWVNQLKERRGFNKTTMAVANKNARIIWSMLTNETGYQVV

SEQ ID NO: 185539 - protein, 354 aa, unidentified
MTEILKSMIAAIGIDIGKSSFHVVGLDGRGAVALRQKWSRGQLEARLANMPACLIGMEACVGAHHLSRRLRLLGHDARLMPAKYVRAYSKGQKNDFRDAEAIAEAVQRPTMKFVATKTADQLDLQALHRVRERLVSQRTGVINQIRAFLLERGIAVRQGRHFLRAELPGILATGCEVLSGRMVHLIADLAGDWRRLDERIEGLSGEIAALARQDAGCERLMSVPGIGPIISSAMVAAIGAGDTFTKGRDFAAWLGLVPQQFSTGDRTVLGKISKRGNRYLRALFVQAAWVVLIRSKNWERYGLKPWIEAAKRRLHRNVLAIALANKLARIAWGVLAHGRSFEAAKLAEAATLPA

SEQ ID NO: 185540 - protein, 394 aa, unidentified
MYQTFIGVDVSKDSFNYAIVDGELNTLSQGSFDMTHEGFKAFKEAISSSPNSVIAMESTGSYHLNLLSFLLSFKQDVCLVNPSLIKRFSQGISLRKTKTDIIDALIIAKFIAMNAHNVKLFTPDNMDDIVAIARVREDLAKQIARIKTQLKQHLSVVFPELLAKYNVFTDTILQILEHFPTTQCIKKAPKSSIKGILNKLDGRKVDISPEELVALANNSIGRSSEIFEKIIKHDVKMLKFLMAQLDEITEDFINKINQSKKEDMDIITSIKGINKTTAAHFLAEIKDIKRFDCKGKLSAFAGCDPSIKQSGTSINSRGKISKKGSKSLRRCLYLMASGVMKFNDYFKAYYLKKRSEGMPHRKAMIALVNKLLRTPFAMLTKKEVFQYHVSSQNL

SEQ ID NO: 185541 - protein, 447 aa, unidentified
MNHLLRIMYKRVAGLDVHKKTVVATRMQVTEEGRLEWETETFGTTTPELLELYDWLAEWGCTHVAMESTGDYWKPVYNLLEDDFEVLLVNAQHVKHVPGRKTDVLDSEWLAELLLHGLLKPSFIPPKPQRALRDLTRYRTKLVQERVRVVNRVQKLLEGANIKLASVATDVMGVSARAMLAEIAAGQTDPKLMADLARGRMRNKIPELEKALTGLVNPHHRFLLTKQLAHIDFLDEQIDDIGGEIARWFETQSQRPGEGGNGSGRESGTETPSSEEEAPLTWEEAVALLDTIPGVNRKTAEDMLAEMGLDMGQYPTDKHLASWAGLAPGNRQSGGKRYSGRTRKGNRTLSSVTVQAAWSAVRTKDTFLKARYHRLAARRGKKRAIVAVAHSILTSAWHMLTYRQPYQELGGDYFDQRRKEAKVNYLTRQLEKLTGGAVRIELQVATV

SEQ ID NO: 185542 - protein, 355 aa, unidentified
MDSTKYIGMDVHKEATTIAVLDASGRLVMESIVETKAATIVQLVQGLRGDLQVTFEEGTWAAWLYDLLKPYVAKVVVCNPRKNALLQSGNKSDRIDARKLAELLRAGLVSAVYHGENGLRTLKELSRSYLTITKDLTRTMNRVKALYRSWSIPCAGASVYAPRHRAEWLSKIQEAGVRRRAELFYQQLDGLQELRQQARKDLLAESRKQEATKLLRKIPYIGPIRAALLIALIQTPHRFRTKRQLWAYSGLALETRNSAEYRYKKGELQRSPKPVALRGLNENHNHDLKGIFKAAAVRASTAGPFQQFYTALVAQGMKPTLARLTLARKMATITLTVWKKGVCFDAARLKRQESV

SEQ ID NO: 185543 - protein, 343 aa, unidentified
MQVVRIGLDLAKYVFAVHGVDARGKVVLRKTLRRDSVSCFFANLPPCLVGMEASNGAHYWARVLTDLGHQVRLISPQFVTPYVKSNKNDRNDAEAICEAVGRPSMRFVPPKSAEQLAVQAIHRIRRRLVSDRVRLVNQVRGLLAEHGIVIPRDITQFRRGLAQIIASCAGGLSELVRSLMRELQEELVELDRRIASYDRRIREIFRNSEPCQRLGKIEGIGPITATALIAAVGDRTCFKNGRQFAAWLGLVPKQRSSGGRARLFGISKRGDRYIRTLMIHGARAVLGRARGKQDPRSLWLGKVRQRRHPNVAAVALANKNARIVWAMLSGDTAYEPALSVKAA

SEQ ID NO: 185544 - protein, 431 aa, unidentified
MRTLEGIFNLPISGRQEMKRQENKACGADIHKKFLMACILSRDGSKVLNRFDMTVEGILSFASWLKDNNCKKVAVESTGNYWHLVYQVLDDEFEFILGNAFKTRRHSGAKTDKRDAEWLAELCLNNQIDPSRILPKEDRELRALTRARKGYVDFRSKAKARTIQELEACTIKLASELSDVFGKSGRHILQGLVDGRSADDIIESIPSKKVKKNKERIKQAIRAGLSTVSIFLIKSHIQLIDEVDKKLVQLDAQISRLLKVRKRDIEIAMSMPGIGFISAAAILSEIGDYRNFASGKKLAAFSGLDPSVYESAGKRYTGKITKMGSKYLRRMIIECAHALSKTKARTQLKRFFLRIMARRGKNIATVALARKMLVVLHHLLINQEMYKDDGLAKPKKVKVRFSEESNYPSLDEMIEVLVGAGYFVKKDSLGG

SEQ ID NO: 185545 - protein, 345 aa, unidentified
MLHVGLDLSRNRVDVHVLDDAGETVGITAVAPDRDGLARLARDIGRGEPVKAAIESMNGARFVHDTLELGGWDVEIADALKVKGLAPLACKTDRIDAWVLAELSRREFVPAIWLPDPSVRAERERARYRLHLVQHRVMFKNRVHAALIAFGKPCPVSDLFAPGGRDLLARLEFPEPWRSNVEAALGHIDALDEEIVACEKQLRAMGADHPYVPLLTTLPGVAWVLGYTIASEIGDIARFSSPKKLVGYTGLCPKVKQSGHSDHRGPLAKNGPKYLRWAYVEASTHAGRHPAYRDHYQRTRARLGRQRGANVARVEVARKLAEATWHMLTKSEPFAPARSHAALAA

SEQ ID NO: 185546 - protein, 340 aa, unidentified
MDITTLGIDLAKSVFQLHGVDAQGVIVLQKKLRRGAVVKFLSKLEPCLIGIEACATSHYWAREIAALGHDVKMIPPAYVKPYVKRQKNDAADAEAICEAVTRPNMRFVPVKTEEQQAVLVLHRSRDLLMRQRTMILNAIRSHCAEFGIIAAQGARKVSELVTKLRNDDTLGVPEVGVSALLSLASQLDCLEQEVRKIEHQLLAWHRQNAASQRLETIPGIGLITATALAASVPDPAVFKSGRQFAAYLGLVPRQNSSGGKDRLGRISKMGNGYLRRLLVVGATSVTRRAPTTDTRTGTWVRSLLERKPTRVVTVAIANKTARTAWALLSKGESYKAVPAI

SEQ ID NO: 185547 - protein, 317 aa, unidentified
MQTFLNVGVDVAKDAVVVACAEQRFPVQSVPNQRAPLRAWLKSLPAGSRIGLESTGAYHELLADLAQAQGYTVFLLNPLETRHYAKAMGTRAKTDRVDAELIARLIAQEHTRLRAYTPPTANQRKLDRLIRRRATIVRLKGTLKLTMDNLGGFAAELKAVMGKLDALIAKIDAAMAALAACSPQHQEAQQRVETIVGVGPVVGISLTNTLERVPFRKADAFVAFIGLDPRANDSGHKAGRRRLSKRGPAELRRLLFNAAMSAIKTKVWKPIYESYRTQGWSTTASLVIIARKIARAAWSIHHYHTTFNPERITKCLA

SEQ ID NO: 185548 - protein, 413 aa, unidentified
MRAGHRRSAQICACGVMMDTAVYLGVDIGKSGHYALAVDAAGKPIYQTAVPNDEAALHKLVKWAHQHQAGLVVDQPGGAAAVLLRLCWQSEVRIGYLHGLAMARARDFYAGESKTDPKDAFVLADVARAHPNRIVWLESSSEALAHLELLCGYDADLRGDANRLTNRLRALLVTHWPALERAFGERLDSHGVLAVLQQYPSGPAVRDAGVEQLTAALKAQRVRRPETFAKQLHRAALAQTVTITGSQTAARLISELAGQLTAILARRAELEKDIEQGFFALPEAAILRSLPGIGPRLGARIAVEIGSIARFRTPSHLAAYAGLGPTPWKSGTSINANLPSRFGNHRLKNALFLAAFASLRHAPSRIYYDRKRAQGKRHNQAVLCLARRRVDVLHAMLSQGVTYQPPTPRAAAA

SEQ ID NO: 185549 - protein, 369 aa, unidentified
MLYVGIDQHRKQLTVSVRDESGNVLLRRQVSTEWKKVRAFFDEVRDLAGAHGGYLCVVEVCGFNDWLLKLLPQQGCQETIVVQPGEQSSHKTDRRDASGLSEVLWINRDRLSRGLPVRGLRRIQVADPQSQADRRLTSMRHDAGRELTRTINRIKAVLRRHNLEQECPTKKLQTQRARKWLNALVLGSASLDSMERLELQQQLVRYDLLRKQREELEAATQQRYALNPAAQLISTMPGAAAYSSLGLACRIGDVRRFPHPRSLANYWGLTPGSRNSGEATQRLGSITKQGSALARFLLGQLVLHVLRKDVWMRTWFRGIKHRRGSKIARVAVMRRLTTILWHMLTKNESYQYGGPPRARLNRPAASEGS

SEQ ID NO: 185550 - protein, 329 aa, unidentified
MMNEQGEVIRRDKASTDRASIRRYFQNADPCEETKAVMEACYGWEYFYDEASDLVDELIMAHPLKTRLIAEARIKTDTIDSETLAHLLRADLIPQAYAPDSETRGRKNLLRYRSSLTAMKVRIKNIIHSVLTRNHIEDTGFTSLSDKFGKQGLSYLRSVTLKGEDTAIVNNYLDLLEETERKIKAAEKQIRAVCREDKICTLLQSIPGIGPILAVTIRYEIDDIGRFMSAGKLSSYAGLVPSTYSSGNRTYQGKITKQGNKWLRWAMIEAAQKAPSNDLWLRGFYQRISKHGKKIARVAVARKLLEIIYRVWKEENPYYKKGTVALPFV

SEQ ID NO: 185551 - protein, 348 aa, unidentified
MEIHTLGIDLGKTIFHIVGLNTSGETVVRKKLSRKQLLLFTATSQVRLIGMEACGGAHFLGRALRQQGHDVRLMPAQYVKPYVKTNKNDYIDAEAIAEAVGRPKMRFVPIKSDDQLDMQSLHRVRERWVGRRTSVVNQIRGLLLERGITVRKGRRHAEGALPGILEDPESNLSGPLRMLLVQLQRELKQLQSQIEEVDAVILKAAHEHEACQRLMGIPGIGPVIATAMVSAIGNGADFKKGRGFAAWLGLVPRQYSTGGKQKLLGISRRGNCYLRSLLVHGARAVLQCREKQSSGLSAWLCQLVSRVHRNVAVVALANKLARMAWALLAKGETYRPPLPVDNTRMVCN

SEQ ID NO: 185552 - protein, 343 aa, unidentified
MDYFAGLDLSVKETSVCIVDDAGKIVREVRVASEPEALLQVLTNNNYRFKRIGLEAGPLSQWLFSALAEAGLPVICVETRHMRAVLKAQINKTDRNDARGIAQMMRVGLYRPVHVKTLRSQKLRMLLIHRKLLQSKAIAIENDLRASLRNFGLKMGLVGTVRFEARIKELVENLPDLAALVEPLLIVRRVLREQLGILHRRVLAVVRDDEVCRRLMTIPGVGPVVALTYRVTVDVPARFRNSKSVGAVFGLTPAKDQSGERDRSGAISRCGDELMRVMLYEAAQIMLVRSAKWSWLKAWAMKIARHRGMKKAIVALARRLAVIMHRMWIDGTEFRWTREVAAA

SEQ ID NO: 185553 - protein, 343 aa, unidentified
MQAVATIGLDIAKSVFQVHGVDVHGKVVVRRQLKRRYVLAFFKKLSPCLVGIEACATSHYWSRELQALGHTVRLMPPAYVKPYLKRQKNDATDAEAVCEAVGRPNMRFVETKTAEQQSCLMLHRTRHLFVRQQNAVINSIRAHLAELGIVAPVGRNGVEKLLDVVADPDDDRLPDAARECVAALGAQLRMLKAQILEFDRRILAWHRSNETSKRLDEIPGVGPVLATALVASVADPKAFRSGRDFSAWIGLVPKQNSSGGKEKLGNITKRGDRYLRSLFTAGALAVIRYAKIHGTKHRPWLTALLARRPTKVAAIALANKLARMAWAMMSKGERYREPAALAA

SEQ ID NO: 185554 - protein, 434 aa, unidentified
MTNSNFISKPRILVAIDVAKAKHDVLVELPGGERKKMIVRNRRDEFERLVGYLKSLDGTCEIALEPTADYHRCVAYFLETHGFELRLVSSIAVARTREALHNSWDKNDPKDAQVILHLLRHRTTQRFYDPVIEQTNDLQELSKTHHQVSLRKTRVQHSLMNHYLPLYFPEAERFLCTTRAGWFARLLIAFPTPAAVTAVTEAEFMAAATGLFRAKHSKAAVLRSFYAKAKESVGIPVPLESQTVATFRLLLNDHSELCRKREELERTAHELLKDRTDYQILRSVPGIGPVIALTVLAEAGDLRRFEHERQFLKFCGLDLSTAQSGAYRGRSQLSKRGNGRLRAALWLAATVAVRMSENSFRRKFDRYMQSEATNADRKRKAYTACAAKMGRTIYGLIKHQQFYRAYHEDAVPEPDGRTRSHGPLRQAALVAVTS

SEQ ID NO: 185555 - protein, 442 aa, unidentified
MVAVMIGIDPHKASHTAVAIDPAEVPLGQLQVRACAAQAERLLGWAQAWPQRTWAVEGAGGLGHLLAQQLLAAGERVLDVPPKLAARVRLLATGNINKNDPNDARSVAVAGLRSAGVREVCRDDHATVLKVWSKRYRDLGRARNQVACRLHQVLCELIPGGVPGEITAGQAERILASITPAEAVEAARWELAAGFTEELRGIDARIRQTRNKLAAAVRAAGTSLTGLFGVGPVIAAAVIGDVRHVARFPDRDHFAAYNGTAPIEVSSGGRKIWRLSRRGNRRLNHAIHMAAVTQIRYRHSPGHAYYQKKLAEGKTGKEALRALKRQVSDAIYACLQADARRAAAPVKSPGGQPGNGSDSSAAGSHPGHRLFGQATPGPAAYPTTPTASFPAPLPCQASGRPGQGPGAARPRQRRQQGVLDPAAREPIMPAAGRNATGPAGHR

SEQ ID NO: 185556 - protein, 338 aa, unidentified
MSVYVGIDVHRKRSQVAVVTEDGTVQLNKNVVNGSEPMLRLIGELPSGTPVAFEAAFGWSWLAELLEDYGFEAHMVHPLRCKAIASARLKNDRVDAAILAQLLRADLLPEAWIAPAKVRQLRALLRHRISLVRLATQARNRIHAVAADHGYDRSASYWTGPGRGWLAELDLPAASREIITDCLAVIDGLAPVIDRIDGELHAHAKADPRVKVLRTLPGVGEFTALVMVAEIGDVSRFGSARKLASWAGLTPTVRGSDLHVRHGHISKQGSVWLRWAMNQAAQTAKRSPEFAASYAAIARRRGKKIATIAIARKLLTRAWHLLNDMQAADAATPLRRPA

SEQ ID NO: 185557 - protein, 339 aa, unidentified
MSSIKILGIDLGKSCFHLIGRDSHDQIVFHKKLSRPKLLEHLAQLEPCIVAFEACGGAHWLGRVCQSHGHDVRLIPPQYVKPFVKGNKNDFIDAQAIIEAALRPDMRTVAVKPVESQSQAVIHRLREGFVAERTACMSRIGAILLEFGLSLPKGHCTMKRLYSWLANQKVKLCPVIIEELQVIHDHYLYLNERVAKQDVKVTRHVNLDVRCQLLKTVPGIGVITASQTVIEMGNATQFKNGREASAWLGLVPRQFSTGGKSKLLGISKRGNKRLRCLFVHCARSVLSRLDKYQGKLYDWLRKLRLTKSFNTVCIALANKLVRIAYAVLSKHEPYLVQEV

SEQ ID NO: 185558 - protein, 329 aa, unidentified
MDTAQAVVGLDVSKETLAVCYQVGAHMQHQEVANTLAGFRQLVRAAGATSLYVLEATGPYYLAVAYHLVAAGAQVAVLNPLVVKRFIQMHLGKGKSDRKDAQWLLRYGQQQATPRWQPEAAVLVECRQMEQTTELLIRQKTMVHNALEALQVQPVVSPTALKQLRQTLLQLEEQVQHLEAELLTTIEQHYCQQMPLLESIPGIGRKTAAYLLLFAGGFTSFQNYRQLIAKAGLGPREFSSGTSVRGKARITKMGGGVIRSKLFMCSWSARKANGACRALYDRLVAKGKNGKLALIAVCNKLLKQAYAIVTSGVPYQADFTKKAALPLAF

SEQ ID NO: 185559 - protein, 407 aa, unidentified
MLFVGDDWAEGHHDIEIMDAGGRALVKVRLPEGVEGIGRLHGLIAERVGPDADPEQVLIGIETDRGPWVAALVAAGYRVFVVNPRQTYRFRERFSPSGAKSDAADAHVLADMVRTDSHQLRPVAGDSELAEVIKLLARAHQSLIWDRQRLVARLRAQLRDFYPAALAAFGEELAATEALDLLAQAPDPDKAVRLSLSKITVALRHAGRRKIDERARKIQDGLRSEQLHLPAAVQHAYGTTVRSLVAMIATTVEQIDYLERELTERFQEHPASAIYLSQPGIGVVLGSRVLGEFGDDPDRYAGPKARKNYAGTSPVTIASGCRSTVNARYVRNTRLIDALMRQAMAVLAGSPGARAYYDRQRARGLPHNAALRHVSNRLVGILHGCLATHTTYDEATAWGHHIAASAA

SEQ ID NO: 185560 - protein, 483 aa, unidentified
MTFIDHPVGRAWPSNDYSRGRCLYCITTLLYCRRPVKPAEDQQTLIPINPMQNPHPYDLVLGMDRSDAKADLCLIHTRTGQRSAVCLNTSPETLWEWLCDLRQLHPKARVALCLEQPAGHLISFLEAYEWIDLYPINPITLQKYREAFVTSRAKDDTRDADYLADLLLNHLDKLKVWAPEDDDTRAVQQLVFHRRSVVDERTALTNRLQALLKQYFPQALVLSGEDLWRPLATAFLLKWPSLQAVQKTKTSSLIQFYHLNGSRSQSLLQRRLALIQKAVPVTDQAAVIDSFVLRVQLVARQLQLLSKTIATFDDQIAQAYQQHSDFPIFNSLPGAGPTLGPRLLGSLGSQRERYPSHTNLQRYTGTAPVTKKSGGSCRIHRRYLCPKFHRQSFHEYAKESVLHSRWAAAYYLQQRTKGSSYHTAVRALAYKWQRILWRCWQDRTPYSEARYQATLRRRHSPLVPLFDKITLGKSPFKNPVTKS

SEQ ID NO: 185561 - protein, 429 aa, unidentified
MQNESTPDARGPVFCGVDTHADSHWLYVLDWRGRRVLSRRFPADAAGYEALAGAIAAAGEPACVAMEGTSSYGAGLTRHLASLGMPVREALSPAGTQRRRPGQGKCDEADAERAARAAMPGSRLGTPKSQDGWVDGVRCMLAARSGAVKARTSAINTARSLLTTAPEGLRSRFRGMAGPRLMEELPSVRAEGALGAALGALADLWAAARDAALDMELAIEASLEENCPALLAMYGCGPVSAAKLAVAAGDNPGRLRSEASFAAICGACPIPASSGKTVRHRLNRGGDRQANSALHEIARQRVMRDPETAEYAERARARGKSDREVMRCLKRYVAREAYRALMRPHEIRRPEDASELVAARRAAKVSQVRAASILGTSEKYISMLERGQRELKPIRRAYEAWVEAGLPLDWDRQAFEAERKMDSKKHLAK

SEQ ID NO: 185562 - protein, 368 aa, unidentified
MKQVTTYVGIDAHKKDLFIAMLIGQQKTPVTWQLADEPQAVRRLVRKLEREAPGPVSVFYEAGPCGYALQRQVTTSRVSCDVVAPGLIPRKPGERVKTNRRDARKLVELGRAGLLTTVQPPTLEDEAVRDLARARDDAREDLQRCRHRLGKLLLRRGLHYAGRNWTRAHRQWVDGLVWTHAAERAVVDDYLLAIDHTEARLLELDARLAEMAEREPYRNPVGWLRCFRGIDTLTAMLILAELHDFRRFASAPALMAYLGLVPREDSSGEKHRRGRITRTGNALVRRLLVETAWHYQHRPSVGVALTRRRKGQPGRVIAIADKAQQRLCRRFRKLAAEHKPAPKIAVAIARELAGFLWAALQPAPVSVK

SEQ ID NO: 185563 - protein, 280 aa, unidentified
MSQEKYIGMDVHQATISVAVMDASGKLIMECLLETKAATMVEFIQGLHGTLSLTFEEGTSAAWLHDLLKPHVSRLVVCDPRKAALLKDGNKSDRIDARKLAEMLRTNQLKPVYHGEHGIRTLKELGRSYLTITKDVTRSMNRIKALYRSWAVPCGGTSVYAPRHRAEWLAKIVEPGVRIRAERLYQQLDGLQPVRLQARRELLRESHQHAAVQLLRQIPSIGPIRSALLVALLQTPHRFRSKRQLWAYSGFAVETHDSGEYRSVRGKLQRNRERITVRAV

SEQ ID NO: 185564 - protein, 451 aa, unidentified
MPKERSKVGSLPVIEPNAAGIDIGATQIFVAVPVDRDPEPVRCFPTFTIDLERLADWLQQCQIRTVAMESTGVYWIPLFQILERRSFEVRLVNAHHVKNVPGRKTDVADCQWIQHLHSVGLLRGSFRPDDEICAIRSLWRHRDNLIQLATLHLQHMQKALDQMNLQIHHVISDLDGTTGLAIMDEILAGERDPHKLAQLRHPRVRASEETIMKSLVGDYREEHLFTLRQSLKAYRYYQELIQEVDLRVKQMMQQLPSKVAHGEKPPTGGKPRPRKTPWRNEPPQLRDDLYRAFGVDLTEVPGINTLTAQMLLTEIGPDLFRFPTAAAFCSWLRLCPDPKISGGQVLSSRTRPTKNRAALALRMATQALHRSDTFLGDYFRRMKARMGVPKAMTATAHKLARIVYHMVTTRQEYDATIFQQQEQRRRQQKSTRLFAQARELGFHLVPINSVP

SEQ ID NO: 185565 - protein, 367 aa, unidentified
MAARERDRSQRSGSGFIKAVGQLGSSRSSVHQPGQLKGSRARIVQGRETRRCARSPAIFVGMDVSQDTVDIAVQPGTAFQIMNDDRGIAEAVERVQALQPTLIVLEATGGLEVPLAGALVGVGVPVVVINPRQVRDVARATGQLAKTDRLDAQILARFAEAIRPPVRPVPDEQTQALAALVARRRQLIERLTAEKNRLRLAARPIQKRVPAHIAWLEKELAATHTDLTATIRKSPVWREKEEVLRSVPGVGPVLTTTLFANLPELGTLTRKEVAALAGVAPFPRDSGTLKGRRAIWGGRAHVRAALYREALVATRRNPVIHAFYQRLCQAGKAKKLALTACMRKLLTILNAMLQSGTPWRVAASQSA

SEQ ID NO: 185566 - protein, 340 aa, unidentified
MHTTQVSVDLAKSVFEVAVSHRPGHVHERHRLTRSRFHSFFAERESVEVLLEACGTTHHWGRELQAMGHRVRLLPPGDVSRYRDGNKTDPPDAKALLEAARNEAIDTVPVKSVDQQAIAALHRLRSGYLQTRTARINAVRGHLREFGVTIPVGAKQVIPHAHRALDDDVVPGYLRHALEEVLDEIEALSAKAKALQRTLERLAEQMPDALLLMTVPGIGVLTATALVSFVGDVRRFRSSRHFAAYLGLTPREFSSGSARRLGRITKRGNSYLRMLLIHGARSALRAGSVAQVPDDLRAWALELQRRKGHNVAAVALANKLARVAWRVWRDQRPFERRAAA

SEQ ID NO: 185567 - protein, 366 aa, unidentified
MKKTSTIRVNGNMIFKGHKLTIGLDLGDRWSFYCVLDEAGQIILEQKLPTTPEAMKQTFGKIPRSLIALETGTHSPWVSRLLRELGYEVLVAHAQKVQLISKSNRKDDRHDARTLARLARIDPELLGPVRHRSAKAQIHLTVIRARAELVSARTALVNAARGLAKSYGERLRKCGTQQVSRELAAEWSVELREVLEPLLQEVESLNERIKEYDVRMEKIAREGYPQVELLKQVKGVGTQIALTYVLTIDDPHRFPKSREVGCFLGLRPGRRDSGQSQPQMHISKEGDPYLRTMLVQGAHYILGPFGEDSDLRRWGLRLAERGGKNAKKRAVVAVARKLAVLLHRLWVTGEVYEPLRNSHKAMRAAA

SEQ ID NO: 185568 - protein, 366 aa, unidentified
MKKPTKTTPSVILTSPAVIVSGFTLGLDLGDRSHYVCVLDAQGQMIHEGSMLNERVALGLLLTRYPAATVALEAGTHSPWISRYLASLGAKVIVANPRKLHAITRHERKCDRRDALMLARLARADAALLHPLQHGSAQAQHDLLGLKLRDSLVRTRVNLINTVRFTLKSLGHTVANPSSEAFHKSILSAVPAECLPVVAPVLAVLALITGQIKTLERDLVARSKRDYPVTQRLQQIAGVGPLTALCFVLKIGEPTRFGRSRDVGPYLGLCPGRDQSGGTDKQLRISKCGDGLLRRLLVSAAHYILGPFGPACALRAYGQHLVGTSVREKKRAVVAVARKLAVLLLSLWKHGTDYEPRVPALVMIPA

SEQ ID NO: 185569 - protein, 348 aa, unidentified
MRFYTEQHQHYCGIDLHARTLYLCILDAGGNVLLHKNLPCDRARFLEAIEPFREDMVVASECIFNWYWLADLCAEHSIAFVLGHALYMKAIHGGKAKNDRIDALKTASLLRGGLLPMAYVYPAKMRSTRDLLRRRTHFVRKRGQLMAHIQNTFHQYNLPRPPGRLVYKYQREPIPDAFDDPMIRKSMETDLALCDTYDELIRDLEKTVVRQARVHDPQTLLRLNTVPGIGEILSLTLLYEIHDIGRFESVQRFASYARLVKCEKSSAGKRIGTSGHKIGSVHLKWAFSEAAVSVIRHLPQSKRLHERLKRKYGKGKALSILAHKLGRTVYFMLKRNQAFDADRFLANA

SEQ ID NO: 185570 - protein, 320 aa, unidentified
MMTIPSEGCWVGVDVSKATLDVCVSHPQQGLSVTNDPAGIQTLIGTLHDLHPTLVVLEATGGLERALVAELLVAQIPVAVVNPRQVRRFAEALGYLAKTDQLDARVLAHFAAAIQPPTRALPDAETQALAEQVARRRQLVEMLTMEKNRLLQTPYAAVRQDIQAHIDWLQQRLKTTEAGLRQAVEASPAWQAKADLLREVKGLGEVSILTLIADLPELGTLDRKQIAALVGVAPLNRDSGTLRGRRCVWGGRAEVRQALYMATLSAVRYNPILQAFYTRLRNAGKTAKVALVACMRKLLTILNAMLRDQAHWDEHHGKTA

SEQ ID NO: 185571 - protein, 347 aa, unidentified
MKVLIGVDPHKGSVAVAAVDEAKGELLERAGFPQSHAGLRALERWAKRFPERRWAMENSGGLGRHLARRLAAAGESVVDVPPKLSARVRVLSTGNARKNDGLDALAIALAASRNERLAPVDPEGSSEVLRLLSERREDLVAERTRALNRLHGLLRDLLPGGVAGKLSAERAARILRGIRSRGCASDRLRRRLASEILRDIRTLDRKIADLSGRIEAEIEVSGTTLTEIFGVGPILAATILGTVGDVARFPTKAHFASYAGTAPVEASSGEVVRHRLSLAGNRHLNYALHMVATSQARSDAPGGSYYRKKLDEGKSRKEALRCLKRRVCDAVYKSLVADSQAPSRSAA

SEQ ID NO: 185572 - protein, 353 aa, unidentified
MLIIGCDFHPGFQQVAIFDNRTAECQEKRLGHRAEAEQFYRSLRGQEVRVGMEACGHYPWFERLLAELGHELWLGDAAKIRAKEVRKQKTDRRDALHLMQLLIDDQFPQIWVPSLEERDVRQLLMHRHKQVQARTRIQNQLQALALSQGVQRKRKLWTQVGRAELEKLPLLPYAAERRQHLLQTLDRMQLEIEQLNQRVEAEVARRPAAVRLRTHPGVGPVTALAMVLTLGPAERFASGKEVASYFGLIPSEYSSGGRQRLGHISKQGNSFLRFLLVEAGQSAARYDPQLGRFYRRLAARKHRALAKVAVARKLVVRLYLMLREDWNYAQLCKAVVQASPSHSVVEKQKKPTA

SEQ ID NO: 185573 - protein, 351 aa, unidentified
MIVIGADVHKRKHTFVAVDEVGRRLGEKTVQATTEGHIAAIMWAREQFGTVLKWGIEDCRNMSARLERDLMGADQKVVRVPTKLMAQTRRSARRRGKSDPIDAESVARAVLREPDLPVASHDETSRELKLLTDRRDVLVAQRTSAINRLRWHVHELDPERGPAPRALKAVKHQKALQEWLQTAPGLVAEIARAELADVIRLTTEINALEKRLSERADDVAPMLLDLDGCAQLTAAKIVGEAAGIQRFKSEDAFACHAGVAPIPAWSGATEGQMRLSRSGNRQLNAAIHRIAVTQIRMQGSQGHAYYQRLIAAGKTKAAARRCLKRRIARRVYRALVANHQTRNQALQPTAA

SEQ ID NO: 185574 - protein, 346 aa, unidentified
MVLIGCDFHPSWQQVSWMNRENGEAGDQKLVHEPGAVERFYRQFPAGTRIGMEATGNCQWFVELVSGLGHKVLVGDAAKIRASDSRQQKHDKRDARLLLQLLVEDRFPQIWVPSREQKDLRQLLIHRYKLVRIRAQVKNGLQHLAMNQGVMKKQKLWSKAGEKVLRELPLAAWASRRREDLFKVREMLNGQIELLDQAVVEAAEKNEKARLLMTQPGVGPITSMAFVLTMGDVKRFQRGKQVASYLGLIPREYSSGGHQRLGSISKQGNTFLRMLLVEAAQGAVRCDPGFRNEYVHRCHSKPKGVAKVAAARKLAIRLYWMLRTNTGYPEVVRVESSSRVPLVSAS

SEQ ID NO: 185575 - protein, 435 aa, unidentified
MQVTRGMRRQSMKLARRRAILPVDALIAGVDLAKKESVVIFSRAADRCRLGKLTIPTDRTGIERLVARAAALRERHGLGELVVAMEPTSHFWKIVARALDAAGVRYVLVQSFVVAKSRELDNLTRDKTDARDAGLIADLAAELRFTETQLPAGPWADLDLLAEARDRRVVERGAALQEQRALLELVWPGLLLECPALDGTHLQALLRTGLTPGQIAVMPESRFLAVLRRHHVPRRFLRWMGRRLRTAARGVEPTPETTGAVLRWRLAAERVLAADAAIAELDARMAELLEATGYGWLRGQIRGLGDVGLTNLLALAGDPARFDDGRCLVKLAGSNPTERSSGERHASGGIHRRGRPTLRLVAYQAAISLVRYNPDFHARYQALIAEDRPRRLAKKQALVAVANKLLRTLWALAVTGVPYRSEIARGEVRPQSIAA

SEQ ID NO: 185576 - protein, 314 aa, unidentified
MYHYIGIDVSKKVLNVFDGKKDLVFENKENLSSLKKHLKKRYPDFSSLVILFEATGIYSYHLKVFCATHMVKAYIINPQTSHNFAKSLGKRSKTDTTDARTIWAYHKLINDKDIRIPRVDQRLMILSSYLASYRLTLKQRLSLANHLEGVKDKTLQRLLKKEQERLQRLEQELLMRMDTYIKQYPELKEDYQRLLSISGIGQKTAISLLVLFNTYPDTNRNQITALIGLDPIQRQSGTSVKGRSRISKHGNQMMRKSLYMPTLSCIRHNHKIKVFYKRLVTQHKPKKVAVIAAMRKLLLIAHAVYTNKTVYVPG

SEQ ID NO: 185577 - protein, 341 aa, unidentified
MDYYAGIDVSMEYSSVCVVDGTGKIVREDKVVSEPAALIGWFGSLGLSLARIGLEAGPLSQWLFAGMRNAGLAVELLETRHVRNAFRTMPVKTDRKDARGIAELIRLGWFRPVHCKSMEAQETRAILTARKQVQSKLHDIEMSLRGILRGFGLKVGKTTPKQFDARIRELVAGHPTLEAMAEELLGVHAALLRAFNGFEKRVRAMARQDAKARLLMSTPGVGAIVALIFASAIDDPARFRSSKSVGAHFGMTPKKYQSGETDYSGRISKIGDTSVRTGLYEAAHVMLTRPVKGSALKSWAMRLAKRAGMQKAKVALARKLAVIMHRMLVDGKPFNLAAQAA

SEQ ID NO: 185578 - protein, 430 aa, unidentified
MPGLNKKPMNESHQFKATIGLDWADQKHDLWIRPADGSKSEHLRLEQSPEALHEWAAKLRKQFGTGQVAIGVETSRGPVISALMTYDFLVLFPINPKALKDYRAAFSVSGAKNDRTDAQLIEEFIRLHSEKLKALQPDTELTRKLGGFVQDRRHLVDERTRIINQLHSKLKTYYPLAETLIGSEMNSLLAAEFLSRWPDLASLMAAQPSTIRAFFYKHNSRSAKKMEQRLEAIKTAKALTTDPGLIEPARELVLALAGMLKCLHKSVARLEQAIELAMDQHPDAPIFRSLPGAGPALAPRLLVAFGTQRERFQSAQEVAQFYGLAPVVIQSGNTELVRLRRRCPKFGRQTFHENASCVSKTEPWGRAYYEQQRKKHDDKHHQACRALAYKLIRIYFSCWKTRTQYKSNTYLNALQKHGSPLHNRLNRIGE

SEQ ID NO: 185579 - protein, 403 aa, unidentified
MYSSFVGIDIGKWNHQAAFLEVSGKETARSLAFQNTSEGFQSLLDSLAPFDKGQTVIGLEATGHYWLALFSFLVDNGWTVKVINPMQSDALRKMNIRKAKTDRKDCVVIADVLRFGRYTETVLPDEDLLQLRELSRCRVAHVELLGDLKRRVLGILDRVFPEFASCFSTVFGSAPTELLQECTDPEELADYDIDKLIKLLEKESRGRHSREKAEELKAKASRSVGTRFGRDALKFELKMLLEQLDFIKGQVKELDKFLKKLMKNHELIYTIPGISVTLGSAILGEIGDVKRFGTPQQLQAFAGMDPSVTQSGNFQGTQAKMSKRGSPYLRRAVYLAANAARRFDPVFKDFYDRMIARGKHPKQALAAVGTKLLRVIHAVMTSQKPYNPQKLLTPAARISQLNP

SEQ ID NO: 185580 - protein, 431 aa, unidentified
MLKINPLSTLYVGIDVSSKSNFVCALDFYKNKYINSSFANNQPGAEELAKKILECLKEHPDLNTIIAALESTSVYSIHIANFLSSCEELMHFKPYVFVLNPKCTANYKKSYIGLGKSDPIDAFVIADYARAGNIETEPWRGSQFLALKRLTRHRLHLVECMTREKTYLVSNLYLKFSELQMLEGDDRPFCDIYGATSSSVLTEYLSPEEIIDSSEEDLISFLAEKSRNRIKDISKTAELLRKAARDSYRLDKALYEPLNVSIASSFNCIETFKKEIKLIDTAIEREIKGLNPNAFIILQSIDGIGPVFAGGIVAEIGDISAFHSSDALAKYAGLTWKSNQSGDFDGEDTPMSKAGNRYLRYYLGEAANSMRKHNATYGAYYRKKYNEVPKHQHKRALALTSRKFVRLVYGLLARNQLYSGVSLDTSMKEPE

SEQ ID NO: 185581 - protein, 329 aa, unidentified
MEVSQAVVGLDVSKATLAVCHQVGAHLQHLEVANTPAGFRQLVRCGGATSLYVLEATGPYYLAVAYHLVAAGAQVAVLNPLVVKRFIQMHLGKGKSDRTDAQWLLRYGQQQATPRWQPEEAALVECRQLEHVIELLIRQKTMVYNALEALQMQPVVNPSARKPLQHILCQLTQQVRELEAKLLTSVELRYAREMALLGSIPGIGRKTAALLLLFAGGFTSFQNHRQLIAKAGLCPREFSSGTSVRGKARITKMGGGLIRSKLFMCSWSARKANTACRELYDRLVAKGKNGKLALIAVCNKLLKQAFAIVTSGIPYQADFAKIKAPTLAF

SEQ ID NO: 185582 - protein, 361 aa, unidentified
MNGTMTWVGLDVHARSTHGAAIDALTGELERVRFGGGAEPVIAWLAGLPAPVRAAYEAGPTGFGLQRVAAAAGISVQVVAPGKTPRAATDRVKTDRKDAELLARLLLAGQLTPVFVPPGWLEAMRHLARRREQVRGDVMRARHRISKLLLVHGRVWEQPTAWTQRHRRWLAAQTFEHEPTELAFVDALAALDGLMARREVLDERLGRLALDERVWPTVSRLRCFRGIDTLTALTVHLELGGDWQRFSSARQVGAWLGLTPSLAQSGESSTSGAITKTGSGLARRLLVEAAWHYARQPSVGVTLAHRQAGQPDHVLAIANRAQRRLHRVHQRMRDRGKPHNVITVAIARELAGFLWAAATAP

SEQ ID NO: 185583 - protein, 317 aa, unidentified
MGQASTIGLDIAKWVFQAHGADATGRVVFRKRLVRAKVLEFFAGQPPCLVALEACGGAHYWARELGKLGHTVRLIPPAYVKPFVKRQKNDVADAEAICEAAQRPGMRFVPVKDEAQQANTVVFRARDLLVRQRTQCINALRGHLAEYGHVVPQGPAHVDSLVALVEDPKSSVPESARGILQVLIRMLNALEEQLKELDGEIARRAKADPVARRLMTIPGIGPIAATAITALVPAPEGFRAGRDFAAWLGLTPLQKSTGGKHKLGAISKMGERTIRRLLILGASAVVRWASRRGAAAGSRLARMLAGRPRLPVTTALA

SEQ ID NO: 185584 - protein, 311 aa, unidentified
MTEHTIGVDISKSHLDVFDAERREAKRFENSISGFRGFEKWLGKAHIARVVYEPTGPYHRNFEERFCDKLPLVKVNPLQARRFAEACGTRAKTDALDARGLARMGGTLELEPDIPVAKVTRILKDLQVARAALIKERTRLNNRAHVQTNPVLKRQTKARLALVEKQLCELDREIDALIKADKTSARRRQIVQSIPGLGSVASAAILTYLPEIGTLDRRQVGSLAGVVPYNRDSGQWRGKSFISGGRKPLRDALYMPALVAMRYNPDLKAKYEALRAAGKPAKVAIVAIMRKLIETANALVKADRIWVQKTS

SEQ ID NO: 185585 - protein, 344 aa, unidentified
MKVTTLGIDLAKNVFQLHGVNEFGKPVIKKQLKRDQMADFLVNVPPCLIGMEACGSAHYWARKLQGFGHTVKLMAPQFVKPYVKTNKNDAADAEAICEAVTRPNMRFVPIKSVEQQSVLALHTVRQGLVKARTAQANQIRGLLSEFGVIIPQGIGHIANRVPELLEDASNELPGAFRVLIERLLDHLKALDEQVKELEAQIVKWHRQSELSSKLAGVPGIGPITASALVASIGDAKNFDNGRQVAAWLGLVPRQHSSGGKQNLLGISKRGDIYLRTLLIHGARSVIHWESRKPDCCSWVSGVLKRRNKNVAAVALANKNARIVWALLAHDREFRADYVSTKAVT

SEQ ID NO: 185586 - protein, 367 aa, unidentified
MKKISTAAAKQIRNFSEQKLTIGLDLGDRSSWYCVLDEAGEILLEQRLATTPKALNEVFGGMPRSQIALEIGTHSPWISRLLSELGHEVIVANARKVRLIGESRKKDDRLDAQTLARLARIDPELLYPVKHRSVQAQADLTLIRARAGLVRARTGLVNTARGLAKSYGERLRGCNVRNMNPEKAEGLSAELQRALEPLLSAIEELSERIGEYKDRIEALAQTSYPQVELLKQIKGVGTLIALTFLLTLEDPHRFRKSRDVGCYLGLQPGRRNSGQSEPQLHISKEGDPYLRTLLVQGAQHILGPFGVDCDLRRWGLKLAERGGRNGKKRAIVATARKLAVLLHHLWVSGEVYEPLHHASRMTATAAA

SEQ ID NO: 185587 - protein, 428 aa, unidentified
MLKHHTQSDPAQDFAAFLALDWADEKHAFRLQVVGQSKIETGALEQKPEVLGPWLAKLRERLGGRPIAVGLEQSRGALIHALMAYDFLVLYPIHPTTVAKYREAFKSSGAKNDPLDAGQILEILTKHQDRLHRLNPDTVETRLLGRLVEDRRKAVDLRTTHLQALGANLKEYYPQALELTGGNLRSRLACDLLLKWPTFEDFQQAKPSTIKRFYYGHNVRSPEVIERALALAKKSPPLTTDPAIVESGRRLSQMYAGLIQALNPAIEKYDQRIQRVFDAHPEAKLFIGLPGAGPALAPRLLAFFGTDRSRYAAALNVQSFTGIAPVTKSSGKSKVVHARAACPKFDRQTFHEFSRLSVTKCQWARNYVQYYTDKGKKYHTIIRALAYKWIRILFQCWQERTPYSEDKYLQTLKKRGSIFATLHLQKTS

SEQ ID NO: 185588 - protein, 308 aa, unidentified
MTIPSSWIGIDISKAWLDIADAGKAVRLANKPTPLAAWTASLQGRDVIVVFEATGHYDTAPRHALAASGIAHARVNPQRARDFARACGRLAKTDTLDAAMLAEMGRALCLQPDPPPDQTLETLALLNKRRDQLVAMRQQERARRSDQDNPQIQADLETHIAWLSQAIVDLEAAIHDLIEAAPPLAEAEALMRSTPGVGAVTAATLIALMPELGHRSHKAIAMLAGLAPVNADSGQRRGQRAIRGGRRRVRQALYMAAVSTLRNGSPFMPFYNKLRQAGKPPKVALIALARKILVTLNAIIRKGKPFAA

SEQ ID NO: 185589 - protein, 402 aa, unidentified
MNAVGIDVSKGKSMVAIMRPFGEIVSAPFEIKHTASDIHSLVELINSVEGESRIVMEHTGRYYEVLAHQLLEANLFVSAINPKLIKDFDNDSLRKVKSDKADSVKIARYALDKWQNLKQYNVMDELRNQLKTMNRQFGFYMKHKTAMKNNLIGILDQTYPGVNTYFDSPARSDGSQKWVDFASTYWHVDCVRKMSLNAFIDHYQNWCKRKKYNFSQSKAEEIYGKAKELVPVLPKDAITKLIIKQAVDQLNSASTTVESLRTLMNETASKLPEYPVVMAMKGVGTSLGPQLMAEIGDVSRFTHKSAITAFAGVDPGVNESGTYEQKSVPTSKRGSADLRKTLFQVMDVLIKTHPQDDPVYQFLDKKRAQGKPYYVYMTAGANKFLRIYYGRVKEYLSSLPES

SEQ ID NO: 185590 - protein, 322 aa, unidentified
MNRSILGIDIAKQKFDVALLRGAKFKTKVFANTRTGFEALQKWLLEHQVDCVHACLEATGAYWQDLAEWLHDAGHVVSAVNAAKVHAYGRSELSRTKTDRQDAKLIARFCQAVQPGPWQPKPIEERELFALVRRLDGLTVMLTQEQTRLDTAHPAIASDIEAHVQALERAIEALRQRIHDHIDRHPGLRAQRDLLASIPGIGEATLAQLLARWSTLAQMTSVRQWVAQTGISPRERSSGSSVRGSGRITKLGDARLRKALYFPAIVARQHNPVIRSFAERLQARGKRPLQIVVACMRKLLHIIYGVLKSGKPFNPAHALAAI

SEQ ID NO: 185591 - protein, 341 aa, unidentified
MNHYVGIDVSLEASSVCVVDVNGKIVCESKVASEPETLIAWLSGLKLELTRIGLEAGPLSQWLYAAMRRSGLAVELLETRHVRTALKTMPVKSDRNDARGIAQLMRLGWFRPVHCKSMAAQETRALLSARKLIQVKLHDIEMSLRGILRGFGLKVGLTTPARFEVRINELVAGHPSLEAIAAGLLAARTALRREFDRFEKEVRATARRDTQARLLMSVPGVGAIVSLTFTSAIDDPARFKSSKQVGAYFGLTPSKYQSGETDIDGRITKIGDAWVRAALYEAANIILIKPLKGCTALKSWAMKLAKRSGMKKAKVALARKLAVIMHRMLVGGTSFRDAAAA

SEQ ID NO: 185592 - protein, 424 aa, unidentified
MKVTYQTCCGVDVHKSFLVATIVKTTGGIEPSYQKKRFSTFNNSILEFKQWLLDNDCHDVCMESTGKYWVPVFNLLEDEINVVIANPKWVKAVKGNKDDAKDSKWIGDLFRLGLVKGSYVPCKKVRILREYTRYRYKLVSCRSSEKNRYQNALTVCNVALDSVVSDIFGKSSTSIIDYLLEQSGSSINHEEIASKLLRSLKSKEDAVIESIEGYQMTDAQKYRMRLIRAHMDYITAEINDVDKMIENMISSNPDFKNAVQFLCTIPGVKRDSAITIISETGTDMSQFSSSKRLCCWTGLTPGSNESAGKKKSVRITRAGVYLKPALVQCAHAAVKSDKSPYYKKKYESLVERRGKKRAIIAIARMILTAIFQMLTTGETWNPCDLYKIDMPEALLEKQKQKAIKQAQKLLIREGLLPPTEPIAS

SEQ ID NO: 185593 - protein, 352 aa, unidentified
MSEYSNFIGLDLSDRTARFCVLDGAGDEVATGSVVLNGDAFERAFGGYDNAVVALEAGTGSAWVSRTLAAQGHGVVVANARKLGMIYMNERKSDVRDAEILARFVRMDPKLLHPVTHRGERAQADLSCVRSRDLLVRTRSSMISNVRSMVKSFGHRLPPCSTPYFASRVKAHIPVVLEAALLPMLEIIAGLTQQIKDFERLLEKKCREAYPETELLLQVPGVGPITALTFVLSLEHAERFEDSRDVGAFLGLVPRRDQSGNMERQLRITKAGDGYLRKLLVGCAQHILGHFGQDSALRQWGLKLAERGGGNGKKRAVVAVARKLAVLLHHLWANGIVYEAFPQQEVLEAQNV

SEQ ID NO: 185594 - protein, 452 aa, unidentified
MKKENSIAMPVINEHVAGIDVGSKSHYVAVGQSEEDVRKFNVYSKDNDALVAHLKEKGIKTVAMESTGSYWQTLYSCLQAAGFEVVLSNNYIKDPQRKTDTKDARWLQRLHSLGLLKGAFIPSLDIERIRTYHRQREKIVALAASCQLKMQKALRLMNIRLDIALSDITGLSGMRMLEAIVQGERSGQKLASLAHSTVKKSREEIADALQGQWKDEQLFILADELEAYKIYQTRIAAYDKKIEELLKDAVSQLPVAAEKSSKKPSKRKPRKNMPAYNVEKLSMQYFGVDLLKVEGVGQSTVMTFISEVGTDINKFPTKKHFTSWLRLAPNNKKTGDKTFSTRTPKGKSIMANAFRLAANTISQRRRGVLKNTFVRIAIKKGRAAAITALARKLAEIFWIMTVKKVSYIPPDEHEYALKIKENTIRNICSKMKRLNIGTEDLVFNGIATPSLS

SEQ ID NO: 185595 - protein, 410 aa, unidentified
METLHALQQVTAGIDVHRMLHVVTVLIEQDDGTVRKEQRQFGGFKRDKRAMATWLTSLGVQLVVMESTGIYWKSPYAFLEQAGITTWVVNAHHVKHVPGRKTDMADSEWLAVLGRFGLVRGSFIPPQDLRELRLVSRYRRKLASTLAAEKNRLHKTLDDAGITLGAIVADIDGVSARRMIEGLIAGQDPAALAGLGLGKLRDKQDDLALALDGELSLRHRFVLQQLDAHIRFLEQRLTDIDQTLFHAMQPYDWAWRLLQTLPGIDQLAACLILIEIGDDLSHFGSADRFASWAAVCPGNHESAGKRKTGKTRKGNAVIRSILCECANAARRTKSVFADKYRSLVVRRGHKKTIVALAHKLIRTIFFLLTRRQPYRDSGFDYAAANVAKNAPRWIKALKKYGHWPQVAATT

SEQ ID NO: 185596 - protein, 408 aa, unidentified
MLGWVADGQEVGFTIRNLTSRIKMSKLNRTDTSAAAEYATVYVAFELSKARWKVGVMLPGSQRVSRFTIDGGDLTALSAWLAKWRARAEAIGKPVRIISCYEAGYDGHWLHRWLTSQGVINYVIDPASIQVNRRARRAKTDNIDLEQLMRTLLAYLRGEPGVCSMVRVPSPEDEDRRRTSRERDRLLKERSSHSNRITGLLHAQGIRDAMPFKRGFIASLDTVRTGDGRALPARLKAEIVREHERLCLVHKQIIALEAKSKAEVRAAVRGSVEEKIKDLIDLKGLGVVSAQKLMHEVFYRSFDNRRQVGSYFGLTNSAYDSGDSHRDQGISKAGNRRGRTLAVELAWLWLRFQPGSELSRWFNERVGSIKGRIRRITIVALARKLMIALWRYVTTGVVPTGAVLRQSV

SEQ ID NO: 185597 - protein, 413 aa, unidentified
MEVLYPHCAGLDVHKDTVVVCVRHMVNGTVSREVRTFKTTTKELLALSEWLATEGCTHIAMEATGVYWKPVWHILNDGDFALVLANAAHVKNVPGRKTDVNDATWLADLLAHGLIRGSFVPDQQTQEMRDLLRTRKHLVREASRHIQRLQKTLEDANIKLDSVISDVMGLSGRRMIEALIAGQSDPEELAQLAHRRIKASPEELREALRGRVTRHHRFLLSLHLQQIDAVDAAIGAIDQEVDAQIEPFRTTVHLLTTIPGVDELSACVILAEIGRDMSRFPTAGHLISWAGLCPRNDESAGKRRSTRMRKGAAWLKTTLVQCAAAAARKKASYLQALFHRLRARRGAKKADQIEQGHRFALQGMDNVLVIDDVAVFAAWLRAPPAQAHQRRRAEKAFQPIVVKPHPQAMADQP

SEQ ID NO: 185598 - protein, 342 aa, unidentified
MRENRSIGIDLHRKRFTCCVRLENGRNYLSEWSLEQLPQFVSKLRRSDEIAVEVTGNTRWFYQAVAPHVARIVVVDPNQFRVISHSVKKTDAHDARNLALYLAKGLLPEVRMKEKEQAELASLTQTRDRLVKLRTALKNKVNHLLSARGIELAKESLSSEKGLTWVLEQKLEPLTQFELEVIVEQIRSLNGSIARLEGAIEEAGKKLGGYSNLTSIKGIGSLGASILLSVIGNVNDFAHEGKLAAYFGIVPRVQDSNQTEHRGRITKRGSKLGRTALVQCALIAQRYSPYLHCYYERIRARRGTGKAIIALARKFLGVIYHTLKNNWIFEDFPNFVLAEAKT

SEQ ID NO: 185599 - protein, 409 aa, unidentified
MTILAIDLGKGNSVACVYEAGSDAHRFVRFETTPTDLRRLVYRIRPERVVIEVCPSAGWVVDLVRGMGIAVQIVHGNHDGWRWRNVKRKTDRDDALKLARLSAMNQVSEVYVPLRRVRQWRSLIQARQSVVKRLRRTKNRIRSILEREAVAWPAEHKGWTRGRLIMLREMACPLSEANVDDLWRGELHVELAMFDQAMLALREVEQRLDALAQQDARVQLLETIPGMGRRTAEMIVAVIDDPLRFKSGKQVGCYLGLTPRQYQSGASNRQGRISGEGHKTLRALLVEVSWLGRRWNPRLRSVYDRVHRGSPSRKKIAIVATARRLLIWCWAMLRDGCPWDERLALDGSSSLGEPVRRGPLQPTLSAVATRFARTGASDGRQGPEPQGQSSSRSKISENQKVVAAQFFAC

SEQ ID NO: 185600 - protein, 272 aa, unidentified
MDHFAGLDVSVKETSLCIVDDAGRIVREVRVASEPEALLAVLTNPACHFKRIGLEAGPLSQWLFNALAEAGLPVICVETRHMRAVLKAQINKTDRNDARGIAQMMRVGLYRPVHVKTLRSQKLRMLLTHRKLLQSKAIDIENDLRATLRNFGLKVGVVGTVKFEARIKELVDNTPDLVVLVEPLLIVRRVLREQIGILHRRLLAIARDDAVCQRLMTVPSVGPVVALTYRTTVDVPSRFRNSKAVGAVFGLTPSKHQSGESNRTGGNITVRR

SEQ ID NO: 185601 - protein, 413 aa, unidentified
MNSYRIAGIDVHKKMLAVVITDIGAEGELVFEQRRFGATPEQLRLMTEWIIGNHIQSVVMESTAQYWKPVWLALEGKCELHLAQAYSNRAPKGRKRDFQDAERLVRRLVAGELVLSFVPEREQRLWRTLTHAKHQLTREKIRALNQLEAFLEDARIKLSSFVSALKGVSSRRILTALSQGETDAGKLARLADPGLRASEEQLRDALSEAATLDPCYRAVLEVFLTRIESAEQHIERLEKLIAERLKQHNDAVVRLAEIPGLGPDSAQQIVAEVGPEAAAFDSPDQLASWIGVCPGREESAEVSRNDRSPKGNRAMRRILNQAANAAVKAKGSAFELLYRRLVGRLGHKKAVWAVAHRMARIVWKVLHDPVRYVEKGIRANPAAARKRASRLISQLRRMGYRVQIIAVTSEVAA

SEQ ID NO: 185602 - protein, 367 aa, unidentified
MNGNEACQTAIERAADVFVGIDVSKLKLDVARLRLSKVRNKVFSNDRTGFSALAAWLSEDNITPTQAHLCMEATGPYSEALAVWLSDEGWKVSVVNPARVKGFAQSELTRNKTDKADAALLARFCSALAPERWCAPIPAVRQLRSLVERLQALKDMHQQEMNRLEAANASDDQLAKVYIAEHVSYLEAAIKRLQSDIDDHIAGQPELRADAQLLASIPGIGAVTVAKVLAYAGNVNRFDNAKALSAFAGVCPQQRQSGTSVKGRTLVSKRGHADLRKALYMPGMVAIRHNPLVKDMAERLKAKGMVPKAIIAAAMHKLTHLIYGVLKTRQPFVANWAKNADEVMEVTMSVVMPAKFDAPALDFQDGI

SEQ ID NO: 185603 - protein, 424 aa, unidentified
MKFKMQDKQNQLIERISDKHLVVGVDIAQQLHVARAVNFRGIVVGDPLTFVNNEEGFATLLHWINNLQRLNNLDTAIVGMEPTGHYWINLSKWLFKQNIEVVTVNPHLVKRNKENRDNTQSKSDKKDALVIADMVKNGYYAIVRPTSESFEKLRVLMSNRDVVVKRLVSSINQLNRWVDIVFPELREVFKDITGKGAIATLRLFPSPMELRSMQPHEVVTGWKSLMKRQPGLKKAQLLLEVARKSIGTRQALDAHKFHLEQLLEEYDLAVVQLERVEKEVKDVLNQIPYAKKLLTIKGISDISLAGILGEAGDLSGFSHGNSLLRHAGLHLVEASSGKWKGQIVISKRGRSRLRRFLYLATMSLVMNNPEFQAIHSNNVKVKKMKKMKSIMKLVGKLARIFVGIARRNEAYCPEKVQPLTELAS

SEQ ID NO: 185604 - protein, 461 aa, unidentified
MNRKKPTGKQKGSAQKRVDWKALEIVHPDAAGIDVGGSEHWVAISPDRDPEPVRRFGCFTADLREMGRWLVEKGVRSVAMQSTGVYWMPVFEVLEEQGLEVYLVNAQHTKNVPGRKSDVQECQWLLKLHAFGLLNNSFQPTDEIRIARTLWRQRSNLVAEASSVIQRMQKVLTEMNVQLCNVLSDVSGMSGMKIIGAILEGERDPWKLATFVEPEVKAKPEDIAKSLEGNWREELLFVLRQHVELYRIYQEKITDCDLHLRKHLESLGSKVDLKTQPIGNRPKGKKNSKNAPGFDLRTELYRITGIDWTQINGIDVLTAQTVIAEAGADLSAFPSEKQFASWLGLCPTNEQSGGKILNRRTRKVVNRATVAFRNAALTLLRSQSYLGAQYRRLRTRLGAPKAITAMARKLACLFYRLIKHGRPYVDKGTEYYEAKYREQQIRSLAKRAQKLGLQLLIPKTA

SEQ ID NO: 185605 - protein, 343 aa, unidentified
MNISRIGIDLAKNVFQLHAVDCHGQVVWKRRLKRDQLLKAILNQAEPGCEIGMEACGGAHHWARELQSRGYSVKLMAPQFVKPYVKSNKNDANDAEAICEAMNRPNMRFVTIKSVEQQDIQATHRVRSELMSQRTAKANQIRGLVAEYGLVAPLTLCALRAAIPCWLEDAENGLTDHFRSLLHGVWSDLLALDDRVLELDRGIRKLANSNLVTQRLQQLRGVGPLVATALVATVGDARQYHRGRQMAAAIGLTPRQHSSGGKDRLLGISKRGDVYLRSMLIHGARAVVSQAKHRDDRLSRWAIGIAQRRHPNVAAVALANKTVRMAWAMLRNETDYDPDFAMS

SEQ ID NO: 185606 - protein, 434 aa, unidentified
MPPALPFGNESHYVAVPPTRDSEPVRRFGCTTAELKSMADWLKQCRIRTVAMQSTGVYWIAVFDILEEAGFEVYLVNARETKNLPGRKSDVQESQWLMKLHTYGLLRNSFRPSQEIRTMRTYWRQRNDLVQAAARHIHRIQKALTQMNVQLANVLTDVSGLTGQAIIKAILAGERDPHKLAAFRDPRVKATEEEIARSLEGNWQEDLVFVLKQEQDAYEFCQKQMAECDRRLQDYLKQRKDRSAGADLPEEKRKTRLKNKKGNKPQFDLRRELFRMTAADLTRIDGIDVMTAMTIISEAGWDMSKWKTEGHFVSWLRLCPDNKISGDKLIGKGRLPSNNRVTIALKMAASSLRTSHSYLGAQFRRLKTRLGAPVAIKAMAAKLARLVYRMLSHGMQFIDRGADFYEAQHRHRQIHALKWKAARLGFQIIEAPAA

SEQ ID NO: 185607 - protein, 347 aa, unidentified
MAFIGVDLHSNSFTICRLEPDRVESFETFGLSAADIERFCLGLDADDEIAVEATSNAAWFCGEIRACVGRVVVVNPRKFEVIRRSASKTDRNDARALAFFLSKDMLPQTRLRSTAEAELGSLVHSRDVLVKQRTMLLNKIHALFARHGWKLRKEGLTSRKRLRELDLDRFTPLEQVELGALRDQALSLSETIARLDRAIEAAGAEMEGFEGLTSIKGIGPRSAAILLAGIGNVDDFENADKLAAYFGIVPRVSQSNETDTRGRITKRGDKLIRTTLVQCTLVARNYSGYLNAFYQRIKERRGAGKAIIATARKLLSIIYDTLRNGWVFDDFTQFKIKEKQSPAGQPS

SEQ ID NO: 185608 - protein, 417 aa, unidentified
MKNKVCGADIHKKFLVATILSRDETKISERFGMTLDEILKFKEWVIANNCEQVAVESTGVYWVPIYTVLEDKIEVIVANPYQIKHTPGRKTDLRDSEWIAELCLKGMIEPSRIFPKEDRELRTLTRARESLVNNITQFKNRIHQTLETSCIKLSSVLSDIFGKSGRYILDGLLEGKTIEEILNGIKLKTIKKKEQQLREAIKNSLDSAQIPVIRNYLELIEEFQKNIKTLDTEIMSRIERIRKDVEIAMSIPGIAFTSASSILAEIGNYRDFENGNKLAAWCGLVPSIYGSAEKRIMGSITKQGSKHVRRILVQVAHAISRTRNSKLKSFFQRIKAKKGTKIAVVALARKVLCILHHLLVNREMFEESGNKKPKHPLKFDRTSSPIQITEQDMIDALVKAGYIIKKMDKGGWKRERI

SEQ ID NO: 185609 - protein, 338 aa, unidentified
MTCYSGIDLHSNNSVVLVSDAADRVLYQRRLPNDLPTILAALEPHRGELAGVVVESTYNWYWLVDGLQAAGYRVHLANTTAMKRYEGIKHSGDETDAAYLAHLLRLGILRTGYICPPDERAVRDLARKRLQLVRTRSSQVLAVENIVARQTGAGISANVVKRLERETVAALNLPEDVRRALAANVAVIKTLNAEIGKLEARLRERVRLRTPFRLITTAPGIGEVLGTTIMLEAGAIERFAAVGNFASYARCVDSKRLSNGKKKGEGNVKNGNKYLAWAFIEAANFARRYCPEAKRFYERKKARTNNIVATKALAHKLARACYHMLKEGKTFDVKRCFA

SEQ ID NO: 185610 - protein, 422 aa, unidentified
MHKERRWFVGIDWGSQEHVVSLCDDVGKRIGQRKFAHGGTGLTDMIAWLLKESGGKPGEIHVAIETPHGPIVEVLLERSCNVYSINPKQLDRFRDRFTVAGAKDDSRDADVLADSLRTDMRAFRKLSSVDPTIVELREWSRIDEELKAEHVRLTNRLKHQLWRYYPQIYELANDVGAGWFLDFLEALPTPEKAAKTREKTVARILKQYRIRRFDAAHVLGELRKPALTVAPGTVEAATAGIRILIARLRLINSQLVDAEQQLDRLCKKIVGPVAGEEGENTPGQKNELRDAAILDSTPGIGRTVLASLLTEASDALQRRDYHALRALCGTAPVTKRSGKSCLVSRRRACNRRLRNAVHYWAHNAVQHDATSRAKYEALRAKGHGHARALRSVADRLLNVVCAMLRSGTSFDSSLASKKQAGA

SEQ ID NO: 185611 - protein, 389 aa, unidentified
MIYIGIDVAAKKHACCILAESGKVHKQFTFSNDISGFEKLHKALLTPSETKIGLESTGVYGNNLAEFLRRNGYETHIFNPLLVKKSIQATTLRKTKTDKSDAKHIAQYTKEHSQPNLEPSYHISELKSLSRGRFSLVRERSKVKAQAKGLLVQLFPEFSQAFSDVFGAAASAVLKQLPSARMISQCPVGVLTDLLRTASHGRLGKVKAELLIDLAEHSVGIQSMALELQTQMLLQQIDLFTIQINRYEAAIKSEMETIQSPITTIPGIGCVLGAAILSEIGDIRRFTTPAKLQAYAGVDPSVGESGTSVSTPGRMVKHGSHYLRWALCQAARCVSLYDPIFAAYMKAKRDEGKHYCVACTHVAKKLTRVIYSILKNNTAYSLTYSQIGA

SEQ ID NO: 185612 - protein, 402 aa, unidentified
MRFAGIDIGGERHAAAVVDETGAVLVKSTFFGEEAAGYQLVRDLLDDPDGCVVAMEATGHYWRNLFAFLVGHGFKVALLNPLRTRRFAEEELERTKTDSVDAVGIARFAAQKRPVPTPLADEVTAELRELVRLRTRYVDEHSDRMRQLHRSVDLGFPEFTRHARLNTMLATAILARYPTARSFASVSVRKLARLAYDGRHQVGEVLARALIDTAKISVGSHHSEAYELQVKYTCSDMELLRNRVKQLDQDIERKLQSHEVGKLLTTIEGIGARTAACLIAELGDPGRFRDAAALASYVGVVPRLRQSGKRAFTGARGLPLGNARLRHRLWMPTLVAVRKNPWLRAHYEPLLAAGKRPKVAIVACMRKLLAAVYSVARNRRPFVSHVPGNGDLLVATTDSELT

SEQ ID NO: 185613 - protein, 416 aa, unidentified
MSFALPEALFFTGIDWAAETHAVCVMDAGGTIVAGFTIEHSADGIALLTGRLARYGTPGSMPVAIERPNGRLVDLLLEAGHPVVPVSPNAIKTWREGEVLSGAKSDAGDAAVIAEYLRLRQHRLRTAVPYSDETLALRTVVRSRGDLVEMRVAATNQLSALLEAHWPGARAIFADVESPISLKFLTRYPTPAAAAHLGEKRMAAFLVKHGYSGRRTAAELLARLRAAPAGTSRESLTEALRDAVLAAVGVLAALNAAVKNLDRSVAAHLGEHPDGAIFTSLPRSGQVNAAQVLAEWGDCRQAYDGPDSVAALAGCTPVTSQSGKHRSVQFRWACNKRFRVAMTTFADNSRHASPWAAKTYSDARASGKDHPHAIRILARAWIRVIWPCWLEGIPYDPARHGAAAALARQTAQPIAA

SEQ ID NO: 185614 - protein, 350 aa, unidentified
MVIVGIDAHKRTHTAVAVDEHGRRLGAKTVPTTSAGHLELVRWVARFGEHRFAVEDCRHLSRRLERDLLAAGETIVRVHPKLMAQLRRSAREFGKSDPIDAVSVARAALREEDLPTARLDGPERELRLLVDHREDLVNERTRSQNRLHWHLHELDPSLVLKPGSLDRYVVLDRLAALCEMHQGSTVATIAAELIELVRAKTRRINELERQITALVSDLAPSLLALEGCGALTAAKLLGETAGVRRFADPGRFARFNGTAPIPVWSANKARFRLNRGGNRQVNAALHRIAVTQLRVGPGRDYVTRAMGRGKTKTEAIRSLRRRLSDEVYRRLTNDELARNVAGMTRVAEAA

SEQ ID NO: 185615 - protein, 360 aa, unidentified
MPTTHPYDLVIGLDRSDRKADLNLIDTRTGNAQKQSVATSPEALHDWLARLRQDHPQERVAICLEQPAANLIVFLETYSWITLYAINPISLQKFRQTFVTSRAKDDGKDAQYLAQLLLNHHDKLKAWQPDDTQTRQLQQLVSHRRAVVDERTGLTNRLKALLKQYFPQALDLCGEDLWRPLATAFLLKWPTLQSLKKAPKESLKEFYYLQGSRSQKLIEQRLERMEKAVPLSEEFALLQSYTLRVQLICQELQLLLKTIDQFDQEIANVFQQHPDREIFEALPGAGPVLAPRLLASMGSERERYARPENLQCLSGVAPVTKQSGNKCSIHRRYLCPKFLKQSFHEYAKESILHSHWAAAY

SEQ ID NO: 185616 - protein, 460 aa, unidentified
MFEETRKMMELFEEAGCRKVLVVGMDISKNKFTLAAVNDMYENKIKARDINLNKESLNKLYKELDKIIEKEEIEQLIFGCEPSGIYYKPVMKELACRYPTAMFRLVNPSSTKANRDQRMEREKTDPIDAYAIVDLLIRGEGYDLNFGDNIFNIIGVYVKELDHLIKEIVRLKNKIHAHTDELYPGLESETSSFLDSQYGIRFLKVLPKPEMLPGLGTKDWQLLLNTKDYKLPKHLAERLKQKSSQIIVTKHDNFKIMRDYIAFLVEGYEQLIKRKQIIEKNLEELIDTLNFGINLKEIKGIETLTVARIIAYMGNPYMFRSGKQVASFAGLFPKADQSGKQDKNKILSKQGHKKLRAVLVQAAQQVINSTGYFTAYYNRLVIENRKAPMVAIIATANKLIRVIMKMIHSGEKFNPPTAQNKEMAKGKMNRLTSKKLKELHKNKGLDSLTQDIKELYPVRV

SEQ ID NO: 185617 - protein, 414 aa, unidentified
MSTGYRFVAGIDVHKKMLAVVVRQEADGRTQYQKQQFGTTRREVMSLAAWLQHQQVSEVVMESTAQYWRPVWYGLEAHFRLHLSHPLQTQAPRGRKWDYRDAQRLADRWCAGDLEESFIPAADQRAWRWLTRTRVDLKGKVGVVRNQVEGLLEQGGIKLTAVVSDVFGVSGWAMLERIVQGETAVAQIVGEARASLRKKKAQLEEALAGSLEPIYQLLLRQYMDQVRLLWQQIAAINQALGTAMQAHTATLCRLCRIPGVQMHAAQELLAEIGPTAAAFATAERLASWVGVCPGNQESAGVCYSHRGAKGNRYLRRLLCQIAWAAIHTKDTFFGGLFGRLKPNLEGRGAAWAVAHRIVKVIWLLLHEGVEYQERGPAPQDFRTLMRKLRRLTRQFAAQGIDVTSLLQSPLPAAM

SEQ ID NO: 185618 - protein, 345 aa, unidentified
MKSMYYVGLDIHKKTISYCVKQVDGRIVQEGVIPARRQELDRWMKQLPGAWIAAMEATLFTSWVYEHLKPHAQAVKVAHPAMLKAIAASKRKNDRIDARKIADLLRADLLPECYMAPAPIRELRRQLRYRNLLVRQMTQTKNKVSSLLMESGIEYNKQKLHQKKYFRQLLASAEHMPPSLPPLLELSRTTLDSFGKMEKQLIQGLEKDARLCQRLDCLMTIPAVGPITALTWALEIGEVSRFASHKQAVSYCGLCGAEDSSAGQLKRTPISKQRNQHLQTVLIEAAKLGPRLDRELARIHARELEHGNRNRATLAVARKLVGYLLAVDRRQSPFQRDRNTQQPAA

SEQ ID NO: 185619 - protein, 371 aa, unidentified
MVSTRKASDKFSTVAIDRLARGVKTVGERGSSRRLIPNIPNSCTDSQSVYRKAGSRKKAMSEAIYVGIDVSKETLDIGTSQGEHWTCANPENDYAELIERLRPVKLIVLEASGGYEGAVVGSLAAAGLPVVVVNPRQVRDFAKATGRLAKTDGIDALVLAQFAQRIQPELRPLKDEQTQELEAWLSRRRQILAMIVAERQRLAMAATSVRTDIREHIHFLVKRLKDTDRGLDELMRQSPLWREREELFKPVKGVGRQTLRTLCASLPELGKLSGKKIAALVGVAPYNCDSGTLRGKRRCWGGRAEVRSVLYMASVTASRCNPVIRAFYERLIKAGKAKKAALTACMRKLLIILNAMARDNSAWNETLHVTA

SEQ ID NO: 185620 - protein, 339 aa, unidentified
MKKRYMGVDLHRNCFTVYTREGDGRGESREWSIRSLKAFAKTVNATDEVAVEATGDVRLFLEALKGQGCRIVVVNPHQFQVISRSVKKTDEHDAKVLAEFLSKGLLPEVRMKDEVHARVASLAQTRDKLVKLRTTLKNKVNNLLAARGILIRKESLSSDKGLAEVLACEVSELERMELEILVGEIRHLNESIRKMEELLGEQGPKLRGWKNLTSIKGIGNIGASILLSTIGNIEDFADEGKLAAYFGIVPRVSNSNETEHSGRITKQGCKLGRTTLVQCALIAARYSPYLQKYYYRIAATRGTGKAIIALARKFLGIIYKTLKNNWIFEDFPRFVLANG

SEQ ID NO: 185621 - protein, 345 aa, unidentified
MKPITIGLDIAKSVFQVHAEEPSGKIVLQKRLRRSQVVAFFAGLEPALVGIEACGSAHYWGRELRALGHDVRLIPAAYVKPFVRRNKNDARDAAAICTAVRRPDMRFVAIKSVAGHASRGLERSRELLVRQHTQLINSVRSQLAELGIIAAQGRRGFAELTQCVAAGDERIPAMLLSVLHLMLQQIDQLRTASAAIEAKIMAVAKADPAMRRLATIPGIGGLTAHAIVTAIGDGRQFASSRDFAAWCGLTPRGASSGLKRREGGISRQGDIRLRKLLALGASTIIRSARSRTDRATEWQRGILARRPVKVAVLAQAAKTARIAWAMLTAGTTYRQPAAAAQPQPV

SEQ ID NO: 185622 - protein, 330 aa, unidentified
MNPQGGAAERIERPNAGIDVSKQHLDACWGNNEVRLGNDASGWKELTARLQADGVDLAVVEATGGYERGLVLALQRAGLTVARVNPRQARDFAKSMGVLAKTDSLDARILRDFADVLARHKDRAKFITPLMDEQRQVLNALMTRRRQLVDMRVAEAQRLEHADARALKSIRSVIKMLDRQLAEIDRDIDDHMDRHFKAQRKLLDSVKGVGAVTTLTLLSALPELGTLGRKPIAKLVGIAPLADDSGKRKGQRRIWGGRSAVRSALYMATLSAIRYNPVIAAHYQHLVQAGKPKKVAMVACMRKLLTILNAMVRDGATWDAVRHLQRPQSA

SEQ ID NO: 185623 - protein, 421 aa, unidentified
MQVLYERCAGIDVHKDQVTVAVRTPGSGPGRRDTQVRKFGAFYGVLREMARWLASQGVTHVAMEATGVYTMPVYHALLEPGSFEQVLVCNAAHVKNVPGRKTDAVDASWLAELLECGLLRGSFIPPEDIKAVRDVVRYRRKIVQERSSETQRLGGVLQDAGIKLDSVASSIDTVSGLAMIRALIDGERRGEILAELARGRMRSKIGDLSQALEGRFDDHHALMCQLHLDHIAQLNEMTAKLDAQVEAMMVPFARQRDLLTTIPGVGQVAAAAIISEIGSAPGEFFATAAHLASWAGLCPGNHESAGKRKHGKPRKGSQHLQPLLVECAWSAVRTNGRLKARYHRLVLRFGGYRNPAAKKRAIVAIAHTLAVIIWHVLTTGTTYTDLGPDFYATRSDPAKEAQRLIARLEALGHKVTLTPAA

SEQ ID NO: 185624 - protein, 401 aa, unidentified
MVSDFRKGRYNLMKIYVGIDIAKLNHFAAAISSDGEIILEPFKFTNDADGFQLLVSKLESFDKNSIIIGLESTAHYGDNLVRYLVAEFYQVCVLNPIKTCQMRKNNVRKTKTDKVDTFVIAKTLMMQDDLRFITFFDLDMMDLKALGRFRQKTIKQRTRLKIQLTTYVDQVFPEIQYFFKSGLHQNAVYALLKEAPSPKEIASMHMTHLANLLKVNSHGHFTKEQAKELRVLAQKSVGANDSAISIQITQTIQQIELLDSQLEKIEAEMTDIMKFNDSVIMTIPGIGYINGGMILGEIGDIHRFSNPNKLLAFAGLDPSVYQSGNFQAKTTRMSKRGSRVLRYALVNAAWNVVRNNATFKAYYDAKRAEGRSHYNALGHCSGKLVRVIWKMLTDNVEFNLK

SEQ ID NO: 185625 - protein, 376 aa, unidentified
MKRIKFVGLDVHAETIAVAVAEQDGEVRTLGVIPNREESIRKLVKKLGPVEQLCFCYEAGPTGYVVYWQLTALGAKCEVVAPTLVPVKSGERVKTDRRDALKLARNYRAGELTAVWVPDAAHEALRDLVRAREAAKKDQLRAKRLSKFLLRHGRRPASGVKAWTLNYLAWVKQEVHFEQPAQEATLLDYLHEVEHAEARIARLDLAIEEAVKSTPPKMKAVIEGLQALRGIAQVAAVTIVAELGEISRFPRARQLMGYGGIVASEHSTGESTWRGGITKTGNAHLRRVVVEAAWAYRHRPNVGGTLRKRQELVSEEIREIAWKAQHRLHTRYRKLTARGKEKGKVVTAIGRELLGFIWAIGIKVEAAQKETERRAA

SEQ ID NO: 185626 - protein, 347 aa, unidentified
MLALHPDLGAVIGVDTHKHTHTAAAVGSTGAVFDHLTVPADPVGYRQLITFGQRHHATLWAIEGTGSFGAGLTTALLARCQRIVEVDRPERPARRGGVKSDDIDAVRAARQALAGVGLSEPRRRGDREAIRVLLGTRAQAVEFRTRAISALHALVTSAPDGLRERLRTLPLGQLLRTCAGLRDSSRRSAEESATVVAMRSTARRALACEQEAAELEAQLDKMVRRLAPELLDQLGIGPIVAGQLITSWSHHGRVHSEAAFAKLGGVAPIEASSGTVIRHRLNRSGDRQLNRALHTIVLVRMRQDSATKDYVQRRLAQGKTIREIKRCLKRYIARQLFRQLEALPSTT

SEQ ID NO: 185627 - protein, 430 aa, unidentified
MKSNTQNAKIEAITEKTLVLGIDVGSEMHYARAFDYRGIEYSKKPFKFSNTEAGFVTFKEWILDLKERHEKDKVIPGMEPTGHYWFNLGKFLQDNEMKPVLVNPHHVKKSKELDDNNPTKNDRKDPKVIAGLVREGRYMIPYLPDGVYADLRTASNIRFQLQAELTRIQNRINRWFNIYFPEYKTVYGKPDAKSGMLILKAAPLPEDILTLGVDGVNQIWRDAKLRAVGKARAKTLIEAAEHSVGSKEGAVSARMEIRMLLEDYESRNTRLQEVMVLIEELVRKIPMAEKLLEIKGVGIRTVSGFLAEVGDISRFNNPKELQKLAGLALVENSSGKHKGETTISRRGRKRLRYLLFEVAMSLVAKNPEFRELHNYYTTRRLNPLKKMQSLMAIAAKLLRVFYAILTKGVGYDPKKMVNDIRRPAAYAQAA

SEQ ID NO: 185628 - protein, 358 aa, unidentified
MSMQQVPAHRRVVIGVDTHKHVHVAVAIDELGATLGNRSFAADTGGYLELIDWALAFGGKPTFGIEGTGSYGAGLASAVRRRDIGAIEVVRTDRRDRRLRGKSDSIDAENAARAVLAGQATAIPKTADGTVEMIRQVKVAKDIAVKARTAAMISLKQVIVNAPPQLREDLQPLSKMALINRCAALRPGQVTTILSSSKYTLRAIARRWQHLNEEISGHEKVLEQLTTQVAPDLTAAFAVGPDTAAEMLIVAGDNPERIRSEPAFARLCGVAPIPASSGMTNRHRLNRGGHRQANAALYRVVIVRMQHHEPTKAYVARRTAEGKTKAEIIRCLKRLLARELWAAMRPLRQPREASPEAA

SEQ ID NO: 185629 - protein, 411 aa, unidentified
MDVVVACCAGLDVHQASVVACVNSTGPGGRPHKEVRTFATMRDDLIALHDWLKEAGVTRVAMESTGVYWKPVYAALEDDFDTIVANAQHIKNVPGRKTDVKDCEWTSDLLRHGLIRPGFVPPREIRDLREVNRYRRKLAQVQAGERNRLIKVLETAGIKLAGVASDVFGVSGRAMIRALIEGKDTPAAMAGLARGKLRGKRTHLARALDAPLQPHQRLMLRTQLARIEQAETDLQRLDAALTEMIAPYHRQMRLLMSIPGVEWSTAVTIIAEIGVDMSAFVSAAHLASWAGLCPGNNESAGKRRSGKSRKGNVFLKTALITAAITGSRRGGGSYLGEKYRRLSARRGKLRAAVAIAHKILVSIWHMLSDGTFYQDLGAAYLDRLDRTRTARNLVRRLAAMGFDVQLQEKAA

SEQ ID NO: 185630 - protein, 341 aa, unidentified
MKHEINVLGIDIAKRVFHAVGMDDRGNVVYRKRLSRHDLLPCIAKLPPVRIGIEACGGAHYWARRFRAYGHEVKLMAPQFVKPYVKSHQNDSRDAEAIAEAVTRPTMRFVPIKDVDQQDIQALHRVRERLMGERTALVNEVHGLLHEDGIVIPKGVAKFRQAVVGQLESEKDKLTSLSQEMFWKLVDEFAALEKQLAYDQEKLEALATTHPACQRLMTIPGIGPLSATALVAAISDASAFKNGRQCAAWLGLVPRQHATGGKERLLGMSKRGDNSLRKLLIHGARATLRWVGRKPDRRSQWIRQLVERRGTNRAAVAVANKNARMVWALLTSHQDYQPATS

SEQ ID NO: 185631 - protein, 349 aa, unidentified
MTVYCGVDFHARMQTVSWMNNEDGEIKQKELNHCADDIRGFYRQFTGEVIVGIEAGGYSSWFEDMLERMGCVVWVGESSEIRRLAGRRQKNDKRDAAHILELMVSGKFPRVHRQSPESREVLGQLRYRHRLVKIRTMSTNCLKAIAIGAGLSEKKQLTTRKGRSKLENAGLSEVLSEQSKKWLELIDDVTKKIETVEGWLEQRAEGDQRVERLRTHPGIGLLTGLALVHTLEPVERFATTRKVAAYVGLDPMEDSSAEKKRFGKVSKAGSRLLRFLLVEAGQTAAKRDPQLKSFYRRVRDRRKSGKAKVAVARKLAVRSFIMLRDQIDYTEFLRRGVEARSSRKCTSTD

SEQ ID NO: 185632 - protein, 357 aa, unidentified
MLTISCLEGEVILGVDTHRDTHAAVLIDPLGRLLATETFATTRRGHRAMIAWAELRGTLRRAGVEGTGSFGAGLTRTLRLEGIEVIEVTRAARVGGRHRGKNDTRDAEAAARSVLSGQATAEPKARDGIVESIRVLRNTRASAVKARTQAILHLKNLIVTAPDELREALGELTNRQLVARCARIHRSRRRDSLSATRHALRSLARRHQTLDAEIAELDAILAELTARAAPRLLKESGIGPEIAARMLLVAGDNPTRLRNDAALAALCGASPIEASSGKTTRHRLNRGGDRQGNSALWLIANNRMIHHAETRDYVARRTAEGKSTKEIRRCLMRHIARGLFPLLIADLNDAHQQSALT

SEQ ID NO: 185633 - protein, 320 aa, unidentified
MNFLGLDIAKATLAVCLLCNLGQRQSSFPNTAAGFEQLKLWLEQHLPLPSEPLHACMEATGNWGLDLAVFLITLGIKVSIVNPKRIKAYGESELLRNKTDALDAALIARFCRAQTPDPWTPLAEGLREFREMVRRCAALKTMRTQEINRSKAGFVSSVAAESIKRMIEFIESEIEQISKDIRKVVRASGAMQDNFNLLVSIPGVGEVTAAVLLAELPNIADFSPKALAAFAGISPQEKSSGVVKRNGKISRMGNAALRSALYMSALSARRHNPTMVKFADRLENAGKCKKAVLIAVARKTLVLAAAVIRSQKPFNAELVA

SEQ ID NO: 185634 - protein, 360 aa, unidentified
MTKVTELDFTGTTIFCGLDVHKVSWRVNLRDTELELKDFTQPADADLLHKHLTKNYPGAKYKAGYEAGFCGFGIQRQLSGLGIECVLLNAADIPKGDKERRQKNDKRDARSISQELSTKKDLKHLYVPTPAWEHARTLVRNRQQQISDSTRCKCRIWHFLHFSSLPAPDKAETGQYWSRKFIKKLEDMDCGGSAELKAALQIKLQDYLHKRSLLLQSTRAIRSMYKQAAYWSLMQLILSIPGIGEINAAIILFELQDIVRFKTFDNLCSYVGLIPDTDDSGETKRNKGLTHRRNTYLREALIESSWVLIKKDPAMLMKYKDYCKRMHKNKAIIKIARHLLARINYVLRKQTAYVSGLLQG

SEQ ID NO: 185635 - protein, 387 aa, unidentified
MPQPNDLSRSHTALEQDTTLIAVIEMSQTSWLVAGIVPGIERQPLKKLAADEEALLLLLHRWRNEATRTGHEIKRIVVSYEAGRDGFWLARWLRARDIEAHVIHPTSVAVSREHRRAKTDRLDTELLKRAVLGWLRGEAGHCSMVAIPTIEEEDARRPNREHENLVGERTRLLNRMKATLARLGLRNFKPTLRKALEHIEALRTPEGMPLPSNTRAEMRRDIGRLRVVTDQIKEIENERLKRLDQAPEHRRNAMVLLLARVIGIGVETADMIVNEVLARNLRDRRAVARYAGLTGAPDESGRRRREKGLARAGNARVRRGMIQFAWRFLMFQKDSALAKWYRARTADGRGGFRKTMIVALARKLIIALWRMVTTGEIPEGVLLRPAM

SEQ ID NO: 185636 - protein, 402 aa, unidentified
MNCVGIDVSKGKSTIAVMRPFGEVVVSPFEVCHTVNELSELARQLKSLDGETRVVMESTGNYHAPVAWLLHDAGFYVSVVNAMLVHDYGNNSLRRAKTDKKDAVKLANYGLDHWLTLPRYVPEEDTRLMLKTCYRQYQQYSKVQTMLKNNLISLLDTAFPNANRLFTSPPRADGSEKWVDFVATFWHCECVCGLSKKAFTAKYQKWCRKHGYNFSQDKALDIYASACGRFGVMPKTNTAKLLVEQAISQLQTTSAALAALKQEMQSLAASLPEYPVVMEMFGVGPTLGPQLMAEIGDVRRFHSKKALVAFAGIDAPPYQSGQIDVRSRSISKRGSASLRRTLFLVMGVLLQCAPMDEPVYQFMDKKRSEGKPYRVYMMASANKFLRIYYASVKAYLDSLEHD

SEQ ID NO: 185637 - protein, 299 aa, unidentified
MNVAGIDVSYQTVTLVISQAGRMGKSREFKNTSQGHATLINRLRKAQVSRVGLEATGLYHLDLALDDAGLEVMVINPKAAKRFAEAMQTRTKTDAVDATLLAQFALRMPFEPWQRPDALALTIRACARRIAALNQLRTQTKNQLHAAEQTAATPDFLLADLQQSITQLDAQIEHLRQQVLDLIAADQDLQPTFELLISVTGIAAASAIQLLGKLLVLPHDMRAKQWVARAGLDPRQHQSGSSVNKKLRLSKAGNRYLRIALYMPALSAARHDPNVRADYRHLIERRGLKKIQAVCAIMR

SEQ ID NO: 185638 - protein, 343 aa, unidentified
MQTITTIGLDIAKSGLQVHGVDAGGQVVVRRQLKRRYVLMFFQKLSPCLVGIEACASAHHWSRELQALGHTVRLMPPAYVKPYVKRHKNDATDAEAICEAVTRANMRFVPTKTPEQQSGLVLHRTRHMFIRQQTSVINAIRAHLAEYGIVAPVGRHGVEELLTVVADVNDRRVPEIARACLSALGAQLRRMKEQILEFDRLIRAWHRSNEMSMRLEEAPGVGPVLATALVAAVADPKSFRSGRNFSAWIGMVPKQHSTGGKNRLGNISKQGDRYLRGLFVAGALSVIRYAKIHGTKHRPWLTALLARRPTKVAAIALANKIARMVWAMMARGERYKEPVALAR

SEQ ID NO: 185639 - protein, 407 aa, unidentified
MEKKVKKLYVGIDVHSRQHKVAMMLVQGYSLPQVDWKQARFLTIKNQAEDFNRLYSEIQGLTNNPRDVAIAIDHTGGHYSMPILWFLQDKGYRTYHLEPKAVKAIRERLLDEECKTDTIDAAGTAYLLYLRDYHGLSFRISAISPELKSRAFLMKCLILQRQMYIKMVTQCTNRLRQLLVTIFPEGEAKYFYQMLNILEQYPTPSDILTCQDINVSNKCKTWERIFALAHITVGAPIDIYRELIIDLSRKRREAREQCKAIELKLQKEVADHPYGNILLSFPRIGTISAATIIAEIKDIKRWPNKKKLKKALGVYSISKQSGSSLSVGRLGNEGSRHGRRVLFQVVFGYLDNRSSDNDFRDYYFRQIQISGKPKLKAIVSTMGKLVEIIYHCLTRGELYKYRGIYRV

SEQ ID NO: 185640 - protein, 343 aa, unidentified
MDYYVGLDVSLKQTSICVVNQAGSIVHEGVADSDPEAIASFVRSKAPGTVRIGIETGPTTTWLWTELKRLGLPVICIDARHAKAVLKMQINKSDRNDAAGIARIMQTGWFKEVRVKDLDSHAVKALLASRALLVKIKRDLENQIRGLLKNLGLVIGRAKFNVFAVRAEELIEDRPELVAAVRPLLDARKAIERQVGDLDRKVHKLARYDVQVRRFMTVPGVGPITALCFKATIDDPTRFRRSRSVGAYVGLTTRRHASGEVDWSGRISKCGDAMLRMYLFEAAGVLLTRVPKWSGLKAWGAKLTKRNGLRKAKVAVARKLAVILHRMWIDGTEFNWSTKKAAA

SEQ ID NO: 185641 - protein, 318 aa, unidentified
MEAPLIFVGIDVCKAQLDVSIRPTAQTLSVTNDKAGIKALVKHLEKLQPNLVVLESTGGLERQVMLALIGAEISVVMANPRQIRDFAKSTGQLAKTDRIDAAVLAHYAEAIRPKPRPLPDQLTLELRALTARRRQIIDMIVAEKNHLVTASKVIKKRITAHITFLEQELDRADQDLDQFIGKNPTWKQNQDLLCSTPSIGPVSSRTLLAELPELGTIGRKQISALVGLAPFPRDSGTLKGRRTIWGGRASVRSALYMATLVATRFNPVIRDFYNRLKAKGKASKVALVASMRKLLTILNAMIKHKTRWSENFSQTTGL

SEQ ID NO: 185642 - protein, 347 aa, unidentified
MLADTVDVVIGVDTHRDRHRLALVAAASGALLAERELSADRRGYRAALRLARARSGRRLWALEGSGCYGAGLARFLAARGECVVEVERPPRRQRTGRLKTDALDALRAARAVLAGEAQATPRAAGSREALRVLLATREAAVAVRRAGLCQLRALVVTAPEPLRERLRPLGKCALVGACLRLRVDGRQSSERAATALALRASARRVRAASREAEELERELARLVAALAPWLTELPGVGAISAAQLLVAWSHRGRLHSEAAFARLAGVAPIPASSGQTVRQRLDRGGDRRLNRTLHTIVLARCKRHRPTIAYVERRRREGKSLRETIRCLKRYLARSLFRQLEEMALGT

SEQ ID NO: 185643 - protein, 425 aa, unidentified
MAKRRYRSVPVKDARPEMLAERGGTGLIVGIDIAKERQFAAFTSRALEVVSTVRWEHPIETREFVALLEEVRANVGDIDVVMEPSGVYGDAIRYQLGAAGFDVHRVSPKRTHDAAEVYDGVPSLHDAKAAAIVAKLHLDGASSPWLVRPEAERDLVAQLRVIELHHKQARKGRNRIEALTARHWPELTRILDLKTATLLELLMAFGSPQAVAGRPEEARKLMRSVGRGKLAFEKIDRVIASAGHTVGMPPTQGEVVAIQAIAGETRRNQHATREAMKALKSLTADDPAVQAMAPAVGVKTAATVVAAVGDPTAFTSSKALLKAVGLNLRTHSSGKRKPGRLHITKRGNGMVRMMLWLAALRYIKSDPVVRAWYEAKVARDGGKKPRAIVAIMRKLVQGLWHVAKGKAFDSRLLFDTTRLDLAEVA

SEQ ID NO: 185644 - protein, 474 aa, unidentified
MVQPKTKKKKNRQPPCKDRRPCEAPAEDMPLVQPNAAGIDIGSRSHWVAVPADRDAESVREFSSFTGDLHRLADWLASCGITTVAMESTGVYWIPVFEILEERGFEVLLVNAAHLRNVPGRRKSDVLDCRWIQRLHSFGLLRGSVRPDEPIVELRAYVRQRARIVQDAGRHIQHMEKALLEMNIQIQHVVSDITGVTGMRILKAILAGERDGNKLAALRDPRCRQPRERIAAALQGNYKREHLFVLGQALTAYDLHQSLLAQCDQRIEALLAELPARSEVPEEPCPPRRHGPPTHNQPRFEIQSPLHRLCGNVDLTQIPGLAPATALTVVSEIGTDVSRWPTEKHFTSWLNLAPGTKITGGKSLSARRAPSKNRAGQALRQAAVSVGRTQTALGGFYRRIALHRGAAKAAVATARKLGVLVYRALKYGMSFVESGLAAYEREQNARLIQHLQKRAAALGYQLLQAPAEAPAGAG

SEQ ID NO: 185645 - protein, 339 aa, unidentified
MVYIGVDLHRKVSQVAALKPNGELLWNRRIRSRPEDFVRVFGDLPEPPVGVAFEATYGWGWFADLLADLGFRAHMSHPSGTKAISAARVKNDAVDARTLAHLLRTNLLPEAWIGPPACREARRLVRTRTALVRFRSGLKCQVHAILAEHGVQLPELTDLFGKRGRQFLERLSLPPFSRCCVDADLRMIDGLGLEIRGLERELVTLLRNDARIQRLRAIPGIGFFTAAAVVAEIWDVRRFLSPDRLCSWAGLTPSERSSAGHTRRGHITKAGSCLVRWAMVEAAARGTRHADHRRFFVRVMHDDLRRRQIARVALARHLLTLCYYALRDEGGCRAYPVAS

SEQ ID NO: 185646 - protein, 394 aa, unidentified
MKLVGIDIGKKHFFCIMDKDSGEVLLQPSSFSNTKDGFDSLIQKLSSYSKDSILIGMEDTGHYHFALLKYLLEKNFTVALINPKTTDYTRKMQNCITKNDKLDTLTICDVLDTPVRKKQYRITKVNSFDLYEQKQLTRHHHNLKEELNVYTNRLQKCIDIVFPEFNSLFSSKYGIIYMNVLKTFGSAENIASTDIRTIRKCFEIKGRGNRISLTAQQLKDSAKSSIGISSAAEVIKIKHLISQIELINEQLAETDKKIEEFSIQNNSPILSIPGISHFSGTSILAELGEISNYSKPSKIIKAAGVAPYHYESSQYDAQHTAITKKGSPYLRKTLYQIILPVINNNNPVFKQYYDLKISQGKGHRCACGHCVRKLLRIIYHLSSTNQQFDDALLR

SEQ ID NO: 185647 - protein, 385 aa, unidentified
MTKRLWAGLDVGVETTSVCIIDDAGEVVHEGSCPTTVKSVHRELSCLRRRRHARVGLEAATGMNLARGLRNLGYSVELFEARKLSKFLRIRRNKTDAGDASGIAHAGRLGAGTVSRVHLKNLECQSVQSRLVIRRHLIRQRVAALNLLGRQLELYGGRLKSTKPAQLRGAVEAETRRLFGKAATPLARELLHLADHCEALFDHQLGVDRELKQFASQNEVCSRFMEIPGVGPLCALSFYSAVGDPFRFRRSTDVGSYFGLVPQIHQSGLTLRVGRISKMGNTAVRTALVQASMTFMRYASPESQLRLWASSVEERRGRRKARVALARKLSTVMLAMWRNGEAYHPRAVARHGGLRDESRSKAQLSRDDEKGRDMARQEPCLASAF

SEQ ID NO: 185648 - protein, 362 aa, unidentified
MRIIGCDLHARQQTLAMLDTTTGEIVNMILKHEGNNVREFYSALPRPVQVGIEATGSMQWFLNLMEELGIECQVGHPAQIRAAEPRKQKNDRRDAELLLKLLAENRFPAIWLPSKELQDLRALLRHRHQWVRMRTRVQNALQSIALANGLRRGTALWSHDGQSRIAALPLAPHTAYRRSELQAMYEKFEAEIEKLNQRVEEQACGRAGALLLMTHPGVGPITALATEVFLGDPARFADSKALASYVGMIPREYSSGGRQRLGGLSKQGNPLLRFLWGEAGAHAARKDPELQRFYRRKLVQKGLGKASVAVARKLGIRLWIMLRDQIDYNEFCRRGQKQQKSSDACAGMPETRNGAKSHRPVD

SEQ ID NO: 185649 - protein, 345 aa, unidentified
MNIRKVTQNPSKGKSLGSNGCDHFVAVDWSLRVMAIAHMTRRSKQPTVFERPSDIRQLKEYLDAMRGGKVVAIEETTTAQWLYLELVDHVDRIVICDPFRNRLLSDGPKTDKIDAGKLCMLLRAGLLKAVFHSNSDLYELRRLISAYDDLVKAGVRAQNQQTALEQGHGDEGNSAPFILEHLADSIELYRSSKRQYEQKFLELSRHNTRMRNLLDVTGIGIIGAVKIVATVVDAHRFPRSGHYLSYCGLVEHEQISGGRSYGRRRPRFNHTLKAVYKVAAMAAISGTTNPMRAYYDYLRAKGVAQHNARHAVARYIARVTYGMLKTGKRYRPFQQRSQAPERQVA

SEQ ID NO: 185650 - protein, 416 aa, unidentified
MEQERGPVIAGIDTHKKKHALCLLDGWGRKMFESFFSADEKGYAEIAEAIGSPEDCIVVGIEGTMSYGAGVCRYLVEKGYPVVEVLGPESARKKKGANKDDLKDAERAARTAIAGDHVSVPKSGSGWVEGVRALLAARRLAVKTSTAATNAVKALLVTAPERIKAKHAGMDTESMMKSLSRKHTKEDPIENALYDSLRSLARMWHEAREQVDALESEIEDLMNENAPALMAMDGCGAITGAQLAVTAGDNPERMKSKDSFAALCGVSPVEASSGETVRHRLNRGGDRLANCALTQIVLSRMQHDERTKAYVAKRRAQGRSKKEIKRCLKRYVANEAYRILLNPKDVPDWQGSELAKTRKALGLTQRDAASLLLVSQAKISEIERGGRRYLKLEKQYSEALQQLQAKRILDEGRDTA

SEQ ID NO: 185651 - protein, 391 aa, unidentified
MFAGIDIASERHVLARLDDAGAALGKPITITEDRTGYDALLAALGPPPVLIVMEATGHYWKNLFAVLSAAGHDVALLNPLIARRFQEASLERTKTDAIDATGLARLAFEKRPAPTHLHDEVAEALRELVRHRDRLRQDFDDRVRQLHRLVDLGFPEFTRCVRTLDSQLATCLLAEYPTAHAFARATPRRVAKLRYDWRHFVGPELAQSLVEAAKRSVGQHHGPAYKLQARHIRQDLDTWRKRLAEIEHDIEDLLDTHVPGKLITSIDGIGPQTAARIIAASGDPAHFKSAGAFAAFVGVVPGLRQSGKQTGTRAGIGPIGNARPRRALWMPVLSAVRLNPRLRAFYLRLHADGKPPKLAPIAAMRKLLHAVYSVAKHRRPFVIGAGQARAA

SEQ ID NO: 185652 - protein, 367 aa, unidentified
MESYVGLDVHSKRSVFVIQAQDGRVVARGDMPTTSEGFRQLRRQHQLPAETPVALETGTVAFYAARELARVGLRPVVIDAHEVRVKAHRPRQKSDRRDAFELCEGLRRGQYRAVVHVPPAPIGALRETLSRRRHFVAVRVAEVNAVKRLLRAAGLGHLSKSLGTDAAWAKLLAAIATEPALRTYVAQHHALWRCAQEQIVALEETLAAQPATIAKVAARLQTVPGVGPLVSLTAVAVFSDVHRFPSAKHAASYAGLVPSTDQSGDRDTHGHITKRGSAALRTMLCEAAHHAQRPNHPLHPYFARRCAQRGYKMAVVAVAHRLCRILFALLRDGVEFDVAKLAVEEGPFRRTSVQRYRLKRPTASRRA

SEQ ID NO: 185653 - protein, 314 aa, unidentified
MKAHAFVGIDVSKRYLDVALPEGTARLSNEPDGIAALIERLSQTIPALVTLEATGGYETGLVLALQRANVPVAVINPRQARDFARAQGRLAKTDAIDARVLARFGEVMRPALLPPIDASREALAGLVARRRQLVEALIAERNHLEHATAAVIAWIERHIVMLRDQLAEVDAAIAATVKAEQALAHRQAILTSVEGVGPATAAVLLAELPELGRIEHKQLSALIGVAPINHHGGQVRGQRHIAGGRASVRCALYMATLSAVRHNHDLRLFYQRLRDNGKPAKVALVAAMRKLATILNALVRDDRPWRPALAQDGC

SEQ ID NO: 185654 - protein, 348 aa, unidentified
MTITTVGIDLAKNVFAVHCVDQHGKTVLVKPKVSRAALPELIASLPPCVIGMEACSGAHYWARLFRQYGHEPRLMAAKFVSPYRMAGKSGKNDAADAQAICEAVRRPHMRFVPVKDESQQAMQCLHRIRQGFIEEKTATYNRLRGLISEFGVIAPQSTDALRHMVSEQKSSLPLQVQQCVNDLLEHIDRIEDNITEYDRILSRMAKTDHRSQRLMELKGIGPTTACALVASIGNAHDFKNGRQLAAWLGLTPSQYSSGGKSKLGRITKAGDSYLRTLLVQGARSVLIGAEKRTDLFSRWVCSLVDRRGYWRAVVAIAAKNARLCWHHCITVMISGCTQSTKARSCITI

SEQ ID NO: 185655 - protein, 353 aa, unidentified
MDTIYIGVDFHARQQTVCSLKTEEGVVNSHNLKHQDKDEVRAFYQQFSGRVIVGIEASGYSPWFEQLLEDLGHEVWLGDATEIRRRARWRQKNDRRDAELILDLLVHDEFPRLHRPAPQSREILRMLRYRQKLVKIRTMGKNSLQALALQSGLAKRSQLFTKSGQQELRAAQMSPAMQWQREQWFQLLEPLNERLLETMLWLKQQTKDDERIKLLRTHPGIGLLTSLCVVHTLWPVSRFRNQRKVVAYAGLEPMERSSAERKHFLGVSKAGSRVLRYLLVEAAHTAVKKDDDLKRFYQRLATRRGRPKAKTAAARKLLIRSYIMLRDEIDYAEFRRRAVAARLARQSSRPPCL

SEQ ID NO: 185656 - protein, 417 aa, unidentified
MTDGKNASSCRYVALDIHKHYCVIAAVNRDGQIVLDPVRIEHEDLEAQLRKKLLPSDQVVIESTTNAWHIYDLLEPLAAKVLVANPIRVKQIACAKVKTDIRDTLILARLLAANLVPTVWVPPVEVRDLRYLLSQRRRLVGMHTQTINRMGSVAHRHHLNHPKGKRYIEKNTEWQQDDELSDSEKFQLELDMATGEHLDGQAKKIAEKIARMSQEEPWAANMMYLMQLPGFGVITGMTVLSAIGDIARFESSGKLSSYSGLTAGVEQSGTKNRGKGITKEGRKELRWAMVEVAQRAVKSDPYWKSRFQALERRMHRNQAIVAIAHQMLELVWHVLTHKQAYRHFSEERIAYKYLTWGWQLDEEARDGLTRQQFARYYLMRLGIGHDLKRIALNPKYPRKLASEAEVLALKPELNQTR

SEQ ID NO: 185657 - protein, 364 aa, unidentified
MTEHITHVAFDMHQDSITAAWLRPGATTPEVRKIPNEAKPLRRLVEQVLKAGPARACYEAGPLGYEPQRQLAAWGLPCEVIAPSLIPRRPGVRIKTDKRDAKKLVGLYRAGELTAIRVPTPAEENARELVRCREVAGEDALRAQHRLRKFLLRHGLRCPAGRAGSQAWWRWVQALRLSDPPAQRTLDEYLLAATTGRARWKALDPEVAALAAGEPWVRPVGWLRCFRGIDTLTAATLVLEVFDFRRFGTPRPFMSFVGLVPSEASSGVRLRRGSITKTGNAHLRRVLVEAAWHYQHRPGPSALIRARRAGQPPAVVAVGEPAEVRLHRRFARLVARGKLRTVAATAVARELCGFLWAAMMAAPA

SEQ ID NO: 185658 - protein, 346 aa, unidentified
MRFYNVQHRYYCGVDLHTKRMYLCLLDHEGNKLLHRNVRAKPHDFLSAIEGFREDLVVGAECMFTWYWLADLCLEEKIKFILGHALYMKAIHGGKKKDDKLDSEKIARLMRGGTFPLSYVYPREMRATRDLVRRRMFLVRRRSELLAHVQMTNQQYNHDPFEKMLQYASNRDVLDRFEQPSVRLSVEADLATVGHYDQLLKQLETNLVRQATLHDPRACRLLRTIPGIGKILSLVLLYEIHTVDRFPSVGDFLSYARLVTPKQTSDGKVTGHGGAKIGNVHLKWAFSEAVLWMLRYSEDAKTFVKRKEKKYGKCRAMTMLARKIARAVYQMLKRKESFDAVKFFAC

SEQ ID NO: 185659 - protein, 421 aa, unidentified
MSKRRYQSKEFKSVDWSEVDQRIGSERVVVAVDVAKEDFVATVLDGAQEALVTFKWRHPQDTAEVLACVLSLGKGRRLEAVLEPSGTYGDVLVWQLRQAGVALYRVSPKRVHDAAEIFDGVPSLHDAKAAYLIGRLHLQGISQPWQEPSEERRELKAIQARLSVCKGREQAACNRLEAHLSRHWPEILCILPLGSATLAVLIGAYGDPASVAAEPSAAEELMRRTGRPGLSEEKIQAVLDSAQNSLGVVPVGPERALLQWLANDSLAAHQEVAQVEREIEQRLAHDTLLAILAMVIGKVSAAVLLASAGSPLDYPNAASYLKALGLNLKERSSGKHKGQLKITKRGPSLARFYLYFAALRLIVRDPLVKRWYQLKSNRPGAMKNKIVIALMRKLAKALWHSARGARFDTNKLFNLKTLAGA

SEQ ID NO: 185660 - protein, 433 aa, unidentified
MSNFFYSPTVGIDISADFSYIAILAPNGETYKKPFRINHDVSGFTHLLNEIKKVEEEFNMKTGIFMEATGVYHLSLFHFLNKNFDNTFVINPLVTKCNKNVDIRKVKNDKKDAVSIAKIGKFQNIKLSQGVTLDIFLLRSLIREYYKLTDTCSIFKKKLSADLRVIFPGYSTIFSNVTSLSSISILSSYPSPKAVLDAPKDDILDILITKSRKGLLWAEKVYSKLYSVTNDAVVIGLPLPGLSIKITSNLTLLNALESEIQNLMSEINNLIKSNDFPKQIRTNIELLKSIPGIGELTAITLVAEIGDINGFIKPKHLVAFFGIDSSVNESGNFKGNQNKISKRGTRIGRRALYAVALASIRQTRKGVPVNKILLDYYDTNLNGKKPKVALVAIMHKILNYIFAVLRNQSPFELRDPRIHKQMFLDNKATANVA

SEQ ID NO: 185661 - protein, 354 aa, unidentified
MSQKLNTAIAVIGIDIGKNSFHVVGLDDRGAIALRQKWSRGQVETRLANIPPCLIGMEACVGAHHLSRRLRMLGHDAKLMPAKYVRPYSKGQKNDFRDAEAIAEAVQRPTMKFVATKTPEQLDLQALHRVRERLVSQRTGIINQIRAFLLERGVAVRQGLRFLRAELPQILATRTDVLSARMLRAIEELASDWRRLDERIEGLSTEIEALARQDMACQRLMTVPGIGPIISSAMVAAIGNGAVFSKGRDFGAWLGLVPRQISTGDRTILGKISRRGNRYLRVLFVQAAWVVLIRPKTWERHGLKPWIEAAKKRLHHNVLAIALANKLARIAWAVLSKEREFEYARTDEMTSRSA

SEQ ID NO: 185662 - protein, 395 aa, unidentified
MVSLFVGVDVSKDFFSAAGLDEEGKELFSGSYEMDSNGFSEFLKALSSHGESLDQVLVGMESTGCYHINLFSFLHDKGIHVVVINPLLISNFAKLSLRKTKTDKKDAKTIARFLVVHQDSISQLSLSQEMQDLRDLSRERESLCHLVTATKVEIKRVLRTTFPELESIGDLYSGVMLRFLQEYPSARLVRVAKPKTIAKALKGPYVGNKLTFSGEDILRAARRSVGVTSPAKEVILRGKIATLLHLKERLDETTKLLTDLCKATRVEDLDILRSIKGVGLKTAAPFLAEMGEVENFTSHKKLIAFAGWDPSVRQSGKFVGISKISKRGNRHLRRAIYLMTASVVSQNAFFKAYFLKRKREGLPPQKALCATVHKLLRVIFAMLTQRTYFKPKEVI

SEQ ID NO: 185663 - protein, 343 aa, unidentified
MDHFAGLDVSVKETSVCIVDETGKIIREVKVASEPEALLAVLASPAYHFKRIGLEAGPLSQWLYNALAEAGLPMICVETRHMRAVLKAQINKTDRNDARGMAQMMRVGLYRPVHVKTLRSQKLRMLLTHRKLLQSKAIAIDNDLRGTLRNFGLKVGMVGATRFEARIKELIENFPDLAVLVEPLLVVRRVLREQLGILHRRLLAVVRDDEVCRRLMTVPGVGPVVALTYRATVDVPARFRKSKSVGAVFGLTCAKYQSGEIDRSGAISRCGDEMMRTMLYEAAQSMLFHSTRWSWLKAWAMQIARHRGMKKAIVALARRLAVIMHRIWVDGTEFRWTREAAAA

SEQ ID NO: 185664 - protein, 348 aa, unidentified
MNAPHYIGFDVHKKTISFCVKTASGEIVEEGSVPAQRRVLRQWASARPQPWQGALEATLFSGWIYDTLKPYGERLEMAHPAKMKAISAAKKKSDTIDARTIADLVRCNLLPACYVAAPRIRELRRLLRYRSLVVSEAVRMKNKMAGLLMESGALYVKEKLHRKKYFANLLEELEEVPESVIDLLRLSRGALEMFESTQKRLVRELLADPELAQRVERLMSIPAVGEITALTWALEVGDPQRFRSGSDAMSYCGLTAALQSSAGKQQRGPISKQRNRWLQTTLIEAAKLAPRWNPQLAALHARELERGHRNRATLAVARKLVAYLLAVDKSRQPFQVRESSQDLAQKTG

SEQ ID NO: 185665 - protein, 316 aa, unidentified
MGAEKVNIGIDVSKGYLDVAVRPSGERFRFTNDEEGIGALRKMLAERHPERIVLEPTGGYESGVVQALATAKLPAVVVNARQVRDFAKAMGRLAKTDRIDADVLAHFGEALKPEIRALPDEAQRELEALVNRRRQLVDIRSAEAKRKHTAPLVVHPSIDGLIEFLDRQIDDVDKDLHRLIRSTPAWREADDLLQSVPGVGPVLSSTLTALVPELGKLNRRQIAALVGVAPYNNDSGKGERTRRTWGGRASVRAVLYMAAAVACRFNSAVRAFHDRLAASGKPAKLVLVACMRKLLTILNALARDRRPWNPQIALVG

SEQ ID NO: 185666 - protein, 346 aa, unidentified
MTIVETTRPVTGGVDTHADVHVAAAVDANGGVLGVASFATTPAGFGELHSWLAGFGPVSRVGVEGTGAYGAGLARHLRGRGLLVIEVDRPNRQERRRKGKSDELDAIEAARAALSGRASGIAKSADGDVEAIRALLVVRRSGRNVRIKYLNQIRHLGFTAPDELRERLRHLHRDRLARTAAALRPTAGSDAVTYATKLAIATLGRRVLALEADAERLDHELEMLVRRTAPNLLEVYGVGINTAAVLLVAAGDNPHRLKSEAAFAHLCGVAPLLASSGKIDRHRLNPGGNRQANHALWRIVFTRMSSDQRTRTYVARRVAEGKTIREIMRVLKRYVARELYPHLVHD

SEQ ID NO: 185667 - protein, 394 aa, unidentified
MVACVLIGEAGRKPRKEIRTFSTLTRDLKGLRDWLKELGVTHIGMESTGVYWKPVHAILEGHFELIVANAHHIRNVPGRKTDVKDAEWLADLVRHGLIKPSFVPPPPIRQLRDLVRLRRSVSEALTTEQNRTLKLLETANIKLASVVSQVFGVSGRAMLKALIENTATPQEMADLAKRKLRRKLEPLALALDGRLTEHHRYLLAFHLRRVEAIEADLRALDERIEEKARPYQAQRRLLRQIPGVDDRIAVAIIAEIGIDMTVFGNAKRLAAWAGVCPGNYESAGKKKSAAARKGNIHLKTTLVQAAVCAARTKGSYYKDKYHRLKARRGSLRAAMAIAHKILVAVFHMLAKTIPFQELGETFLDQQARTRTTRNLVRRLNNLGYDVLIRPKVAA

SEQ ID NO: 185668 - protein, 329 aa, unidentified
MNYKWFVGIDISKGTLDLVLYKKELQKKSPHCQILNNSKGFRTINKWLKDQNAILQDTLFCMEHTGIYGIEIASYLNNKASYCMEAATHIKRSLGLTRGKNDKVDAYQISRFCYLHREELTPTKLPTKSMVLLKSLINERERLVKVRVIDKRIIAEMYFEANKPCIERARNRINLLTDDIEQIESEIKQIIKEDMEIEQNYNLVTSVTGIGLVNAVMFILFTNNFKSITDARKYACYTGIAPFEHTSGISIRGKTRVSKLANRRIKVNLTNGARSAVQNDPELKLYYNRKREEGKEHGTVMNAVKFKLITRVFATVKRGTPYVKLRQAG

SEQ ID NO: 185669 - protein, 407 aa, unidentified
MELFCGIDWAEGHHDVALVDGEGTRVAKLRVDTGAKGFSDLQTLLAEHCTTPSAVPVAIETDKNLIVVALLAAGHTVYAINPRAVARYRERHHQAGGKSDPGDAAALANILRTDRHEHRAMPKISEDALAVRALARQHQEAIWARQLTVNRLRSVFLEFYPNALVAFPVLTHKAALEILAAAPTPGLALKLTHKRVVTLLQRSGRGDRPGLADSILANLRQPSLRQLPAVEEALGRAVKGLVCVISSMESAIADLESAMTLAFNAHQNAELLTSIPGLGSVLGARVLSEIGDDGGRFTTANGLRAFAGTAPITRASGRSKSVRARHVKNKRLADACHWWAFASITRSAGCRAHYDRRRAAGDTHNAALRNLANKLLGRLWWCLVNDLAWDEKAAWPSPDPAAVKIAA

SEQ ID NO: 185670 - protein, 342 aa, unidentified
MSSTNTYIGVDLHKKTCYMTVMDKSGIVSKQTEIKNDREEIEKFFAVYPKESQVAVESTMNWIPFYEQVEKMGFEVVLSNPLMTKAVAAARIKNDKVDSKILAELLRTDFLPTAYIQPKSIRDLKELIRQRAVYVEMRTRIKNKVHSVLFKTGDKQEFTNLFGKGGRKFLSELKLSPVYRTELDRYLLTLDNLDLQIKDMEQDIEAKAKADYDCKLLCTIPGVGPYTALMVKSEIGDIARFHRAEQLCSYAGLIPSTYASGEKIRTGRITKRGSKWLRKALVDAVTSSCRNANKISVFYKKLKKNKGTGKAKVAAARKLCSVIFAMLTDKQPFKEFVPVKER

SEQ ID NO: 185671 - protein, 349 aa, unidentified
MKILAIDLGKYKSVACNYVTTTGTARFATVVTHANEFDRLLSQESPDLVVIETCSIAGWVHDLCCQRGVKCQVANPSSEAWKWKNVKRKTDRDDALKLAQLAALEQLPTVHVPAPETRQRRALLKYRQSLITRRVAIQNHLRAIAQRQGILLDRGSRAWTKAGFEVIQQIAKPLEQCSADELWRGEAALELQALEAVTKLLREVERKLEAFAASDESVKLLRSIPGVGRCTAEVVVAYLDNPQRFENGRQVSAYAGLVPKQFQSGETDRRGRISRRGPSLLRKMLVEAGWILLRYNPWAQRLMLRLSRGQRTRRKQAIVALARKLLVRCWAMLRDSTAWREPPPATATA

SEQ ID NO: 185672 - protein, 410 aa, unidentified
MELLHPHCAGLDIHKETVVACVRHLRNGKVMTGIKTFKTTTEELIALSDWLTAEGCTHIVMEATGVYWKPVWHILSDGEFDLVLANAGHVKNVPGRKTDVNDAAWLAELMAHGLVKASFVPDQPTQQMRDLLRTRKQFGRERSSHIQRIQKTLEDANIKLDLVVTDVLGLSGRRILQALIAGQTVPQALAALADRRIHATSAQLEAALRGRVTDHHRFMLKLHLDQIDAQDAAIARIDKQVDGNVEPFRVALEMLNGIPGVSSLSAEVIIAEIGVDMSRFETAGHLISWAGLCPRNDESAGKRRSSRMKKGAPWLKTTLVQCAWAAARTKDSYFQAQYHRLRSRRGPKKAIGAVASSLLTTAYHMLKTGTLYQDLGANHFNHRAKDKQALHLIYRLKNLGFNVQITPSAA

SEQ ID NO: 185673 - protein, 350 aa, unidentified
MTFVGCDLHSRSHQVAVLNTDTGELQEQRLAHEGQVVEQFYRALPCPVTIGVESVGYAQWFHALIQREGPTLLVGDAAKIRAMVPRKTKTDRRDAAHLLKLLGEDRFPTIWVPDPGVRDRRALVAHRMRLVRTRTMVKNGLHAIALNDRLAAGAALFTRRGRAQWQALALPPHLTQRRDESLELLSWLDAHIDPPDGQIAAAAAADDQARRLLTHPGVGPLTALATVLVLGPVTRFPTSKHVVSYIGLAPAVAASAAKCRLGHITKQGNALLRYVLGQAGQVAARSETDLRRLYAMVMHRHGRPKAKVAVARKLLIPLYIMLRDQIDYAEFRARGRRLRTHPRPKGTERA

SEQ ID NO: 185674 - protein, 345 aa, unidentified
MPIVGGLDIHRKQITFDYPGTVTGEVRRGQVSPADRAHLRAWLARFAGRDDVAFAMEGCTGWRYVAEELAAAGIAAHVGEPADTAFARGRKRHAKTDKTDSRHLRQLLAEGRLPECWIPPAQVLECRALLETYHDLRREHTAWIQRIHAVFFHQGAPALGEGALRTERSLAALREAAAVHLSPAGQLQIATDLDMLAAVEARMDTLRRQLLHAARRLAGAKALADRLYGVGPVAGLALTCWLGGAGRFSSSRKAVRFAGLDVTVYSSDGKRSPGHLSRQGPEILRWVVYEAGKTHARAAAPGHDYYAAVKDRTDGKIAALSQARKIVRQACHILAELGDDALTVT

SEQ ID NO: 185675 - protein, 343 aa, unidentified
MQTVTTIGLDIAKSVFQVHGVDANGQVVIRRQLKRRYILAFFQKVPPCLVGIEACASSHHWSRELQALGHTVRLMPPAYVKPYVKRHKNDATDAEAICEAVGRPNMRFVATKTPGQQSCLTLHRTRHLFIRQQTSVINAIRAHLAEFGIVAPVGRHGVEQLLQVVADKSDKRLPEVARTCVAALGAQLQTLKAKILEFDRLIMAWHRSSETSRRLDDIPGVGPALATALVASIADPNAFRSGRDFSAWIGVVPKQNSSGGKDRLGSISKRGDRYLRGLFVAGALAVIRYAKIYGTKHRPWLTALLARRPTEVAAIALANKIARMAWAMMAKGERYKEPVALAV

SEQ ID NO: 185676 - protein, 395 aa, unidentified
MFIVGIDIAKRSHEAIIIAEDGQVVRKAFSFRNNCTGYNLLLEQVRRLTLVKSQIVFAMESTAHYWLALYARLLKDGYAVMVLNPIQSHSLRELYIRKAKTDARDSLIIADLVRFGRCKASNVPQDKILALRELCRSRAYRVDMAADLKRKLIALLDRIFPEYESLFDSVFSKASIAVLSKYSTPQKVKNANLRKLTDILMESSNGHFGEWKAHQLKEAACSSFGIDDSGGVYSTLLGMFLEQILSLTAQADSLEKQISVFFQEFNNPLTSIPGVGTVLAATILSEIGDITRFSSADKLLAYAGLDPSVKQSGEFKSNQNRMSKRGSPYLRRAIWLASTVAVHRDPMFQTYYEKKISEGLHYMNVIGHVSRKMTAVIFAVLRDGQPYQPILQSAG

SEQ ID NO: 185677 - protein, 387 aa, unidentified
MAQVNDLSRSLTAFDPISTLVVVVEMSKASWLVSGAVPGVERQPLKKLEPDATALLRLIERWRNEAVRAGRPISRIVLAYEAGRDGFWLARWLIARGIEAHVIHSASVAVSRERKRAKTDRLDAAMLMRVFLGWLRGERGHCGMVAIPTMEEEDARRPSRERECLVNERSRITNRMKSALARLGVRGFKPHLRKAPERLAGLRTAEGTGLPANIIEEFRRDMTRLALIREQISSIEAARAERLERAPDTGPDAMVRLLARVIGIGIETADMLVREILSRKLRDRRAVARYAGLTGSPDESGLKRREKGLAKAGNARVRRGLIQLAWRFLVFQKDSALARWYRTRTEGPSGTRKTTMIVALARKLLIALWRLVTTGEVPDGVELRPAL

SEQ ID NO: 185678 - protein, 342 aa, unidentified
MFYAALDVSLRSVAVCIIDHEGKVRLERSLSSELPDLIRCLREFGQPIRQVGLEAGNLSHHLAAGLTEAGFDVVCMEARQVSAALSAMRNKTDRHDARGIAQILRAGWYSRVHVKSQKSLHTRALLTSRKVMQRKCIDLENEIRGVLKVFGVKLPMRLSRGAFEMAVRDTIEADPALSHALLPMLQARQTLFATFIELDRRVRLAAREDAVCRRFMSVPGVGEITALSFKAAVDDPTRFKRSRTVGAHFGLTPRRFQSGEKDNPGRISHAGDADVRATLYAAANAMLMRSIAWSSLKAWGVRLMKTKGRRRAIVAVARKIAVVLHRMWVDGSDFRRGAEAAA

SEQ ID NO: 185679 - protein, 357 aa, unidentified
MAALSLADVPANVTVGVDTYKHSHIARAKDGLGRHLGQLEIETDPRGYVRLLAWAQGFGPVVTFGIEGTSSYGAGLTRFLRGHGQAVIEVLRPVRRDRRFGGKSDPIDADAAAGAVLSGRATAVPKAGDAGVEMVRALKIAKQTAIKARTQAVNAVKGLVVMAPDPIREQLRNLNTPALVRTCSAYRVGRASDPTSAIKLSLRSMCRRYVVLDQEVRSLEKELDALTVRLVPQLRQLFGVGQDVAATLVLAAGDSGERLRSEASFSMLCGASPIPASSGMVQRHRLNRGGDRQANAALHHIVIVRLRHDEATKAYFAKRKAEGKSKKEIFRCLKRYVAREVYRTLVGPREEAIRSAA

SEQ ID NO: 185680 - protein, 347 aa, unidentified
MNKKWFIGIDVSKKTLDVSIFVADVVINMFPHIQVRNDKEGFKELLRWLKEQGVRPQDALIGLEFTGYYSDALELFLTRKKLCYTMLPTTVVKHYQRGTRDKNDKTDSAKIADYLFRFQGTECIKLRMLPSKAMQDLKALKSERKFYVRHRTDCENRQKVAKSKDEQKNLQKIIDLYDKEIERIEQKMADVVTSDEEIYLTYMRLMSIPGIGPVNAINTIANTQNFTAFETARQYAKYVGVAPSEHSSGTSVRWRGRPSPHCDLQAKADLSMAAMRAVEFSFEMNVYYERKLGNRPDDKDIKRKVLNAVKFKLIRQMFSVAKQHRNFKPLEQTQTQAEIHNTDQRVN

SEQ ID NO: 185681 - protein, 343 aa, unidentified
MESIHYIGLDVHKKTIAYCIKTVAGKTVQHGTVRSERQALREWQSEIPGPWMGAMEATLFTGWIYDFLKPYAVELKVAHPEMLKAITAAKKKNDRADAEKLADLLRVNLLPECTMMSEELRELRRILRYRNMVVRTSVKMKNKISGLLMEVGAPYEKRRLHSRSYFTQLLEKVEDVPDSVKELLKLSRSNLELFEAVQKKLVKTLRQEAKIKERVECLMSIAGVGEITALTWVLEVGDPARFRNSRQAISYCGLCSAQKESAGKEHRGPISKKRNKHLQTILVEAAKLAPYWNPYLAAVREKELARGNRNRATLAVARKLVEYMLAVDRRGTPFVQEEPPQVA

SEQ ID NO: 185682 - protein, 425 aa, unidentified
MHSKMNNKINQVTENTLVVGIDIAKHVHYACFVDERGRVIEKAFSVHQSKEGFESLYEKIRQTLLETQKTEVIVGIEPTGHYWMNLAYFLDQYDIPLVMVNPMHVKRSKELDDNLPTKNDKKDALVIARLLKDGRFSYPRILKEVEAELRIGSTLRSKLTEDLASIKNRIIRWLDRYFPEFTQVFPSFGKMALTALERTPMPQDIQGKTAEELVFLYRQVGGMRAPQLPKAKLLIEKASNSIGLTEGQKMAKHEIATLLRQFRLLEAEIEAVNDQLTEMAKTTMEYDLLASVPGLGDATIVDLLSEVGSFSLYENPRQLIKLAGLTLRENSSGQHKGQKHISKRGRKRLRHILFKVIVPLIRHNLAFKQLHEYYTTRNQNPLRGKQSMVVLCGKLLKILHGICKKKVYFNEQLMMKDLYCLGEAA

SEQ ID NO: 185683 - protein, 356 aa, unidentified
MNEANAPDIIVGVDTHKQSHAAVAVTGLGVRLAEVTICADTRGYQDLEAWASSLGAVRAFAVEGTGSYGAGLSRFLRERGHAVHEVCRPDRRARHQHGKTDHLDAEGAARALLSGRRAAVPKSGTSEVEMIRHLKVARDTAVKARTQAMLTLKSLIVEAPAALRERLEAVGGKRALLRHLAALRPGELTDTVASAEASLRALARRWLALDEEIQSHDAHLERLVRRRAPALVEAHGIGVGTAAEMLVLVGDNPERIRSEAALAKLCGVCPVPASSGKTNRHRLNRSGNRQANAALHRVVVVRMRAHAPTTDYVRRRTAEGKTKAEIIRCLKRFVAREIFGHLCASPKPVSGCSEAA

SEQ ID NO: 185684 - protein, 320 aa, unidentified
MRNAVGLDISKLTFDASAMVGNAEYSAKFDNDSKGLDQFSDRLKSLGCQNLHICMEATGNYYEEVADYFAQYYSVYVVNPLKISKYAESRFKRTKTGKQDAKLIAQYCRSAQESELVKRQKPTDEQYRLLRMTAAYAQIKSECAAMKNRHHAAKDEEAAKAYAQIIKAMNEQLEVLKEKIKEQTEKPNCKEGVKRLETIPAIGRMTAAVLFHHLTSSKFETSNKFAAFAGLSPQQKESGTSVRGKGKLTKFGNRKLRAVLFMPAMVAYRIRAFPGFIKRLEEKKKPKKVIIAALMRKLAVIAYHVHKKGGDYDPSRYKSA

SEQ ID NO: 185685 - protein, 370 aa, unidentified
MKRFATLFIGLDVHKESISVAHVPDDRRADVTYVGRIGTRPADIDRLVRRLQEKADRLVVAYEAGPCGYVLYRHLSRRRITCLVVAPSLIPKKPGDRVKTDRRDAIQLARLLRSGDLHSVYIPSVEDEALRDLCRAREAAVVTLKAAKFRLKSFLLRLDLHYTGRADWNDAHLRYLAKVVCPTPAQQIVFQESLRAVDEQVQRLKRLEAELIDLVPAWRLAPVVRALQALRGVQDTVAVTMLAEIGDLTRFDNPRQPAGFLGLVPSEDSTGESRRQGPITKAGNGHARRVLVEGAWAYQYPAKVSPAIRKRLEGLPQPVQDIAWKAQVRLCKRFRRLVARGKHPNVVVTAIARELAAFMWAIAKEVPIAA

SEQ ID NO: 185686 - protein, 417 aa, unidentified
MELIHPRCAAIDVHKKTVVVAIRIAVSGNRAKSETRTFGTFTQDLLAASDWLEESGVTHVVMESTGSYWRPVYSVLEGRFELIVANAQHVKNVSGRKTDVKDAEWLSDLLAHGLLKASFVPEPALRALRDLTRGRSTLVTQRATLANRIQKLLEEANIKLGSVASDVLGVSGRDMLAQLASGQEDSAALASLARGILRKKTDDLQKALQGRMQPHQRILLRELLKQVESLDASVRTLEKEIDAYIGQQTTSPFEAAVSLLETTPGVGRTSAVIVVSEIGTDMTRFGSSDRLCAWGGAAPGNCQSAGRRLPGGKRHGNKNLMTCLVECAASAVRMKDTYYYALYRRIAPRRGKKRALVAIAHSMLRSFYYMISNGTAFKDLGADHFERANKQRIVNRLVKRLTDFGYEVTPPQETATA

SEQ ID NO: 185687 - protein, 340 aa, unidentified
MNATTYGLDVAKRVFQMYWIDAQTGEIANRRFGRDELIAFLAQRPPGRVALEACGSAHWWARKIRALGHEVVLLHAQFIRPFVQTNKTDAADARAIWTAVQQPGMRTVAAKSEDQQTMLSLHRMRSLLVKFRTMQVNQLRGLLYEFGATFRAGRVAGLAEIRERMAELEDTLPRPIILNLQDQLRRVNAFEEDIDQLERRIGAWQKQEAACRAISEVPGIGRLTATALVATIGDARTFKSGREFAAFLGLVPRQHGTGGKVRLGSISKRGDPYLRTLLIHGARSVLCHAKVPTVWQKGIQERRPGNVVAVALANKMARIAWAILAHESAYEKNHVSVRPV

SEQ ID NO: 185688 - protein, 430 aa, unidentified
MGLLEPTPMPPERDEQATSYNWYVGIDWGSQQHQVCVLDRDRHVVGERVVDHDGSSLAQLATWLWALSAGHPQRVAVAIEVPRGAIVEGLIERGFHVFAMNPKQLARFRDRHTMSGAKDDRRDAFVLADSVRTDQPSFRRLQLDAPQLLLLRELSRAEETLLEEFRRSANRLRDQLHRFYPQMLHLCSGADEAWLWDLIDLAPTPAHAALLSKEQIQRVLKAHRLRRVKATEVLTCLQASALPVAPGAAEAAQAHCAFLLPCLRVLAEQLRSCAQQAEALLHTLAEAPDETGGPSDVAIVQSLPGVGRKITAWLFAEAAQPLTERDYQVLRTQGGVAPVTKHSGKRRHVVMRRGCNPRLRHALYHMARVAMQREAYFGGVYEALRAKGQRHGQALRNIGDRLLRILIAMLHDRTCYDATRSRREPVVQMG

SEQ ID NO: 185689 - protein, 316 aa, unidentified
MNQAEVFVGIDVAKSRLDVALHPSGATWTVPNSEAGIAGLVAQLQQLPVTHIVLEATGGLEIPLLGALGAAGLPAVAVNPRQVRDFAKALGRLAKTDRLDAQVLALFAERVRPALRPLPDQATQALSALVARRRQLVEMLTAEKNRRGQASPAIQADIATHIAWLEARLEQLDKELGQHLQQSHLWRAQDDLLQSVPGVGPVLSRTLLADLPELGTLDRKQIAALVGVAPLNRDSGTLRGARTCWGGRAAVRAVLYMATVAATRCNLVIQTFYRRLCAAGKAKKVALTACMRKLLTILNAMLKHRTPWHAERLQRA

SEQ ID NO: 185690 - protein, 321 aa, unidentified
MTKVNKIIGIDISKEKFDACFSFQPCGYSSRTYTYNEEGISSFLAEVPSDCICIMEATGVYHLRLAYALTKAAIYVSVVNPLSVKNFSRAVMCRTKTDKADARQLVDYARRMELVEWKPTSENYIRIQQIYRTIELFVTNITQLENQLEAISNSPVQDRMLCRILKRSITIQKRRIERLEKQIEELIAEDDKTVVKRLCSIPGIGKKTAVAVLTATKGMHGFNNYRQVSSYFGLCPRIYDSGKSVHGKAHICKMGMGWIRRLLYMCSISAAKHNEACKDLYLRLTERGKPIKVVFIAIANKLIKQIFAIVKNNSLYHKTFA

SEQ ID NO: 185691 - protein, 392 aa, unidentified
MTYFIGIDLAKYKHDCFIMDENGEVIRDSFSFNNDKEGFNTLLNVLNSLDSNQEKRIGFESTGHYGSNLKFFLERNGYSFMEFNPLLVHRHFKSETLRRTKNDKVDARKISSYLYTREYKPNPNSSYHLNCLKSLTRTREALIKDRTRHIIHMTNVLDKMFPEFKLQFGNQGLNAASAMYLLENYGSPSKMSNMTRASYDKMKSELRRTISYAKFLRIKELARNTIGNEDEILVFELNTYLELFKELDKKILKVEDKITKEFSIMKCHIASIKGIGIITAAGILAEIESIDRFDNPGQLCAFAGIEPSENQSGTHDGGGKMVKHGSPHLRNYLMQSAGYMLIHNPVLYEYYLKKRNEGKCHTVALSHVAKRLTRIIFYLEKNDTDFNIDKMR

SEQ ID NO: 185692 - protein, 367 aa, unidentified
MKKVSTAVAKQSRNFFRQTLTIGLDLGDRNSWYCVVDEAGQVKREQRVRTTTKALQEVFGAMPRSRIALEIGTHSPWVSRLLGELGHEVIVANARKVRLIGESRKKDDRLDAQTLARLARIDPELLYPVKHRSAQAQADLAMIRARAGLVRARTGLVNTARGLAKSYGERLRGCNVRNMDPEKAEGLSPELQRALEPLLAAIEELSERIVEYNDRIEALAQTTYPQVELLKQIKGVGTLIALTFLLTLEDPHRFRKSRDVGGYLGLQPGRRNSGQSEPQLHISKEGDPYLRTLLVQGAQHILGPFGIDCDLRRWGLKLAERGGRNGKKRAIVATARKLAVLLHHLWVSGEVYEPLHNSSRLTVAAAA

SEQ ID NO: 185693 - protein, 338 aa, unidentified
MMYGAIDLHLRYSEIRVVEADGRVVRERRVVTSRATLTAAFAGLGVLRVLLETGTESEWVAQTLEAAGHAVVVADPNYAPMYGEVRRRVKTDRRDVAALAEANRHGWYRATHRRSRAQRTLQQILRSRRQLVAMRTGSISVVRALLRQEGYRLPSGSAAQVPARLARVPLPDELAATLAPLRQVIDTVTRELAAIDTRVRTTAAADPVVTRLQTVPGVGPVVALTFRATLDEVTRFQAAGQVSAFLGLVPREDSSAERRHRGHITKAGSGELRSLLIQAAWACWKSRGSGTLRAWAERLAGRRGRRIAVVALARRLSRILYAVWRDGTTFDGARVTAA

SEQ ID NO: 185694 - protein, 373 aa, unidentified
MKKNSRNEKASERSRAQARLTVGVDVGDKRSWFCILDEEGEIVVKGSLPTTPNGFKKQFELLGPSRIALEVGAHSRWISEQLKRYGHEVIVANARQLPLIYASDRKRDPVDAEKLARVARLAPKMLCPIEHRSVKAQRDLAILRARDLLVGMRTKLINAVRGLVKNEGVRIAACSPEKFPAKASEIAPRELMPALAALLEQIDSLNQRIGEYDQMIVHKAQTDYPETARLDQVSGVGALTALGFVLTVEDKHRFAKSRDAGCFVGLRPKQSESGESAPQLGISKAGDGYLRRLLVNCAQYILGRFGPDTDLRRWGLKLAERGGKNAKKRAVVAVARKLAVLLHKLWVTGEVYDPQYNRKAVEAAQGKEKAAAA

SEQ ID NO: 185695 - protein, 308 aa, unidentified
MGVDVASMHLDAAAYGGSGVVRFANTDGAVSKWLRTLPAGSTIALESTGRYHERLAFAAHAKGFTVYLLNPRDVRHYARAMGMRGKTDKLDAQILARYAAHECTELRAWVPPSPELRRLEDLLRRRGTLVKHQVAIRQSLADSAGLRASAKTLMKEFAQLLDSIDQQIAQAAADLNLDSEGFERITSVPGIGLLSGSVLLGLFQRLAERGADAVIAFLGLDPRPMDSGKKVGLRRLSKRGPAEWRRLLFNAAMSASRTKAWSATYERERAKGLPRTAALNVLARKLVRVAFGLFKSGQHFDSSKIAPA

SEQ ID NO: 185696 - protein, 371 aa, unidentified
MAKRLKYIGLDVHKETIAVAVAEGERGGEVRFHGTIPNEDDAVRGMVKRLAGPGITLDFCYEAGPCGYGLQRLLTRQGQPCIVISPSMMPRRPGDQIKTDRRDAMTLARLLRAGELAPIWVPDEAHEAIRDLIRARRSAQEDTSAAKQSVRSFLLRHDRRFSGKSAWTKTYWRWLSEQRFDFAHQQLAFEEAKRRVLEAQARTARLEAALVEAVDGWRFAPLVRSLQALRGVRLIVAATLVAEVGDLTRFQNPKQLMAYLGLVPSEYTSGARVQRGRITRAGNAHARTMLVEAGWTYRLPAREERRYRDRVADLPEDIQAIGWKAQVRLCQRFRRLSATGKPQPKVNTAIARELVGFAWDIARRVQPVVAV

SEQ ID NO: 185697 - protein, 361 aa, unidentified
MRTLKVTKPDFSGQHIYIALDVSRKSWKVCILTETYEHKTFTQPPNVEVLVAYLHRMFPGAHYHCVYEAGYCGFWIYEQLKQRLVDCIVANPADVPTKDRERVFKSDGVDTRKLARGLRSGDLDALYVPSRTAQEDRSLVRTRVTFIKKQTRCKNQIKAFLSYYGILIPEEVVSSHWSRRYVAYLEGLSFQQASGTQALKTLLEELRSLRATIARVTKSIRLLSTTQPYEASVKYLVSVPGISTVGAMMLLTELVDIHRFRSLDQLASYAGLVPGEHSSGEQEITTGISRRRNPFLRGVLIECAWVAARKDPALLLAFTNLSKRMPKNDAIIRIAHKLLNRIRYVLLHQQYYQSSIVATAA

SEQ ID NO: 185698 - protein, 321 aa, unidentified
MENKKEQISFEQVIERGCGIDIHKSILVATIRGLGIVEETRTFDGFTHSIEALRDWLKENGITHVAMESTGVYWKPVYNILESDFEILLVNARHIKNVPGHKTDKKDSKWITKLLLSGLLKGSFIPPRHIRELRDLTRYKRKIIEQIASEKNRIHKLLEDANIKLSSVVSNLSGATATKIVDSMIEGEEDIDKLLKLRHGKMQSSVEDLAASLRGNLTNHHRFMLQTVKESIKSQEQIIVKLDAQIDILLKENELVLDAELLATIPGVGKEAAAYILAEIGNDMSQFPDEQHLASWAGMSHGSNESAGKKKAQESPMEMSI

SEQ ID NO: 185699 - protein, 339 aa, unidentified
MNYTAVGVDIAKNVFQVHYVDQETGEIVNKPIKRAKFLEHFANRASCLIGMEACGGAHHWARQFTKMGHQVKLMPGEYVKAFNIGNKKDAADARAIWLAVQQPSKAVAVKTEMQQAMLALHRTRDQLVKFRTMQVNNLRGLLAEYGEVMGTGRAALDKAMPDVLARVAERLPAVLIDTLREQWNGLKQLDEHIAKIERRMREWKKEDHAVKAISEIPGVGLLTATAAVAMMGDAKAFKSGREFAAWAGLVPKQTGSGGKVNLHGISKRGDTYLRTLLIHGARSVVTCAKEPGAWVEQMKRRRPLNVVIVALANKIARTIWAVLAHDRPYQKGYVSVKAA

SEQ ID NO: 185700 - protein, 320 aa, unidentified
MRNAVGLDISQNTFDAAAIVNGQRKQALFDNSINGFESFKAWLDGFDCELHICMEATGNYFEDVADYIGQFYIVSVINPYKISEYGKSRFHRTKTDKQDARLIAEYCHTAMPKDLPARQKISIGHYRLKRLLALYEQLKTQKTAQKNRLKVAKDDFVRKIHQVQIQELDQHIQQVEAEIQAITNSNQDLKAVSDRLQTIPAIGKLTAAILTNYLLSGDFKTANQFTAFAGLNPQQKESGTSVKGRSSMTRYGNRRLKSALFMPAMVALNRNYFPDFVKRLKAKNKPKMLILGALMRKLLVVAYYVYKTQKPYNPERYKPA

SEQ ID NO: 185701 - protein, 340 aa, unidentified
MNYMGIDHHNQSSQLTVVDERGREIKTGRVFNQQREIEHFLQGITLQKLEAVIEAGRSSYTMVELLERLGVRVKMAHPQQVKAIAKARIKTDKRDSRILAHLLRSDLIPQVYLREAENRQRQRVLRHRVFHVRMHTQIKNRIRALLAQQDGEVRELSFWDKLFTGRGLKVLGEVELAGIDGEMLRALIRIYDQLAVEIKTSDAMIRAIYRESREARLISTVPGFGDFFSVLVATEIADIERFDSPAKLHCYAGVVPSTHASGDRNFHGRLINQGNKWLRWAVVEAVWPATKGDFDIRVFYQKRAKRKGANSAKVATARRLLTIIYRMLKEKRAYVPYKRI

SEQ ID NO: 185702 - protein, 392 aa, unidentified
MHETPRSADASHDVIKTVSLDIELESMFDDKICSLTGETVMTLYIGVDFHPHQQTIAWCDKRTGEIRTRDLAHDMEKVREFYSSLQESAVIGVEASARAAWFENMLFEMGHKLVVGNPVLIRKRAVSRHKNDRRDAELILDLLMRDEFPALWRRQPASNQVLEILRLRQHLVCQRTEVLNRLQSLAHNAGLPKGRMKTISFQSLIKALELDEAGDLSRSHLFGLREKLDEQITALEAWLKKKAVDEKVQLLQTQKGVGYLTALTTVHTLGDVRRFTRLSKQVASFAGLDPLERSSAGKTRFGHVSKAGSPLLRFQLGQAAQIAARYDTKLKSFCKRLAKKKPKAVTKTAAARRLLVKLSIMLRDNIDAYEFDRRGRTVGNARVAPRSEMTVT

SEQ ID NO: 185703 - protein, 355 aa, unidentified
MESLKYVGLDVHRDTISVVVLEESGKMVMQTILATQSGAILDFVGGLRGTIQLTFEEGTHSAWLHDLLAGRVARVVVCDPRQNALLKAGNKSDKIDARKLAELLRAELLSPVYHGETSTVTLKHLSRGYAALTEDTTRVKGRIKALYRSQAIASSGKKAYGKRHRGQWLVQLTQAGMHRRAELLYEELDALLSLRREARRELIVESHKHDAVKLLCTVPFLGPIRAATLIARVQTPHRFRSKRQFWAYCGLALETRTSADYHFQEGQLVRAKKPAFIRGLNLNHNHDLKNLFKSAATSAGARPGPFAVFYENLLTKGIQPAMARLTLARKIAAIALCVWKKGEPFNAEYLKPQAA

SEQ ID NO: 185704 - protein, 325 aa, unidentified
MGKETALGIDIAKEKFDVRLEVNGKAKKQQFANSPDGYKKLVAWLNLLKVERVHACMEATGTYGEALAEYLYVLGHLVSVVNPARIKGHAQSQMKRHKTDELDAEVIRHFCETQTPELWHPVKPEIKELRSLVRRRDDLVTMRTQESNRLQSGELTDGVRKSIDSMLEHLEQQITELEDQIQQHIEQHPDLKHQVELITSIPGLGQRTAIKLVAELMDIAGYTDARSLAASVGVTPSQHRSGTSVNGASHISKVGNGALRGALWWPAVSAMQHNPVIRNFVKTLQKAKKHNFAIIIAVIRKLLHLVYGVIKNDTPFDANWATSKA

SEQ ID NO: 185705 - protein, 338 aa, unidentified
MTQFQSFVGVDMASATFVACVGTTPWKLIVKPVQFDNHEEGFLSFLEWMKEHKLTPERTVVCMEATGVYSEGLAYFLYANGYSVAVEPPLNIQRKFPVNASKTDELDCQYIAEYACRYVDKLSFWKPRAEILEQVKLLLTTRQHFSVQLTGHKNALHAIQRKKVASDLAKHVHQNMIEQISKHIKAVDQEIRRLIESDPTFKQTLLLLLSVPGIGLQLAAHLLIAMQDTLDPKVLAAFIGICPLKHQSGSSVYSAPTSRHYGPPVLRKLLYLAACSVRTHKKPFQQYFFRKAAEGKHKKLILNNIQNKLLKIACAVVRSQKPYVSNYVSLNPLILKKA

SEQ ID NO: 185706 - protein, 340 aa, unidentified
MSTLYAGIDLHSNNSHLAILDQGDKRIFHKRLPNMADVLLAELEPFKDALSTIVVESTFNWYWLVDSLMEQRYKVLLANPAAMQQYKGLKHVDDKHDAFWLAHMARLGIVPQGYIYPKEERPFRDLLRKRGHLVRLRTSVINSLQGIISRNCGCSLSGNKIIRLRENHVEPLLAANEVLALSGEVSKDVIDFLGQQISRIESQVMEKVQLRKPFQCLQSIPGVGKILSLTIMLETGPITRFKKVGNFTSYCRKVPTSWTSNNKKKGKGNSKNGNKYLAWAFSEAAEFSRRHSDHARAFFNRKAARTNKSVAYSALAHKLARAAYYMMKNQVNFNPNKLFA

SEQ ID NO: 185707 - protein, 360 aa, unidentified
MLSMRRVGLDVHGKETTAVVLDAISGEFAVKRIVGRPDRVLEWLATLERPFQAVYEAGPTGYGLARGAAERGLDVVVCSPGHIRKHPGDRIKTDRRDAERLARLLLAGELRAVRVPTPAEEQLRDLVRSREDLRVDLMRVRHRISKFLLRRELYYPTSGGAWTGRHRDWLSSLHFDDAASEIVLQDALHTHDWMIARRDQLERALGELAEHSPWADTISRLRCLRGINTLSAVGLIAEIGDFQRFPHPRPLAGFLGLVPSEDTSGEHRRQGAITKAGSKHARRLLVEAAWHYRNPPRISKDLERRQRGHDPRAIDAAWRCQRRLYQRWQRLDQERGKRRTLVAVAVARELSGYCWELATL

SEQ ID NO: 185708 - protein, 309 aa, unidentified
MKPYVGIDVAKATLDVAIGSDGEMVQVENNDAGIAQLVKRLVEAAPALVVLEATGGYESLVAAALAGEGIAVAVVNPRQVRDFAKSTGVLAKTDSIDARVLARFAEAVKPEPRPLPTQEAKELDELLSRRRQIVDMLTMEKNRLAIAATERMKKALKKHIAWLEEALKRANDDIDTAVRNSPAWREQEDLLRSFPGIGPVNARTMLAELPELGLLNRKKIAALVGVAPFNRDSGQLKGTRTCWGGRATVRQALYMAALSAVRCNPVIRRTYAALRERGKKHKVAMVACMRKLLTILTAMVRDRRRWSPS

SEQ ID NO: 185709 - protein, 347 aa, unidentified
MLFIGVDVHLRKIVVHILDANGKTVKSQTLTGDIGLFLESILRLKEDCAVCYEASCGYGHLYDRLKRLPNVKRVVVAHAGQLRLIFRSKRKNDRADAKKLATLLFLDQVPAVHVPGADVRAWRQMIEFRSKTVQKCTAIKNQLRGLLRTHGIAGLSRKALWTRAGMVWLATVELPGVTAAFQRDMLMDSLRQEQVRLKRVTALLDQTAQTQPGVQLLRTIPGVGPRTAEAVVAYIDNPDRFRRSKQVGSYFGLVPCQDQSADANRLGHITREGPSTVRRLLTEAAWQGIRRSPEIAAVFERIQGGDPKRKKIALVATTHWLVRVMHAMLRSGEAARFTTRTKERAAA

SEQ ID NO: 185710 - protein, 465 aa, unidentified
MPIIAPIPRGERRLMQKAIHKTRDKNHARRLTAMLMLHRGERVSDVARTLCCARSSVGRWINWFTHSGIEGLKSLPAGRSRRWPFEHICTLLRELIKHSPGDFGYQRSRWSTELLAIKINEITGCQLHAGTVRRWLPSAGLVWRRAAPTLRIRDPHKDEKMAVIHKALDECSAEHPVFYEDEVDIHLNPKIGADWQLRGQQKRVVTPGQNEKYYPQYVKPFVRGQKNDGNDAQAIAVALMQPTMQFVPPKSPEQQDIQALHRARQRIVNHRTATVCQIRGLLLDRGIPIGSAVSRARRAIPLILEDAENGLSSRMRRTIAELYDLFNDLERRIHFFDKEIETVFRQSEACQRIARVKGIGPKTATAVVAAIGKGTEFKNGRHFAAWLGLVPRQHSSGDKHLRTLFIHGARAVVRVATNNNDGHMNQWVNQLKERRGFNKTTVAVANKNARIIWSMLRNETEYQVV

SEQ ID NO: 185711 - protein, 343 aa, unidentified
MKVTTIGFDLAKNVFQVHGVDERGHVVVRKQLRRDQVAVFFANLPACLVGMEACGSAHHWARKLQGIGHRVRLISPQFVKPYVKSNKTDAADAEAICEAVARPNMRFVPIKTMEQQAVLSVHRVRQGFVKARTAQANQIRGLLTEFGLVLPQGISNVMRGVPQLIDVATDLPASMRQLIARLLENMKVLDRQVKELEAQIKAWHQGSELSRKLEKIPGIGPLAASALVASIADARSFKNGRQVAAWLGLVPKQDSSGGKPKLLGMSKRGDTYLRTLLIHGARSAIVAAQRRGKPNVWLSGLLARRHPNVAAVALANKNARTIWALLAHECEFRPDYLPRPATA

SEQ ID NO: 185712 - protein, 369 aa, unidentified
MKNRLLYVGLDVHKNTTDVAIASGRSNGKVRSYGKITSTLDALNKLIKKLQDGDKELQFVYEAGPCGYQIYRHLNAKDIHCCVVAPSMIPRRSGDRIKTDRRDAINLVRLFRAGELTSIYVPTPEDEAIRDLVRCRDDMKRFERKARQRLLSFLLRHGHHYNGKKNWTKGFYSWLATVRFSYPAQQITLQEYIDVTNECSERIERITQQIQVHVEEWSRAPFVKAYQAMRGVSLIVSTTVAAEIGDMRRFQNPKQLMAYLGLIPSEHSSGKTVRRGPITKTGNSHVRRVLIEAAWTYKMQARISSILLKRQKGLPKSICDISWKAQTRLCARYRRLYARGKSRQTVVTAIARELSAFIWAINRQVQLTL

SEQ ID NO: 185713 - protein, 405 aa, unidentified
MSSDVFAGLDWAVYTHAVCVIDTSGAVLERFEIAHDREGLAELMRRLARFGSRLRIAIERPSGLIVDALVEAGHQVFAIHPNAVKASRPRYRSHGAKSDASDAYLLADLLRTDGHRWAALSPQSDSIRALRALVRSRDDLVATRVALGNQLHSTLDAFWPGAACVFADITSPIGLAFLKRYPSPASAARLGEPALGRFCRSQHYSGRRSPAQLLARLHSAATGLAGPLSHAAAAQSVRAMVAVLKPLVAQIAKLTRSIERFVESLPDGQIIMSFPRAGHVCAAQILAELGDVRERFPSLEQLAAEAGTVPVTYQSGKTRSVAFRWACNHRLRQAVTCLADNSRHANAWARSIYTAARARGCDHPHAIRILARACLRVIWRAWTDRQPYDPERHFGALKLASTNGG

SEQ ID NO: 185714 - protein, 451 aa, unidentified
MAKMRPQVIDDEQHERVYERVVAVDVAKDSGMVCTRMPHPSRPGARQSTVWTVKARMAAIGALGRQLKRDGIQMVTLESTSDYWRIWFYVLEAAGLAVQLVNAAQARNLPGRPKTDKLDAMWLARLTEMGLLRPSFVPPAAIRALRDYTRARTRLTQERTRCFQRLEKLLEGALIKLSSVASKLTTESAKDMIKAMIAGERDPHTLAALARTRMKAKHDDLVEALAGMFDDHHGELAQLLLDQAAFCDTRIGQLTARITASVAAMPAAWGVDADGTTGPDAGTGPDAAALPAVARLAEIPGVSPALACSIIAETGLDMSRFPTAAHLVSWAGLCPRASQSGPRTRAGKKNQGDSWLRSHLGQAATSAARTTTFLGERYGRIARRRGKAKAQVAVARSILIIIWHLLSDPAARYTDLGAGYYQTRLDTDRKIRNHIRQIQALGFDVTITKTA

SEQ ID NO: 185715 - protein, 409 aa, unidentified
MQVIYSRCAGLDVHKKNVYCCILMCDENGRKQRQIRTFSTVTSDLLELADWLNRHAITHVAMEATGVYWRPVWAILEGQFELLLVNPHHVKALPGRKTDAKDCEWLADLLQHGLVRRSFVPPREIQDLRDLTRYRVELIQAQGRVANRIQKVLEQANIKLSSVASDTLGASGQLMIQRIIEGEDNTERLADLARGKLRHKIPELRVALNGRVRPHHRFMLKEQYSEWKALAERIKRVEQEIDGRLGPFEHAIMRWTSIPGIDHVTACCLVAEIGTDMDQFPTAQHLASWAGICPGQKESGGKRMSGKIRDGNRWLRRCLCQAAWAASRKKDSYFSAQFKRLASRRGIKRALVAVAHSILIIAYTMLKKAESYIEAGGDYFERISKIQLQNHLLRRLKRAGLAVTVQPTG

SEQ ID NO: 185716 - protein, 402 aa, unidentified
MWYAGIDWADTHHDAVVIDEAGRQADALRVMHTKEGLAELTSFLLARAKTPDQMACIVETNQGLLIAALLEAGFTVYPVNPKTVDRRRSASGAKTDAIDAYLLAKTGRADLVDLRPLKPDSPLVQELKVLTRDQDALIQSRTRLVNQLTACLKAYYPVALQLFAKLQQRSTLVFLQTYPTPQAAQAASVAEIEATLRKGHHSNPTKIAQQIFARVHQPQLIADTITTRTKARLMLALVSQLLPLIEQIATYDKEIKRLFLTHADNAVFRSLPGAGKRLAPRLLAEWGDDRTRYTGSNSVQALAGTAPVAFQSGNYAKAHKRYACLKPLRNALYQFAWQSTKQEAWALAYYRRKRAEGKSHSVAVRALANVWVRIIYAMWLTHACYETATFEAAQRAHAHEAA

SEQ ID NO: 185717 - protein, 347 aa, unidentified
MHKDELEHIHLNMKTETSPKITSPTYVGMDIAKATLQVHSNGHQIEFQNDPPGHAQFLKQLAKLTRPHVICEATGGYERAVVEALHQIKIPVSVVNPAHTLAATQAQGKRAKTDRCDAEALTDYGQRFKPEPTAPVPPKLREATELTVWLKQLIDNRALAKTQAEHHANQFVSQQHQELLKHYKHQIDTVEKEIKKLVQSQKEFQQRLDCLTEIQGVGFRTALMTLVFMPELGSMNRGQTAALAGLAPWTRESGTMKGKRCIGGGRAQVRPVLYMAALSASRCNTVLAPFYKSLKVRNKPSKLALTAVMRKLLVYMNHQLKALPTTASAVETKPVRKTKESKKSFTK

SEQ ID NO: 185718 - protein, 315 aa, unidentified
MTIADQVFVGIDVSEAQLEVHMLPSEEHFVVQNSPQGFVQLLGRLKEAPVELVVMEATGAVERAAALAVAEAGLDLVVANPRRTRDFVRAMGLLAKTDKIDAKGLAHYAQRVRPTPTQLPSAARQALKDAIQRRRQLLKMRTAEKNRLRRVDAASVRRSIEQLIRCLDKQIEKFERQIQKLIAQDPGARRLHEIITSMPGLGTQTACAVIAELPELGHANRQQIAALAGVAPYNCDSGTLRGQKRIYGGRATLRQALYMAMLAATRYNPVIRGFYRRLIQAGKPAKLALTAALRKTLVILNAMVRKDETWHPELP

SEQ ID NO: 185719 - protein, 398 aa, unidentified
MICVGIDIAKGKSTVCFLKPGGEVLRTPYDMEHTAEGITKLIRDIRSYDEEVRVVLEATGHYHLPVVAQLLEANVFVCVVNALCMKKFCSQDIRKAKTDRIDAAKIAAFGLTYWQELKQTKPTDEVYRELRLLSRQYFQLTSMLVKAKITMNNLLDNIMPGITDLLYDREQNHKLTDFVLRYLHFDKISAMGERKFTTDYCNRAKKQGYRMYERQAKEIFALVQNGIPALPMTASTTIVVKEAIRVVRELENSRASILAQMQTFAKSLPEYSLIRSMACVGDTLTPLVIAEIGDVRNFHSKHALIAYAGIDAPPYQSGGFCGTERHISKRGNGYLRHVGFEIMQCKLRLKPEGDAVYDFIQKKRSEGKCGKEAMVAGINKFLRIYYGKVTELYRELEA

SEQ ID NO: 185720 - protein, 349 aa, unidentified
MEATRQVIGGVDTHKDSHVVVALDHLGRQIGSSSFPSTGEGCRAILDWLRHFGQLDRVGVEGCGSYGAGLARLLRSEGVEVIEICRPNRQMRRRRGKSDLLDAEAAARAVLAERDGVTPKSADGPVEAMRALRVARSSAIKARDQATNQLHALIVTAPQNSRDRFNEPKIDKLVDRLLGAEAGAISNQAGYESAVRSLASRWKALDAEAAELASKLKMVVIETAPPELLELQGVGPDVAAALMIAAGDNPERLRSEASFAALCGVSPLDCSSGRQDRHRLNRGGNRDANMALWRIVMVRLRWDPTTRAYIDKRVSEGKTRRGAMRCLKRYIARDVYRLLTTPGAAPIAA

SEQ ID NO: 185721 - protein, 412 aa, unidentified
MELLHRRCCGLDVHKETVVACLRLVSDGKVTTEVRTFQTTTADLLRLSEWLAANGCTHVAMEATGVYWKPVWHILDDGEFELVLANAAHVKNVPGRKTDVNDAMWLAELLAHGLIRASFVPDTQTQEMRNLLRTRKQLVREQSSHVLRVQKTLEDANIKLDSVLSDLMGKSGRAMIEALIAGETNPVKLAGLADRRVKASPEKLREALRGRVTKHHRFLLRLHLNQIDALDAAMATVDAQVEANLGPFRTAVDLIMSVPGIKNLGAQAIVSEIGIDMSRFPSDAHLISWAGICPRNDESAGKRRSNRLRKGAPWLKTTLVQCAWAAVKKKNSYLQAQFHRIKARRGPNKAIMAVAASILTAIYHMLKDGTMYQDLGRDHFDRRSTDQQKKSLVKRLADLGYAVEIKPLAATA

SEQ ID NO: 185722 - protein, 361 aa, unidentified
MPGTMTWVGFDVHARSAHAAAIDVMTGELSRARFGAGFQTPVAWLCSLPGPVRACYEAGPTGFGFYRAAVKAGIDMQVIAPGLTPRGRSDRVKTDRKDAELLARCLLAGSLTAVRVPSVEVESARELVRAHDACRRDLMNARHRVSKMLLRHGRVYPKPSTWSQEHRRWLAAQQFEQAISELTYADLIACVDGLTARKSALAERISVLATDEQWWPTVARLRAFRGVDTLTAFAIHLELGADWTRFEKAHRVGSWLGLTPSRQQSGESDRQGSITKTGSTLARRLLVESAWHYAREPRIGATLRNRQDGQPEHVLQISHRAQQRLHRVYTGMRARGKPHNVTVVACARELSCFLWAAATAP

SEQ ID NO: 185723 - protein, 344 aa, unidentified
MHYCGLDVSRKSTHVCIEDGQGRRVTRGVVPTTPTGLAGTVERYAERGLRVAIEAGNQTAWIVDLLRELGAKVHVVHPLKVKLIAESKKKTDRIDAQRLAHLLRIGGLPEPVHVPSHRSRELRGLLVARRQLVQMRTKLVNVVRGLARQQRIELRRRALRTQTGWGQLAAADLTPALREVVAAYEATVQAVGTALGALDRQLAQRARRDPRVARLETMPGVGPVCAQTLVAAVDTIDRFATAKKLVAYAGLAPSVRASGERVEYGRITKQGRSEIRAVWVQAAHAALAVKGATAAPLQRWWTRVARRRGKKTAVVALARKLLTIAFHLLQDGTTYDARRLRHAA

SEQ ID NO: 185724 - protein, 441 aa, unidentified
MSNPNPLDLPVINPQAAGVDVGSEKFFASVAGQAPRVFLTVTAQMQEVCEFFKAEKVRTVAMEATGVYWINLHGALEEAGLEVVVVNGAHCRNFPGRKTDMKDCQWLAVLHAHGLLTGGFVPPAQIRRLRDYMRLRGDLVSMAAQHIQHMQKAMDRLNVKIHVVISDITGRSGMRIIKAILAGERQPEKLVELCDQQILKTKKASMLEALRGLWRQEHLFALELALESYESYQRQIAKCDAQIAEVIQGLSGGKPTPELGPAKELRHNAMDLEGLQTQMAQIFGKDLTKLPCLNESTAALLLAEIGCDMSRWKDWRHFGSWLALAPCNAQSGRKRRRVKRYLTRAARILCRAVQCMAVGKHTWRASYYRRIRAKRGSKVAIKATAYKLAKLIFLVLTQGWQYVEQGIAKYEERIRQMELKALAKLAKKLNYVLLPKTLATA

SEQ ID NO: 185725 - protein, 483 aa, unidentified
MKSKPEEKNKKATNHPTQHHWHEMNRKQRRETIRKIQSEELSLEVIHPHAAGIDIGNGSHYVAVPPSRDSQPVRCFGCTTAELKAMADWLQQCGIRTIAMQSTGVYWVAVYDILEQAGFAVYLVNARDTKNLPGHKSDVQESQWLMKLHTYGLLRNSFRPPQEIRTMRTYWRQRNDLVRSAGRHILRMQKALTQMNLQLANVLSDVSGATGQAIIKAILAGERNAHKLAEFRDPRVKASEEQIAQSLEGNWQPDLLFLLKQEQDGYEFCQKQMAECDRQLEQYLHQREDRSQGAPLPEEKRKERLKKKKGNKPQFNLREGLFRMTGTDLTRIDSIDVMTAMTVISEAGYDMSKWKTENHFVSWLRLCPDNRISGNKVIGKGRLPTNNPLNVALKMAASALLKSKTYLGAQFRRLRTKLGAPIAIKAMAAKLARLVYRMLRYGMKYVDQGAAFYEAQHKQLQIKRLKWKAAKLGYKVTPVPAAA

SEQ ID NO: 185726 - protein, 358 aa, unidentified
MGRIQEHVLKDQEIFIGLEDSKKTWHLCVRCGGVVVHETSMPAKYSTLNNYFRNRFPGCKITVMYEAGFRGFNLHDKLEGDGWNCVVTPPNKVTDEKCRRNKNDRIDCRRLAKNLENNDYKSCYVPDRQLREDRQISRTYGQVQRDITRLCNRIRRSFEFHGLDDFFPSGSWGRKMYRDAKLLIKDMDISSSLCFSLNILYRELEYLWDLKKELTKELKKLSESERYKKSVQLLKSAPGVGMLTAIRLTLELGDMTRFKRKEEFANYLGLIPSEYSTGETERRGHITKQGNRLVRSWLIESSWIAIKYDPVLLNKYKSAMGFNGKYKKKAIVAVARKLAIRLRALLLSGEPYIVGLVA

SEQ ID NO: 185727 - protein, 367 aa, unidentified
MSTLYVGMDVHKETIVVAVAEEGRDGEIRSYGTFENTPASVDKLIKRLAKAGRTLHFCYEAGCCGYSLHRQITAARHTCDVIAPSMIPKKPGERVKTDRRDAIKLARLLRAGELDVVWVPDAAHEAMRDLVRARAGASNHLKAYKQQLQSFLLRHGQIYGGESSWTRTHYRWLAEQKFEHPAHQIVFQDYINAIHDEEKREKQLIRQIEKLLPDWRMRPLVDALCLMKGLNLVASSTVLSVTGDLRRFPTPTEFSGYTGLVPSEHSSGNSTNRHGITKAGNTELRRVLIQAAWCYRFPARITKPKEPRLTATDKAIRDVAWKAQVRLCGRYRQLIARGKLAPVACAAVARELATFIWEMGQIVPLTS

SEQ ID NO: 185728 - protein, 421 aa, unidentified
MQPEAPETFAAFVGLDWADAKHDVCLQAAGSEQREHSSLDHTPEAIEAWVCALQKRFEGKPIAIGLELNKGPIVFALRKYHFLVLFPINPLTLARYREAFTPSRAKDDPTAAALQLELLRTHRDKLQPLKPQSPAMRALAQLVEHRRRVVGDKVRITNRLTSTLKNYFPQVLQWFQDKDTVIFCDFLSRWPALTTAQLARRAPLETFFREHHVRSADVIAQRINAIKAALPLTTDEGIITPNVLLVHALVAQLRVTLQAIADFDTAIAQRAQEHPDFPLFDALPGAGAVFAPRLLVAFGEQRERFTSAEELQKYAGIAPVTERSGKKSWVHWRFQCPTFLRQTFVEWAAESIRHSFWARVYYQQQRDAGKAHQAAVRALAFKWIRILFRCWQDRTPYDESVYLNALNRRGSSLIQNLAKES

SEQ ID NO: 185729 - protein, 404 aa, unidentified
MIFAGVDWAEAHHDVCVMSQDGQVLGQRRVEHSVAGIGELHALLAAHAADGESVAVGIEIDRGLVVTALLAAGCQVFAINPLASSRYRDRHAVSRAKSDRGDAKVLADLVRTDRHNHRLVAGDSDLADAVRVLARVHQSAIWSRQRQVNALRSALREYYPAALAAFGTDLASGDAIAVLTLAPGPEAGRALSRAKIAAALRRAGRRRNAEQRSQEIQAALGADYLTARPAVTSAYAAAARSAIRLIAAYTAEIAELEQELSEHFDQHPDAKIIRSLPGLGTILSARVLGEFGDDRTRFASPQSRKNYAGTSPITRSSGRSKIVLARHARNRRLADALEQWAFCSLTTSPGARAYYDQLRRRGKTHHQALRQLANRWTGILHTCLERQQPYDESAAWAHLQTAAA

SEQ ID NO: 185730 - protein, 425 aa, unidentified
MEHVGIDLGSRKSQVCTRKVNGRYVERASLTAELPVLMRQWPQSRVVMESCAESHAIAEAARAAGHEVVVVPSSLVRELGVGWRKMKTDERDARVLCMAALRLEGDELPSVHLKCERSRQWLDLVMTRGHLVQARTAAVNAIKGRLRRELDVQDTRFSSQFTSKVRERLTSKPSGLDMSMSVLLDTVDSHSEQIERLEKEMKSIAQPSSESRSEMSKEAAHNAELLRRARTMPGIGVLTAMALLATIDEPKRFASPAKLGNYLGLTPGQDTTGFDPKMLGITKAGPSHVRWLLIQCAWSMMRARPNDPIVRWAKKISERSNPRIAAVALARKIACVQWAMWRTETDYDPSMVGRGESEASADATSAPPSSSQQAREKPEPEAPSARGSKRASARTQKTSTRKSRTADAGAKSAGTRTRKAASATN

SEQ ID NO: 185731 - protein, 367 aa, unidentified
MQNTIVHYEGAASLEAAATKVKPSGAQIKIGLDVHARLYVAVAQYDHLLPKAALRLSPGEFVPWVQVLLARGHSVHVVYEACGFGFSLYRQLIAAGAHCYVIAPRKLDEEHSRMKTDPRDATTLCQRLSRYLEGNTRELALIRVPSEEEEQARHVSRQRGQLVCHRQKLEAQGRSLLISQALPAPAHWSKEQSWTRLGRHLPAWITTRLQTARPALLSLQQQINALTSELEASAPSTLPRGVGKLTSVVLTREICDWHRFNNRRAISSYTGLCPGERSSGSKRVPGSVTKRGNPRVRAALVECAWRMVRFQPQYPPVQKRLAILSKGSRALGAVRKKAIVAVARRLAVDLWRLHTGRCTAEQLGFTI

SEQ ID NO: 185732 - protein, 343 aa, unidentified
MQAVTTIGLDIAKSVFQIHGVDAAGNVIVRRQLKRRYVLPFFQKLAPCLIGIEACASSHHWSRELKALGHTVRLMPAAYVKPYVKRQKNDAADAEAICEAVTRANMRFVATKTLEQQSCLMLHRTRHLFIRQQTAVINAIRAHLAEFGIVAPVGRNGVEQLLDVVADTSDKRLPEVARACVAALGAQLRMLKARILEFDRLIIAWHRSNEASKRLDDIPGVGPALATALIASVADPKAFRSGRNFSAWIGLVPKQHSSGGKDKLGSISKQGDRYLRSLFTAGALAVIRYAKIHGSKHRPWLTALLARRPTKVAAIALANKIARMAWAMMARDDHYKEPVALAA

SEQ ID NO: 185733 - protein, 445 aa, unidentified
MTRRRTKAREPRPTGRESVGFRRRREKRRKIELALAGRPLVAGLDLGSRTHAVWLTGRDLDPVEHFRIDHSLEGVAKFVKRAETAREQGRFDRLLVFMETTGQIWRNVSAALEERGLACRTISPLAVDRKREIEHLTYAKGDFRDAELIARLGIEGHWLGRTLETEPVWIELAALAREHEVLLELEVRERLRRRSLLELALPEFLDIFKDPCLKTASALLRALSSPAVTTVDEVLDRARSLAQSKGLHRKKVARLVSLLEAGPSFGVTRMLRAAFLRVGLSAERFDVLGHQRTVVRRQLVELYQRTPYATFLDTIPGVDPANHALVLGFVGDPAVYDRATCLVKLAGIEPRENHSDESEGSHAISRRGLPQLRHVLFRIVSSLSKANDEFSAYVERLGSRSSNPLAYHQAIVAAANKYLRVVHRLCTRKETYNAAKVVPSNESKK

SEQ ID NO: 185734 - protein, 488 aa, unidentified
MDEVEDEPLFADRVAGLDIGKAGVEVTVRVPGDTAGGRRRQETRTFGTTRRELLDLAAWLARWEVVKAGMEATGDYWKPVFFLLESRGLECELYNAGQVKALPGRPKTDRADSIWLAKITERGMISSSFVPPEPIRRLRTHTRYRRHLTQARTAEKQRVEKLLEDGHLKLSSVISDIHGVSGRDMLDALATGQRDPKALAQLARGSMRGKMGRLEEALDCSFFTDQHAAVLAMMLAAIDYHSTQITALTATIETLIAPYLHQVEQIDAVHGIGRISAQDIIAEIGTDMTVFPTTAHLVSWARWSPQVKQSAGKRKGSNSTGRGNPTSARPSAKQPWAPRSSPSPAARRRALPSASAGVGEGLGRHCNDLLHLVDFGRVPSRASSPRGSWRNRGPAGGRLLARAFFLSQLVQHAGDHDLPCRAAAAAARCLWPDTHWGEAQSGCGPQAHDSAELLGIMVLGLPTGSTCAGGRRPAVHPIGRPLRRRRRR

SEQ ID NO: 185735 - protein, 446 aa, unidentified
MNSIFQRSNPAIKKLFQEAGSPKKVMCVPIDYAKRQHTALVCNGEGMQLRGTFNIHNTAEGVAFLEDIIKGLCKKHSIRKAHVFFGGEDCTAFCYNFIHALLEKKYLGIGINAYEGAEARQNQLASTDKLDLLGIASVLINKKHGRTLSTAYGQARIMRELTHHRDSLVKAHTASAYRIYHWVDQLMPGFLDAKQSGLEPFSEASLWLMSQNFSPRQLLARKNDILAEKLGLLMLRNTDAKVAQLKQLARTTLPPPTGLCETLQDNFAREVALYRHLRDTLRQLDQQIARRLAATPGAMLTTASGIGIILASGLYAEIGDPARQRNMASLAAYAGIVSRLKQTGGPDNPARSLGRSRRACIPLKRRILDIALSISQYGAEELKADYRRRVEANQDARFTMGRRMLRICAHLIQRQDFFLPPALLANTDPDARKAYFAKAWDPILIK

SEQ ID NO: 185736 - protein, 416 aa, unidentified
MDAIVERCAGLDVHLDTVVACVSYGKLDIKPKKEVKTFSTTTKGLLELLDFINQKECTHVAMESTGIYWKPVWNILESGAFDLIVENAKKIKNVPGRKTDVKDAEWIASLLRGGLIEKSFVPPERIRDLRDLTRLRKELLGEVNRNKNRIHKVLQDANIKISSVLSDVFGETGKSILNQIIGNQCITEEFIYSLYEGRGKSKLKSTPMEMYEALNGKIRGHHVILLGMHNSNIVFLEKQINELEKEIDILLQKERDSLELLETIPGISKISASSIIAEIGTSMDVFKTEKHISSWAGLCPKNNESAGKKKRSGIKSWNNWLRSMLCECAWSATKKKDSRFKNKYWSMVPRMGRKKALIAIANMMLRLIYHLLKTKSTYKELEIQYFIDKDKRREDRIIKELKSKGYLVEKDSLQMA

SEQ ID NO: 185737 - protein, 346 aa, unidentified
MKITTIGVDLAKEVFQIHGVNAHGKTMLRKQLRRNKMTKFFANLEPCLIGMEACGSSHHWARKLGEFGHTVKLMSPQFVKPYVKTNKHDMADAEAICEAVSRPNMRFVPSKNVEQQAILSVHRARQGMVKARTAQANQIRGLLSEFGIVMPQGIRSISKRIPDILEDAENSLPGILRKLLERLNDHLKELNRQVEELELQIKLWHKGNEASKKLEAIPGIGPITASAIVATVGNAAEYKNGRQLAAWLGLVPKQHSSGGRQTLLGISKRGDTYLRTLLIHGARSVIRFAENKTEPESWLRKLITRRNKNIAAVALANKNARIIWALLVKGTTFHPNHASAAYAAAA

SEQ ID NO: 185738 - protein, 340 aa, unidentified
MSVMIGIDPHKAVHAACVIDGNEVQLAELTVRSGPRQVGQLIDWAAPFDARTWAIESAGGLGYLLAQQLLARGERVVDVPSTLAARVRLLGSGKSSKNDANDARAVAVAALRAPSLRTVRVEDHVAVLRLLAKAHLDAGRARSQACSRLHALVNELIPGGISKEIVVNQARSTLADIEATSVVQRQRLQLAVELLEEITVLDTKLKCSKARVATAVTASATTLTEMFGVGPIIAAMLIGYTGDPARFPTAGHFAAYNGTAPMEFSSSGRTVHRLSRRGNRTLNHAIHLIAVTQIRHPHSEGRAYYDAKIAAGSPPRTAMRALKRHISNRVFRHLRGDAAC

SEQ ID NO: 185739 - protein, 349 aa, unidentified
MGKISTDYSSVTIVGLDLAKHVFQVHGIDAAGQVVVARAIRRKDLLSFFASLPCCLVGMEACSSAHHWAREIGDLGHDTRLMPPAYVKAYVRRQKNDAADAAAICEAVTRPTMRFVPVRSIENQSVLMHHKVRELLVAQRTQVINALRGHLAEIGMIAPQGPKYARELAASIMTGDDGLPPVVREALRPLVRQLDCLDKEIALADKQIRAMAKADEVARRLMSVPGIGPVIASAIAASVQDPSAFASGRAFAASLGLTPKQNSSGGKERLGRISKMGNRYLRKLLVVGAHAVLFNRKRHSDALRTWACKLMETKPFKLVAVALANKLARIAFAVIRDKKDYSKSSPAPA

SEQ ID NO: 185740 - protein, 420 aa, unidentified
MTTQTSHDTFAAFVGIDWADTKHDGCLQADGSAKRECFQLEHTPEAIDAWVTTLRTRFDGQPVAICLELNKGPLVFALRTYDFLVLFPINPLTLARYREAFTPSRAKDDPTDAELQLELLLTHRDKLQPLNPQSPTMRALEQLVAHRRRVVGDKVRITNRLTSTLKNYFPQVLQWFQDKDTHIFCDLLSRWPTLKAAQLARRATLETFFRDHHVRSEDVIAQRRHAIKTATPLTTDEGVITPHALLVQALVAQLRVTLQAIADFDTAIAQCAQTHPDFPLFQALPGAGPVFAPRLLVAFGEQRARYASAAELQKYAGIAPVTERSGKKSWVHWRLQCPKFLRQTFGEWAAESTRHSFWAQVYYQQQRDKGKAHQAAVRALAFKWIRILSRCWQDRTLYDESTYLQALTQRGSLLMHNLAK

SEQ ID NO: 185741 - protein, 312 aa, unidentified
MEKLSYGGIDVSKDRLDVVVLPEGWFFSVSNDTAGWTELVARLRPLAVCAIGLEPSGGYERGIIRALLVARLSVRRINPNKLRQFARARGVLAKNDRLDARLMAEYVAIMPTRAVQRDDAVDRLAEVVTMRRQLCDEHVTVENQTAHLEDAMLRRLSKRRLVRLEADIRLLDKRLAEMVATNAAFARLYELLTSMPGVGPVLAFTLIALLPELGKMSRKQIAALVGLAPYDFDSGKLRGHRSIYGGRMPIRNVLYMAALSASRYNPALKTFSNRLAHANKKSKVIIVAVMRKMITTLNAMLRDNAAWQPQSN

SEQ ID NO: 185742 - protein, 404 aa, unidentified
MIFVGIDWSERHHDVCVLDVDAMVLARARVPEGIDGVAKLHELLAEHTEEAKEVLVGIETDRGLLVGALVAAGYQVFAINPLSVARYRDRHTTSGAKSDPGDAKVLADIVRTDRHNHRPVAGDSELAEGIKLLARTHQNFIWERQRNVNRLRSALREFYPAALQVFGTQLGSPDAIAVLELAPTPELGRGLSRSKIAAALRRAGRQRNVDARASQIQQGLRSEQLRASAGLERTYGVIASSLVGLIAGLNTQIAGLEQDLHQAFEQHPDAEIILSLPGLGSTLGARVLGEFGDDPTRYADARARRNYAGTSPITRASGTHRVVLARFARNERLYDACHLWAFATLTASPGARRYYDLQRDRGKTHNQALRALGNRLVGILHGCLTHGKLYRADVAWPISEAKAA

SEQ ID NO: 185743 - protein, 342 aa, unidentified
MRYIGVDYHRRFSQLTMLDSKGKTLKEARIPNTKEALENFLKSSVDGKTVAVLEAGRNWQVMYDLLEEEIDTVKLAHPYKVKAIAEAKIKTDKIDSKILAHLLRVDLVPEAYVPSKETRKAKDILRQRMFFVRLRTKVKNRIFTILDRHPEIKDRPSVVDLFGKQGRLWLDKLKLYSPDDKLLRENLELLDNLNRRIESSDYLVNLLSTKHPYVKRLLTIPGIGKFLSVLIAYEIDDIKRFFNEKKFAGYIGIIPSTYASGNRLTHGKITKQGNKYLRWALVEAIWPAINKDNYLRAYYERIKKIKGSNQAKVATARRLSTIIYRVLSEDRDYIIKYPAASY

SEQ ID NO: 185744 - protein, 352 aa, unidentified
MSIIAFDSHKHYTFARVEGKNGENPKEFRIEHKRGNIVEFLSRQQPGSSVAVETIGNWYWIIDEIEQAGMEAHLVHARKAKMMFGCINKSDKLDAKGLNTLQRTGTLPTVWIPPGDIRDKRELPRTRMVFSGQRTRLKNRIHSVIDKYGLQDQFKDISDIFGTKGMKVICSVLGRLPPHTHYTTELLLEQLAQTERTIKAIEAKMNKLFNETDQHRLLKTMPGIGFILSVVILQEIGDIGRFGSAERLASYSGVTPRVHASGGKVRYGRLRPDTNHYLKWAFSEAGNSVAVNRNRYPARHVSQLYNRIRARKNHAKAVGAVARHLAEATYWILTKNEQYKDRGLLKVSPTGA

SEQ ID NO: 185745 - protein, 337 aa, unidentified
MSVYVGIDVHRKRSQVAVVTEDGKVQVNKNVVNGSEPMLRLIGDLPAGTPVAFEAAFGWGWLAELLEDYGFEAHLVHPLRCKAIASARLKNDKVDAAILAQLLRADLLPEAWIAPPAVRQLRALLRHRAGLVRLRTQQQNRIHAVAADFGYDRSGSYLSGVGRGWLAGLELPAASREIITDCLAVIDGLAPLIERIDGELRQHAKTDPRVKVLTELPGVGQFTALVMLAEIGDITRFASARKLASWAGLTPTVRGSDLTVRHGHISKQGSAWLRWVLNQAAQTAKRSPEFAATYATIAQRRGKKIATIAISRKLLTRAWHLLAGMQDTGTTTPPQRP

SEQ ID NO: 185746 - protein, 416 aa, unidentified
MIDKQQFAAYVGLDWGDQRHSVHLQVSGQSKAESFDLEQKPEALHEWVARLVQRFQGGWIAIAIEQRKGAVIHALMMYAVLVLFPINPKSLARYREALYTSGAKNDPTDSELLLDFLTKHSEKLRPWIPDSEPTRELQALCEQRRKLVNRRVALTNRITSLLKQYFPQALDWIGDIASIQACDFLESWSTLDAVQTIGQNQLRTFYRHHNCRKASVISERLDQIARARPLTNDLAIIEPYSFIVEASAAQLRNLIRAIKRLDKRIAELFTQHPEHDLFDSFPGAGAACGPRLLTVLGTDRSRWTSAVELQSYSGIAPVTEKSGNSCWIHHRLACAKFVKQTFHEFAVQSIRYSNWARAYYDLQRSRGKEHHAALRALAFKWIRIIFRCWKDRKPYDEATHVQSLRRRGSPIVEKLP

SEQ ID NO: 185747 - protein, 341 aa, unidentified
MQRTVIAVDIAKKVFQLHWVEMDTGCIERLQLKRARMLEWFANRTAALVVMEACGGAHDWGRALIGLGHDVRLISPRKVRPFVQRNKTDAADAQAIWTACQQPGMRFVPVKTEAQQIVLSLHRLRAQLMKTRIMQTNELRGLLYEFGIVLPEGHAALLKALPDVMCDAKTRLPAMLMDSLDEQLRRVQRLQADIGLIERRLSQQMRELPACKAVAEIPGIGLLTATAVVASMGTPAAFKDAREFAAWIGLVPRQTGTGGRVRQLGISKRGDAYLRTLLMHGARAVVIRSKDGPTWPWLTALLQRRPYSVAVAAVANKLARTIWAVLARGQAWHPEAWQTAH

SEQ ID NO: 185748 - protein, 344 aa, unidentified
MIYIGMDTSIKSFEVYAINDRKKVVFRDEIPATRSALRLTVRGLGEEPKLVVFEAGNQLKWIASTLKKLRGVHVHVVHPNVVKWISQSSGKTDKIDARKLAQLARGDLLPKKVHIVEGKVRQLRELLSARSKLQSKRVALINTIRGYMLQEGYKLPKKFFDRRDWKEQLNKSKVGQTTKLIIASFMTSIEALLESERQLSKELLKIEDDRLDKLESIPSIGGITSRTLLSAIDDAKRFDDKKAAAKYGALTPRIFQSGEMVHLGRINQDGRHEVRRVLLQCAHTVARMKTLAAKPLQEFFFRIMKRRGKKIAIVALARKLMTIAYAVLKTGEYYDPAKLVSQPR

SEQ ID NO: 185749 - protein, 337 aa, unidentified
MTDVHILAIDLAKRSFQICATAPGGAVLFNRTVSRTKLEAHLREQAPCIVAMEACATSHFWGRFAQALGHDVRLIPPIYVKPFVKRQKNDAADAAAIAEAAVRPNLHYVAVKSAEHQARAVAFRTHQSFVGQRTQLINALRGHLAEFGLVVAQGPANLKSVVCMIDDSAIDLPDAVRDVARLYLDQIALLTNKIEELHSKLVHSTKVDDAMRRLCTVPGVGPVTAGAIMAFAPDLRTFASGRNFAAWLGLVPRQRSTGGKTRLGSVSKMGQADIRKLLIVGAMSRIRWIVRKGVLPDNWLGHVLGRKPRMVAAVALANKMARMIWAMMTREENYRMA

SEQ ID NO: 185750 - protein, 363 aa, unidentified
MIVIGTDTHKRTHTCAAVFAQTGQLAGELTASAREPGFRELLAWGRDLDEERIWAIEDCRHVSGSLERFLIASGERVVRVPPKLMGQSRRGERSAGKSDPIDALAIARAALREGPETLPAAYLDERSLRVKLLLDHREDLVKARSEDQCRLRWHLHDLWPELELPAGCLDRIVWLDRIARKLARAEQGTRVRIARELVKEIRRRTRRIKELEREIAALVKAQAPELLELEGCGALTAAKLIAETAGAERLASDAKFARLAGVAPIPASSGNRVRHRLDRGGNRQLNCALHRIAVSQGQAHPPARDFLAKKQAEGKSRMEALRCLKRHLARRVWRLLLESERERPMTTVDPQRGKLTPQIAAAA

SEQ ID NO: 185751 - protein, 345 aa, unidentified
MPIVGGLDIHRKQITFDCLDTDTGELRRGSIAPADRAHLADWLVQHLAGRAEAHLAFEGCTGWRYVAEELSRAGVYGHLAEPADTAALRGPKRHAKTDRADSQHLRELLVDGRLPECWIPPAHIVEARALLETYHDLRVEHTAWVQRIHAVLFHQGAHRPCAGLRSVEGQAELAVITATELSAAGRLQVATALGMLTALEDHLHRLHRELIDAARHLNGAKVLSARLYGVGLVTALALTCWLGGASRFSSARKAVRFAGLDVTVHSSDGKRSPGRLSRQGPAVLRWCLYEAGKTHARCSAPDHDYYAQVQQRIDGKRAALSEARKIVRQAYHILTELGDGALTNT

SEQ ID NO: 185752 - protein, 344 aa, unidentified
MNVTTFGLDIAKNVMQVHWVDGQTGEVGRRALKRSQLAPFFARQAQCRIVLEACGSSHYWGRTLSALGHEVRLIHACHVRPYVRGNKNDAADAQAIWSAAQQPEMRWVPIKSEQQQAVLSLHRVRAQWIKVRTQTTNGLRGLLYEFGALLPGGRQAGVKALGASRAEIDAKVPVLMHGLIDGQLQMLRQIDERIAAIEGELQGLEHQLDSARRVRQIPGVGLLAATALAAVLGEDARGYRNGREFAACLGLVPCHRGTGGKVVLGRLSKRGDPYLRTLLMHGARAVIFHAKSKSTWLEKLLARRPLNVVVAALANKMARTAWALVTHGREYQAGGFAKASSPNT

SEQ ID NO: 185753 - protein, 347 aa, unidentified
MEKHTTLAVDLGKSVYEVAVSQHPGRVAERHRLSRPAFERFLAERPAATVLMEACGSAHHWGRVVRSLGHEPVLLPAHGVKPYVLRNKTDRSDARALLEALRNADLFPVPVKTVAQHALTALHRTRSAWMATRTARINLGRGLLREFGIPIPVGSAHVVPRILELLHDSTSAVPHAIRPTLDSLCSEIRELERRIKAIEKQLAELARDIPATNRLLSVPGIGLLTATALVAFVGDVGRFASGRRFASYLGLTPRERSSGNVRRLGSISKRGDAYIRMLLTHGARAVLRSAVMAARSDKKLDPLRAWAVGLQQRRGHNRATIALANKLARIAWAVWKRDQPFQDRKAA

SEQ ID NO: 185754 - protein, 360 aa, unidentified
MTGTMTWAAMDVHARSTTAAALDVQTGELSRRRFDSGRVEPVVEWLAGLPAPVHACYEAGPTGFGLYRAATKTGVRCEVIAPSKTPRASGDKVKNDRKDTEHLLRQLMAGALTPIAVPPASHEAARDLTRAREQVRGDLMRCRHRLSKLLLRHGRVWDQSTWTQAHQRWLGAQRFEHANTELAFLDNLAACQGLLARRVALDERLSHVARDEEFWPVVRRLRAFRGIDTLSALVIMLEVGDFQRFARAVQLGSWLGLVPSRQQSGESDTHGPITKTGSRYARRILVEASWHYLRTPRIGVTLAARHESLPDNVLQIAWRAQHRLHRVHRRLRAHRKPPNVVNVAVARELSCFLWAAATAP

SEQ ID NO: 185755 - protein, 342 aa, unidentified
MDYYAGIDVSLECSSVCVVGTNGKIIREGKVASEPDALIGWFRSLGYELSRVGLETGPLSQWLFAAMRKAGLAVELLETRHVRKAFEAMPVKSDRNDARGIAQLMRLGWFRPVHCKSMNAQEVRVVLTARKLVQTKLLDVENSLRGILRGFGLKVGKTTARSFAGRIQELVDGNPHLEAIGEALLSVRAVLLREFNAFEKRVRAMSRLDARTRLLMSTPAVGPIVALTYTAAIDDPARFKSSKQTGAHFGLTPKKYQSGETDYSGRISKIGDASVREALYQAAHVMLTKPVKGCSQLKSWAMRIAKRAGTSKAKVALARKLAVILHRMLANGTPFNTAAATA

SEQ ID NO: 185756 - protein, 341 aa, unidentified
MTNFSVLAIDLAKHSFSFVLLNKQGGVEKKGTVSRARLLKLISSLTFNKVAMEACSSAHHWARLLIERGHTVELLPPQHVKGYLRGQKNDINDAMAIAEACQHGKIRPTRVLTIKQQDEQAFSRIRELLGSEQTKVINQIRGLLSEYGIIISKGVASFTRDLPLILEDGENGLTPEFREILFRRYQQFQAIKSELDWYNETLQQKVKSEKVCQKLMAVPAIGPINSFSLLHWLGDGKQFKRGRDASAALGVVPKQYTTGGKVRLQGISKRGNSRLRASLVHGARAVVTQATKQMKEDKLSLWLRGLVERRGFNKAVVALVNKVVRIAWVIVAKGETYCPAV

SEQ ID NO: 185757 - protein, 316 aa, unidentified
MDKQLKKVFIGIDVSKKTLDVACDGGVFSAQFSNDEAGYPKLIDAIGQLSPSLVVLEATGGFETAAVGAMVSAQLPVVVVNPRQARDFAKAIGLLAKTDQVDALMLARFAQAVSPQLRPFKSEETRELEAVLTRRRQLVDMVTAEQNRKLMAPARIAKEIDQHVQWLRQRIKGADTDLDTAIKSSPVWQAKADLLACVPGIGPVTMVTLLAELPELGTLDRRAICALVGVCPFNRDSGKFRGKRRIWGGRASVRATLYMATLVATRHNPVIKQFYQKLLEGGKLKKVALVACMRKLLVTLNAILKNNTTWSAIYLT

SEQ ID NO: 185758 - protein, 328 aa, unidentified
MSASAIVALGIDISKGSFDVALLNANNRVKRAKFDNTAAGFEQLSEWLTSQDVEQVHACLEATNTYGHALARYLHHQGHQVSIVNPARIKGYGKSQLSRTKNDAADAALIARFCRDLKPTLWHPAPDEVATLQRLTRRLEALEQMMTQEKNRRDLCEDDELKADIDAHIEFLEAQETSLKKRLQQHIQAHDRLAEQQALLESITGIGTQTALTVLGEIGSIEVFGSARQLAAFAGLTPQEFQSGSSIHGKTRLCKIGNARLRKALYFPALVMIRYCPEIQAFRQRLLAAGKQKMQVVGAVMHKLIRIIYGVLSSGEKFDAAKLVPQNT

SEQ ID NO: 185759 - protein, 338 aa, unidentified
MQLYCGVDLHSNNSVISMIDDTDRVISEKRLDNDLNIITEHLEPFAQDLTGIVVESTYNWYWLVDGLIEKDYTVHLANTLAIKQYNGIKHTNDETDARFLAHLLRLNILPTGYIYPKAQRHVRDVLRRRLLLVRQRTAQLLSLQSMIMRHTGKRLTSHQVKRLTQEKLPLYFKDTATLFTAGHALQLIQQLKIQVEEIEEFVLSYCKQNTPFSIITSTPGIGKILGMTILLETGPIERFAQVGNYSSYARCVPTNRISNGKSKGKGNARNGNRYLAMAFVEAAHYATIWEPAIKRYYQRKCKRVPLMVAKKTIANKLTRACYHMLKNNTVFDIKRAFG

SEQ ID NO: 185760 - protein, 342 aa, unidentified
MYYIGLDVHKKTISYCVKDAAGCVQSEGKIGSTRRELDAWIMSLPQPRMMAMEATIFTGWIYDHLLPHAEKVKVAHPLMLRAIAAAKRKNDKIDASKIADCLRCDFLPECYMASTEIRERRRTLRYRNLLVRQAVQLKNKIAVLLMEAGISYDKQRLHKVGYFRDLLKTHPEINESLRSLLGLCRETMVRLQKTEGALVRSLERDPLLAERVDRLMTIPAVGPITALTWALEVGEVKRFSSIKKAISYCGLCSGEKSSADVTKRSPISKQRNKHLQCMLIEAAKMAPRISPSLAMVYNQERQKGNVNRATLAVARKLVAYLVAVDRRQKDFLVMETENQTAA

SEQ ID NO: 185761 - protein, 317 aa, unidentified
MRASAAFFVGIDVSKQQLDIAVRPSGESWTVAHEEASLSALVARLRDLAPTLIVLEATGGWEVPVTGALAAAALPVAVVNPRQVRDFARSTGLLAKTDRLDAQLLAQFAEVLRPAPRPLPDAQAQELTALLQRRRQLVEMLTAEKNRLPLAARRIRPQLQAHIAWLHQQIAQFDEDLRQRIRSSPLWREKDDLLRSTPGVGPVLATTLVAALPELGTLSRRQIAALVGVAPLNRDSGTLRGRRTVWGGRAQVRAVLYMSTVVAVRHNPVLIAFYQRLRAAGKAPKLALTACMRKLLTILNAMLKHHRRWAPVRAQHA

SEQ ID NO: 185762 - protein, 342 aa, unidentified
MIVLGADTHKRSHTIAGVGATTGELLGERTVQVGRAGFGALLAWARALGGERVWALEDCRHVSGSLERFLIERGERVLRIPTNLMAETRKSARQRGKSDAIDAVNVARAALREGLATFPAAHLDGPELDLRLLVDHRERLVIHRVELNNTLQWHLHDLWPELELPGGALFSKKWSTRIARRLSRAEQTMRVRIARDELRRLRELTETVKALAREITQLIEQIAPRLLAEPGFGPLIAAKLVGEIAGAQRFATDAKLARAAGAAPIPASSGNTRRQRLDRGGNRQINAALHRVIVTRARCHQPTRDYIERRRGEGKTTRDAIRCLKRYLARQVWNLLRASPRT

SEQ ID NO: 185763 - protein, 348 aa, unidentified
MKYIGLDCHKQYDHATMIDTETGEIKAKRLPHIKEEFKEFIGDGAGTRMVIESCRDWSKTYELSEDLVEEVILAHPLKVKAIASAKVKTDAVDSRTLAQLLMADLIPQAHLRKGDNRVKQRVIRHRAFMVVMRTRVKSRIHVLVDSQLLPPDKLRTKPIDLFSKKGMEWLSSLEWARAEDKKLVESHLRVMEVINQEISITNDMVKEIYEKDQDAQLLATIPGIGVTLAMLISIEIDGIDRFPSVSNLYSYAGLVPSTHSSGGKTYHGKITSEGNRWIRWALVEAVVPASYADVEIRERLNTLRKKKGANVAKTAIARWLLKVVYHVLKERRPYIAAYNNVAKAGAAF

SEQ ID NO: 185764 - protein, 329 aa, unidentified
MQIYGIDLASEKFDVSFLDSEGKPAHITVKNARAQIEKFLDRLPESCRLVAEHTGVYGDLLLKLADIRQIPVSYVSGYEIRHSMGLQRGKSDPVDAARIREYGERHPDKLEDTHFPSDTMYELKELYATRRLLVQQRKQLQTMLKGDRKRPVRSETAQKVKLEMMEQLNRQISAVEIKMNQLIGDDDELSKTSSIAQSIPGIGPVTATELIIKTDNFRRVSSAKKCATLAGISPFPNSTGKSDRGSHVSHMGDKELKSLLYMCALSAVTCFDKMRVYKMKKYDVEHKHIFVVMNNVANRLLKILYALVRKGELYDPSYSQTDPRLKIAI

SEQ ID NO: 185765 - protein, 345 aa, unidentified
MTMYCGIDLHSTNNYVAILNDKLERVAGQRLGNDLEEVLRMLSPYRGEIAGIAVESTFNWYWLVDGLMDAGYCLHLVNTNKVKQYDGMKYRDDRHDARWLARLLALGILPVGHIYSREERPLRDLLRRRSFLVKKRSSMLISMRGAFECRTGMRAKSNDIKTWTEEDLERLLSDPDIRLGLSCLLAPIKAMTEQIEIIEKWVLPRARLRDEFRMLETVWGIGKILALTIMYEVGDISRFEKVGNFASYCRLVNSEHLSDGKRKGKGNTKNGNPYLSWAYSEAAHFANQHRKPAKKFIQRKRKQTNGIVANRALAHKLARASFYVMRDLVEFDPAKVFGAIQCELM

SEQ ID NO: 185766 - protein, 349 aa, unidentified
MEYYIGIDVSLESSSVCVVDAKGKIVKETKVPSDPDALVSFIRGLGLPIERIGLEAGPLSQWLHAGLTQAGFETVLLETRHVKAALSAMTVKTDRKDARGIAQLLRMGWFRPVHCKSVGSQEIRALLVARKLLLGKLLDVEFSIRGILRGFGLKVGLVTRKSFEPRVQELCAGQTMLEQICAAMLLARSSLQSEYSKLHKEMLAIVRKDDVCRRLMTTPGVGPLVAITFKTGVDDPTRIGKSKAVGALFGLTPKKYQSGETDVTGGVSRVGDVMVRTALYEAANVLLSRISRFSALKRWGMDLAKRRGIKRAKVALARKIGVVLHRMWVDGSDFRWTKEAAKAQQLAQA

SEQ ID NO: 185767 - protein, 395 aa, unidentified
MNPYALGWDNHRKFSKVSVMEQTPDGEIRAVERARLEHNDKQAMRAWLARLDPEIPVALEATFGWPWVADLLEELGHPVHLAHPPVIRALAKHEAKTDRCDSDRLGKFQLRGILPESYLAPTEVRQRRERTRYRMALSALRTAVKNRAQAVLHRHGILHDFSDLFGKAGRRFLEDLALPEGSRQALQGCLELLDKLALLIHEVEQWMIENLEEDESVRLLMTIPGIGLILAHVIRAEIGEIERFPTFRHLASYAGLAPMSDDTAGREGPRHCSSACNHVLRWAFIEAVHGVQRTKGEHGFRLRQLYSRLCGQGRPKGRKSSAKVAVAHELCKLVYVVWTKRVPFTDAPPSRPGSREDRRQPRETKETLIVKTTLRSDQPRHPMVRRRETVGQTRS

SEQ ID NO: 185768 - protein, 351 aa, unidentified
MRMAAQAEKRSYTEKQVFVGIDVHKESWHVTARSSGEEIFNGRIPGQYQSLRRILDRYRDARIKVAYEAGPFGFWLLDRLTQDGFETIVVPPSLIPIESGNKVKTDKRDSRKLATLLESNMLKHVHVLTPEEREHRDLLRTRRQIVEHRNNVARQIKSKLMFYGIRSPFSSTTRWSLQYVAWLKTITFETSYLKKAFELLIQMYEYLTRQIASINRAVVLLCRDKRYRERIKLLCTAPGIGRLTAIELLVELQDITSAEELASYIGPTPSEYSTGERTRQGRITRCGNKRVRTYLVESTWVLITKDPYLRAKYLRLKSLRGGKRAVIAIARKFLIRLRRMLLDNVPYRMAA

SEQ ID NO: 185769 - protein, 339 aa, unidentified
MKLTPFGVDIAKHVIQVHFIDEFTGEVVDKQIKRVNFLEFFSNKPPSLIGMEACGGSQHWARELEKLGHKVRLLPGKFVKAFVMGNKNDVMDARAIWMAVQQPCKSVAVKNEEQQAILSLHRMRNQLVKFRSAQINALHGLLLEFGETLGKGRSALDQSMPIVLERLSHKLPPFLLRQIEDQHQRLKDYDDQITNIERQLAAWAKQNDVCKRLMKIPGVGTMVATAAVSVMGDAGAFKSGREFASYIGLVPKQTGTGGKVKLLGISKRGDTYLRTMFIHGARSAATLQKEPGQWITELKQRRPACVAIVAMANKLARTVWAIAAHDREYEKDYVSVRPY

SEQ ID NO: 185770 - protein, 418 aa, unidentified
MQHAPTDTLAAVGPGHRTAGVDWARDDHAVAIVDAGGKVVERFTVAHTAASLRDLVRQLAKVGAHEVAIERPDGPVVDALLGAGLTVVVISPNQLKHLRSRYGSAGNKDDHFDAFVLADTLRTDRARLRPLIPDSPATVSLRATCRARKDLVAHRIALANQLRAHLQRTFPGAVGLFANIDSPISLRFLARFDCQDRADWLSPKRLTAWLASVGYCGRVAHATLHARLVAAPRGATGDVGAAQAHVTRALLAALSTLVEQIRLLSEQIDEQLSLHADAHVFTGLPRAGTVRAARLLAEIGDCRARFPTPESLACLAGVAPSTRQSGKHRTVGFRWAADKQLRDAVCDFAGDSRRANPWASDLYQRAIARGHDHPHAVRVLARAWLFVIWHCWQNGTAYDPAQHGALQALLHPDHQRVA

SEQ ID NO: 185771 - protein, 339 aa, unidentified
MELNVIAIDIAKQVFQLHWVDGDTSSIERLRLRRPQMLPWFANRQPAVVVMEACGGAHEWARQLLKIGHEVRLLSPKSVRPFVQRNKTDAADAHAIWTAAQQPGAKFVAVKTLGQQVVLSLHRLRAQLMKMRIMQSNELRGLLYEFGIVLPEGHRALLKELPAALALADSRLPSMLVQCLREQVGRIGSLDADIGTIERRLAQQLRETPACKTLAEVPGIGLMTATAVVASMGSPAAFRDGREFAASIGLAPRQTGTGGRVRQLGISKRGDSYLRTLLMHGARAVVRSSHSTSWPWLAELLKRRPYNVAVAAVANKLARTAWAILAKGQSWRASAWQAA

SEQ ID NO: 185772 - protein, 453 aa, unidentified
MCLEDRPVLEPNAAGIDVGAREMFVAVPPGRDENPVRVFATFTEDLERLTDWLEQCGVTTVALESTGVYWIPLFEILEQRGIRPCLVNARHMKNVPGRRTDWHECQWLQFLHSVGLLRAAFRPGQDVCAVRTILRHRNELVTAASQHVQHMHKALTQMNLQIHHVISDITGLTGRTIVDAILAGQRDGAELAKLRDPHIKADTETIRKSLEGNWRPEHLFTLGQSRDLYRIYQQQIVNCDLEIEKMLQGFAPRIDVGERPLPPDRKRNRAGSKRRRKNGHPHPEFDLRTEAYKLFGVDVSQIPGLEENALPLFSEVGRDMSRWPSAAHFVSWLALCPDNDISGGKLLWRGARRVKNRAGHLFRMAAYALHRSLTPLGNYLRRMKAKLGPQAATMATAHKIAVIFYTMIKNQVEYDETIWDARDAQREKKLQAKLKRQAKQLGYELVPMEPQAA

SEQ ID NO: 185773 - protein, 475 aa, unidentified
MNVNGKRKKNQVVTANIFEQQELLKKAEVIRANLTASTWRELETNGKFNKNEKLSFISDDMLILGCDVGSETHYLRAIDTRGRELSKSAFPFSNDSEGFQSAKEWAVTIAAENNKNQIVLGLEPTGHYWFCLATWMISNGISVVQVNPYAVKQTKEVEDNSQLKDDTKDPKLIANLVKDGNFGMPYLPEKLYAELRRLSMFRDQLNEDRIRSINRMHREMKIYFPEYKDALGKVDGTFSLELLKQAPFPEDLTALGEDGIRQIWHDAKLRGRGYSRAGEILQYAKVSVGIKDGAAAGKTAVQWFVRKIMELDAELAVIEEQINQKCQEIPHTGNILEISGIGENTLSGILAEMGDISRFDDVKEIQKLSGLGLVACSSGKHKGETKISHRGRKRLRYWLFQAAKSAVAHAEEVKELHVYYTTRPDNPLKKMQSLIVIACKLLRIVYTILKKGTVYDPKKMLMDIRRPEKKEAIAA

SEQ ID NO: 185774 - protein, 405 aa, unidentified
MDKNDDSRLAGFRQLKREIRGSTQHLVVGIDIAKDRHHAFFGTPSGKTLLHRLVFDNSREGFEKLCFRAEALKAQKGLTDLVFGVEPTADYHKPLGEYLIDRGHSVVLVAGTAVKKNRELLDGRWDKNDTKDAANVADLITQGKCLFYDLPSLDLRELRSLLSLKRRLKKSEQGYKVRIRNHLIAQYFPEMDDYFTYVEGPHIVRNCLDPKKLASLELQEFTRTVPSGNEKQRERLGEIYAKASSSIGCAAHPSVTFEASTLLDGFKGLRLMIQETDKRIAKVCQGFPEYPFLLSIPGFGPDVSAKVLGAIGDPFRFENHRQVLKMAGLDLSSDQSGKRTATTPVISKRGKADLRYGLYQAAVIASTRNPSFIRYFTEKMAVRLFDQAGELATICLREIVCQIIV

SEQ ID NO: 185775 - protein, 320 aa, unidentified
MEFKHYVGIDVSKNTLDVAVIMNANDVPLHIQISNDNNGFKQLTSWFKKIDKFDFSSTLFCMEHTGIYNNPVLGFLLKLSCTVWVENAVHIQKTIGLQRGKNDKVDAHRIAVYATKNKEELNPYKPRRQSIEQLKVLSSLRDQLIGMKKEIKSRINEYQKFGDKTASSLMLKTSKQTQQGIEKDLKNLEKEILKIITSDEQLNQMYELMKSVVGVGHVTALQLIVHTNEMTLVNNPRSLACHCGVAPFERSSGLFKGKARVSHMANKRLKTALHMAALSAMKLDKELKIFYERKVAEGKSKMSVINAIKKQNLSIVSLLS

SEQ ID NO: 185776 - protein, 318 aa, unidentified
MKVGIDVSKLTFDVTWGNKESLQHRCFDYNEEGIKALLDLLPNDAHIVMEATGVYHSRLALRCYEADLKVSVVNPVAIKRFGQMLFKRAKSDKTDSALIHQFAESQNPDLWVPSSEAINELRQAIGWVDDLIRERTVANNREEAVRHNARPSQFVLGEIKDFRKYIKVRAKKCDQYLKAVVKKHFPELYNRLQTIPSVGEKTAIDMIVITEGFTKFTNDKALAAYVGVSPTTYSSGTSVHGRGGISRASKGRSRQYLYLCSWTARRINPGCAALYQRMSKAGKPPKVISIALAHKLLRQIFAVGMGSHDYQAESTYLT

SEQ ID NO: 185777 - protein, 326 aa, unidentified
MQYVGIDVSKLKLDCCWLRDPDKNKIKTKIFQNTLADHKALAAWLLSQTKSNTTDIQVVMEATSIYHESLAYALHDLGFRVCVTNPARTKDFAKSLGSTHKTDAKDSLMLAMFGQRMSPDLWQPESKEARELKALLARLEALEADLRRENNRLEKAEFNHSSERVLESLCKMIDHLSIEKKRLENDVDDHIDRYPELKKDRELMASIPGVGPVVSRVMLSVIHSRRFKTAGQVAAYLGLIPRIQESGQWKGRSRLSKQGSPRVRAKLYMAAVVSISKNPDISDQYQRLLKNGKSKMQAIGAAMRKLVQICFGVVKHQSEYRPQYLK

SEQ ID NO: 185778 - protein, 438 aa, unidentified
MSNKVIFNLDELFISVGIDVGADFSWMSIALPNQQFVGKPYKILHNSIASLTTAVSKIKEAEELYSLESRIFLESTGIYHYPLFCYLRDKGFNCSVINPIITKNSTNINIRKVHNDRFDSKKAALVGLKPDLKVSLMPSDLALNCRNLCREYYDLMDNRSAYVNKLQGELRMAFPQYLGIFSKVTINTSLTLLETYTSPSAFLKADKQEIIDIIKSTARFGLTYAQNKYNAIIQAATDANQFGYIINSNIKRIRLYISFIRKYDEEINSILESLHELVDANEDSDFVKQIHLIETFKGAGFLSAVSIMGEIGDFSAFSKPKQLFAYFGLDPAVKQSGKFEGTKVQMSKRGSAIARRVIHTLTLQSISISRNREAKNPVLREYYLKKCDSKPKLVAMGAVSHKVCNMIFAILRDNKPFKIIAPQEHIKQYNSAKCDIAA

SEQ ID NO: 185779 - protein, 447 aa, unidentified
MGTAVRKQSRYVGLDIHKELAVSCIVNAAGKVLDRQRCGCTRDGLEEFGRRYLQPTDKVALEATTNTWEVVAILKPFVAAVVVSNPLKTKAIAEAKIKTDKVDAEVLAHLLRCDFLPRVWEPPAETQHLRRLTARRAALVMDKTAIKNRIHAVLHQRLITCPFTDLFCVQGRQWLSTLPLDIEGRAMVDSDLRLLGYVEAEVAQQDHVLAEHAYDEPRVKLLMTLPGVSLTVAQTLWAVLGEAERFRDADHAASYLGLVPSTHQSGRRCYHGPITKQGHRQARALLVQAAHHVAEHPGPLGAFFRRVAKRRGYNVAVVATARKLVVIAWHMLKANEPYRYAHPQTVEYKLEQLRVTATGEKRKRGYATGTPRPATYGSGQRVQRVRSLGQVCERAALPPPMSVDHLPAGEVRMLEQNGTLTFVQEIQHEQRKVRRTKKTETRSEPRS

SEQ ID NO: 185780 - protein, 327 aa, unidentified
MKNIFIGIDVSNKTLDICIKEGNNSSFCTIENSIPSCKNFFNAFKDRASFTYVAMENTGRYNYNLYEALEQFSFLVYVINPIHMKKSLGLVRGKNDRIDAERIVYFVEKNHMDLPQWQPNTLAIKKLKVLQSERKHRIKIKSALLKQQYDYKLMKSIKMDKELLKLNQSLLSNIDKQLKIIENKIELIIQEDEKLQDQSNRLQTIPGVGKVLTWMMITKTQGFSTINSPRKMACYAGVVPFDHQSGTSLRFKPKVSIFADKELKKILHLAAMSAIRLDNELRLYYLRKVKEGKNKMSILNAVRNKIIHRIFALINNETIYQKDFVVS

SEQ ID NO: 185781 - protein, 343 aa, unidentified
MQATTIGIDIAKNVFQVHGVDEAGKVVIVRQLRRKQMIEVFGKLSPCLIGMEACATAHYWARELTKLGHEVRLMPPAYVKAYVRRQKNDAADAAAICEAVTRPSMRFVAVKTPEQQATLTIHRTRALLISQRTQLINALRAHLAELGLIADQGRDGLARLVAMVKEDRTLRALPTAMLHALQALVAQLASLQQQIGDLDRCLMVQFRASDVSRRLESIPGIGVIGATAIAATITDPGAFKSGRDLAAWIGLVPKQNSTGGKERLGSISKQGDRYLRRLLVAGAMAVVQHVRQHPEKHPWIARLLDRKPAKVVAIAVANKSARIAWAIMSKGGTYRAPALATAV

SEQ ID NO: 185782 - protein, 413 aa, unidentified
MEGLTPLHRRVAGIDVHRMTHVVTVLIEQPDGSITRISRDFGGFRRDCIALSSWLSELGVELVVMESTGIYWKSLFAHLERAGIPAWVVNAHFVKHVPGRKTDMLDSEWLAVLARFGLVRASFIPPQDLRELRLVSRYRRRVGASLSSEINRQHKLLDDAGIKLGAVVSDLHGVWARAMVKGLVEGRSPTELLAHARGALKRKLEPLLLSLDGELSARHRFVLRQLQTHIEQLERELAELDAYVLAAMQPYAWAHRLLQTIPGIDQIAAALILIEIGDDMQRFGAGRRLACWAALSPGNNESAGNRRSGRTGKGNHVIRAILCECANAARMSSSSLASKFKSLLVRKTYKKAIVALAHKMLRLIYAMLSKRQAYRDPRIDYAALSAKKNAPRWIRQLQLIGALPQPDQAAPAT

SEQ ID NO: 185783 - protein, 375 aa, unidentified
MAKVRSWAGLDVHAAKVVACVVDAESGEMTVHRLPGETSAVLSFCCGLPGPTRVAYEAGPTGFGLARALVAAGIECVVAAPGKIERAAQDRMKTDQRDAERLVRLLMIDALRPVRVPTSEEEALRDLVRAREDLRGDLMRARQRLSKLLLRHDVRYDDTTSRWGQRHRSWLANVDLGERGAQLTLSEYVGAIDALVIRRETLEAAIGELIPCSPWAQDVARLRCLRGIDTLSAVGLAVEIGDFDRFEHPKLLMSYLGLVPSEHSTGESRRRGPITKSGSQHARRLLVEAAWHYRRSPRLGATLERRQDGQQQAVLAIAWRAQQRLHRIWRRLELQRGKRRTIVAVAVARQLAGFCWAIVTYNHEHRPLHQLEAHK

SEQ ID NO: 185784 - protein, 383 aa, unidentified
MTKSSNLYVGMDVHKESIDIALAEGDGQQEVRHYGSIGGDLPALDLAVRKLQAAGKALHFVYEAGPCGYVIYRHLASKGLDCVVVAPSMIPKRSGDRVKTDRRDAEMLARLHRAGELSAVYVPHPEDEAIRDLTRAREAAKEAQTRARHQLKAFLLRSGLPYAGKTAWTPAHLRWLASLKLAQPVQQIVFQDYVDAVTAASERLARIEGYLRDAVAGWRLQPLVQAFQALRGVQLVVAATVAAEVGQIDRFGNPRQLMAYLGMAPSEYSSGPTTRRGPITKCGNGHARRVLIEAAWAYRMPARITPIIAKRQDGLSEAVRAIAWKAQVRLCKRYRSLRVRGKEQNKVITAIARELVGFVWAIAREVPAVMPQPGLSPGGALRA

SEQ ID NO: 185785 - protein, 443 aa, unidentified
MQDAQPDQSAMPEIAVWIGIDWADQKHAYAMQIAGEERVGRGEIDHTPEAVEEFFTELGRRFPDQMIAVAMEQARGSLLFMLSKYGHLVLYPVHSSTMDHYRKSFYPSGAKSDPTDADLILELLRKHPDRLRPFRPDTVATRTIQFLVEARRDAVNDKTRYLNRLTSQLKMFFPQILQWFKEVDAPVVSDVLTAWPTLEHMQAAKPSALAKFFGRHRFSPERSDQLRTALVAAIPATRDQAVIATGVIVVKRLIEQLRVLRASIKEHAEKIEELTTSHPDFEIFASLPGAGKVMIPRLIAALGTDRDRYMTAAELQCYSGIAPVISRSGQQCHTDWRRACPKFLRQTFHEWAWYSTRKCSWARQYYDTQRARKKSHHAAVRALSFKWIRILFRCWKDRSLYDEARYTAALASRTSRQAQPSVKIMWKNIAGFCKPAEIPSENA

SEQ ID NO: 185786 - protein, 310 aa, unidentified
MDKIIIGIDVSKDRLDVHVLPSKQAFSVARNSEGLEALVQRLLEPRPDLVIMEATGGFETVVAAALAAANLPVAVVNPRRIRAYAQALGRLAKNDRLDAATIAAFGEGAKIEPRKVPDHAAQMLGELVARRRQIVETIGVESNRRRSLTHSRLIKGSDRILLALQKELGKIEGEIGDAVRGTPAWREKDELLQSVPGIGPKTSSMLIAELPELGTLTRHKIAALVGVAPMDDDSGKYRGPRRIQGGRFVVRCGLYMAALVASRCNPVIAAFHQRLIAAGKTPKQALTACMRKILVILNAILRDHRPWQSA

SEQ ID NO: 185787 - protein, 353 aa, unidentified
MKPKFPTVTIGLDLGDKKHAICVLNSAGEIIDERTITNHRESLRRLSQKYPGSRIAMEVGSHSPWISRFFKALGHEVFVANPRKLRAIYANNRKSDQSDAYMIARLARVDPTLLSPIEHSTEEAQRDLLQVKLRDNLVRQRVDIISSIRFTLKSMGVMVASPNTTCFTKRCRKSLAGVDPKLLAMCEPSLRVVDELTQSIRELERRIEELCAEAYPETEFLQQIPGVGPITALSFVLTIGDPARFDSMRDVAPYLGLVPKRDQSGETDRRLGISKAGDAYLRRLLVSAAQYILGPFGPDCDLKRHGLHLVARGGRGAKKKAVVAVARKLSVLMLTLWYREEIYEPLHNHSAAA

SEQ ID NO: 185788 - protein, 392 aa, unidentified
MRFVGIDIASEKHVVAAVNEAGEALLKPTSFGEDAAGYAKLFELLGAPAETLVALEATGHYWKNLFAELAARGFEVALLNPVRTHRFAAEDLQRTKTDAIDAIGISRFAAQKRPAVTRLPDAATEELRELVRHRDRLVQDFGDRTRQLHRLVDLGFPEFTRHVRRLDTPLATAILHGYPTAAAYLDLRWKKLAKFRYDGVHIVGDEIAKSLIETAKVSVGRHHGFAYQIQVQHACEDMDILRRRIASLDRDIEKKLGEHAVGSLLTTIDGVGTTTAAKLIAELGDPADFRGAGALAAYVGVIPALRHSGKRAPARAGLTPLGNARLRAALWMPTLVAVRHNPWLKAYYDRLRARGKLRKVALVACMRKLLAAVYSVSKHRQPFVPRIAGATA

SEQ ID NO: 185789 - protein, 341 aa, unidentified
MQIHSIGIDLGKTTFHLVALGASGKVLVKKKFTQKQLLAYTANLQTSLIGLEACSGAHFLGRALHKQGHEVRLIAAQFVKPFVKSNKNDFIDAEAIAEAVERKNMRFVPIKTDDQLDLQAIHRVRDRLVSRRTAVINQIRAFLLERGLVFAKRPAQLKAAMADVLENAEADLTPMMRNLIDVLWDEWKIVDRQIEELGDELERISAADAGCTRIRKIPGIGPVVATAIVAAIGNGAAFRKGREFAAWLGIVPRQYSTGGNAKLLGISKRGNVYLRKILIHGARAAVLRMKRDKAPIGAWLDRLDARAHKNIVIVAMANKLARIAWAVLSSGNEYRPAAVPA

SEQ ID NO: 185790 - protein, 312 aa, unidentified
MEARGLVVGIDVSKDRLDVHVRPSGERFAVARDAAGLEALRRRLVELGPAAVALEATGGFEATVTATLAGAGLPVIVLNPAQVRSFALALGRRAKTDPIDAAVIAHFVAAAEVEARPLPDEATRQLGELLGRRRQILAMIRAEHNRARRLAEPRLRASVARLVEALERELALLDGDIDSAVRASPAWREAEDLLTSVPGVGPTIARTLIAELPELGTLDRRRVASLAGLAPYTRQSGKWKGRSFIGAGRSSVRAALFMGAMVAKRFNPVLKAFYGRLVGAGKAKMPATVAVARKLLTILNAIIRDRTPWRTA

SEQ ID NO: 185791 - protein, 344 aa, unidentified
MKKITTIVIDLAKQVFQVAVYNKHGVLKSNKAMNVKGMMRTVHQHPEAQIITEACGSAHHFARRFIQLGHDAYLIPPHICAKYRTGNKNDKNDTIAIYEAAKNQRTYFVSVRNLIQQDIALLHKLRKGHVDQRTKVANRIRGFAMEYGVSFPLGINKLRQQLPDALENADNELTDIARSSLRALLDMLLQFDVLEAKVKLQIEQLGKQLKPCKALVKIPGIGWLGATMIYARFGSGEAFKRGRDASASIGIVPSHSGSGGKNRLGSISKRGDTYLRWLIIHGARSVVNNIRDKQDGMSCWIRKQLITKHSNITTVAVVNKLIRMAVAILKSGEAYRTPVAQRVS

SEQ ID NO: 185792 - protein, 421 aa, unidentified
MKNNAARKLRQVPAGYLTIGIDPHKKKHAAVAITEDLMIRTKFKFMNSRNGFEETLEKARSEMIKTECRGVIFAIETGGHFWRNFAYFLEERGLPFRLISQFTLKRMRDGRDLNRRKNDFRDAEMAAGVLRTGDFTETRLPQGVYADLRGTHSAYFRLVKERTRIINLLKGLLDGLFPEFTQVFKDPCGRTALAVLSICPAPAVIASMKEEDFLDTIKGVRQGRLLRRKLRALHQAAQTSVGIKPAASSVALEVSLLVSRFRLVKQQVDRLVESLIQLVDKTEEGKYLLSIPGINYLSTAALLAELGSLTLYHNAKQVIKMAGTNPIELESGGKRRSKTPMSKKGRPRLRYSAWSAVIPLFRHNPDFRDWAKRLRERPVHANPLNGKEVVGAALNRLLRLVYALVRKKEFYRSPQLTPVIN

SEQ ID NO: 185793 - protein, 334 aa, unidentified
MKQVTQVGVDVDSEELVCAMQRAGQRQPLARFANTAAGHKKFIRWATKGGHPARVCLEATGIYSLEFALALHHAKNVEVMVVNPRAIKDFTRACMQRAKTDAVDAGGILDYLERMPFVTWQPPTPEVLELQAMNRRIVQLNTELTREKNRRHASEFAGASADAIAHDIEVNIHHLERRIERMHDNGLKLVRGVPALATKLAHLVSTKGIAEASAMRLLGELLVLPDDLAAPQWVAHAGLDPRPYDSGTSVHRPRRISKVGNRHLRAALYMPALVAIQHDPNVKAFYNKLIVAGKKPMQAVVAVMRKLLHAIWGMLKYDEDFDGNKFFKLTAKTA

SEQ ID NO: 185794 - protein, 344 aa, unidentified
MDHFAGLDVSVKQTSVCIVDDTGRIVREVKAASEPGALLRVLANPAYHFKRIGLEAGPLSQWLFSAFAEAELPVVCVETRHMRAVLQAQINKTDRNDARGIAQMMRVGLYRPVHVKTLRSQKLRMLLTHRKLLQSKAIAIENDLRGTLRNFGLKVGIVGAVKFEVRITELVEDLPDLGLLVEPLLIVRRVLREQIVILHRRLLAIVRDDEVCQRLMTTPGVGPVVALTYRATVDIPARFRKSKAVGAVFGLTCSKYQSGEIDRSGRISRCGDEMMRVMLYEAAQSMLRSKKWSWLKAWAMQIVRRRGMKKAIVALARRLAVIMHRIWVDGTEFRWTREQAAAAT

SEQ ID NO: 185795 - protein, 328 aa, unidentified
MDQISVGIDVSKTFFVVGLAPTGERWTSETTPVAIDALVTRLRGLAPAIIVVEATGGYERALVAACGVAGLPVAVVNPRQVRAFAQALGLTAKTDDIDAGVLATFGDRVQPAPRPLADAATQALAALVARRRQLIEMIGMERQRLEQAPPTGRITRDLRNHIRWLERRVSDVDDEIGTAIQASPIWRVQDNLLRSVPGVGPITARTLLADLPELGTLDRRAIAALVGVAPFNCDSGQHRGQRHIWGGRASVRTTLYMAAVSAARHNPVLATLYRRLRDAGKPAKVALVATMRKLITILNAMLKHHTPWTGDGASTPAAIARRAPAATV

SEQ ID NO: 185796 - protein, 343 aa, unidentified
MKLSRIGIDLAKNVYQLHGVDRSGKTVWKRRLKRHQWLKVLLDKTEPGCVIGMEACAGAHHWARELQSRGYTVKLIPPQFVKPYVKSNKNDANDAEAICEAMSRPNMRFVTVKRVEQQDIQATHRIRAELITQRTAKANQIRGLVAEYGLVAPKHLSSLRAAIPCWLEDAENGLTDDFRCLLQGVWDDLRALDDRVGEMDQAIKRLAENNEVCVRLQQLRGVGPMIATAMVATAGDARQYHKSRQMAAAIGITPKQQSSGGKDRLLGISKRGDVYLRTLMIHGARAVVARAKYKDDRLSRWVTGIATRRHPNVAAVALANKTARMAWAMLRHETDYDPDFAIR

SEQ ID NO: 185797 - protein, 345 aa, unidentified
MESMYYIGLDVHKKTISYCVKDGSGRIHADGKIPATRFDLDLWMKTLPRPWTVAMEATMFTGWIHDHLRPHAAAVKVAHPLMLRAIAAAKKKNDRIDANKIADGLRCDFLPECYMAPTQIRERRRTLRYRNLLVRQTVQLKNRISGLLMEAGVSYNKQKLHKVGYFRELLKTNQDIDESLRPLLQLCRETLVRLQKTESALIRSLARDRFLVERVERLMTIPAVGPITALTWALEIAEVSRFSSIKKAVSYCGLCGAEKSSGDHIKRTPISKQRNKHLQCVLVEAAKMAPRLSPELALLYDREKQKGNANRATLAVARKLVAYLVAIDRRQKDFLVVEKQNLAVA

SEQ ID NO: 185798 - protein, 471 aa, unidentified
MNANRPKTRRTKRHRITAKQRQRFFEKIHLNAAGIDIGSEAHWVAVPEDRDERPVQKFSSFTHDLHRLADWLEACGIDTVAMESTGVYWIPLYELLEERGFEVLLVNARHVRNVPGRKTDVLDCQWIQQLHSFGLLRGSFRPKAEIAALRSYLRHRDTLVEGAAAFVQRMQKALTLMNVQLHNVISDITGLTGMRILRDIAAGKTDAEQLAEYRDDRVRASKQTIADSLRGHYREEHVFQLRQALELYDFHQLQIAACDREIEARVRALEANCARPSDALLRPRTSRKSSNEPAFEIRSPLFALCGAVDPTELPGIGPYAALKLISEVGLDMTPWPSEKHFTCWLTLSPNVKITGGKRISSATQPSANRAARIFRVGAMSLARSDHALGAFYRRLAARIGKAKAITATARKLAVLFYRMLRDKKPYREQSADDYTAKQRSRVLRHLRKRAESLGFQLVDRATGELLGAAVS

SEQ ID NO: 185799 - protein, 272 aa, unidentified
MYYIGIDVSTKESALCILDGKGKIVRETKLPTDPEIIARFIAATGVTIERIGLESGCTAAWLFAGLQRHGWPVICIDARHAAAALQAGFRNKNDRNDARGIADLMRVNKYRPVWVKSPKAQQQGRLLTARATLQSQLVGLENTIRGLLRQEGIGLTDRRTAFEAAVREAIGEDCLLQAALHPLLETRNAVLRHRAALDREILRIVRADPVCRLLVTAPGVGALVSLAFKVAVDDPRRFSRSRDVGAHFGLTPREYSSGEVSYHGWISKMGDR

SEQ ID NO: 185800 - protein, 313 aa, unidentified
MKKTICGVDVSKAKLDVCIEPGHRFASFDNDTAGIAKLAAFCREHAVELVVMEASGGYERRPFVELWERGISCALTNPRSVRRYAEAMGILEKTDRIDSSVIARFADAKNLAPTPLPSQAQQRLKALVARLRQVTDDLIVQKQRRASLLDNTEMRESIDEVITLLKRQSRKLEGEIASMIDDDPLWAKLAETWREVKGVAGRTVARRHAELPEIGILSNKAIAKLTGLAPIANDSGQRKGKRPTRGGREGVRSILFLVAATAARYDKSLADFRDRLVAAGKEKMVIRIALARKLLVRLNAKARDARTAYANAT

SEQ ID NO: 185801 - protein, 310 aa, unidentified
MEHFIGIDVAKATLDIASLPDGESWTVSNDEHGLAELVPRLLALAPTLVVLEATGGFQLLAALTLAQAGLPVAIVNPRQVRDFARAMGQLAKTDALDAGVLALFAQRIRPEPRSLPDEATQFLEGLLTRRRQIVDMLTAEKNRLGFARGPIKRDISQHIRWLEKRLADVDGDLQDAVTATPQYHAKAELLRSVPGVGQVTTLTLLATLPELGHLSRHQIAALVGVAPMNRDSGTMRGKRMVWGGRAPVRAALYMATLVGIKHNPVLRSFYDRLRAAGKPFKVAATACMRKLLTILNAMLRHNRGWDPHHA

SEQ ID NO: 185802 - protein, 407 aa, unidentified
MIFVGVDWAEAHHDVFVQDEDGKQVAGGRLPEGVEGIARFHEMVGHHAEEPEEVVIGIETDRGLFVGALVAAGYQVFAVNPMSTSRYRDRHSTSGAKSDPGDAKVLADMVRTDRHNHRPVAGDSELAEAIKVLARAHQTMIWSRTRQTNFLRSTLREFYPAALVAFDNLTSGDALEVLKVAPTPTLGSGLSRSKIAAALRRGGRQRRVDQRAEEIQQALRAPQLQGSALVATAMGSSVSATVAVITTMNAQVTELAQELEVHFEQHPDAEVIRSLPGLGTILSARVLGEFGNEPNRYATAKSRKNYAGTSPITRASGTKRVVLARHVRNKRLADAIYFWAFAALNASPGARAFYDYRRVAGDTHHAALRHVGNRLVGILHGCLINHTSYDEDTAWGHRAALELTRAA

SEQ ID NO: 185803 - protein, 403 aa, unidentified
MKVRERIWVGVDVGKAHHHACAVDETGKVVFSKRLGNGQSEIEALIARTGKVAGHVRWALDMTSGTAGLLLAVLRQAGAEMVYVPGRLVNRMAGAFAGEGKSDAKDAFTIAETARLRHDLTPITDPDRLVVELQVLTARREDLMGDWVRGVNRLRDLLASIFPALEAAFDYSTRSALVLLTGFQTPAGIRDAGVNGLAEHLRTGGAWPKGIPAMADKALAAAAAQTIALPTETTVAPLIARLAAQLLDLDREIKDLDKQITDTFGEHPHAARITSVNGFGPILGAQLLADTGGDLLTAFGSSARLAAYAGLAPVPRDSGRVRGNLHRPKRYHRGLRRVFYLAALSSIKPDGPSKTFYQRKRAEGKLHTQALIALARRLIDVIWALLRDGREFHPSPPLTAYAA

SEQ ID NO: 185804 - protein, 310 aa, unidentified
MSKTNYVGVDLSKSELVADLSAGTAPRVFPQTVEGRSALLAALPPGAHVICEASGGYERALVATLQAAGIPVSVVMPVRVRAFACAQGLRAKTDPIDARLLSAFGAALQPAPVLAQTRAHAELQELVRTRRVLIEQLNDEASHLEHTAQPLLVELAQARRKLLESQMETIEARLRELIALDAAWCWRAERVQQVCGIGEVSAWTLLAELPELGSLERGQAGALLGVAPHPDDSGPRHGRRRISGGRSGARKVLYMAAVSAAHRNTILRAFYQRLIGPKNKPKLVALTAVMRKLIELLNRLLADPNFKLAT

SEQ ID NO: 185805 - protein, 368 aa, unidentified
MFYLGIDQHARQITISLRDESGDVVQARQVSTQPEKVHAFFQQLTRERLTAGEAFVAVLEVCGFNDWLIRMLHDYRCHKVILIQPEERKLRKTDRRDAAALSELLWVNRDRLPQGKPVRGLRQVDIARAADQENRRLTTLRKDAGQARTRLVNRVRHILRRHNLQWQMPTKKFPTKSGLAWLKQVALPEIDRLEMNHLLADLEQVQGRRQELEQVIARRCGVSAEAVLLSSMPGVGYFTAIALACRVGRVERFPRAHSLANYWGLTPGCRNSGESNQRLGGITKAGSSMARWLLAEVTIKVLRKDARLREWFRRLKRRRGASIARVAVMRKLATVIWHMLSRRMTYAECRAAGEAGTKTREQQECVRE

SEQ ID NO: 185806 - protein, 345 aa, unidentified
MPIVGGLDIHRKQITFDYFDTGTGEVKRGQIAPADRVHLRSWLARFAGRDDVAFALEGCTGWRYIAEELAAAGVAAHVAEPADTAFARGRKRHAKTDRTDSRHLRELLAEGRLPECWIPPSRILEYRALLETYHDLRAEHTAWVQRIHAVFFHQGAPALGEAALRTDRALQALRAAAACHLSPAGQLQVATALDMLAALEARLDVLRHQLLGAARSLTGAKVLASRLYGVGPVTALAMTCWLGGAGRFSSSRKAVRFAGLDITVWSSDRKGPPGRLSRQGPEVLRWAVYEAGKTHARASAPDHDYYAAVKDRKGGKRAAISEARKILRQACHILTELGDDALTAA

SEQ ID NO: 185807 - protein, 435 aa, unidentified
MKKNQTDRNLEEITVDTLIIGIDVAKEYQWARFVDYRGVEMGKAVKFKNNRQGFEKIVTVTKEICNLKILKQPFKHIIIGMEPTGHYWKPMANYFIKLGEKVVGVNPAHTKKAKELDDNSQSKSDKKDAITIARLVKDGRFFDPYIPEGVYGELRGLANARVDIMKRNNAVKNKITAILDEYFPEITTVFKYPLKGKASRQVLCSCPFPNLILSMGELGILAEIKKAVKKTVGIKKVRQLIQAAETSIGVKYGLESAKLRLRGLVEELNLIERQLLEVEELMEEMLWRTGYAEQLLAIKGIGVVTAASFLGEVGDLLRFDNARQISRYAGYNLVEDSSGKSKSGTVISKRGRKRLRSVLYLMAFTMLGKGKNNEMKELYRYLTTRKKNPLKKKQALVVVSKKIITVIYSLIKKQEFYEPAKVLGAVRQEMMAAAA

SEQ ID NO: 185808 - protein, 309 aa, unidentified
MFIGIDVSKKKLDVAARPSGEQWSVGNDEKGVAELCDRLRKLTPQVVVLEATGGLELPVATALAVTRLPVAVVNPRQVRHFAKALNRLAKTDAIDAQVIAQFAEAVGPEPRPIADLEAQRFSELLTRRRQLVEMLVSEKNRLAVATTKPVKQRISYHLHFLKEELKSLDQELDTEIRASAVWREKDDLLQSVPGVGPTVSRVLIGELPELGTLTGKEIAALVGVAPFNQDSGKLRGQRHIFGGRAYVRTMLYMAAVSAARCNPVVKRFYAKLRAAGKPAAVALTACIRKLLVILNAMVRDQRRWAPEAA

SEQ ID NO: 185809 - protein, 366 aa, unidentified
MGWMAPLRHLSAKLLSDRISSEWEPSMGEVTTIGLDLAKHVFQVHGVDAEGATVLRKQLRRAQVLAFFSRLPPCLVGLEACATAHYWARELRALGHEVRLMPAQYVKAYIKRNKHDAADAEAICEAVVRPTMRFVLVKTADQQAAVLLHRGRERLVRQRTGLVNALRGHLAEFGIVAPQGLRNVGKLIAIVRDEGDARLPDLARQVLQVLAAQIERLEVAVAAIEKQLMAWHKSNPVSQRLASVPGIGPIIATAIAATVVDPSGFRSGREFAAWLGLVPRQNSTGGKHRLGRISKRGNQYLRRLMINGASANLLRSKATNADPWVIGLRQRRPSLVVAVALANKTARIAWAVMHRHENYQRVATAA

SEQ ID NO: 185810 - protein, 412 aa, unidentified
MTATNQFAAHVGLDWADKKHDVCVQFKNGERTFHVIEHTPEALDVWLTELHQKVKGRIAIAVELKKGPVVYALQKYPFITVFPVHALSLARYRQAFSPSGAKDDPQDAELALELMLRYPQKIKAIEPDNADIRLLQQLVEQRRQLVEDKRRFVNRIINTLKQYYPQPLEWFSHRGSLLLCELIIRWPSLQQLKRARRDTIRNFLNAKGGRAMALTEQRVASIDNAIPLTTDPSVIEANALMATALATQIKVVSEIIKTYDERIEALFDTLPDAELFKSLPGMGPCMGPRMLAALGDNRDRFNSAEEIQNYAGIAPVTERSGQKSWVHWRWQCAKFVRQTFVEWAAKTVNSSYWARLYYQGLREKGKSHQSAIRALAFKWIRIIYRCWKARTQYDEAKYLLALEARHSPLLKP

SEQ ID NO: 185811 - protein, 337 aa, unidentified
MEYFAGLDVSMEETHVCVVDRDGKIILEARTPTAPKTIAAALAKGPPVERVLFETGRMAPTLFHGLTALGMPVVCVESRQAYQALRSMVTHKTDRNDARGLAHLARAGFFKPVHVKSLPSHAVRALLIARKKLVGQRVTLENQIRGLAVAFGVRLPRGLSSGFSEKAMAAGRGIPGLDGAMRGLLAARDAILKAIVAINADMKSLERSSAACRRLMTIPGVGRLTALAFVAAIDDPDRFRRSRDVGAYLGLVPRRYQSGEIDYTGSISKCGDARLRTLLYEAANVMLTRYRGSLALKTWALDIARRSTLRKARVALARRLAVIMFAMLKHGTEFQPA

SEQ ID NO: 185812 - protein, 315 aa, unidentified
MEQPSTAPSFIGIDVSKDRLDVHVRPTGQTFSVARDSKGLEQLTDELRDLAPALIVLEATGGFEITVAAALAGASLPLAVVNPRQIRDFARATGRLAKTDTLDAQVIALFAERIRPEPRPLANADSQSLAELIARRRQVVEMIGMETNRLHQARNMRVQRMLRTTLRTLTGQLAQLDRDIDDTIRRSPIWRATDDLLTSVPGVGDVTAHTLIADLPELGQLDRRRVAALVGVAPVNRDSGQMRGKRTITGGRAGVRSALYMATLSAIRWNPVISKHYGSLVERGRPKKVALVACMRRLLGILNAIIRTRTPWQCV

SEQ ID NO: 185813 - protein, 315 aa, unidentified
MDHNQAVYGVDVSKRNLVIAGYDEQTPVVVANLPESIAAWLAKLPRGATVAMEATGAYHQVLARLAHAAGMQVYVLNPQTLKHYAAAIGQRGKTDGCDARMIARYVVHEQAKLRRWLPPAPAADRLSQLLERRHTLVEARQTLAQSLAVPMLKAPRQSLLANLDRILRRLDILIRHEIARLPGMAALYERLKSIVGIGPVVAAQLVAVFSTLNFAKVDSFIAYTGLDPRPDDSGARVGRRRLSKRGPPLLRCLLYNAGMAAANSRVFKPVYRQLRERGLQTIEAIVILARKIARIAFALYKSGQCFDAQKHLKIA

SEQ ID NO: 185814 - protein, 347 aa, unidentified
MKLYTTLHNYYCGIDLHAKILYVCILDQQGNKLIHQKIGADPQALLRLLEPYIGNVVVGVECMHCWYWVSDFCQTHEVDFVLGHALYMKSIHGGKAKNDKIDSYKIASLLKGGNFPLAYNYPREMRATRDLLRRRTGVVRHGASLKAHVVNTDSQYNLPIQHLNLKNSSARETLRHSYDDKVVQRTIELDMVLLDCYAKELAKVEYFIEKQAKQHHGAYLYIIRSFPGIGQILGLTILYEIGHITRFKSVQNFASYSRLVKCKAESAGKTYGTSGNKIGNGHLKWAFSEAAVLYLRGNDKAKNYLDKLQRRMSKGKALSALAHKIGRCIYFMLRDKTVFDEKKFLKG

SEQ ID NO: 185815 - protein, 350 aa, unidentified
MIIIGVDFHPEFQQIAWVDSESGAFREQRLQHREQAERFYRELGQRAVQVRVGMEASGHAGWFESLLSELEMELWIGDAAEIRTKRVRKQKTDRQDAQLILRLLLEDRFPRIWVPNGANRDLRQLLWHRHRMVQARTRIMNQLQAVALNQGLRSKKKLWAERGRQQLEAFRLAPWASRRRRDLLELLDRLNPMIAELSQAIEQEVENCAEARRLMTHPGVGPLTALAFVLILGNANRFHCGKQVASYLGLVPLEESSGNRRRLGHITKQGNSMLRFLLVEAAQVTVRRVPQWRSRYFHLAMRRGRKIAKVAMARRLAVRLYWMWRKQWDYEQLNKFGSHAGQPEHRHGVQ

SEQ ID NO: 185816 - protein, 488 aa, unidentified
MAPLGRRLFHVQPIKEAKLKRARSKRKKTGGGDPVGKKIPGESGLRKLNPAAAGIDVGSREHYVAVPADLDPTPIRKFSCLTAQLHEMAQWLKGLGIVTVALESTGVYWIPVADVLESYGLDVQLVNARHVKNVPGRKTDVQDCRWLQELHSFGLLRGSFRPEAEVRVLRGYWRQRQRLVESMSQCILLMHKEMEQMNLQLGKVLSDVSGLSGMKIIRAILAGERDGKALAQLAHPGVRSERSTIAQALIGTWKEEHLFALKQHVALYDFNSGLVAECDHNIEECMKSFDRDTTLPPTATDPEKPNKHRRSKNAPQFTIRDLLHQMTGVDLTRIDGISTMTAQTIIAEIGVDMRAFPSEKHFSSWLGLCPNRIITGGKVKKSATRKVVNRVATALRRAASSLHRGKSWMGAFYRKMKARLGPPGAITAVAHKLACQVYRMLKYGGDYVDKGEKVFEERHSERELRYIEKRAKAHGYDLSPSPLAKAVP

SEQ ID NO: 185817 - protein, 454 aa, unidentified
MARRRPAKSTRQQTLLTVHPHAAGMDIGSRFHVVAVPPDRSPEPVRTFESFTADLHRMVDWLVELGITTVAMESTGVYWIPAFEMLEARGLEVLLVNARHVKNVPGRKTDVHDAVWLQQLHQHGLLRGSFRPAQTLAALRAYLRHRERLLEYAAAHIQHMQKALMLMNVQLHHVVSDITGATGMKIIRAIVAGNHDPATLASYRDIRCQASVETITEALIGHYRAEHVVALRQALELYDCYQAKVAECDQAIEAALASCEQADPEMPLPAARYRTRQANEPRFDVRTALFQLLGTDLTQLHGFGAYTALRLIGECGTDMTKWPTAKHFTSWLTLAPDNQISGGKLLSTKTRRSANRAAKILRLAAVNVGKTQTALGAFYRRLAARVGKAKAVTATARKLAVLFYNALRHGMAYQDPGATYYEEQYRQRVLQGLRRRAKALGYELRESAAVEGVS

SEQ ID NO: 185818 - protein, 369 aa, unidentified
MADRITYVGLDVHKDSIVVAVAEGGLRGEVREYGRIANTATALDRLLRKLGGDGMTLRFCYEAGPCGYGIQRRLSAQGHECAVVAPSLIPKRAGDRVKTDRRDAASLAKLHRAGELTAVWVPDARHEAMRDLVRARLDAVHSLRRARQQLSGFLLRQGCHYGRPAWTKLHRRWLAGLKFEQAVHHLVIEDYIAAVEAAAARRDRLTAQIEAMLPDWALAPVVAALQTMRGMALVNAATLIAELGDLTRFANPRQLMAYLGLVPSEHSSGASVKRGGITKAGNGAARRLLIEAAWSYRFPARLSRELLLRQENQPKPIRDIAWKAQVRLCGRYRRLARTGKPANVVTTAIARELSGFVWAIARQVTVTAG

SEQ ID NO: 185819 - protein, 377 aa, unidentified
MFREEWPATDGDPRRAAGDRIEPTLSRTWLPRSVIVVSTFIGPGWLPEQLGSLHKAGSTKMTQTNITTAGIDTSKAKLDIAIHGRSERWQVDNTSPGWRRLAADLAKANVVRVGIEASGGYERGVVRYLRDKGFTVLLLQPIQVRAFARAHLRRAKNDALDAALIAAFAAMTNQPNREIDERLAELAQHLTFVEQIEEDMARFKTRLEHVDDKRIRRLVMADIARLKARRTAEMLRIVRQLRAHDDLARRLDLVLSVPGIGERTALALIVRMPELGRVSREEAAALAGLAPFDDDSGTHKGQRHIAGGRGRLRRSLFAAALPAAFRWNKALVALYARLTASGKAHNAALIACARKLLIYANTVVQRGTPWTERLLTA

SEQ ID NO: 185820 - protein, 402 aa, unidentified
MNAVGIDVSKGKSMVAIMRPFGEIVSAPFEIKHTTSDINSLVELINSVEGESRIVMEHTGRYYEVLAHQLSEANLFVSAINPKLIKDFDNDSLRKVKSDKADAVKIARYALDKWQNLKQYNVMDELRNQLKTMNRQFGFYMKHKTAMKNNLIGILDQTYPGVNTYFDSPARSDGSQKWVDFASTYWHVDCVRKMSLNAFIDHYQNWCKRKKYNFSQSKAEEIYGKAKELVPVLPKDAITKLIIKQAVDQLNSASTTVESLRTLMNETASKLPEYPVVMAMKGVGTSLGPQLMAEIGDVSRFTHKSAITAFAGVDPGVNESGSYEQKSVPTSKRGSSDLRKTLFQVMDVLIKTHPQDDPVYQFLDKKRAQGKPYYVYMTAGANKFLRIYYGRVKEYLSSLPES

SEQ ID NO: 185821 - protein, 408 aa, unidentified
MEQKVCGIDVHRDILVATMIDQTNHKQTQTFTNNTTDMQTLKNWLKTNNCINVAMESTGSYWTTLYTVLEDANFKPVLANAHQVKAIPGRKTDQRDSEWLAHLHRSDLIRPSYVPAKPIRELRELARTRVRYVENRTQYKNRCQKILSKNNLRLSSVLSDIFGKSGKEIIEGLMKGKTVGDVLKNTDNKYLKKHKQKIMDAAKGALSETDMFLLKQMSHTIEELTVQIEELELRMAELVDTRALKVVCSVPGVGRLSGVTILAELGNVSRFSNGKQVASWCGFAPSVSQSAGVTKIGGITKRGSRWLRRVMVEVAHVAVRMDCRFKDMFWRIASKSGKKVAYVAVARKMLTVIWHLLVNDELFVEEGFSKTPDLVRSKLEVVGGGGLSLDVMASILGRAVRLVSDDDG

SEQ ID NO: 185822 - protein, 325 aa, unidentified
MNEATPYIGVDVSKDELDYSVSGEKAAGTCPNTAKGIRKIIGAARKLNARVCCEATGGYERALLEACWAGGVEVVLTDPWRVRHFAKGKGVLEKTDAIDARIIARFACENDLRPFARPSEARRRLCDLTRAGETLDKQIQMARGQLEHCCDKAMEKLWLKNIRMLGGMREKVDRERIAVVNGDERMRHLFERYQLVKGVGPETALSMIAEMPELGTVSDKVAGKLLGAAPIPDDSGKKTGRRLIRRGRFAARRALYMAAVSSIRFNPILRAFYLRLAKSNGKPPKVALVAVMRKLICLLNRIAEDEAFKPSASGSKPVPRASGRG

SEQ ID NO: 185823 - protein, 367 aa, unidentified
MKKVSTRATAQSRNISQQKLTIGLELGDRNSWYCVVDEAGQIQREQRVHTSGKALQEVFGAMPRGRIALEIGTHSPWISRLLSELGHEVIVANARKVRLIGESRKKDDRLDAQTLARLARIDPELLYPVKHRSAQAQADLTLIRARAGLVRARTGLVNTARGLATSYGERLRSCNVRNMNPEKAESLSPERQAALEPLLNAIESLSEHIVEYNERIENLAQESYPQVALLKQIKGVGTLIALTFLLTLEDPHRFRKSRDVGCYLGLQPGRRNSGQSQPQMHISKEGDPYLRTLLVQGAQHILGPFGIDCDLRRWGLKLAERDGRNGKKRAIVATARKLAVLLHHLWVSGEVYEPLHNSSRTTVAAAA

SEQ ID NO: 185824 - protein, 349 aa, unidentified
MRFYNRQHRFYCGVDLHARTMYLCILDANGQVVFDKNLAAEPDAFLKAVAPFRDGLVVAVECLFCWYWLADLCAKEQLTFVLGHALYMKAIHGGKSKNDQIDAGKIARLLRGGNLPQAYVYPAGMRAARDLLRRRMYLVHKRAETIAHVQNTNSQYNYAPFGKKLSYAANREELHIAERFTDPSVRCMIDIDLALIDHYDVILGDVELYLTRAAKVDDVNAFHRLRSIPGVGKILALVLLYEIHDVGRFAEVGNFLSYARLVRCAHESGGKKLGSGGKKIGNPHLRWAFAEAACLFLRQSETAKKWLKRQEKKRGKGKALGILAAKLGRAVYHVLYKKVAFDEKRFWAS

SEQ ID NO: 185825 - protein, 350 aa, unidentified
MIIIGADYHPGFQQIALVDTETGELQERRLEHREEAEKFYRDLGTQGATVRAGMEASGHARWFERLLGELQFELWIGDAAEIRTKRVRKQKTDRQDAQLILQLLLEDRFPRVWVPSWENRDLRQLLWHRHRMVQARVRIMNQLQAVALNEGLRCKKRLWRDAGREQLESFRLAPWASRRRRDLLELLDRLTPTITELTEAIEQEVEKCPEAQRLQTHPGVGALTALAFVLIIGRAERFQCGKQIASYLGLVPLEESSGQRRRLGHITKQGNSLLRFLLVEAAQVTVRSDPEWRRKYFHLAMRRGRKIAKVAMARRLAVRMYWMLRKGWDYEQLKKFGSHAGQLGTGDGVR

SEQ ID NO: 185826 - protein, 343 aa, unidentified
MLEISTIGLDIAKNVFHAHGADANGLQVFSRRITRGKLLSFFAAQPRCLVALEACGGAHHWARELIRMGHDVRLIPPAYVKPFVKRQKNDAADAEAICEAAQRPNMRFVTVKSEEQQASALVFRTRDLLVRQRTQTINAIRGHMAEYGWVAPKGPSWVAQLSELIDDAVTASLPPAAREMFHVMLGILEEFDHRIAELDKEIARRAREDEVARRLMTIPGVGPIAATAITALAPAAATFKRGRDFAAWLGLTPLQKSTGGKTKLGRTSKMGERTLRRLLIIGSSAVVRQASKRGAAEGSWLARMLARKPRMLVTVAQANKTARIVWALLTKEEDYKAPVAMAV

SEQ ID NO: 185827 - protein, 341 aa, unidentified
MKKFIRIGVDLAKNYFQVHALENENGGTVTRKLKRSKMHEFFAQIEPCLIGMEACGSAHYWARELKAMGHEVLLMPPAYTKPYVKRGKNDAVDADAICEAMSRPGMRFVPIKSPEQQAMLMLHKTRELLVKQRTMSVNALRGHLSEFGIVAAKGIGRVDELLDLAESDTTLPNAAKAGVKVLAQALEGLDKTIDDLEDEIASVDAQNEMVRLLDKVPGIGKLIASVIAASVPDPSAFKSGRDFAAWLGLTPRQNSSGGKQTLGGITKQGNRYIRKLLVLGATSLLNVVGKRKGALRDWIIGLLAKKPARLVTVALANKLARILWAMMKTGECFRSETFAKA

SEQ ID NO: 185828 - protein, 345 aa, unidentified
MKILKQVLGIDVAQKELVVSLGRMHEDLTAEIYAGKVFANTEKGFSALLEWVERSTDSNLPVRFVMEATGVYHESFAYFLDERLRQVSIVLPNKINHYFKTLDVKTVTDYTAAEAIARFGLERKLTVWKRPNAVFKNLKQLTRERDQIVDARTVTKNQLHAESCEAEPSKNTIKRLNALIAFLDKQEKEIMQEITAVVKKDQPARDTIKLLTSIPGVGVLTAAIVLAETNGFELIRNKRQLTSYAGLDVREKQSGTSIKGKPRISKRGNRYLRKAMHLPALSAIQCNERFKTVFARLVSRHGIKMKAAVAVQRKMLELMYILYKTNTSFDAEFTREIKKEKQLLQ

SEQ ID NO: 185829 - protein, 412 aa, unidentified
MKHPKMRYTYVGIDSHKDTHTAVFLDCFFERLGEMQFSNLPSCFDDFLLQAQAYLMDGTTFMFGLEDISSYGRTLTVHLKNRGYEVKHVNALLVARERKNQNIVQKTDSVDAECAARVLLSKFSELPNADTQDMYWVLRTLVARRDALVKQRGMAKNQLHGFVTQHYPDYRRFFINIDSATALSFFTRYPSPGLLSRTTVEELTAFLQHTGGGNYTPDFAQRMLDTLQDTTVQFQEVRDTVVQSTIRQLRYIVDEIEQLEQAMETFLPKFNSTLTSMSGIDTVTAARMLAYIGDIRKFSSSAKLARYAGIAPVSYSSGKKDMQFANERGNRQLNSLFYNLAVRVSYATGHNYKVTNSFFYGYYNRKISEGKTKAQALKCVQRRLVNIIWTMLTNNEEYVNPPTYGLPEATDA

SEQ ID NO: 185830 - protein, 324 aa, unidentified
MSLPSPPINVGIDVSKETLDIAVHETAAHWTSKHEFTEFPQLLKSLRAVAPTRIILEASGGVENLLVSYLAMAGLPVIVINPRQVRDFARATGQLAKTDRIDAFVLARFGATLEPAVRQLKSAETQELEALVARRAQLVNMLTAERIRLQQAQQQRRQSIVSDLKAHISWLQKRLDKCERDLSQLLRSSPIWRATDERLQSVPGVGPITSLVLIAELPELGQLPDKQIVALCGLAPHARDSGKWHGKRTTRGGRARVRTALYMAALVATKHNLVIKSFYRRLLSAGKQKKVALTACMRKLLVILNAMFRNQTSWQPPRPAQELN

SEQ ID NO: 185831 - protein, 394 aa, unidentified
MKLVGIDVGKNSHHFCVMDKETGEFNVTPTSFSNNKEGFDFLINSLKPYSKKSILIGMEDTGHYHVALLKFLLSNGYTVALINPKTTDLTRKMEGGITKNDKLDTITICDVLDTPERKKQYRITKVDRFDLYEQRQLTRHHHNLKEELNVYCNRLQKSIDLVFPEFNTLFSSKYSIVYMNLLKTFGSAEAIASTDIRTIRKCFEIKGRGNRISLTPEKLKECAKNSIGISSEVETIQIKHLVSQITLIKEQIAETDKKIEEFSITNNSPILSIPGISHFSGTSILAELGDIGNYSKPSQIIKFAGVAPYHYESSQYNAQHTGITKKGSKYLRKTLYQIILTVINNNPVFKKYYLLKISQGKGHRCAQGHCIRKLLRIIYHLLETGQSFDPALLR

SEQ ID NO: 185832 - protein, 354 aa, unidentified
MAKKSQQSFSSLASIGVDIGKDFFHLVGFDINGQFVLRRKIRRLALVQTFEKLPPCIVGMEACMSAHFVSRALRKLGFEPRIIPAKYTKPFNKGQKNDFNDAEAIAEAALRPRLKLVQEKTQDQLDLQALHRVRFRLVSRRTATINQIRAFLIEQGITVRTGAHNLRNSLFAILQNREDEISPRMSDIIVGLYEDWLWLDERIESTSYEIEAISKREANCQRLMSIPGIGPMISTAMVAAVGRGEAFDRGRDFGAWLGLVPRQHSTGGKTILGRISKRGSRYLRTLFIQGAHVILMRPHNWKKFSFGPWLEQASQRMHKNKLAAALANKLARIAWSVLRNGKAFDTKPQEVTAV

SEQ ID NO: 185833 - protein, 391 aa, unidentified
MIYVGIDVAKDKHDCFITNSNGEVLFKAFTISNNQDGFNVLYQRIESVMEDVTKVKVGLEATGHYNYNLLGYLIDKGLTTYVINPLHTNLYRKSLSLRLTKTDKVDARTIAYMLMSDVNLKSYSNTSYHNEELKSLTRYRFNKVKERAKLKTSVSRLVCILFPELEKLVPTLHIASVYALLSEFPGAKHVAGAHLTRLTNLLSDASKGRYGKYTAITFREAARASIGSNMPAKSLELKHTIKLILELGSEIDEIENEIKTIMDEINSPILSIPGINYRMGAMIIAEIGDFSRFDSPDKILAYAGFSPSTYQSGQLDSAYSHMEKRGSKYLRYALYNAAKYVCRWDTIFAGYLAKKRAEGKHYNVALSHAVKKLVRVIYHLVKSNQQYIKVA

SEQ ID NO: 185834 - protein, 344 aa, unidentified
MNAVGIDVSKGKSMVAIMRPFGEIVSSPFEIKHTTSDINSLVELINSIEGESRIVMEHTGRYYEVLAHQLSEANLFVSAINPKLIKDFDNNSLRKVKSDKADAVKIARYALDKWQNLKQYSVMDELRNQLKTMNRQFGFYMKHKTAMKNNFIGILDQTYPGVNTYFDSPARSDGDQKWVDFASTYWHVDCVRKMSQNAFIDHYQNWCKRKKYNFSQSKAEEIYGKAKELVPVLPKDDITKLIIKQAVDQLNSASATVESLRTLMNETASKLPEYPIVMAMKGVGASLGPQLMAEIGDVSRFTHQGAITAFAGVDPGVNESGKYEQKSVPTSNAARLTLEKLCFR

SEQ ID NO: 185835 - protein, 412 aa, unidentified
MLKIVYPICCGIDVHKTFVVACIASTNDKNMTSYQTKRFSTYTKNLRELSLWLEENNCKDVCMESTGKYWHPVYNILELTCNVVLAHPKYLKAIRGKKTDKKDAKWIADVFKHDLVSGSFIPPAQIRELRDLMRYRYKLTCYTTGEKNRAQNCLTVSNIQLASAFSDIFGKSATAILNHILHNPDDKDFDVTPFVHKSCKTPIEEIQLSIDGAISHEQTEKLKVIRSHMDNLASCKDGLESVIVNLAKPLMPQINLVSTTPGIKEFSAIGIISEIGVDMSAFPTAKHLCSWAGVAPQCNESGGKKKSSRVSRAGVYIKPLLVQCANAAVKSSKHPEIKNRYQAIKKRRGHKRAIIAIARMLLTAIYNILKKSEPYNPELYRIADVSPINREQQAILLLQRRGYSITKDDLIA

SEQ ID NO: 185836 - protein, 344 aa, unidentified
MVVLGTDAHKRNHTVVAADEAGVELGSITVGATPEGHLRLVRWAAAWPERRWAIEDCRALSRRLEADLLGVGESVVRVPPKMMAGVRRSARTRGKSDPIDALAVARAALREPDLPVAVLDGPSRELRLLVDYRESLVKDRTAAQNRLRWRLHELEAGYDPPAGSLNRYKVLNEIDQLLAAHTSMVAELGRREVSRIRELTREANQLEADISQRVTRQVPTLLEIPGCGALTAAKLVGEAADITRFKSRDAYAMWAGVAPIPVWSANNQRHRLNRGGNRQTNAAIHRIAITQIRIHPDAQAFIKRRLENGSTRREALRLLKRKLANVVYRNLLTDTQQPALADAA

SEQ ID NO: 185837 - protein, 368 aa, unidentified
MEPANLTTVMTNTNTTIAKSYARIKLGIDAHAKWYYVARQLDGATPQPVQKMDLDGLLHFVAKQQRLAREVHTCYEAGAFGYHLHRKLVAMGVRNLVVQPQDWDERGKGVKTDRIDALALCQRLDRYVRGNRKAFSVVRVPSEEEERERATSRQRQQLVRERQRLQAMGRSLLAMHGIHVTGKWWKGKTWNRIRSEAPDWVMERLEVFIRLIEPVEAGERQLTEAIREAARDRKIPKGVGPLSFEVLRREVGDWSRFNNRREVSSYTGLCPREHSSGGKRRGGSVNKSGNPRVRAMLVEMVWRMIRWQPRYHALRKWMPVLGDASRSAAVRKKAIVAVARQLAVDLWRLFTGQTTAEKLGLIYLPHAA

SEQ ID NO: 185838 - protein, 421 aa, unidentified
MSTSTLSKKLANVKPGTLFVGVDLGLDRNVAVVLSEHAKQLSRFGFPNDRDGYDYFYHRLETIQGQQQAAAVLVGMEPSNYIWKLLAADMEQQRLEYDYRLVNSYTVKKHREGDQLDRSKDDNRDAFTIGDLVRTGKYTETRLLHGPYAELRQYVTLYTRLGRNVRRQKNHVSNIVGQLFPELRRAFKDLSGQTALAMLCNHAAAVEVRKLSQEIFIAGVRADFHGQRLEVAKLRRAHTLAKRSVGLSDGAKALQLALQLHVETLRVLQQQLERVTKEMMDTFLALPESKYLLSMPGLSIITATTILAEIGDPSNYTSARQLIKLAGTQPAPNTSGRRTRSQTPMSHKGRSRLRTALFFAVLSLVRVDDAFAREYKHLQKREKNPLTKMQALGVLMNKLLRILWALMRNRTFYVSGFQGTA

SEQ ID NO: 185839 - protein, 365 aa, unidentified
MDNRYYTIIGMDVSDRKTQVCVMAREGGRTNIVTETAIPTTKDGLSRFLSAQDRSVPLAFETGTHCRWMYELATGLGFKVYLANPYRLKVITASKTKNDTNDARLLARIALADPELLHPVKLRGPEHQKMINLHEMRNLLVKQRSGIIVQLRAIAKSMGFRLAKGSAAQFHRLDARSWPKEFRDIAWPMVKNLAQLAITIRTYEKLIRELAATAAFKGMVDRLMEIHGVGIMVATGFVATIGGDVDRFAKPRDVGPWLGLVPKQSQSGDVDRQCHITKAGSPFMRRLLVESAQRIMCECMPDTDLKAKGMRMCVRGAKIAKRKAITAVARSLAVLMVAMLKRPDAPYVPLSERGKRDLLAARACA

SEQ ID NO: 185840 - protein, 311 aa, unidentified
MASAHVDVAATGAELPAALGRVDNDTEGHSTLADGLARLKPTLVLMEATGGYEAALACALQAAGLRVAVVNARMARDFARAMQRLAKTDRIDAATLAEFASVLTRRSDCERFIRPLSDSEQQDLAALVTRRRQLVSMQLSERQRLRLARPVTRPSIEAVLEAIARQLDDVEATMARRVEQHHAPMTKLLQNVAGIGRVAAATLIAELPELGRLNRRQICALVGVAPYANDSGASRGRRHIVGGRFEVRRVLYMATLTATRHNAAIRAFYERLVAAGKHKKVALIACMRKLITHLNAIVREHLNAQNRPSIT

SEQ ID NO: 185841 - protein, 344 aa, unidentified
MTYYTGIDVSLRSVSICVVDDKGEVCLEAKVAAEIDAIVDRLRQFSSDVKSVGFEAGTLTQYLTYGLQAAGFEVICLEARQVSVTLAAMRNKTDRNDVRGLAQILRTGWYSRVHVKSLHSHQVRALLASRKAILKKCVDLENELRGLLKVFGIRLPSRVGHGSFDAELRDTVSSDEMLACALVPLLDARTVLYKTYLKLDNAVKGLVRADPVCRRLMSIPGVGPVTALTFKAAVDDPSRFKSSRTVAAHFGLTPRRFQSGELDNPGHISRAGDADVRSALYVAAHSLLTRNAQWSTLKAWGVGLAKIRGHRRAVVAVARKLAVILHRMWIDGSEFRWGPVAAFA

SEQ ID NO: 185842 - protein, 360 aa, unidentified
MQPEASQEVKDGMARFVGIDIGKAKCRAAIMDPGGIILEEFTFTNNHEGIEGLASRLTLDDRVVMESTGSVWTNLYNHLDERHIPVALANPLKTKAIASAKIKSDKVDARILAHLLRSNLIAESYVPPQHLREIRALVRHRVGIVKIRTMVKNEIHAIVDKHGLKHEFSDLFGKRGLEWLRSIELLPLDRLILDNHLTHLESLNQQTERVDKEIHNKACEDSDVKLLLSMTGIDVYSALLIRSEIGSIDRFPDHKKLVSWAGLAPSLHQSGSVEYHGAITKQGSRTLRWIIVEAARVAVNHDAKMQGFHERVKHRRGDQKAIIAVANKMLKIIWFMLTRREPYQSRNEKRYQQKLNSIAS

SEQ ID NO: 185843 - protein, 415 aa, unidentified
MDTIFAKVAGLDVHQKFITVGIRCRLETGKLFAEVRTFGTMTRDLMALADYLEALGVTHVAMESTGVLWKPVWNILESRRFTLLLVNPRHVKQVPGRKSDVSDAEWIAQLLQCGLLQSSFVPKRELRELRDLTRYRAQLVSEQTRVANRIHKILEDANIKLGAVASDILGKSGRAMLGALVGGQQDPEKLADLAEGRLRAKIPHLKLALEGHFSEHHKFLVEHLLRHLDDLERQTEQISQRIAERLCPILDDKRLERLDAISGVNRTTIENVVAEIGADMSQFPDEHHLSSWAGISPGNEESAGKRLRNRTTRKNRWLRRAIIEAAWAAGRTKNSYLGAQYRRLAARRGKKRALIAVGHSLLVIFYHMLKYDVEYQDLGVDYFDERDPEHLRHYLVKRLERLGYRVSLTPQTEAA

SEQ ID NO: 185844 - protein, 330 aa, unidentified
MAYAGLDIHKSYCQAIVCTPEGDVIKEGRMTTDKEDIEEFFSGLEGLEIALEASTNYEYFYDLLESLGHHVVVAHPLKTRMIADAKVKTDKLDARILADLLRGDLLPTSYVPPKEQRELRHLVRHRIALGRLRGRLKTQIKTELRRKNIKYREGANCFTEKGKTELRRLHNPVIDSYLTIYAVVEDELKKMDRAIAEAGTRYEDVRLLTSIKGIGVYSALVIYSEIGDGSRFPTEDHVFSYAGLTPRVHQTGNEQYYGRITKEGSKYLRWILVEAARIHVQWCPESRITKHYEKIKRKRGEKIAIIAAARKLLQAIYYMLKHKEPFRIEG

SEQ ID NO: 185845 - protein, 455 aa, unidentified
MEHARQPRRVRRRLTIVNEDAAGLDVGATFHVVAIPADRAAEPVRTFQSFTADLHALADWLQSVGVRTIAMESTGVYWIPVYEILEQRGFEVLLVNARDTRNVPGRKTDVNDAQWLQQLHQHGLLRASFRPRAAVARLRAYLRHRERLLDYAASHIQHMQKALMQMNVQLHHVVADITGVTGMTILRAMVAGTHDPAALAAFRDRRCKASPATITAALTGNYREEHVFALRQSLELYDFHRTQIAACDAQIEATLTQLNLDREAPAQPLPPVRHQGGPNEPRFDVRSALFTLLGADLSQVHGFGPYTILRLVAECGDDMTKWPTAKHFTSWLCLAPGNKISGGRVLSAKTRRSANRASALLRIAAVNVGRTHTALGAFYRRLASRIGKAKAVTATARKLAVLFYNSLRFGLRYVDPGQASYEARYQTRVLANLTRRAKQLGYALVKTPDFQLGVS

SEQ ID NO: 185846 - protein, 335 aa, unidentified
MQTITTIGLDIAKSVFQVHGVDADGNVVLRRQLKRRYVLAFFQKLPPCLVGIEACASSHHWSRGIQALGHTVRLMPPAYVKPYVKRQKNDSADAEAICEAVTRPNMRFVPTKSPEQQSCLTLHRTRHLFIRQQTATINSIRAHLAEFGIVAPVGRRGVEQLLEIVADPNDDRLPEVARACVAALGSQLLALKAQILAFDRHIMAWHRSNETSRRLDAIPGVGPALATALVASIADPKAFRSGRDFSAWIGLVPKQNSSGGKDKLGSISKQGDYLRSLFHGGCARRDPLCETPWYEAQTMADGVVGPPAHQGRRHCARQQDRSHGMGDDDEGRALQ

SEQ ID NO: 185847 - protein, 346 aa, unidentified
MMIIGCDFHPSWQQVSWLDTETGETGEQKLVQASGDAERFYRQVAAPALIGMEATGNCHWLVDLLSELGHELWVGDAAQIRASYVRQQKTDKRDAAHILKLLVEGRFPRIWMPSSEVRDLRQLLLHRYKLVIIRARVKNELQHLCLNKGVQRKRKLWSQAGQQILRELPLQLWAGRRRDDLLKLMAMLDQQIEPLDQAVKAEAQRDKMALLLQTQPGVGAITALAYVLTMGDVGRFPRGKQVASYLGLIPREHSSGGRQKLGAITKQGNRMLRMLLVEAAQIAVRYDPEFRREYLHRCHQKPKAVAKVAAARKLAVRLYWMLRTQRPYPAVVRIESSPRVPLVGAS

SEQ ID NO: 185848 - protein, 313 aa, unidentified
MRNDLIGEIVKRERVSTCKAELRKCLSSVPKGSRVALESVGFCWPWIDFLEELGYEVLLANPAKVKLRAEDIKNDRVDSKTLAELVRMNWLPTCYVPSAELRWLRSLLRHRAYRTKLSTSVRNRSRSEFRKRDIHLDVDLGTVKGRKAAGSLDVFEISQNIELLDVIERQSKEVETMLWKKYGKIKPVELLMSVPGIGFLSALTLYAEICDIKRFSSAEKLAHYAGLVPRVRQSGEKMRMGREIKGCDKWLKWIFIEASWNFVRCCPDSHLTRVYEDACKRKKDKTKAIKIVARKLVNVVWYVWTYEKEFKVK

SEQ ID NO: 185849 - protein, 387 aa, unidentified
MPAEEMSVAYLGIDVGKSSHSACALDVGGRVAFRAELANRPDDIDRLLERAGSGALVVDQKRNIGALVLARAHAHGNPCAYLPGYAEKQARGMFPGIAKTDAIDAEVIARTALGVPRALRPAPEEPEGTASLRILSSQREFASSARTRAKNRLRATLLEADPALEGAVDPSSRWQVSMLAEFGGAAGCSAAGWRRFSSAARRAGAPVAGARRLWEALLASSRSGRRLPAGEDVAVRILAREIASLDADIEELDSLVADSLAGDEVYECLLTVPGIGPKTAAALVTSIDISAFRGHDELASYCGVAPRDRRSGSSIRSTSPQHGGNRQLKNLLIFSCNSLIGTDNRFGRYYGECRARGMRHSKALKAVARKRLKVIYAIMRDAVPYAA

SEQ ID NO: 185850 - protein, 324 aa, unidentified
MHTLGIDIAKEKFDVSLLGGRQAVAGQFDNDAAGFERLQRWLQKRQVAQVHACMEATGAWWEELALFLHEAGYQVSVVNPKLIKRHAESIMQRNKTDRQDAATIADYCLRQTPELWSPPPEANRRLRALVRHLQSLKEDRTRETNRLKAHVSEPAVRELIEQHLRFLDQQIATLQQEITDHIDQHPGLKEDKRLLTSIPGIGDLTAALFLAEVPDVSRFQQAGQLAAFAGLTPAQQQSGSSIRKPARLVKWGNRHLRCGFYMPALSAHRFNPLIADLRERLLRRGKSKMTVVVACMRKLLHLAYGVLKTRQPFDPYHTVNVQAT

SEQ ID NO: 185851 - protein, 394 aa, unidentified
MSYRSDPYIRVTKIVLLPFDVEHTAEGLKKLITKLRQLDGEIRIVMEHTGMYWRPIAMTLKEAGFYVSVVNAILIHNFSDNSIRKVKTDRADAMKIANYGLTFWSDLQEYTGEDENRQLLKIQSRLYERTATTAGMLRNGLISLLDQTFPGANKLFRDESRNSRGHVKWIDFVLRFWHKECVAALSLAAFTDTFQKWCKRTGYKFSASDAERIHAIARNAVATLPKNDSTKLLITQATNSLNAIYDSLQAIRTEMDRLASMLPEYELVMGMEGIGKVTGPQLMAEVGDVRRFSHKGALVAYAGVDASPYQSGSFDSKSRHVSKRGSPHLRRVLFVIMSMTLIRANTANPVFCFMDKKRAEGKHFYVYTVAGSAKFLRIYYAKVKEYLNALEETA

SEQ ID NO: 185852 - protein, 347 aa, unidentified
MKKIVKQVLGIDVARKELVVCLARMHDDWTSELISHRTFTNSEKGFEAMILWVKKLTIESTPVRYVMEATGVYHESLAYFLEEKGHAVSVVLPNKINSYFKSLDVKTVTDKTASDAIAQFGLERNLDNWRRPKEIFRDLKQLTRERDQTVDERTVAKNQLHAEETQAYPNKKSVSRIKARIKLLNKQVIEIKEEISALVKGEKDVSKSVDRICSIPGVGLLTAATVLGETNGFELIRNKRQLTSYAGFDVQEKQSGTSVKGKPRISKKGNKHLRKAMHLPALSAIRHEERFKAVFVRLVSKHGVKMKAAVAVQRKLLEMIYTIYKTNTFFDKDYPTRHNDEQQKAAA

SEQ ID NO: 185853 - protein, 391 aa, unidentified
MIYIGIDVAKDKHDCFITNSEGEVLFNAFTIPNNADGFHDLFQKISSLTNDFSNVKVGLEATGHYNYNLLGFLIDKGLPTFVINPLHTNLFRKSLSLRQTKTDKVDAHTIALMMMSGVNLQSYSDTSYHNEELKSLTRYRFDKVQERAKLKTSISRLVNILFPELEKLVPSLHMVSIYALLAEFPSSAQIASCHLTRLTNLLANASKGHYNKEKAIEIRNAAKHSIGSNMPAKSLELKHTIRLIQELTSEIDEIECSIKSIMDEIRSPILSIPGINYRMGAMIIAEIGDFNRFSSPDKILAYAGLSPSTYQSGQLDGCYSHMEKRGSRYLRYALFNATKFVCIWDNQFSAYLAKKRSEGKHYNVAISHAAKKLVRVIYQLEKSGQLYHRAA

SEQ ID NO: 185854 - protein, 343 aa, unidentified
MLYVGIDIAKNKHDLACINETGEAMITNFRFANSYQGFHQLKLKLEQLSPITQDVQIALESTGHYNYNIVVFLRELGYNVFAYNPFIIKQFAKSQSLRKTKTDRKDALLIARKLRSDVTPEYYQTDKSMDELKELTRYQNRLIQSRSKCKNLYIRLLDIIFPELHRVVSNLHNHFVYELLTKYPSAQKIARARFSSLLKIKRLTADKAHQIQEIAKQTIGNASPALSLELVQLIESIKHYDKQINQVQEEINLLMTDLNSPVTSITGIGNRLGAIILAEIKTIHNFKNPNQLQAFAGLDPAIYQSGQMDNTGHMVKRGSSYLRYALIQAAKLISITHRILKPI

SEQ ID NO: 185855 - protein, 446 aa, unidentified
MQMDIINPQCAGVDIGSKSHFIAIGQELTDVREFGVYADDLTAICTHLQQNGITSVAMESTGNYWQNLYVELCKFGFEVTLANGKFTKNIKGKKTDVKDARWIQKLHSIGLLTSSFLPDETTETLRTFCRQRQNMLDLAAEASHKMQKYLKLLNFRLDVVVNDICGLTGMAIITDICKGNLDPVSLAKHRHGNCRKSEEEICKALKANNRADYLFGLKQELESYDFYKKKIGECDKQINLFLKNQINTDPEKKKLKTDDKSHKRINKNALRGIDLNQASYQYFGGVDLMKIEGLSHATILSIMSEIGPEGFLKFETAKQFTSWLRLAPNNKISGGKLLSSKTPKGSNRLKIALRNAANAIGNLKDTHLSDFFKRVAYRKGRTVAVSATARKLAVIIWNMIVKRTPYNPPMEYLFLDEKRKLKLISRIKKQVAKFELTKDDFGFATN

SEQ ID NO: 185856 - protein, 364 aa, unidentified
MSKYATIASKSIAAKQKIAAFAGIDYAKRFSYITLGDEDGNVLVQEQIPNEKILLLKFFEKHPKMTIAIEACRGHEWLVDLLREEKHTVHVGNVYAIKLIAQSRCKTDKIDSRILMELLAKGFLPTTYQPTVKERGYREVLRFRAHLVKSQVRYKLKVHALLDKENKGLAIPYLFSETGRKALSEVKLAEPKQQILDETLEVIDYLEEQIHKQDLKVRKLAKPNPHVHRLKTIPGFDVLTAMIFVSEVGDVTRFRNAEQLAAFTGLVPRVYASGGKMHTGRITKTGPRLLRRMLVQSAWASLRSNSALRSRYASIMRRRGKQIAIIAIARMLAEIAYHVYRDKTEFDETRLGAGLVRPPIDPKK

SEQ ID NO: 185857 - protein, 344 aa, unidentified
MLKFNVIGIDLAKNVLQICVISKHGELVSNKMASRQKLKEVLAKSSPSIVGIEGCGSSHYWGRLAESFGHDVRIISPKKVKGFLEGHKTDANDALAIANAAMQIGLKYSKPKNEEQQTLQSLEASRVFLSRNITSLSNHIRAMLYEYGIVSAKGAAGLRKVIEDTFEENNALPTCLISILHQLWAQYLNLKDEFTKLEKSKNSIVRQVKPCKQLMALEGVAEVCAGMLYSSIGNGKQFKNGREASAFVGLTPKQYSSGGKVFMMGIDKKGGVKELRAALYQGAMSIVSHLPDEPKTVKQAWLIQLVKRVGIKRTCIALANKTVRTAWAMLRHESKYEQQQLIAA

SEQ ID NO: 185858 - protein, 340 aa, unidentified
MNATTYGLDIAKAVMQVYWVDGETGEVGRRTLRRAQLAAFFANRPAGRIVIEACGSAHYWARTLGSLGHEVRLVHARHVRAYVRGNKNDAADARAIWNAAHQPGLRWVPIKGEQQQAVLALHRVRSQWVKARTQMVNGLRGLLYEFGVVLPGGRQAGLKAIAASRGQLDAALPEPMRALIDGQFEMLGAIERRIEAIEAQLQALQSQFDSARRVRAIPGVGPLGATALAAVLGEDARGYRNGREFAACLGLVPRHTGTGGKVSIGKLSKRGDPYLRTLLMHGARSVIHHARGRSAWLEQMLARRPLNVVVAALANKMARTAWALVAHGREYQVGGIARAA

SEQ ID NO: 185859 - protein, 406 aa, unidentified
MYNDDILVVSLDVHKKIHFAHCELKSSAKSIGKDFSFPNSASGFNTFFSEVNNRLHHILIKSVAVVLEPTGPYWKPIGYAVINRGWPLYIVSPEQVYHQRIADDPSASKLDKLDPKTIAKLFRDGKATIARLPQGTFRELQKLHREYIDLTKKLAREKIQLKSILAEVNPELASFFSNVFGKIALAILSTAPTPPEILALGIERLTAIFKKHGNGIIGRKKAEKLINLMKSSIAVPQKSAISLLDRTLQRVSIYRTQIQDVADSLINMAYPWASRLTTIDGVNIRPACRFVAELGDPSSIHSPKALVKLAGLIPKEFRSGSSIHKKAIISKKGNPYLRTIAYYMAISCVKRNHRLSQYYKHLISKGKPKMVAICAVARKLLMIIYHVLHNEPYVPEKVGVGLNKHT

SEQ ID NO: 185860 - protein, 322 aa, unidentified
MKEELTQPGPMRPCYVGIDVAKAWLDVAVRPSGVQWRVANAEADLPALVEQMERLTPQLIVLEATGGYERGVAAVLAAARLPVVVINPRQVRDFAKATGRLAKTDVLDAQVLAHFAEAVHPEPRPLADAATQRLAALLERRSQLVGMLTAEKNRRQQALSSVRPLIETHIAWLEQALDQLTQDLDQTLHASPVWREREDVLRSVPGVGPILALTLLADLPELGTLAPKQLAALVGVAPLNRDSGSSRGKRLIWGGRARVRSALYMSTLSAVRYNPVLRAFWTRLREQGKPPKVALVACMHKLLTILNAMLKRQTPWQPALVA

SEQ ID NO: 185861 - protein, 446 aa, unidentified
MKKSSRMSIVHPHAAGVDIGAEFHVVAVPPDADTEPVRTFQSFTGDLQRMSDWLKTCHITTIAMESTGVYWLPAFEILEAAGFKVILVNARDAKNVPGRKTDVNDAQWLQKLHSFGLLRASFRPEHDISVLRSYLRQRERLTEYRAAHIQHMQKALMQMNVQLHHAVSDITGVTGLSIVRAIVSGERDPSMLIQYRDVRCKKTPEVLRQALTGNWQPEHLFALEQSVAFFDFYQEKIRECDDQIETSLLQLSTGIEEPEGVLPCARHRTKQPNQLSFDVKPLLWKITGADLTQIHGFGPYLALKFIAECGTDMNRWPDASHFTSWLCLSPGNKISGGKVLSSKTRRSSSRIAAALRLAATTIGRSDTALGAFYRRLSSRIGKAKAVTATARKLAILFYNALKYGQKYVDPGADYYEERYRSRVLDGLKRRAKSLGYSLLQDPELCV

SEQ ID NO: 185862 - protein, 315 aa, unidentified
MTQTIALFAGIDISKETLDLAFSNDAAVVQFDNTKAGCRRLVALLAKYQPERTVFEATGPYHRELEMALASAGLAYVKANPRKVRRFADVIGIHAKTDRVDAGLLARFAAMVDMTPTVQKSSSLQNLGELINARHSLIADRTALKNRSHVQRSKLIIRQNQARLKLIESQIKAIDQEAITLVKQDETLAARFDILISIPGISTLTAIVILAEMPELGTLDQRQVASLAGLAPHPRESGTWKGKRFICGGRANLRQALYMPALVAARFNADLKAKYEALIAARKPPKVAITAIMRKLIILANALIREQRKWRPKPA

SEQ ID NO: 185863 - protein, 320 aa, unidentified
METPESGAVCSKHHRGTTTEHYAGIGVSLESASLCVVDATGRIIREAKVASEPDVLIAWFRGLEFAVTRIGLQAGPLSQWLYASMREAGLTVELLATRHVRAAFKAMPVKTDRKDARGIAQLMRLGWFRPVRCKSLLAQEVRALLTARKLLQTKNHDVEMSLRGVLHGFGLKVGPTTPRTFATRIRELVAGHPTLSTAAEALLAARSTLFEQWQQLEKRLRSLAREDHRVRLLTTVPGVGAIVGLTYVSAIDDPGRFRSSKAVGAHFGLTPKKYQSGETDVTGRISKIGDGGVRTALYEAANVILTRPVKGSTLKSWGCV

SEQ ID NO: 185864 - protein, 400 aa, unidentified
MISVGIDVSKGKSTVCILKPYGEIVSKPFNITHTQKDLSELSSMLFRLNDEVKIVMEATGIYHLPVLTYLQEKGFFVSVINPYLMKSYRNESLRKAKTDKIDSRIIANYGIDHWFKMKEFQTSGEIYEELKLLGQQYRHYMKLHLLSLAELTHLLDLTMPGIKNLLASWNETNRKDKRSDFVERFWHYDVITSMSEQEFTEEYILWAKEKKYVPSQEKAKVIYTLAQESIPTLPSETSSVKMLVTEAVRVLKEVDATLGLILSRMQEIAKTLPEYSVVREMGGVGNTLAPKLIAEIGDVRRFRNGKALVAFAGIDPPPYESGQFVGCNRKISKRGSASLRKVGYETMRSLKMRSRPEDPVYRYVVKKESEGKSKKSAKIAGLNKFLRIYYARVTELYKNI

SEQ ID NO: 185865 - protein, 350 aa, unidentified
MIIIGADYHPTFQQIAFVDSETGELRERRLEHPEAAEKFYRELAAQGKKVRVGMEASGHARWFERLLAELDFELWIGDAAEIRRKRERKQKTDRQDAEHILRLLLKDDFPRIWVPSWENRDLRQLLWHRHRMVQARTRIMNQLQAVALNEGLRSKKRLWREAGRKQLEAFRLAPWASRRRHDLLELLDRLNPTIAALSQAIEQEVHNCPEAQRLMTHPGVGPLTALAFVLIIERADRFQCGKQIASYLGLVPLEDSSGNRRRLGHITKQGNSLLRFLLVEAAQVTVRSLPEWRSRYVHLTMRRGRKIAKVAMARKLAVRLYWMMRKERGYEQVKKFGSHAGQPGNRDGVK

SEQ ID NO: 185866 - protein, 359 aa, unidentified
MAVIEGRERHIVGGVDTHKDLHVAAVVDEQNRILGTRSFATTRQGYRQMLAWMRTFGELQRIGIESAGSYGAGLLRFMQQAKVTVLEVTTPDKQDRRRRGKNDDLDAQNAAYAALAGQRTATPRSRDGMIESLRILMACRKTAVSARRVALQMIHNTIVCAPDGLRDQLHSLTRMQLIRTLASWRPDLTTYRDLESAYRIGLKSLARRYLELHDEIAELDAMIAAIVDELAPNLVARNSIGHIGAAQLLLTAGDNPERLRSEASFAALCGVSPVPASSGKTVRHRLNRGGDRAANSALHILAIGRLRTDQRTKDYVARRVAEGHSKLDAIRALKRYLAREVFTLITQRRREINATRIAA

SEQ ID NO: 185867 - protein, 403 aa, unidentified
MVFVGIDWAEAHHDICVVDDEGHVLAKRRVPDGLEGVGKLHALVAEHAEDPAQVVIGIETDRGLLVGSLVAAGYQVYAINPFASSRYRDRHATSGAKSDSGDARVLADLVRTDRHKHRPLAGDSHLAEVVQILARAHQGLVWTRQRQANQLRNALREFYPGALAAFDDLDAADAVAILERAPTPSQGRALSQAKIVSALRQGGRERNLESKAAEIQAQLRLPQLEVPALLAQAYGHSVAATVAVIKQLNLQIAALEQELAASFEMHPDAEIYLSLPGLGVVLGARAMAEFGDDRTRFLNPKARKSYAGTAPITKASGTRKVVLARVARNRRLADACYQWAFSALTRSEGARHRYDVLRARGQTHHQALRALGNRLVGILHGCLTNRQIYSEHLAWSPHLEVAA

SEQ ID NO: 185868 - protein, 398 aa, unidentified
MTESSDYESVQVFIGVDVGKDTHHAVAINRSGKRLFDKALPNDENKLRSLISDLKQHGQILLVVDQPATIGALPVAVARSEGVLVGYLPGLAMRRIADLHAGEAKTDARDAAIIAEAARTLPHALRTLKLADEQIAELSMLCGFDDDLAAQTTQASNRIRGLLTQIHPALERVLGPRLEHPAVLDLLQRYPSPEKLASLGEKKLAAQLCKLAPRLGKRLAADIAQALAEQTVVVPGTNAAAVVLPRLALQLITLRKQRDEVALEVEQRVLTHPLYPVLTSMPGVGVRTAARLLTEVACRAFASAAHLAAYAGLAPVTRRSGSSIRGEHPSRRGNKALKRALFLSAFAAFRDPLSRAYYTRKMSQGKRHNQALIALARRRCDVLFAMMRDGTFYTPQGS

SEQ ID NO: 185869 - protein, 429 aa, unidentified
MNCTQNKKIEQVKETTMIVGIDVGSEKHYFRAFNWRGIELTRKPIAFSNSMEGFNSFYNTIVELMQKSELEEALVGIEPTGHYWFALGQFMGEKDIKFVMVNPHHVHKTKELDDNSPSKNDRKDPRVIAGLVRDGRYFYSYMPTGVYAELRNASNRRFVLVEEQTRAKNRLQKWIAVYFPEYKGIYTHIDAKGGMLVLKKAPTPEEIVRLGVEGIIKIWKDAKLRGNGHKKAMLILAAAMRSIGLKAGLTEARMEIQDLIEDYELQTKRLERVNDLIKGLCQQVRYADKLLEIKGIGITTVAGFIAEVGDITRFDSTKELQKLAGLELVADSSGKHNGKTKISKRGRKRLRYLLLEAAISVVGKNEEFKEIHRYYTTREKNPLKKMQSLIAVACKLIRVFHAILTKGIRYDASKMLKDIRHPGEQLKAA

SEQ ID NO: 185870 - protein, 414 aa, unidentified
MEDILECCCGLDIHKESIVACVLKGPLEKGLKPQSEIKEFGTQLKDLMVLRKWLDENSCRYVAMESTGIYWHPVYAVLENALSDEMHLLVVNARHMKNVPGRKTDMRDAEWIATLLRAGLLKGSFVPEHDIRDLRQYTRYRKALIRDITSQKNRIEKLLQSSGFRLSSFLSDIFGSSGLAIMQQLVQVGCISEQSLEICLKGQARRKAAEISSSLNGTLSLPQRQLLKMQLAHLKDLQDNLQEVEEEIRRDFSQFEGPRDLLDSIPGINLTAAYTILAEIGNNMSAFPTAQHICSWAGLAPGNHESAGKKKNQRVTQGNNYLKTILCEVAWVIAAHKKQYLSGWYWRLKQRTDSKRAIIALARKLLVIIYTMLKTNQPFNEQKFLERKEITDRKRVNRMVGELTRLGYVVSTPA

SEQ ID NO: 185871 - protein, 343 aa, unidentified
MQTITTVGVDIAKSVFQVHGVDADGNIVIRRQVKRRYVLAFFQKLPPCLVGIEACASSHYWSRELQALGHTVRLMPPAYVKPYVKRHKNDSTDAEAICEAVTRPNMRFVATKTPEQQSCLTLHRTRHLFIRQQTSVINAIRAHLAEFGIVAPIGRHGVEQLLGVVSDAGDTRLPEVARACLAALGAQLRTLKAQILQFDRMITAWHRSSEASRRLDDIPGVGPVLATALVASVADPKAFRSGRDFSAWIGLVPKQNSSGGKQARQYISKRGDRYLRSLFTTGALAVIRYAKIHGTRHRPWLTALLARRPTKVTAIALANKIARMAWAMMAKGERYKEPVALAA

SEQ ID NO: 185872 - protein, 392 aa, unidentified
MFYIGIDVSKDKHNCFCCNDNLQPVFQFQFNNDSIGFKQLFEAIKSLDSPFDNIKIALEATGHYSYNITSFILDNSLPLAIINPLHSNLFRKSLSLRKTKTDKVDACVLARILIAYPDLKFSTSLDDNDIILSELKSLTRFRLSLVKDLSKLKTSLSRIINIVFPEIEKVFSSTNSLYELLYNFPSAKEIANAHLTKLTNVLIKASKGHFSKEKAVQIKKLAQNTVGNSSYALTLELKHTIKLINEYNSSIDKIDKEITTIMDKIASPITSIPGIGITLASIIIAEIGNFDNFDSPDKILAFAGMSPTIYQSGKYVASSAKMEKRGSKALRYALYNAARLTSIYCPVFKEHLARKRSQGKHFNVAISHVVKKLVRVIYHLQTKNELFKNIIN

SEQ ID NO: 185873 - protein, 355 aa, unidentified
MEQYVGLDVSLMMTAICIVDRTGKIEREGMVASDPAAIAAFVRLHAPHVARIGLETGATSTWMWTELNKMGLPVICIDARHAKAALKMQINKSDRNDAVGIARIMQCGWYKEVRVKGLDSHAIKAVLVSRALLVKIKRDLENQIRGLLKNLGLVIGRAKMNMFVVRAAELIEDRPELAAAVEPLLKAREAVEKQIADLDRKVMRLARNDVQVRRFMTAPGIGPITALCYLATIDDPTRFKRSRSVGAYVGLTSRRYASGEVDWTGRISKCGDPMLRSYLYEAAGVLLTRVAKWSVLKAWGMRVAKRSGLRKAKVLNRAKRASHIDPPASSYAIMRRTRPYRGENPGPGKDDQTRA

SEQ ID NO: 185874 - protein, 453 aa, unidentified
MARKHKKDSKANNATLPVMRPDAGGIDIGATEIFVAVPADRAAENVRSFPTFTQDLYALADWLKQCGVKTVAMESTGVYWIPLFQILEDCGLEVCLVNARHVKNVPGRRTDVCDCQWLQFLHSVGLLRASYRPEQEVCAIRSLLRHRESLVQMAATHVHHMQKALDQMNLQLHHVISDVTGQTGLAIVEAILAGERNPYVLAKLRNDRIKASEAVIAKSLVGDYRPEHLFTLRQSLVAYHHYGKLIDGCDREIRRCLEGFKPPHLPDASEGGNQKSQSMTASPDGVLRSELNRVFGIDLTQIPGIRVGIAQTLFGEIGPDFTKFRSASAFASWMGLCPDNEISGGKVLWVGTRKVKCRAATALRLAAQSLHHSKSALGDFYRRMRAKLGAPKAITAAAHKLARIIFHLVTTGQEFNDSRFAADQLRYQKRQEAKLRAKAKALGFQLIPIEQTG

SEQ ID NO: 185875 - protein, 345 aa, unidentified
MKKVMAGIDLHSNNLVVGIMDQDGKRVGQQKLPCELPAVVKFLAPFKERLEQVAVESTYNWYWLVDGLQALGYPVVLANPAAMEQYSGIKNAGDTNDAFFLAEQSRLKILPTGYIYDVELRPVRDLLRRRMLLVRQRTALMLSFKSLYTRTTGTEMELRALKALAIKEAQALYDHPANQVIAGLQIKHIEQLGESIEKIEKAVLASARELPFYSKLTSLPGVGKILGMTITMEVGDIKRFADAGHFASYCRTVEAKRTSNTRKKGENNSKCGNKYLAWAFVEAANCARRADEQCRKWHDRKAAKTLKVVATKALACKLAKAAWYLMAEGVDYNSQRMFGQPAPTK

SEQ ID NO: 185876 - protein, 460 aa, unidentified
MSKKRPKGKRAEPAPKVDWKALEIVHPDAAGIDVGGSEHWVAISPDRDPKPVRSFGCFTADLREMAAWLVEKGVRSVAMQSTGVYWMPVFEVLEQHGLEVYLVNAQHTKNVPGRKSDIQECQWLLKLHAFGLLNNSFQPTDEIRVARTLWRHRGNLVAEASSTIQRMQKALIEMNVQLSNVLSDLSGVSGMRIIGAILKGQRDPAQLAALVEPEVKATPEDIAKSLEGNWRDELLFVLKQQVELYRLYQEKIGDCDVQLRRRLESLGSRVDPRTQPLGPKPKGKRGSRNAPEFDLRTELYRITGIDWAQINGIDVLTAQTVMAEAGDDLEDFDSEKHFTSWLGLCPTNETSGGKILKRRTRKVVNRAAVAFRNAASTLLRSDSYLGAQYRRLRTRLGAPKAITAMARKLACLYYRLIKHGQQYVDKGTAYYESRYREQQIRVLTKKAKKLGFQLVIQQTA

SEQ ID NO: 185877 - protein, 402 aa, unidentified
MNCVGIDVSKGKSMIAVMRPFGEVVVSPFEVRHTASELSELARLLKSLDGETRVVMESTGNYHAPVAWLLHDAGLYVSVVNAMLVHDYGNNSLRRAKTDKKDAVKLANYGLDHWLTLPRYVPEEDTRLMLKTCYRQYQQYSKVQTMLKNNLISLLDTAFPDANRLFTSPPRADGSEKWVDFVATFWHCECVCGRSEKAFTTQYQKWCRKHGYNFSQDKALDIYASACGRFGVMPKTNTAKLLVEQAISQLQTTSAALAALKQEMQSLAASLPEYPVVMGMFGVGPTLGPQLIAEIGDVRRFHSKKALVAFAGIDAPPYQSGQIDVRSRSISKRGSASLRRTLFLVMGVLLQCAPMDEPVYQFMNKKRSEGKPYRVYMMASANKFLRIYYASVKAYLDSLEHD

SEQ ID NO: 185878 - protein, 342 aa, unidentified
MTLYIGVDIHARQQTLSYLETADGTTGQVVLDHEVDDVAGFYRQFQGEVIIGIEACGYTNWFEELVERLGHKLLVGDAAEIRRLARRRQKNDRRDADLLLDLLVHDEFPALYRYCQESREVLRQLRYRHKLVKLRTMVANTLHALALNAGLSLRAKLLTKGGRKQLSALPLSAISQQQRNELLSLADELTRRIQLVEQWLAVQAARDGRVQRLQTHPGVGLLTSLCVVHTLGEVQRFSSTRKVAAYVGFDPMEDSSAERKAYGGISKAGSRLLRYLLIEAGQTAAKDDEQLKQFYRRLLPRRGKARAKVAVGRKLLIRCFIMWRAEIDYAEFLRRGQKEETE

SEQ ID NO: 185879 - protein, 385 aa, unidentified
MQKLNDLSRSPSPLDPDGTLIAVIELSLSSWLVAGIVPGVERQPLKKLAVDESALLMLLHRWREEAAKAGHRIKRIAVAFEAGRDGFWLARWLSARDIEAHVIHASSVAVSREHRRAKTDRLDTELLKRSFLGWLRGERDHCKMVAIPTTKDEDAKRPSREHESLVGEQSRIVNRMKATLIRLGIRGFNPKLKKAAERLDSLRTPEGEPIPPNTLAELRRDMVRRRLISDQIRQVEDARLELLKQAPNDGPHAMVRLLARVIGVGVETADMLVQEVLSRSMRDRRAVARYAGLTGSPDESGRKRREKGLTRSGNARVRRGMIQLAWRFLMFQKDSTLAQWFRARTESARGTRKTMIVALARKLLIALWRLVREGVVPDGVVLRPA

SEQ ID NO: 185880 - protein, 411 aa, unidentified
MDVLIERCAGLDVHRDTVVATVRRPGPGGVRRSETRTFATMTGRLEEMSDWLAAEKVTLVGMESTGVYWKPVYYVLEDDFPVWVINAEHLRNVPGRKTDVADSMWIAQLIEHGLVSPSFVPPRQVRLLRDLTRHGRRLTEERTRTIQRLEKVLQDAGIKLTSVASTILSKTGRAILAALLAGEEDPAALAELAKGRLRPKIPALREALTHRFRLEHHGLLVAQTLAHIDFLESSITDTYGQVEVLLRPVVDVVELVMTIPGVGRRVAEVLIAEVGVDMTVFPTAAHLASWAGICPGNNASGGKRRAGRTRHGSMWLRIALTEAAQAAARTKGTYLAAHHAQIRGRRGTQKAIGATRHDILIAYYHIVRDKVSYQDLGPDWNNRRRSTEQQTRRLVRQLERLGVNVTIEPTT

SEQ ID NO: 185881 - protein, 348 aa, unidentified
MAMTIVEAARTVIGGVDTHLDVHVAAALDPIGGVLGVESFDATPRGYKAMFEWMGAFGTVSKVGVEGTGAYGAGLGRFLAKAGVQVVEVDRPNRQARRTKGKSDPADAVEAARAVLSGRATGTPKSRDGNVEAIRALLVAKRSARDARLRALHQMRQLSYTGPDQLRSRLKDLSITDLVAETAAMRPRSSGDPVVYATKVSLAALGRRVLSLEDELVGIDELLSELVTTCAPEILELFGVGIDTAATLLVTAGDNPERLRSEATWAHLCGVAPIEASSGKVTRHRLDRGGDRHANQALWRIVMTRLACDPRTREYMERRTKEGRSKREVIRILKRYVAREVFKYLPRA

SEQ ID NO: 185882 - protein, 326 aa, unidentified
MAGAPVSQRYVGIDVSKATLDVWILPDEEGFVVENTPTGFALLIARLEELGNLLIVLEATGSYHRKVTIALDAAGFTPAVINPSWLHYFGRSQGQRAKTDPGDARLLAAYAQREGATPRPVPSETTQLLTALLARRNELTKMLVMEKNRRHTIPDLLRDELEDHVANLLGRRQVIERQLRDLVAQDPFWTRRVAILRSIPGIGPVLSVTLAVRLLELGDLSRQELASLAGVAPHPRDSGTHRGRRTTTGGRRDVCKALYQGSVVMRSHNPPMRAHFEQLQARGKERNVALIAVARRSLGIMAAMVRDDLLWEETKVGQAVFLAHSA

SEQ ID NO: 185883 - protein, 408 aa, unidentified
MDMLHARCAGLDVHKDTVVACARILADGGVRQRVKTFATTTTGLLALADWLSERGCTPVAMEATGVYWKPVRHILEGAFALVLANAMHVRNVPGRKTDVTDAMWIADLLAHGLIRGSFVPETSIQHLRMLTRTRKQLVRERAQHVQRIQKTLEDANLKIAAVASDIMGVSGRAILEALVAGETDPETLADLTRGRLKARRATVVDALRGRITHAHRFLLQLHLDQIRALEGAIAAVETEMGTFLEPFRAAAEVLTTMPGASDLVAQVIIAEIGVDMARFPTVGHLISWAGLCPRNDESAGKRRSTRLRKGAPWLKTVLVQAAWSATRAKGTYLRAQFLRLKSRRGPGKAIIAVAASMLTATYFMLRDGVPYHDLGSDYFDRLDRSNTIKRLVRKLEDLGCEVKLEKAA

SEQ ID NO: 185884 - protein, 370 aa, unidentified
MAEPTTLFVGLDVHKETIAVAHASPDRSSDVVYVGEIGTREADVEKLLRRLHSHASRLVVAYEAGPCGYGLYRQLTEKGVCCLVVAPSLIPKKPGERVKTDRRNAAQLARLLRSGDLTAVYVPTVEDEAVRDLSRAREASIGVLKDAKLRLKSFLLRHGLNYSGRATWNEAHLRYLAKVVCPTPAQQIVFQESLRAVSEQTERVHRLEDELVDIAATWRLRPIVDAFQSMRGVQSHTAVTIAAELGDLTRFDNPRQLAAFVGLIPSEYSSGESRRLGPITKAGNGHARRALVEAAWAYRYPAKVSAHLQQRIERCPKPVQAIAWKAQLRLCKRYRRMVARGKNPNVVVTAIAREILAFLWAIAREVPIGN

SEQ ID NO: 185885 - protein, 380 aa, unidentified
MSANLRYLGLDVHADTIAVAIAEPGGEVRSLGMIPNDPTAVAKLIRKLGARDQLRACYEAGPCGYVLYWQLTKLGVACDVVAPTLVPTKPGDRVKTDRRDAEKLARCHRAGDLTAVWVPDAAHEALRDLVRAREAAKADQLRARHRVSKFLLRHGMRAPGDVKPWTQRHRRWLDTVTFAPVAQQTTLADYIHEVDHAGARIERLETALDVAIAAAPPAMQAIMRALQCLRGVRQLTAATIVSEIGPLSRFSHPRQLMGYSGTVPSEYSSGSSVHRGAITKTGNAHVRRVMVEAAWQYQRRLTLGRTIKARRKDQPKEIVEIAEKCEKRLNARFHRLTSRNKKSTIAVVAVARELLGFVWAIGIQVEREQQGCTKGHRPAA

SEQ ID NO: 185886 - protein, 397 aa, unidentified
MIAVGIDISKAKSTVAVIDSDGTVLASPFTMAHTQPEMEAFVTYLKGLGEPTTILMEYTGHYHYPVLKKLQDEGFPVCIVNPYQMKKYGDVEIHKAKTDKKDALRIAAYALEKSYKLVPYSSMEQKYEDLKFLSRQYSQRITYVAKLKVQLIALLDQTMPGITRILPLNSRNPEKCALLLFIKRFKSFDEIQRIGKARFLASYDVLAKKASERSASSKGLSIYELAVDSITTRGEDPYIWLSQNQCVDLLSATQNAADEIISQMRNIAETIPEYKVLRAMHGVGDRLGPIILAEIGDVHRFHSGKALNSYAGNDAPPYQSGQFESRNRHISKRGSSTLRKACYEVMQALKLIKPQDDPVYLFMLKKDQEGKPFNVAKMAGVNKFLRIYYARAMELYK

SEQ ID NO: 185887 - protein, 388 aa, unidentified
MEQVIIGVDPHKLSATIEVVDQHEKLLGSGRFTTDRAGYAAMRKYAATWPTRLWAVEGSNGAGRPLAQRLLEDGEQVVDVPAKLAARVRLFDTGHNRKTDAHDAHAVAAVAVRTKTLRVLQLDGELEALRMLTDRREALTRRRVQTVDRLQALLAELLPGQAKRDITTGQAKAMLASVRPRDIAGKTRRRIAAEELAELVAVEAKIKKSTAELKAIVLARGSHLMDLHGVGPVVAARVLADVGDVTRFADRNRFASWTGTAPLDASSGEQNRHRLSRAGNRRMNHMIHIAAISQIRLDTDGRAYYRRKRAEGKKPLEAIRCLKRRISDAIYRQLLDDAQRDATRDPGAGPGGHCGATVQSSAVDLPPHVDTSDQPLPGPARKTLRPTG

SEQ ID NO: 185888 - protein, 320 aa, unidentified
MTSRGAEKMKNDTIGVDVSKDHLDAHRLADGAARRFANDKGGHKALIKWLAETPLNRVVFEPTGPYHRAVERALGASGVPFVKVNPRQARRFAEATGKLAKTDRLDAAILARMGALLELEARPARSEVLLELKELYVAREALVKDRTAAKNRGKALTLSLLKRQNAQRLEQIDRQIATVEATILQIVEADASLSDRFAILTSIPGVSNITPFALLIAMPELGALEAGQAANLAGLAPIARQSGRWTGRSFIRGGRADVRQALYMPALVAARFNPDMKAKYTHLIKTGKPAKVALTAIMRKLVVLANALLKANRPWTPRTA

SEQ ID NO: 185889 - protein, 397 aa, unidentified
MYIVGIDIAKRKHEAAVIDGEGTVIIKPFSFTNNCSGYNRLLAMLAKAKLPLDEVSFAMEATGHYWLALFTRLQKEGFRVQVINPVQTNSIRSFYIRQAKTDPRDALLIAEVIRFGHFSESTLHPENIYELRELCRGRHAIVSMQADVKRKVVALLDQVFPEYETAFTNMFGDTSMAILQACPTPKELSEMPLEELCHLIEVSSRKRFRMVKAQELQELARNSFGFAMAGDVFSTMIRLYAKHLVFLKQQVQEMDRKIAEIMDTLDTPITTITGIGPTLGAYILSEIGDISRFSSAAKLAAYAGIDPTMRQSGEYNGVRNRMSKRGSPYLRHAIWLAASSAVLHDPALKLYFQKKRDEGKPYMASVGHACRKMVSIIYAVMRDNKEYVPCIPNEISA

SEQ ID NO: 185890 - protein, 392 aa, unidentified
MSQHCHFDASRSLTALEQDSTIIAVIEMSQTKWLVAALIPGVERQPLKKFDAHEETLLKLLHRWRREAGQAGRNIKRIVVAYEAGRDGFWLARWLRARDVEAYVIHPTSIAVWREHRRAKTDRLDTELLMRVLLGWLRGETRHCSMVAIPTIEEEDARRPNRERRNLVTEQTRIINQIKAIFTRFGIRSLRPTMRKVAEKLEDLRTAEGTPLPQNTLAELRRHLARLRVVRDQIRAVEQERLRNLAVAPAAEKKSPHAMVRLIARVLGVGVETADMLVNEIFSRHWRDRRAVARYAGLTGSPEESGSRRRERGLARAGNVRVRSGMIQLAWRFVRFQKNSALAQWFAARTADGRASTRKTMIVALARKLLIALWRLVTRGELPQGVVLRPAS

SEQ ID NO: 185891 - protein, 416 aa, unidentified
MKYAQIRVLPETPPGGLSAGIDWGSADHAVCVVDPAGQVRARFAVAHDRAGIAKLIAGLRAAGVSEAAIERSDGVLVEALLEAGLTVVVVTSRQMRNLRSRYGSAGAKDDRFDAFVLADALRTDRARLRPLVVDTPATAALRAAVRARRDLVAHRIAACNQLRAHLAVAFPGAVGLFASLDSPISLAFLARFGSHDAAGQLTEDDLAAWLHTVPHRGKAARPGQLRARLQAAPRGATGPDGAALVPVTGALVATLATVSAQVQALEAEIAVQLAAHPDAHIFTCLPRAGTVRAARLLAEIGDCRARFPDPESLAGLAGVAPVTRRSGKHISIGFRWAVNRQLRDAVCDFAGDSRHASPWAAAIYDAARARGKDHPHGVRILARAWTYVIWRCWQSGSAYDPAKHAALQRVLEQRKS

SEQ ID NO: 185892 - protein, 345 aa, unidentified
MKIVGCDLHTRYQQVAMLDRETGELVERRLEHESGEARAFYAALPGPVRVGIEATGHTRWFERMLAELGHELWIGDAAQIRASVVRKQKTDARDAAHLLELLLSERFPRIWRPTMAERDLRQLVWHRQKLVWMRNAVGNQLHALAMGEGVCRKKKLFTKKGRAELDGLGLGVWGSYRRQELLTMLDRLDGSLHELDHAVAEQAEQNAAAVLLMTHPGVGPVTSLAFVLTLGPVERFERSKQVVSYLGLNPREHSSGGRQRLGSISKQGNPMMRSLLVEAGHTAARLDSELRQDYQRLKLRRGSGVAKVAIARKLAVRMYWMLRSPANYAQLVRMQGSPWATLVKE

SEQ ID NO: 185893 - protein, 342 aa, unidentified
MQVATIGLDIAKNVFQVHGIDAGEKVVVRKQLRRSQVLAFFKSLSPCFIGMEACATAHYWARELTKLGHEVRLMPAKDVKAYVKRNKNDAADAEAICEAVRRPTMRFVQAKSAEQQGQLMQHRTRDLLMRQRTQLINALRAHMAELGIVAAQGREGIKQLLTIVASERDARLPVDAHASLVVLAAGLQAVQTMIGSIERRIIVQHRSNQASKRLKTIPGIGIVGATAIAATVPDPGAFRSGRDFAAWIGLVPRQDSTGGKQKLGPISKQGDQYLRRILVVGAHAVLKRARQQPEKYLWLTRLLARKPFRVVAVALANKMARVAWALLAKGGNYRPPALAAPA

SEQ ID NO: 185894 - protein, 412 aa, unidentified
MEILYECCCGLDVHAKTVVACLITQDQKERRTFSTMTDDLLRLADWLVNAGCTHGAIESTGVYWKPVFNILEGRMDVILVNARHVKAVPGHKTDARDSAWLADLLRHGLLKASFIPPRHMRDLRALTRYHASVLRDQSAVANRIQQVIESGNMKLGQVASDALGVSGRAMLRALAAGETDATMMADVARKSLRRKKPALVRARDGRLTDTQRWVLGELLARYDELEAALARVEGHIRQALEESPDPCVAEAVPLLDTIPGVGEQVAQTIVAEIGVEMTRFPSAEHLASWAGLCPGNHESAGKRKSGKTTKGSPFLRAALVQAAWAASHRRGTYLAAQYHRLVKRMGKKKALVAVAHSLLAIVYHMLSRHTRYVDRGEDVFKRRSVQAQSQRLIRQLAALGVTVTVEERADAA

SEQ ID NO: 185895 - protein, 373 aa, unidentified
MSEFNKFVGLDVHKSTIAISIASDDGAEVRYFGEIKNTKEALSNFANKISQGSLKLSFCYEAGGCGYEVYRHLRNIGHDCMVVAPSLIPKKAGQRVKTDRRDSLNLARLHRARELTGVWVPDAMNEALRDLTRAREDMKHLQRQAKQRLLAFLLRHGWTYSGKSNWTKDHFNWLETVKFQHAAQQIVFQEYVDTVKYCGKRVESVTQQIEICSRESACWPVIESLMALKGIDLISAATIMAEIGDLTRFDSAPKLMSYLGLVPSEHSSGSSVRRGGITKTGNSHVRRVLVEAAWTYRFPARKTAHTQKRAKVTTEAVQEISWNAQKRLCQRYKELNANGKIKVQTCTAVARELAGFVWAIGQTVPLKQSANVQ

SEQ ID NO: 185896 - protein, 483 aa, unidentified
MKPKSEEKNKRATNHPTQHHWHEMNRKQRREMMRKIQSNDLSLEVIHPDAAGIDIGNESHYVSVPPNRDGQPVREFGCTTAELKAMAAWLKQCRIRTVAMQSTGVYWVAVYDILEQAGLEVYLVNARDTKNLPGRKSDVQESQWLMKLHTYGLLRNSFRPAQEIRVMRTYWRQRNDLIQSAGRHIQRMQKALTQMNIQLANVLSDISGVTGQAIIKAILAGERDPHKLAVLRNPRVKASDEDIVRSLEGNWQPDLLFVLKQEQDGYEFCQHQMAACDRQLEQYLQQREDRSHGAPLPEEKRKGRLKKKRANKPQFDLRQGLFRMTGTDLTRIDAIDVMTATAIISEAGWDMSKWKTEDHFVSWLRLCPDNRISGNKVIGKGRLPTNNPISIALKMAASTLRESKTYLGAQFRRLRTRLGAPIAIKAMAAKLARLVYRMLRYGMKYVDQGAALYELRHRELQIKRLKAKAEKLGYRVAPIPAAA

SEQ ID NO: 185897 - protein, 350 aa, unidentified
MAMTTMTDSPRRITGGVDTHRDVHVVAALDERGVELGVEFFATTPAGYRAALRWLEKFGELGRIGVEGTGSYGAGLARFLTAHDVQVVEVSCPNRQRRRSHGKSDPVDAIAAAKAVLSGDAVTEPKTRDGNVEAIRALRTADRSARHARVKALNQMRALVLTGPQELREQFRGTTVYRLVRGAAKLRPGDPCTAVGGTKYALRILAKRVLELEAELAELKAILRPLVAATAPELVARHGVGTFTAGALLVAAGDNPERLRDERAFAHFCGVSPIDASSGTVVRKRLNRGGDRHANEALWRIVMVRMVSDPATRHYVERRTKEGLSTLETMRCLKRYVARELYPFLAANAP

SEQ ID NO: 185898 - protein, 347 aa, unidentified
MNFYTQQHKHYCGIDLHAKAMYVCILDQSGTKLVHRNLPTTPEAFLRTVAPYREDLVVAVECIFTWYWLADLCAKEGIAFVLGHALYMKAIHGGKAKNDKIDAHKIAVLLRGGMLPQAYVYPAEMRATRDLLRRRCHLVRKRAELLAHIHNTNSQYNLPELGRRLTYKANREGVEEHFPDPSVRKTIEVDVSLIDHYDKLLGEVELYLTRSAKAHDVQTFARLQSVPGIGQTLALVILYEIQDITRFPRVQDFVSYCRLVKCAKESGGKRLGTSGTKIGNVHLRWAFAEAAVLFLRHNHPGKAYFIKLEHKHGKAKALTVLAHKLGRAVYYMLSRKQAFDLQRFVTA

SEQ ID NO: 185899 - protein, 334 aa, unidentified
MQNVTLIGIDLGKHSFHVHAQDKNGNALLRKKFSRNPLTAFLSTCAASTVVMESCAGAHFMARHISQFGHQVKLISPQFVRPFVKSNKNDFIDAEAICEAASRPSMRFVTPRTEDQQAMSALHRVRDAIVRDRVKTTNQMHAFLLEFGISMPRGIAVIRRLAAVLEEHELPPYLARLLMRLHQHYAYLTEQIEELEQELKTHMADDDTAQRLLTIPGVGLITASLLATKLGDGKSYASSRDFAASTGLVPRQYSTGGKSTLMGISKRGDKNLRRLLVQCARAFMQRLEHNQGRLADWVKAQLSRHHSNVVACGLANKLARIAWSVTTHRTAFIQ

SEQ ID NO: 185900 - protein, 427 aa, unidentified
MTKSQDLKFNAIENTDAIVGIDIAKNVHWAGIILPNGKEIKKSFSFHNNRKGFESLVETVKNVLTMLNLKKVIVGMEPTGHYWKSCARYLKKIDWIKVVTVNPFHVKNAKEFDDNCQTKNDKKDCMTIARLIKDARFFEPYLPEGIWADLRNLSNTRAELVRKQNAVKCRLVAIIDEYFPEYTKVFKNVLSRTSEEILKECPFSEDIKSIGKEELLKHIKKTVKRGYSKKQVETIYELANESIGTTEGIEGAKFQLNMYIEEAKLLEKQIKMTEQELERQLKETGFYESLISIQGIGIVSAAMFVGEVGDINRFDSYEQIRRYAGLNLVENSSGNHKGKTTISKRGRSLLRSILYRMAFTMVNKNNELKELYKYLTTRKENQLKKKQAIVAVIGKILQIIYALVTKNEEYEATRVFTVKRLEQLKVA

SEQ ID NO: 185901 - protein, 370 aa, unidentified
MKKNSTCSQSWKGRGSWRQGSVTIGMDLGDKNSRYCVLNENGEIVKEGRLATSKKGLAQEFGALRRCRIALEVGTHSPWVSRYLSQLGHEAIVANARQVQRISQSSRKDDRLDAEMLARLARVDAQLLRPIRHRSESAQMHLMRIRVRAAMVETRTSLINTARGLSKSAGERLPQCDAAHMGVERMALLPAELQRVLGPLLEEVKALSQRISACEAELKQIAQTEYPETRLLEQVSGVGTLIALTFVLTLEDPARFAKSRDVGCYVGLRPKRSESGESQRQLRITKEGDVYLRKLLVQGAHYILSERGPDTNLKRWGQKLASSGGKTGKKRAVVAVARKLAILLHRLWVSGEVYEPLHKAPDRRPWRAAG

SEQ ID NO: 185902 - protein, 363 aa, unidentified
MHSINNSELSSLEETRCQFNGGTGAIKLGIDVHQDFYVVVEQAGGSNPKPPQRFAKAAFLHWAAKLKSQATEVYAVYEACGFGFSLQRKLSALSIKCYVVCPQKLDEQNRRVKTDGLDAKALCLRLDRFVQGNRDALAIVRVPTEAEEQLRAIHRQREQLVKARKQLEAQGRSLLVNHGLEPVQSWWKPRTFATLAAPGWMKELLCNWQPILLALQEKIAALTVRLQSAAAPDQPRGLGLMTSVIIDREIGDWRRFNNRRQIASYTGLCPGEYSSGNTRLQSCVTKHGNPRLRAALVELSWRLVRFQPNYKPVLKWRQILATGAVATGAARKKAIVAVARQLAVDLWRIRTGRVSAATLGLIN

SEQ ID NO: 185903 - protein, 336 aa, unidentified
MRSIGVDLHKRTLTCCFLSDGEKVFKEYGVSDLNLLRRDLRKTDRLAVEATGNVRWFVEEIRGCVEEVVVVNPRQFKVISQSVRKTDETDAELLAFFLSKGMLPEIRMRDELSREIKSLCVTRDKLVKLRTALKNKIHNILNAHGIQSGREDFSSEKGLRKVLGYPIGSIGRVELEVIVEQIRHLNEGIKRLDREIEEKGRGLKGFANITSIKGIGPKGGAILLSVIGDIGDFESSKKLESYFGIVPRVKNSGESVCQGRITKQGSKLGRTTLVQCTLIAIKYSPYLRKFYLRLKEKKGSGKAIIATSRKLLGIIYQTLKNDWVFEDFGNFVLKTN

SEQ ID NO: 185904 - protein, 412 aa, unidentified
MDVYCGIDWAEDHHDIALADRDGKLLARRRIGDDAAGLAQLLELLAGHGDSAGDLIPVAIETPRGLLVACLRATGRKIYPINPMAVARYRDRHSVAGKKSDHGDSVVLANVLRTDIGMHRPLPDDSELAQAIAVLARAQQDAVWDRTTAHNKLRSHLREYFPGFLVAFADARGGITRPEARAVLAAAPTPAAAAALTLTQLRALLKKAGRSRGIDIEATRLRDAFRIPQMRQPRLVEDAMGRQAIALLRQLDAACVAADDLEHAVTESFNLHPDAGIITSFPGLGPLTGARVLAEIGDDRTRFSDAKGLKAYAGAAPITRASGKITSVTFRRVKNNRLCAAGYSWAFSALTASPGARAHYDRRKDAGDRHAAAQRNLFGRLLGCLWHCLITGQHYDETIAFPVIGKKVRQAA

SEQ ID NO: 185905 - protein, 337 aa, unidentified
MNVTTIGIDLAKTSFSLVGMDKHGKIQFRKSLTRNKLAEFIAQHPECVIGMEACSGAHYWSRKFRELGHEVRIIAAKFIQPYRIGGKNDNNDAQAICEATMRPNIWYVPIKTAEQQATLCVHRIREGLIKDRTGMINQLRGLLSEFGIVMAKGRYPFQKEIPFILEDAENGLPDLARKMIDYLWQRIKQANEEILSYDRELSRLARRDKVAQRLMTIPGVGGQTATGVVASVPDAKQFKDSRQFAAWLGLTPRQFTTGGVVRLGRVTKAGDKYLRTCLVHGARSVIAMLKDKQDRVSCWIRELVERRGYNRAIVALAARNARMIWTLMIKQEDYRVM

SEQ ID NO: 185906 - protein, 317 aa, unidentified
MDKIIIGIDISKQKFDAAYQGPDRRWRQRVFENNAKGFNGLLGCVPQDFTGKLHVVMEATGRYGEDLAYFFHGKGFDVSIINPAQIKHYGRSLLRRTKTDKADARLIAEFAKHQHLSIWQPLAPSLQALKEQVRCLNSFKKDATQISNRLEAAKDPKVRSLCQERLEYIKAQIKALEAAIKKITKQDQGVKERFQRLMSIPGIGETTALILLAELPDLDTFKCAKQLAAYAGLNPSIRTSGSSVRGKERLSKMGHALLRKALFLPALSIMGRQTPLRPFIDRLRAKGKKGKVIVGAVMHKLLHIIFGVMKRQVAFQG

SEQ ID NO: 185907 - protein, 416 aa, unidentified
MSLALPDALFFTGIDWAAETHAICVMEAGGKIAAQFTIEHSADGITALLRRLARYGDPGALPVAIERPDGRLVDLLLEAGHPVVPVKPNAIKTWREGEVLSGAKSDAGDAAVIAEYLRLRAHKLRVVAPYGDQTRALRTIVRSRGDLVELRVAATNQLSALLDAHWPGARAIFADVESPISLKFLTCYPTPAAAAHLGEKRMAAFCLKHGYSGRRSPAELLARLRSAPAGTTGEALTDALRDTVLAAAGVLSALNAAVKNLDRSIAAHLGEHPDGAIFTSLPRSGQVNAAQVLAEWGDARPAYEHPDSAAALAGVTPVTTQSGKHRGVGFRWACNKRFRVAITTFADNSRHASPWAAKIYNDARAAGKDHPHAIRILARAWIRIIYRCWLDGVPYDPARHGAAAALAQQTAEQIAA

SEQ ID NO: 185908 - protein, 415 aa, unidentified
MPEYAALVAVDWADQQHAVCLSDPSTGEREQTIVKHTPAALQEWALGLRQRFAGAPIAVCLEQSRGPLIYALLQYDFFVLYPINPATLAKYRQAFSTARGKDDPTDADYLLDLLEHHRNRLRPWHPDDQKTRTLRLLVEQRRRLTGDRTRISNRLTALLKGYFPQVLDWFEDIRTRLVCDFLDRWPQLSLLQQARPATVDKFLRSHHSTSKATNQRRLSEIKTALPLTRDEAVMTSSIINVKVLVAQMKTVIAAISEYDRHLEALCLTHDDYHLFAALPGAGPVHAARLTAALGSDRSRWQTADELVRFSGIAPIIERSGKQFRIRWRYFCPKFFRQTFHEFAAQSIQDSFWARAYYFSQRAKGKDHHAAVRALAFKWIRIIWKCWQTRTPYSEVIYLESLRKQGSSLLKFAADY

SEQ ID NO: 185909 - protein, 339 aa, unidentified
MQVSTLGIDLAKNVFVLHGVDHTGQIVLKKKLSRAKFAEFVIRLDPCLIGMEACSSSHHFARMFIRHGHQVRLMPPQYVKPYVKTNKTDATDAEAICEAVTRPNMRFVQVKTVDQQAVLALHTERDIIIRERVACTNSLRAMLAEFGFVMATDRKALKQGVPEILEDGENELSPFVRASASRQMAHIDALDEHLVLIEQQLQSWAETQAACKRMTKVPGVGLLTATYLVASVGDGKQFSCAKQFSAWMGLTPREHSSGGKQHLGRISKRGDGYFRYLLVHGARAVASVIERHRENMRWLDGLLKRKNYNVAVVAQASKTARILWSMLVHETEYRPPAVA

SEQ ID NO: 185910 - protein, 355 aa, unidentified
MSREKYIGMDVHQATISVAVMDASGKLIMECLLETKAATIVEFIQGLHGTLSLTFEEGTSAAWLHDLLKPHVNRLVVCDPRKAALLKDGNKSDRIDARKLAEMLRTNQLKPVYHGEHGIRTLKELGRSYLTITKDVTRSMNRIKALYRSWAIPCAGTSVYAPRHRAEWLAKIEQPGVRVRAERLYQQLDSLQPVRLQARCELLRESHQHAAVQLLRQIPSIGPIRSALLVALLQTPHRFRTKRQLWAYSGFAVETHDSGEYRSVRGKLQRNRERITLRGLNDNHNKDLKNLFKSAAISASTRPGPLQDFYVALVAKGIRPTMARLTLARKIAAITLTMWKKGVSFDPKQLNRQAA

SEQ ID NO: 185911 - protein, 342 aa, unidentified
MFYAALDVSLRSVAVCIIDDNGKVRLERSVPSDVPDLVRCLKEFGEPVHQVGLEAGTLTQHLTYGLREAGFDVVCMEARQVAAALSAMRNKTDKHDARGIAQILRSGWYSRVHVKSVESHHLRALLTSRKVMQRKCIDLENEIRGLLKIFGVKLPMRLSRGAFDVAVRDSIESDPALSHALLPMLQARQMLFETFMELDRRVRKAAHEDEVCVRFMGIPGVGEITALSFKAAVDDPARFKSSRTVGAHFGLTPRRFQSGEKDNPGRISHAGDSDVRATLYAAANAMLMRSIKWSSLKAWGMRLMKTKGRRRAIVAVARKIAVVLHRMWVDGTEFRLGSEAAA

SEQ ID NO: 185912 - protein, 343 aa, unidentified
MDQHIGLDVSLKDTSVSVRQDGKRIWRGKCASDPKLLAEVIRKRAPNAKRVVFETGPLSVWFFHALTAEGLPAICIDARHAKAALDMAANKTDANDADGLAHLAEVGFYREVRVKGFDSMLMRTLIAARRQLMKMRVQMSNQIRGLMKTFGLVVPKGAGSVFDRNVISLLEGEDNLARIILPLLKAWGDIRLRVAELTKQLVAMAGADQRCRLLTSVPGVGTVTATAFAAAVEDSINFKNSRAVGAWVGLTPKRYQSGEVDYEGHISRRGDAKLRTLLYEAASVILNRSTETNALRTWALALKERLGLKRAAVALARKLAVIMHAMLKTGELFDPNAGAAAPT

SEQ ID NO: 185913 - protein, 345 aa, unidentified
MKNKKEQKKKQQSFIGIDASKLTMDYPFINYEGFEEHHLFENNKKGFKKMETWLNSTKVFNYSDALFCIEHTGVYTRELVEYLLLRGANVWMESALHLKRSMGMTRGKNDKVDSYRIARYAMTNGDKAKLVQPGNKTLQLIKDLMSSRKRIKKSIQSLKVSIKELKRVDKVSGRELELINKPALTGLMKSKQAIEKRMQELINSDEELKRIFQLVTSVKCVGPVLAIELMVYTHSFTRMTGIKQLACYCGVAPFSHTSGTSVKGKTGTSNFANMGLKSTLHLAAISSTQYVPDIKQYYNRKVGEGKKKMSVINAIRNKLLSRVLTVVKRGTPYVENYLENNLVRS

SEQ ID NO: 185914 - protein, 402 aa, unidentified
MIYAGIDIAKNKHVIGATDERGKDAAKSMPFANSTEGFDRCIAYLDGLADSKAGLMVGMEATGHYWLPLFCRLQDEGYPVVVVNPVRTDAMRRFKGSSRVKTDMIDCVLVAETLRCGEFEPSKLGDEAVIELRQLTRLHQELKESVADLKRQVIVALDRVFPEYDSIFSNTFGESSKAFLKRCPTPEECLGIRADSLARTLERASRGKLGRAKADEIKEIAKASCGISVAASAFSFQIKLLIDQIDFIEGQIDEAEARVRDGIEAVEPLILTIPGIGHALGAQIVSEIGDIRRFHSAPAVVKYAGINPSVSQSGKFSSEDNRITKQGSPCLRRALYLAAMAQLKLKTPFYDYYAKKRADGKSHREALVAVSRKLVHVVYAVLSRQKPYDPDIARNPNESRSE

SEQ ID NO: 185915 - protein, 387 aa, unidentified
MLYKETRTFKTMTADLLALSDWLISKGVTHVAMESTGEYWKPIFNILENNFEVLLVNAHHIKQVPGRKTDVKDSEWIAELLRHGLLKASFIPPLGQRELRELTRHRTNFVHERATLINRIQKTLESGNIKLASVATNVMGVSGRAMLAAIVEGKANPSEMAELAKGRLREKREQLEKALEGHVKAHHRFVLTELLCQIDSLDESIARFDLEIEKYCRPFEETVKLLDTIPGVAQRTAEVIVSEIGTDMSRFPTADHLAAWAGVAPGNNESAGKRYSGTTRHGNKALNTILVQAAHAASHTRNTYLSAQYHRLAGRRGKKRAIVAVAHSILVIAYNMIQRHEPYHELGGDYFDKRRPEASAKRLMKRLEQLGYDMSNVQPLTALPTAS

SEQ ID NO: 185916 - protein, 463 aa, unidentified
MSKNKRPSQATSAGVEAVQSLPVVEAQAAGIDIGSRHMQVCAPVGEGQREVRIFPTTTDQILACANWLGENQVKTVAMESTGVYWIPVLEILESCGLATLLVDTRALSRVPGCKTDVSDGRWLQTLPSHGLLQGSYRPGEEISQLRSLVRGQATLVAEPADWIRRLQKSLDQMNVRVHQAVSDLSGTTGMAIVRAIVAGERDPQKLAGLRDPRCQKSQEEIVRLLTGHWRADHLFNLANSLKMYDAHQDRIAEYEEEIQRRMKQLTPSGRQDQSAPPLPNRERMKAIKRRHQDERRQILFRRVGADLTTIDGIGVETAEAVVSEYGLDLHQFAHEKKFVAHLQLAPHSPKSGGKPLKKKRRTKRTSRAGQALPTAAVTLGRSATALGAYYRHIARKKGPDVAVFATARKLGTLAYRLLRWGQEYVDIGQKAYEELYQKARLRALAKTASQLGYQLSKTEAITA

SEQ ID NO: 185917 - protein, 414 aa, unidentified
MKLFVGIDVSSKELETCFMNANGDKVETLNVKNNLDGASYLRDRIVALADQLACSEIHIGLESTSVYSWHPAMYLHQDDSLRKRNTKVFTINPKLVSKFREAYPDLDKTDRLDAWFIADRLRFGRLTTTIIMQEQYVALQRLTRMRFHLIHNLTREKQFFLQNLFYKCNAFTTEVESSVFGHALMEMLSEKYSLDDIATMDIAELADYLRDKGRNRFPDPENVARCIQKAARASYRLSKVVEDSIDIVLGTSIQAIRSIQSQLKELDKAIERILEGIPGSQCLRSIPGIDKVYAAGILAEIGDIDRFSDQAAVAKYAGLTWRRHQSGLFEAEDTKRIKSGNRFLRYYLVEAANSVKNRDEEFGEYYRKKYYEVPKHQHKRALVLTARKLVRLVDVLLRNGQLYTPRRKVKATKE

SEQ ID NO: 185918 - protein, 345 aa, unidentified
MPIVGGLDIHRKQLTFDYLDTGTGEVKRGQIAPADRAHLRSWLARFAGRDDVAFALEGCTGWRYVAEELAGAGVAAHVAEPADTAFARGRKRHAKTDRTDSRHLRELLAEGRLPECWIPPPVILECRALLETYHALRAEHTAWVQRIHAVFFHQGVPALGEAALRTDDDLEALRAAAAAHLSPAGQLQVATALDMLAALQARLDVLRRRLLAAARGLTGARVLAERLYGVGPVTGLAMTCWLGGAGRFSSSRKAVRFAGLDVTVWSSDRKGPPGRLSRQGPAVLRWAVYEAGKTHARASAPDHDYYAAVKDRKGGKRAALSEARKILRQACHILAELGDDALTAA

SEQ ID NO: 185919 - protein, 354 aa, unidentified
MAEKHNSMIAVIGIDIGKNSFHVVGHDERGAIVLRQKWSRGQLEARFANMPPCLVGTEACVGAHHLSRKLKARGHDTRLMPAKYVRPYSKGQKNDFRDAEAIAEAVQRPTMKFVATKTADQLDLQALHRVRERLVSQRTGIINQIRAFLLERGIAVRQGQRFLRAELPRILGTPPEVLSPRMVRMIEGLTGDWRRLDERIDGLSGEIEAIARRDAGCERLMSVPGIGPIISSAMVAAIGTGDAFSKGRDFAAWLGLVPKQMSTGDRTILGKISKRGNRYLRVLFMQAAWVVLIKPKIWERHGLKPWIEAAKKRLHPNVLAIALANKLSRIAWSVLAHGRGFETSPITNATAQTT

SEQ ID NO: 185920 - protein, 402 aa, unidentified
MNCVGIDVSKGKSMIAVMRPFGEVVVSPFEVRHTASELSELARLLKNLDGETRVVMESTGNYHAPVAWLLHGAGLYVSVVNAMLVHDYGNNSLRRGKTDKKDAVKLANYGLDHWLTLPRYVPEEDTRLMLKTCYRQYQQYSKVQTMLKNNLISLLDTAFPDVNRLFTSPPRADGSEKWVDFVATFWHCECVCGLSEKAFTAKYQRWCRKHRYNFSEEKALDIYASACGHFGVIPKTDTAKLLVEQAIFQLRATSAALAALKQEMQSLAASLPEYPVVMEMFGVGPALGPQLMAEIGDVRRFHSKKALVAFAGIDAPPYQSGQIDVRSRSISKRGSASLRRTLFLVMGVLLQCAPMDEPVYQFMNKKRSEGKPYRVYMMASANKFLRIYYASVKAYLDSLEHD

SEQ ID NO: 185921 - protein, 321 aa, unidentified
MSRILVGVDVCKDFLDAHARPTGVQKRFDNTPAGIEQLVAWVRPLAPERVIFESTGPYQKAAVGALLAADLPAVVVNARQVRDFAKGTGQLVKTDAIDASILAHFGEVVATVVRPLPPQEILEFRELCDRRGQLVRMLASEKNHRHAAQGASPKVIKNIEKHVAFLQRQIDDLEERMDRIVADSETFKAKDAILQSIVGIGPQVSRTLLVHLPELGTGTRRSIAALVGLAPFADDSGTSSRLRHIRGGRAKIRIALYQAAVAAIRYCTTMKRFYASLKARGKATKVALIAVARKLLVLANALLRTGIPYQHPTNSVCPKNA

SEQ ID NO: 185922 - protein, 457 aa, unidentified
MRIVYQRCCGMDVHKDSVTACVLLIDEYGEWRSEKRKFRTMTRDLREMATWLASLRVEAIAMEATGVYWKPVWNILEAENKFHLLLVNAHHVKQVPGRKTDQKDSEWIADLLQHGLLKASFVPPQTIRRLRDLTRMRVKIRQMLATFANRIQKVLEDANIKLGSVASDVLGVSGRHMLHALVEGQQDPEQLAALAQGRLREKRAELQLALEGHITDHHRFQLKFLLEFVQFGEKQLSQLEAEIRCLLAQVEPASVPPKDTVIAELAAPGAGAEASATAQKSPLQTVVELWDTIPGVDELTATTLVAEMGANMDQFPSSGHAAKWAGICPGNKESAGKRLSGKTPKGSVWLRRALCQAAWAASRTKNTYLAAQYHHLIVRKGKKRTIVAVAHTMLVMAYYMAKRQCPYQELGGDYFDRRNADTMQHRLVKKLKNLGYEVTLKPITAPPTAQEPTAQCC

SEQ ID NO: 185923 - protein, 384 aa, unidentified
MLKPDKRQVHKPRLFANTAAGFHRWQDQLASLDVPAAQVLIGMEATSRYGDALFHFVQEQGYQLCLVHPGQTHQFAQRRGLRAKTDQLDAITIGHVLLSGEARVGSVPDELISSYRELVRLHTQLTDDSARYKHEIHALLQVLFPEFTQVFADPCRPTALAVLQRYPSAACLSTVSVEELTTLLRGLAPRHYGRKTAQSLIALARASVSPGVAQRARSKSMQILADQLVHTRENLAQVEAELAQVPEKDSGWQRLSGVPEFGDKTVAVLRAELGDVARFQRIDQAVASAGLDLQIRTSGKWQGQAKLSKRGSGLLRRMVYLAAARSTHMRDSAFGAYYHRLVARGLRKSSALIAVMRKMLIVAVQLLKTEQEYDPSKVARACGG

SEQ ID NO: 185924 - protein, 424 aa, unidentified
MNLTQNDRLKQVTSDTLIVGVDVGSQTHFCRAFDWRGFELSRRVFKFSNTGMGFLTFLRWTEELMNKTEMKKVIVGCEPTGCYWLTFQKFLQDHDVQLVTVNPFTVNRSMELDDNSPEKSDLKDPKTIALLVKDGRFSTSYLPSGVYAEIREASVCRDQIMKQHVRLSNQIQGWLQKFFPEYFECYADWDSTSGLMLLREAPLPQDILKIGAGGINQIWRDAKVRAAGIKRAQTLVEAAQNSVGLEAGEAARLEIWVLVNDYILKAEQLKRLDEYLEEKVKEVPNVEKLLAIKGVGMSTVIGFIAEVGDIGRFTDPKQIQKLAGLEIVKKSSGKKKGQPRISKRGRRKLRRTMYESVRALMTWSPAFQDVFLYYRNRTKNPLGGMQAKIAVACKAIRIFYVVLKTGCDFDEEKFRKDIIRPEAA

SEQ ID NO: 185925 - protein, 346 aa, unidentified
MDRQQHYVGLDVSLETTAVCVINDKGTVVWRGKCASTPESIAAAVRTYAPAAVRVGLETGQLSNWLTLNLRRRGVPIVCLDARHAKATLSLQINKTDANDAFGLAQIVRTGWFREVAVKSMDAHTLKILLVARAQLVSQRQMVANTVRGLLKTFGLVIARGAQRLFPIRVREQLVGNDVLAAIVEPMLVVWHALREQIDTLHRQILVRARADAAARLLMTIPGVGVVVALTYTAVIDDPARFRRSSSVGAYVGLTPRRYQSGEVDHGGHISKCGDGLLRAYLFEAATVLLERSSRASTLKTWGLALAKRIGMRRAKVAVARKLAVIMHRLWSDRSQYRWGDAPVAA

SEQ ID NO: 185926 - protein, 459 aa, unidentified
MSQRRKKPKRAGQGGAVPSLSCIEPNAAGIDIGATEIFVAVPQGRDPSPVRSFETFTEDLHRLKSWLQQCGITTVAMESTGVYWIPLFQILEKAGMEVCLVNAQHVKHVPGRKSDVIDCQWLQYLHSVGLLRASFRPEERICAIRSLLRHRDSLVQMAAAHVQHMQKALTQMNLQLHHVLSDITGQSGLAILDAILAGERNPAVLAQLRHARVQASEEIITKSLVGDYQREHLFTLRQSLQAYRYYQSLITACDQEIAEQLQNLDSRTPPDASPLPPERYPHRPRKNEFRFDMRSELYRIYGTDLTAIPSINALTGYTVLAEVGTDWSKFRNGDAFASWTCLCPQNKKSGGKILSAHTRRSANRVNRALRLAAQTLERSTSYLGAYYRKMRARHGTPAAITAAAHKLARIIFHLVTTGEAYDESLFAAEEQRQRKRMENKLKRSAQQLGYQLIPLGQTA

SEQ ID NO: 185927 - protein, 412 aa, unidentified
MGVDSDRLSGKVRLRQPTLEAIMQAAIDHPKQPTAIRTDLGAIFVSMELSRSTWLITSLSPGGGEKMSQHSVPAGEIAALLTRFSELKQKAFARTGKLFPIIVIQEAGLDGFWIHRVLQNEGIESHVVDPASIATSRRRRRAKTDRIDGEALVRALLAYKRGEPRVCAMVKAPTPEDEDSRRLCRERKTLTVERVQHVNRIKGLLFSQGVSGYEPLRRDRRQRLDRLETGDGRPLQPHLKAQISRELDRLELLIEQIKAVEIERDALFAPATKTEAGLEPQAMLRSLNGIGAEIAAVLWSEGLYRSFANRKQVGAYAGLAPTPWQSGSVAHEQGVSKAGNPRLRTTMIQLSWLWLRHQPQSALALWFKERVSSNGGRFKKTAIVALARKLLVALWKYVTAGVLIEGAVMKTA

SEQ ID NO: 185928 - protein, 349 aa, unidentified
MHSTTVAVDLAKNVFELAVADAEGKIGERLRLNRARFSSFFVHRAPCRVLMEACGSAHYWARRIGEHGHAVQLLPAQYVRQYVRRNKTDRADAAALIEAARCTAIRTVPAKSLQQQQVLVLHRLRSQWMSTRQRYLNTLRGVLREFGIAVPLGARVARARIAHYLAQPPQELPAATRPLLSQMLSEVKELEHRIEQIERDLTALTRADPVVQQLRQIPGIGLLSSTAIRASVGDVERFACGRSFASWLGLTPREYSSGERRRLGGISKRGDVYLRTLLVHGARSALLAAHRQQRAGHPLDHLRLWALQCERQRGHNVATVALANRLARIVWATWKHGRAFDGNWGCTAQ

SEQ ID NO: 185929 - protein, 366 aa, unidentified
MKKQTSEVISGEGLVKYVRRVLNLGLDVHYWQVTVAMQEDGGRIKSAGKMGHPEFLTWVLKKLEEGWEIYSCYEAGASGYWLHRKLVELGVKNLVVVPKAMGRGGKKQKTDKRDAGELCDSLDRYLRGQKKALSVVAVPTEEQEEKRALIRYHRQIMKDRGRCEARGKGLLCAQGIEVRGRWWQGDTWLALTSDPRLKDWMKEQLVGWRSKILSTDEEQRALRQRIAALAPALLPKGVGAYSAAVLHYELRGFDHFKNRRQVGSITGLCPGVHLSDGRGKEGSINRCGIGIVRWTLVEMVWRLMIWQPQYPPVRRLASGFVKSKRAKKRLVTQAARRLAIDLWRLSTGQTTPEKLGLVMQYHPPAN

SEQ ID NO: 185930 - protein, 534 aa, unidentified
MRTRKKVRGKKGRLSLKKARNSLQARLDRVGAEHFGILAVDSSKARFQVLLGNFCGTVLMEPLEVDNSGPALDRLVETVRLEMERHGLKDLVAGIERTGRFHHPIRTVLRRHWTVKMVHPFATKQLREPADPGNKTDATDLVAILRAILMGYGTDEQELSESGAAWRLVSREREALVRHRARVRVRIQDRVEALLPGYAALFTDLWKMPAALVLAQDYGSAAALREAGPDALLGHLRQAGLSMRRDTLGRILAWAATAAPADPSAPVLQRLLADERRLHAALESQIRAYERDLARFLADAPFVLLLSIPGIHVVSAASYGAELGPIEHYPDAHKITGRAGLYPSRYQSDETDRADGPLVRHRNARLRDALMEIAHNLVRCNPYFKAWASLRRSAGWAEKKLRVAVASTFARISYSMLAGRQLFDHPAVRGRDAILPKLTAFILDHGVPPDAARDLLRRAAQQIPPEARPAEADALRPELTRRRQRHSIWTRGTGPQLLGEILPELLTWLGLPVAPEPERNPSPPTQEKSKRTPH

SEQ ID NO: 185931 - protein, 325 aa, unidentified
MQNQTIVGIDVSSATLDICIMDSKGYHSFIISNDVQSISTFFSKYNQSLIVGMENTGRYNWALYQVLKDMAHRVFVISPLHLKKSMGLIRGKNDKIDAVRIAAFTKKNHTELLEWKPSADTVQKISVLLAERNSRIKSKKQLLNQRYDYDRMKHLGIDKELEMLNKQQLELLESQIAIIEERIEAVISSDQQMKNQAELIRSIPGVGKVLCWMMLAKTENFKAITEPRKMACYSGVAPFNSQSGTSILGKHRVSHYADKAIKAVLHLAAMSAIRLKNDLREYYLRKVAQGKNKMSVLNAVRNKIIHRIFAVIKNQSPYQNHLLLS

SEQ ID NO: 185932 - protein, 467 aa, unidentified
MVCFNPSTKLTRVRPAELIVARWKQLSTRRKFVSYFAPLVDLSEDEERLLREVGTGMQVVHERCCGLDVHKKTVVACILITLANGEVQRHIRTFSTMTAGLLALSDWLESLTVTVIAMESTGIYWRPVFNLLEDGRTVILVNAQHMKAIPGRKTDIKDSEWLADLLRHGLLKASFIPPAPIRELRDLTRYRKSLVQERAREVNRVHKVLETANVKLSSVATDVLGKSGRDMLSALIEGTTDVEILAELARGKLRKQLPQLQQALDGRVQAHHRLLLKHLLAHIIFLEETLEQLQQEIEQHLCPFEETMTLLMSIPGIAALAAAAILAEIGDDMTRFPSAKHLASWAGVCPGNKQSGGKRLSGKTTQGNATLRAMLAEVVWVLSHMKDNYLSAQYHRLARRLGKKKAVVAVSHSLLVIIYHVLSTKQPYSDLGADYFEQRDSTRLTQRSVRQLEALGYTVTLVPKEVA

SEQ ID NO: 185933 - protein, 360 aa, unidentified
MFCERTSVGLDVHARSVVAAAIDGRSGEVFRARLTPSHAEVIEWVGKLPGPCAVVYEAGPTGFGLARALSAVGLRCQVAASSKLLRPAGDRVKTDARDALNLARLLRLDEVVPVRIPSAAEEAARDLVRIREAARADLMRARHRLSKLLLRHGIVYYDGKAWTERHDRWLHHQRFDAAPTQSAFEDVYEAVVLATARRARLDEKITALAADSEFSPLTRRLACLRGISTLTGFALAVEIGDWDRFTGASIGAYLGLVPSEYSSGTSRTQGAITKTGNTHVRRLLVEAAWHHRSTYRPGPVLRHRWDQAPAAARARAHAGNQRLHARWVGLNLRRKPAVIANVAVARELAGWCWSLAVLPD

SEQ ID NO: 185934 - protein, 392 aa, unidentified
MFYYIGIDVGKFSHSICVLTDSGQKTIFQIKNDKLGFEELRKKLSSLPDSENVLVGMEATGHYFLNVYEFLLEFGLKTEQIALLNPLQVKAFRNTNLRGAKSDNVDAERIAVLLRFGDFQRCNVSVDKLMNLRELTRLRSDLVSNIADLKRKIIAVLDRIFPEFNEVFCNKFGATAVALLTDYPTPEEMAELSLKKLTSIIKGLSKRGISSEKIFKLHQGAQNSIGISFGKEAFKIELDILLERLKVFQKQIDVLEGKVSELAETFHSPIFTIPGVGKSTGATIISEIGNISNFKSSKKLIAFAGLDPKLKESGKYQGKTPISKRGSKYLRNALWSSAMVACRCQEKFKEDYQMRRNKGKSHRYAVTAAANKLTKIIYHILKNNEPFKSELV

SEQ ID NO: 185935 - protein, 417 aa, unidentified
MEDRSEARGLRYIALDIHKQYCVVAGVDREGRLLLQPVRVEHADLEEWLKKHLYSTDHVVIESTTNAWHVYDLLAPLAKRVVVANPIQVKQIACARVKTDIRDTLILARLLAANLVPAVWVPPVHVRQLRQLLSQRRQLVETHTQIVNRMHSVAHRHHLKHERGKRFNEKNTAWQKDKVLSSVEQFQLELEMENRAYLEKQIGRIGKEVAKMSHQKPWAQSMTYLMQLPGFGVITGMTVLAAIGEIQRFESAKHLASYSGLTPGLEQSGSKLVQKGITKEGRKELRWALVEAAQRAAKSDPVWKHRFEEMHKRMHRNRAIVAVARRLLELVWYVLTRRQPYRHFSHERIAYKYLTWAWQMDDEARDGLTRQQFTRYYLMQLGIGQDLTRIVLDPKHPRKIASEAELLALRPELKHTE

SEQ ID NO: 185936 - protein, 396 aa, unidentified
MSSTATPGPNRVVIGMDPHKRSATIEVMAPDEGIEGGGRFGTDRDGYAAMLTYARRWPDRVWAIEGCAGIGKHIANRLLTDGEEVVDVPPKLSARARVFATGQGRKTDATDAHSVALVGTRMTGLRPVVNDEQLAVLRILVDRRRSLGEEHTRLVSQLHQLLLELIPGGAKRDLSARQAKALLAKVRPRDAAGKVRRRVAAELIADLERIYARKKAANKELTELVAATGTGLLDLPGIGPAGAARLLVEVGDITRFPNKAHFASWNGTAPIDASSGDQVRHRLSRTGNRQINRVLHIMARVQMRNPSKGRDYYDRKRADGKGPMEAMRCVKRRLSDIVYQQMLNDAITHAVTGPGGQQGNDSDSSATGSHPHTGSSDKPLPGPANNKPKTPLRKAG

SEQ ID NO: 185937 - protein, 404 aa, unidentified
MWYVGLDWADTHHDVEVLDEAGKRVGVRRFAHSHDGLHELQAFLLGIAASPEDLACIVETNHGLLITFLLEAGIPVYPVNPKTANQLRKAAGAKTDQLDAHLLAKLGRLDLADLHRLEPASALVQELKTLTRDQDALIQTQTRLVNQLTACLKEYYPAALHLFAKGKPRSTLVFLQTYPTPQAAQAASLAEITATLRLGKHTNPTKAAPKLVEELHRPQLVANPVIVRAKSRLLLSLVKQLLVVIEEIASYDKAIRPLFLRHDDQGLWRSLPGAGKRLAPRRLPEWGDDRTRYADASSVQSLAGTAPVPFQSGNYAKAHKRFACVKPLRNALYQFAWQSTRQEGWARDYYRRKRAEGKTHSMAVRALANVWVRIIYAMWVTKTSYQTATFEAAKRAHAPRPHAA

SEQ ID NO: 185938 - protein, 408 aa, unidentified
MNAVGIDVSKGKSMVVALRPMGEVALLPQEFLHTGVGLEQMACAILALGEDTRVVMEATGRYHEPVAAALHEYGIYVCVLNPLYIKQSGGGSIRKVKTDKADAMKIAKYGLDNWVDLREYTPMDTVRQQLKLCSRQYNLYMKTVVSLQNNLISLTDKTFPGVNELFSSPERADGHQKWVDFVMTFWHCDCICRVSEKAFIERYQKWCKRKGYHFSEEKALDIYAGSCGHFTTLPKNDNTKLLITTAAQQLLAGKTTLATLRAEMTRLASQLPEYETVRAIYGVGETTAVQLMAEIGDVRRFPRRSSIVGFAGVDPAVDQSGKHETQSTSTTKRGSPHLRKTLYQVICTYLRKAPADEPVYQFLDKKRAEGKPYFVYMTAAQNKFLRIYYARVKECLEAFDAQQDTSQR

SEQ ID NO: 185939 - protein, 344 aa, unidentified
MEYFAGLDVSVNETSVCIVDDTGRIVREVKVVSEPDALLAALKTGAYHFKRIGLEAGPLSQWLYNALGEANLPVICVETRHMRAVLKAQINKTDRNDARGIAQMMRAGLYRPVHVKTLRSQKLRMLLTHRKLLQSKAIAIENDLRGTLRNFGLKVGLVGTARFEARIRELVENLPDLAVLVEPLLIVRRILREQIAVLHRRLLAIVRDDAVCRRLMTIPGVGPVVALTYRATVDVPARFRNSRAVGAVFGLTPCKYQSGESDYTGGISRCGDEMMRVMLYEAAQIMLVRSTRWSWLKVWAMQIARRRGVKKAIVALARRLAVIMHRIWIDGTKFRWTREEVAAA

SEQ ID NO: 185940 - protein, 320 aa, unidentified
MMAQNDLVVVGIDVAKDKVDACIRALGLRQTFPSTTQGHRKLVAWLRKHKVNKAVMEASGGYERAWAKVVREVNIEVRIVDPKRVRSFALSAGRLAKNDTIDAEMIAWFAETFRDAPGQTHDPVHEELQALVKARLSLIDFRMRLVSQSEHASPGLVRKAHGRILKSLTGEIAKLEAAICAKIKSMPDFAERAEIIESVPGFAQTSSANLVAGMPELGQVSNEIVAALIGVAPYDDDSGKRRGERHIKGGRRWVRNAIYMPCVGAATLNNPVLKAYYQRLIAKGKEPKVAIIACMRKLIVILNTMIARRQKWDPSRYALN

SEQ ID NO: 185941 - protein, 353 aa, unidentified
MNSLTDLREVVDVVIGVDTHVHTHSAAVVDAATGGVLDEITVEATAEGYCELVKFANNHPMLRAWAIEGTGGHGAGLSRHLLEMSEIVIELDRPKRAARRNGAKSDPLDAIRAAREAMARPRLGTPRTGGERQALSVLLAARRSAINASTEAQQQVFSLVIAAPEPIRVRFRGQKLAAMLNTAANLRVHASWDTETTSTVVALRTLARRAHAMLKEARELQKAIVAIIRSWRPDLLEEFGVGPIVAATVLCAWSHPGRIHSEAAFAMLAGVAPIPANSGQVTTRYRLNRYGDRQLNNALHTVVQSRIQYQPATRDYVARRTAEGKTSREIKRCLARYVARDLYRLLESGAAAA

SEQ ID NO: 185942 - protein, 440 aa, unidentified
MEEVTDEPLYRDRVCGIDIGKAEMHATIRVPSDKNPARRASETRSFATTKRGVLALADWLRCWQVPAVVMEATSTYWMGPFFRLEAEGLECVLADAKQVKNLPGRPKRDPSDSSWLAACFERGAVRPCFVATEEFRIIRLHTRYRRDLINERTREKNRAEKLLETAAVKLSSVITDLHGVTGRDIMDHLIAGQRDPKALAQLARTRARAKITELEHALEGAEFFTAHHARLLKTMLGRIDQIDAQIDELTAVIEELLAPYEEQLAQAESMPGWGRRSAEDAVAETGVDMTRFATGGHLVSWAGRAPLDKQSGKRKGQARHKKGNTYLGGVLGETAICAGRTQTREGARYRKLARSRGKNKACVAVGNTQLKVYHKLLSNPGMRYEDLGPDYYERQAATRRKISRLVREIEAEGFEVTLCRTPEPGAGPAEDNPAGTHHVA

SEQ ID NO: 185943 - protein, 346 aa, unidentified
MLHVGLDLSRRRLDYYALAADGRPLDVGGSPPDADGLRALAERLAGYGQPISAAIESMTGARFVHDTLERFGWEVEVADAQKVKGLAPLACKTDRIDAWVLAELSRIGLVPAIWLPDPEVRAERERARWRLYLVRQRVRLKQRVHSTLMAWGAPCPVSDLFGARGRELLQRLEVPEPWSTHVATAVAMIDSLDREIAAQERELRRAGADHRYVSLLTTVPGIGWVLGYTIAAEIGEIERFRSPAKLAGYTGLCPRVYQSGDSDRRGSLSKRGPRYLRWALIEAAVGASKHRLYHERYERTKHRLGRQRGPRVAQVELARRLAHSIWQMLTRSEPFAPKGASHQLAA

SEQ ID NO: 185944 - protein, 429 aa, unidentified
MPYRIAGIDVHKKILAVVVSNVEVDGDFHFERRVFGSNPEQLRSLAAWLLEQEVEEAVMESTAQYWRPVWGALERYWKPICEKREGARRRSGTLHLAQAQSNRGRRGRKRDFADAERLVKRLVARELILSFVPDAEQRLWRTVTRKKYQLTCDRVRLQNQLESLLEEVHIKLSSLVTDLLGASARRMLKALAEGETNPATLAALADQRLRATPEQLCDALGACTDLKPVYRRLLKMVLEQLQFLEQQISQLDQETASLLSQHQDAVERLAAVPGLGVDSAHQIIAEVGPTAATFPSEKCLSSWVGACPGDEESAGVNYSRRSPKGNRHMRRLLNQTANAAVRTKGSIFEIVYRRSVPRLGHNQAIGAIAHRQCRLIWLILHQGVRYEERGPAVTKQSKQKRTARMIRQLRSLGYRIESPNPQPGQAQPQ

SEQ ID NO: 185945 - protein, 453 aa, unidentified
MPKTRLSAPQNLTRLNPSAAAIDIGSTMHMAAVNPDSDDMPIRAFGTFTHDLHDLAAWFRSCGVTSVAMESTGVYWIPAFEILEEHGFEVILVNARYAKNVPGRKTDVNDAAWLRQLHSYGLLRGSFRPNAQVATLRAYLRQRERLVEYAAAHIQHMQKALMEMNLQLHHVVSDITGVTGMKIIRAIVSGERDPDALASLRDVRCHSFIETIKASLVGNDRDEHVFALSQSLELYDFYQLKMLECDRKLETAIAMMTVEVEVPLAPLPKIRTKTKQTNAPSFDVRAALYGLTGTDLTQIHGLGSSLALKLIGECGTDLRAWPTAKHFTSWLCLAPGNKISGGRLLSSRTRRSSNRAAALLRLAATTIGRSDTALGAFYRRLARRIGKQKAVTATARKIAVLFFNALRFGMAYRDPGAAAYDERHRGRVLANLQRRARSLGYQLDPIPDAESVS

SEQ ID NO: 185946 - protein, 387 aa, unidentified
MEVRVVNTPSAGRNNDPVHCFVAIELSKSNWVVGFQTPLTDKASRHQVKAGDAKGLIELIERVRMRVGRQLSRPVEIVSCYEAGYDGFWLHRVLEAYGIHNHVLDPASLQVSRRARRPKTDRIDAERMVRALIRHLRGEPEACSVVCVPNVEQEDAKRLHRERRRLIAERVQHVNRIKGLCATQGIYDYSPLRKDRLARLDGLRTGDGRALPTRLKAEIVRELKRLELVIEMIATVEAERDAILTNPASTHVNAGKIKMLAKLRAIGPEFATNLVGEVFYREFANRRKLGSYVGLGSSPFCSGSVDRDQGISKAGNSTARSMMIELAWTWLRYQPGSALSVWFRERVGNLKGRPRRIAIVAMARKLLVALWRYLETELVPTGTALKA

SEQ ID NO: 185947 - protein, 341 aa, unidentified
MRQYVGLDVAMDETKVHILDGDGKRVWRGKCRSHPDDIEAVLHQRAPQAERIGLETGPLTTWLWTELTGRGLPMVCLDARHAKRALDMRPNKTDANDAEGLAYIVRSGWYREVRVKGSEAMLSKALAGARGQLTTMVTDLSNQIRGIMKTFGLVVPKGSGGVFERNLRALLDGAEAIATVVTPLLDVWRLARQRAAALDRRLLAAARESSDCRLLMTMPSIGAVTAASFVAAIERPESFTRSRNVGAWLGLTPRRYQSGEIDYQGHISRRGDSRLRALLYEAAMRLLTRVRADSALRRWGLALKKRLGFKRAAVAVARKMAVALHAMWRSGVAFDPAPLPR

SEQ ID NO: 185948 - protein, 343 aa, unidentified
MKLHVVGIDLGKTVFHLVGLDSTGRVVIRKRCSRTQVLAFTANLQVQLIGMEACSGSHFLGRALREQGHEVRLMPAQYVKPYVQTNKSDYLDAEAIAEAVQRPRMRFVPIKTEEQLDLQALHRVRQRWVMRHTAVVNQIRSLLLERGLTLPKGRSHLDEQLPRILEDAEVNLSDSFRVLLAQLKLELEQLGARIEEMDRVIQKTARENEACQRLTEIPGVGPVTATALIAAVGNASAFGKGRKLSAWMGIVPGEYTTGGKQKLLGISKRGNKYLRRLFVQGARSVLQQRHKQAPGLSEWLAQLLVRTHQNVVVVALANKLVRMAWAVLCKNERYRAPVLAITT

SEQ ID NO: 185949 - protein, 342 aa, unidentified
MDEYDGRQFVGIDLHLQRSVIVRQSESGEQLSAVRIVNEPVALELQLEQAGADPEVVLEATYGWYWAVDVLQACGARVHLAHPLGVKGFRYRRVKNDVRDAADLADLLRMGRLPEAWIAPPQTRELRELVRYRAKLVAIRSGLKAQIHGVLAKAGVLIAVSDLFGVTGRQRLAKVPLGPAYAQRIRSLLELINILDSHEARFAVMIAERLATHRGYQAIQQVPGIGPTLAAVFVAEIGDVHRFTDAAHLCSWAGLTPRHRESDTVVHRGHITKQGSKAVRWAAIEAVQRHPTTAKIAADKHRIEARRGKNIAKVAAARKLLTLIYYGLRDGQIRALDRARPA

SEQ ID NO: 185950 - protein, 344 aa, unidentified
MNYYAGLDVSLRTVNICVINDQGDFIAETKVDSEVTDVVAYLDGLNLDVLNVGLEAGTMTQFLTYGLQSAGFEVVCMEARQVKAALSAMRNKTDKNDARGIAQLLRSGWYSPVHIKSMASHRIRLLLSSRKAVLSKCIDLENEVRGLFKVFGIKLPPKLGHGSFDPAVRDIIETDVTLSESLLPLLDARLVLYHCFRKLDNRTRHMAHADVVCQLLMSAPGVGFVTALTYKAGVDDPTRFKHSRTVAAHFGLTPRRFQSGEIDIEGHISRCGDRDVRSTLYTAANALMTRSSKWSSLKAWGMQLAKTRGHRRAVIAVARKLAVILHRMWIDDTQFQWGSEGARS

SEQ ID NO: 185951 - protein, 334 aa, unidentified
MKSDTVHIGVDVSKEKLDIFVPAKKEGARPMTKEVDNDIKGFRELRDLARKANATVCVEPTGGYELELIAFMHKFDVPIAYTDALRVRQFARAEGNLSKNDTIDAALISRFADKIGVRVLEPQEVEAVELKRKAKFRQTMVDSRTAMINRLETEIDPEMKALLKEQIRLAGRIIDKAEKLCLDTVKKNERMDSLRERFTTIGGVGDLTAISILSSLPEIGTLSDGKLNRLVGIAPEEKQSGAKEWQRRIWGGRKDVRNALYMAAVASIKWNAILGSYYHKKRAEGHPHKWAIVPTMRKLLSLLNRIARDPGFTPMPEPESTKQNANVGRRKKAA

SEQ ID NO: 185952 - protein, 367 aa, unidentified
MRGDGVGSRRRPRRDWKPAAASAYTPRMSLVLPSLLPFPNSCQGMNPHQQGRGTKMIQQGYGGIDVSKDRLDVMVLPERQFFSVENSTAGCGELVQRLRGWSVATVGLEPSGGYERGVIRALLAAGLSVRRINPNKLRQFARARGVLAKNDHLDARLIAEYVAIMPTRVVQCDPVTERLAEVVTMRRQLCDEHVAVENQTAHLEDAMLRRLNKRRLARLEADILLLDRRMAEIVASNASLARRYELLTSMRGVGPTLAFTLIALLPELGQMGRKQIAALVGLAPYDFDSGRLKGHRCIYGGRLPVRNVLYMAALSACRYNPALTAFHLRLADANKKPKVRIVAVMRKMIVILNAMLRDNVAWQPNST

SEQ ID NO: 185953 - protein, 413 aa, unidentified
MKLQHLRCAGIDVHKRRVTVCVRVVEEGVARIEIREFGTTTGELLELCDWLKENRIPSLAMESTGSYWKPLYNLMEGDFQILLANAQHMKAVPGRETDTKDAEWISELFAHGLLRASFVPNVEQRGMRELTRTRASLVGERARLANRIQKVLEDANIKLASVAANVLGVSGRVMLKAIIDGEEDPKAISELARGLLRKKIPELEQAVQGRVRPHHRIVLRELLKQVESLDDSVRVLEKAIEEAMADSDRPFETSVSLLCTIPGVAEVGARSVLAELGTDMDQFPSERHISSWVGVAPGNHESAGKRLSGRTTAGNAWVKRCLVQMAHAAAKAKNSYFQAMYRRLARRIGRKRAIVAVAHALLVAMYHMLKNGVPYEELGEGYFDQLNAQKTVKHLLDRLAKLGVTVQVQEAAV

SEQ ID NO: 185954 - protein, 387 aa, unidentified
MARKRTLSTLDTSIAYEAVGLDLAKEDVALAAFDSEHKEPYLIDRISYDKLYELLADMAPTLVAMEPCSGAHQICEQIEALGHEVLMISGRHVQAWVKDHCNGQKTDLNDAFAILNLAYDRWLTPIRGKTREECRLLALQASYRQLKGQRTKTMVHVKATLHAWGFPIRAGSFNQKALHELIDTNREAFGDEVVETLHLMINRVRDLDHDIATVLKLLTEATKRDPRASLLRSIPGFGILTMSRWCAVIGDIARFDSPKQTMAFVGLVPNNRITGHHTETSSGREARGQGRMSKRGDKMLRSLCILGAASLCLMVRNDRLPDCPFVASIKERLASPRPWFKVLVYVAAKLVRIATALLKYGETFSYEKAGISKAVLKQWELEQAKAA

SEQ ID NO: 185955 - protein, 344 aa, unidentified
MEHPTTIAVDLAKSVFEVSISREPGRVCQRKRLTRGQFARFLALEPPATVLMEACGTAHYWARLAQDAGHRPVLLPVQHVCPYRLRDKTDHADTRALLEAFRNEKISPVPVKTPAQQAIAALHRIRSGWLATRTARLNTIRGLLRELGIVIPQGARLVLPRLAEALSQESIPESLHTVLLSAASEIRQLEADIKEVERQLEELSKSLPACSSLRSIPGIGLLSSTALVASIGDPSRFKNGRRLASSLGVVPKEHSSGSSRHLGSITKRGDSYLRTLLTHGARSVLFAARHAKNPDPLKRWALCVQARRGHNRAAIALANKLARIAWAVWVRNTTYQPRTEKALS

SEQ ID NO: 185956 - protein, 403 aa, unidentified
MNMNAVGIDVSKGKSMVAILRPYGEIVSSPFEIKHTSSNIQSLIERINSIEGNSRIVMEHTGRYYEPLARQLSLAGLFVTAVNPKLIKDFGNNSLRKVKSDKADAVKIARYTLDNWIDLKQYSLMDELRNQLKTMNRQFGFYMKHKTAMKNNLIGILDQTYPGVNTFFDSPAREDGSQKWVDFATTYWHVDCVRKLSLNAFVGHYQKWCKRRMYNFSKDKAEEIYGAAKELVPVLPKDDLTKLIVKQAIEQLNTASKTVEELRTLMNETASKLPEYPVVMEMKGVGPSLGPQLMAEIGDVTRFTHKGAITAFAGVDPGVNESGTYEQKSVPISKRGSSSLRKTLFQVMDCLVKTKPQDDPVYAFIDKKRAQGKPYYVYMTAGANKFLRIYYGRVKEYLMSLPE

SEQ ID NO: 185957 - protein, 386 aa, unidentified
MSQTAVLTPAAVDYEKTLVLSIEVSNKSWVLAAQVPGLPHTKAKRTINPEAEALSAAIAGYRARAAAVGRSIERVIAVYEAGWSGFWLARWLMSHGVEVYVIQPSSVPVDRRMRRAKSDGIDAELLLRTLLAWLRGEPRVCSMVPIPDEADEDARRGVRERAELISERVGLVNRITAVLATLGVSDYNPLLRNRHHRLAELRTGLGKPLPVNAHAKIVRLLARLELVLAQLAVLEHERDAVMEADASDQASKMIQQLASLRGIGVQSATVLVREAFVRRFANGKALGSYAGLASSPYSSGGIDREQGIGKGGNRRVRTVMVELAWLWTRYQPAAAQVCWFRERVGSTGRRVRKVMVVALARKLLIALWRFVTDGVVPEGAVLKPAA

SEQ ID NO: 185958 - protein, 352 aa, unidentified
MRRPKHQVTSGEDLFVGIDLHKQRWHVTIRTFDVELFSASIPGTWEALERVLARYRGHPLQAVYEAGYFGFRLHDRLVDRGIPCIVTPPSLIPQEYGNRVKTDRRDSRKLAHLLAKGLLKRVWVPNEEELYQRQVVRRRRQLVRDRVRTQSRIKAELRFYGVLIEEPRGKWTQIYFANLRRVNFGNRWMQESFNRLLEQYEFLSAQIDKQTQLLRELSETELYQERVKILQSIPGVGVISAMELLLELHDVSRFRKAEQLAAYVGLTPSQYSSADKVRMGRITGIGKNTLRAILVEASWKLITKDQVMREKYERIKIRSGGKRAIVAIARTLRLRMRRMLLDQRAYALDLAA

SEQ ID NO: 185959 - protein, 379 aa, unidentified
MRKDTRHAGFDVDTEKISVAVAEPGGEVRSLGAIPNREESIRRLVRKLGPASRLRVCYEAGPHGYGLYWLLRGLGVHCDVVAPTLVPVKSGDRVKTNRRDALKLARCYRGGDLTAVWVPDAEHEALRDLVRAREVAKRDQLRARHRLGKFLLRRGLRAAGGMKSWTAKHLLWVKTLRFEHPAQEATYLDYLHEVQHAAERVARLERSIEQAIEALPEEMKAVVGGLQALRGIKQVSAVTIVAEVGPLSRFARPKQLMGYSGMVSSEDSTGSDVRRGAITKTGNAHLRRIVGEAAWAYQHRPAMSWEMKKRQAGLSEEVKEIAWKAQHRLCTRYRRLAAKGKLRQKITTAIGRELLGFIWAIGVQVEREQRNAKLARRAA

SEQ ID NO: 185960 - protein, 342 aa, unidentified
MDYFAGLDVSVKDTSVCVVDDTGKITREVRVASEPDALLAVLRDPTYRFKRIGLEAGPLSQWLFSALATDLPVICVETRHIRAVLKAQINKTDRNDARGIAQMMRVGLYRPVHVKTLRSQKLRMLLTHRKLLQSKAIAVDNDLRATLRNFGLKVGMVGATKFEARIKELVENFPDLFLLVEPLLVVRRVLREQIGVLHRRLLAVVRDDEVCRRLMTVPGVGPVVALTYRATVDVPARFRRSKSVGAVFGLTPSRDQSGETDRPGAISRCGDAMMRTALYEAAQSMLVHSTRWSWLKAWAMKIARHRGMKRAIVALARRLAVIMHRIWVDGTEFRWTREAAAA

SEQ ID NO: 185961 - protein, 372 aa, unidentified
MNYNTVYVGMDVHKESFTLCSCRYEDEKASHYQRTPASYKNVLRYLAFLRTIYGEDTRFVCGYEAGCLGYSLYHQLENFNVECVILAPTTMLEQRSKRRIKTDKRDAEIIARSLAQHNYSPVHIPTKMDNQTKEFIRMRDDHKAELKKIKQQILSFCLRQGYQYDGSGNWTAKHVKWLRSLKPAGLYKEILDEYLLTYTILTDKLNRLDQRIEELASKEEYKESVSKLTCFLGIKIHTALSVIVEVGDFQRFVSARKFAGYLGLVPGQHSSGDDRNGLGITKAGNTHVRRLLVESAQSYTRGKIGYKSRVLRSRQAGNSPQVINYADRANERLRRRYYKMVLKDGKKYNIAKTAVARELACFIWGMMTDNIY

SEQ ID NO: 185962 - protein, 341 aa, unidentified
MSIVGAFDVHRRQLTFDYLDTVTGEVKRGRVVPADRDHLRAWLARFAGQHDVHFALEGCTGWRYVVEELLAAGITPHLAEPADTAALRGRKRHAKTDKTDSRHLRVHLMAGDLPECWIPPAHVLEARAVVRLYKDLLDERGAWHQRIAATLFHQGVPVTASMSTASGRAAVAEMDLSPAGRQAVGTALRQIDRLTGELEPLRRQLDMISRRQPGCRALRATQFGVGAVTAVAIWAELGDVRRFPSSADVVRHTGLDITVHSSDGKGPPGKLSRQGPELLRWALYESAKCAARPAAPDYGYYTATRDRRTGGLATLSVARKLARRCYHTLRELGEEALAPAA

SEQ ID NO: 185963 - protein, 402 aa, unidentified
MRVGIDAHKMKCTTVMFDGDSVTGSFDFQTTRQGVYEFMQKVPEGSIAVIESSTTGKVLSRMLSGKYEVHMVAPPERRVSIKTDRRDAERIVMEDMLNYLRRCYIPSQYIENIRFVVTQQIQIGRRIARVKNQVHALLEMNMIQHELDDMADIFGVKGLKKLSKIQLPRQDMIALARYLEELQMYVSHHRQLDTEIARIAASDNDVQLLMTIPGINCFTAVAIKSRIGDDVSRFATKKHLCSYAGVVPKANNSGEYVSEHNHVKQGDIVLKYALTCAVRGAILANKNSSIKLFYQKISKKGVSPQKAQIAAARKVACIVWKVLSSKQPYTEQDDHMTKRKMKIMSSKAMRTIPTSVMPSKVSELVRNLADDIDILGRYHEDSGYIIGKDLSNKNRSKEDILR

SEQ ID NO: 185964 - protein, 315 aa, unidentified
MTSTQVFVGVDISKAQLDLALRPEGQFSVPNNEAGFAQVLEHLNAVHPTLVVLEATGGLELPLTGVLAAAGVPVVVVNPRQVRDFAKATGRLAKTDALDAQMLAHFAEVMRPEPRPLPDEQTQALAAILARRRPLVEMLTAEKNRLGTAGKPVRKSLRTHIAWLERELSHTDRGLAQTIRESPVWREKEALVRSTPGVGPVVTTTLLATLPELGTLTGKQIAALVGVAPLNRDSGTWRGKRTVWGGRAQIRAVLYMAALVAARCNPVIRACYQRLRAAGKAKKVVLTACMRKLLIVLNAMLKHRTPWRAELVQCA

SEQ ID NO: 185965 - protein, 315 aa, unidentified
MHKQSSFIGIDVSKNSLNVHVLPDNISYSFPYEPQKIKALIRKLKQHKPALIVMEATGGYELAAASKINEAKLPVAVVNPRQVRDYARAIGKLAKTDSIDAYVIARFAQDVRPEARENLTLKEHQLKELIMRRQQLIEMRTAEKNRLGTIYSKEVIKSIERIIKTLDEQIHALDEQLNREIKGNPNWDHKIELITSVPGIGPHTAHTLLFCLPELGRLNRRQIAALVGVAPLNRDSGKLRGIRCIAGGRAAVRKALYMPVLCAATRWNKKLSLFYAQMVARGKKPKVALTACMRKMLILLNAMLKNDQIFDPEYC

SEQ ID NO: 185966 - protein, 345 aa, unidentified
MSKLSADMSSVTRIGLDLAKHVFQVHAVDDFGNPIDKRAIRRAKLIDYFAALEPCTIGMEACSSAHHWARQFEAMGHRVMLIPPIYVKPFVKRQKTDANDAAAICEAMGRPGMRCVPVRSIENQAAKMVHGVRETLSGQRVQLLNALRGHLAEAGVIAAQGHQHARKLAELVEQGCDRIPACVRDALLPLVARLRDIEAALDGIDKRIAVAVKADPDARLLMTIPGVGPVKASAIVATIGSGGIGQFSGAKNFAAWLGLTPGQHSSGGKQRIGRITKMGDRYLRKLFVVGAHTVLIHADKHDDRMRQWARKLRATKKIKLAAVALANKTARIVYAVLATQKPYAA

SEQ ID NO: 185967 - protein, 411 aa, unidentified
MDVFCGIDWAEDHHDIALADRDGKLLAHQRVSDDAAGLARLLELLAEHGDTPDDPVPVAIETPRGLLVARLRATGRSVYPVNPMAVARYRDRHSVAGRKSDKGDAAVLANVLRTDLHAHRPLPADSELAQAVAVLARAQQDAVWNRTTAHNKLRSHLREYFPGFLRAFAAARGGIMRPEARVILAATPDPAAAAQLTLAQLRALLKKAGRVRGVDAEAARLREAFRQEQMRQLPLVEQAMGRQALALLRQLDAACTSADDLEQAAAESFNQHPDAGIITSFPGIGALTGARVLAEIGDDRSRFTDAKGLKAYAGAAPITRASGKTRSVTRRHIKNNRLNAAGYIWAFSAISASPGARAHYDRRRDAGDRHAAAQRNLFARLLGCLHYCLATRQHYDETTAFPNQANIPAAA

SEQ ID NO: 185968 - protein, 412 aa, unidentified
MKEKVEFEQVIERGCGLDVHKETVTATIKGEGIKQETREFSTYTRSLISLRDWLLKNGITHVAMESTGVYWKPVFNILGEHFQIILVNARHVKNVPGRKTDQLDSQWLAKLLMAGLLKASFIPIKKIRELKDLVRYKTKLTRQVSSEKNRFVKILEDANIKLSSVLTDIFCVTGMKMIREIIECDYDPDKLLYHVHGSVKKSRSEIKEAITGYVTDHHRFMMQTILESIEKTEDIIAKIDSQIAEQTKEYGLEIELLKTIPGVGHDGAIGIISEIGADMSVFPDEKHIAKWAGMCPGNNETAGKKKSSRASYGNAYIRALLVQLAWSASRTKKTYLSSKYKSLVRRMGKKKAIVAVGHKILIASYFIIKDKVAYNELGEEYLSNFRKDKLVAYYKKMLQELEPNLEFETKVA

SEQ ID NO: 185969 - protein, 337 aa, unidentified
MGRYLGVDLHRNCFTVCTIEEGGRRYLKEWRLKDLGRFVSQLRSTDEVAVEVTGNTRLFYDAVVGKVSRVVVVNPSEFRVISQSVNKTDGNDARRLAIFLSKGLLPEVRMKDKGHAQLASITQTRDKLVKLRTALKNKINNIVSAHGINLKKEELSSEKGLEKVMGMMFDPLVDLEVEVLVNQIRSVNKSISKLEKAIKEEGSKLKGHKNLKSIKGIGDLGAGILLSVIGDVEDFANEGKLASYFGIVPRVSNSNETLRSGRITKRGSKLGRTTLVQCCLIAKRYSPYLNRYYERIKARRGGGKAIIALARKFLSIIYKTLKNDWVWADFPNGVLVG

SEQ ID NO: 185970 - protein, 344 aa, unidentified
MSKHSVRSGDVAGLLHQLAKLRGKAQARTGETFPVIVIQEAGLDGFWLHRVLETEGIESHVVDAASILTSRRRRRAKTDRIDGEALLRTLLAYKRGEPRVCAMVRAPNPQEEDRRRLCRERKTLVAERVEHVNRIKGLLFAQGISDYEPLHRDRRRRLEQLTTGDGRPLPAHLEAQIGRELDRLELLLKQLKAVEAERDALLAPVGDAVPAPVAALAGLRGIGPEFAAVLWFECLFRSFSNRRQVAAYAGLAPTPWQSGSVQHEQGVSKSGNPRLRTTMIQLAWLWLQHQPMSELSLWFKDRVQRDGGRGKKTTIVALARKLLVALWKFASNGVVIEGALMKAA

SEQ ID NO: 185971 - protein, 445 aa, unidentified
MHHRSLFIYARVSLPQSQGHCFIGFLIYLESEVNSMLNTLFVGIDVSKKSNVVRFTNSHGDTLTVFSIPNNHDGANKLLDKLRNTLTTEDFQAVSIGMESTSVYADHLALLLRNDDFLRKWGVKVHILNAKQVKAFKEAYPELPKNDNIDTLVIADYLRFGRISKEVNLDEKFVALKNLTRARFQVAQNLSREKTRFLDTLFYKFSSLDSSNVFSDTFGATSIAVITDFFSVDDINDMPLEDLAEFLVDKGKNKFDDPERIAKDLKAAAKSSYRLSKTVNDSINQLLAVRLVGIRSLQKQIKDLDKAIESYMQLFPAILNSIPGIGPVYSAGLLAEIADIQRFKNHAALAKYAGISWSQYQSGDYQASNTRLILSGNKYLKYYFLEAANKTRMHDAEFKRYYQSKFKEVPKYQHKRALALTARKLVRLVYSLLSTNQLYIPPTSR

SEQ ID NO: 185972 - protein, 320 aa, unidentified
MMAQNDRVVVGIDVAKDKVDACIRALSLRQTFPSTAQGRRKLISWLCKHKVTVAVMEASGGYERDWAKALRGAGIEVRIVDPKRVRNFARSAGRLAKNDAIDAEMIGWFAETFGEAKGQAYDAAREKLVQIVHARQGLLELQTSLQNRGEHAAPEVVQKMQGRLLKKIARELAGLEAAIAAMIKATAHFAELAEIIESVPGLGGITAAGLIAAMPELGQVSDQAISALLGVAPYDDDSGKRRGERQIKGGRRKVRNLFYMACLGAATRHNPVLKAFYRRLLAKGKEKKVALVACMRKLIVILNTMIARGEKWDATRYALS

SEQ ID NO: 185973 - protein, 422 aa, unidentified
MLQEAQDRDEIIERVAALDIGKAELVCCVRVPDEDRRGRRLQEVRAYSAMTGSLLGLADRLRVLGVTRVVMEATSDYWKPVFYVLEAHGFETWLVNAKDVKHLPGRPKTDKLDAVWLCKVAERQMIRPSFVPPPEIRRLRDVTRHRIDLVAVRTAEKQRVEKLLEDACIKLSSVASDIFGVSGRAMLDALAAGERSSKVLAQLARSVLRRKISALEEAFTGHFTEHHAFLLSKMLARIDALDADIAELDARIEAMIAPFASAVDRLDEIPGIGPIAAAIILAEVGLDMTRFPTAQHLCSWAKFTPGVKESAGKKKGNGSTGHGNRYLARVLGEAAVGAARTDSFLGERYRRIARRRGKKKAVVAVGRSILVIVWHLLSDPDARYHDLGSDFFDKRINPERRKRAHIHQLEALGYKVTVEPAA

SEQ ID NO: 185974 - protein, 414 aa, unidentified
MKLFVGIDVSSKELETCFMNTDGDKLETLTVQNNLEGAAYLRDRIVALADKHAVSEIHIGLEATSVYSWHPAMYFHQDAALQERKTKVFTINPKLVSKFREAYPDLDKTDRLDAWVIADRLRFGRLTTTIVMQEQYVALQRLTRMRFHLIHNLTREKQYFLQNLFYKCNAFTTEVESSVFGHAILEMLSEKYSLDDIATMEVGDLADYLRDKGRNRFPDPENVARCIQKAARASYRLSKVVEDSIDLVLGTSIQAIRSIQAQLKDLDKAIEKVLETIPGALCLRSVPGIDRVYAAGLLAEIGDIDRFSDQAALAKYAGLTWRKQQSGAFEAEDTKRIKSGNRFLRYYLVEAANSVKNRDEEFGAYYRKKFLEVPKHQHKRALVLTARKLVRLVDVLLRNGQLYTPRKKVTPAKD

SEQ ID NO: 185975 - protein, 363 aa, unidentified
MTSMSVMTPGVTGGIDTHGQTHHAAVLDHVGRQLGDREFPTTPAGYRQLLAWLRGHGPLERVGVEGTGTYGAALARHLGSHSVPVVEVDRPDRKARRAKGKSDPLDAYAAARAALSGTAAGAPKAQDGPVEAIRALRVVRCGAIKARTQAMNQLQALLVTAPAELREQLRPLTTTALIATCARLRPTGELTDPEQATKTALRRLAQRHQHLCQEIVEADTELRTLVTAAAPRLLALPGVGIEVAGQILTTAGDNPHRLRSEAAFAHLCGVAPIPASSGRTHRHRLNRGGDRAANNALYIVVLGRLRYDPRTRRYADRRTTEGLSKPEIIRCLKRYVAREIYNQLATHTADDRPTTPPTMSRAA

SEQ ID NO: 185976 - protein, 410 aa, unidentified
MEVLHPRCCGLDVHKATVVACVRRVIDGKAVKESRTFATITSSLFALSEWLTETKCTHVAMEATGVHWKPVWHILSDGDLELVLANAAHIKNVPGRKTDVKDAEWISDLLAHGLIRASFVPDTQTHEMRTFLRTRKQVVREKSSHIQRIQKTLEDANIKLDSVITDIMGLSGRKMIEALIAGEKDAAKLASLADHRVKASQGTLREALRGRVTRQHRFLLRLHLDQIDAFDEAIAKIDREVEASIAPFRTAVEQVSSVPGVKDLSARVIVSEIGTDMSRFASDAHLISWACLCPRNDESAGKRRSTRIRKGSPWLKTTLVQCAWAATRTKDSYLNAQFHRIKARRGPKKAIMAVAASILTAIYHMLKDGTFYQDLGPNHFDPRTKERQKNRLIKRLADLGYVVELAPQVS

SEQ ID NO: 185977 - protein, 345 aa, unidentified
MTNNPANTPTESLSRLFAGIDVGADELVLVIRKNGKSFDPQKYANTRSDRARLVKKLIKLPGIKVCLEATGIYHFDLAIALHDAGIPVMVVNPKASHNFAKVLMKNSKTDVVDADTLAEYVERMDFVAWTRPSNQVLALRGFARRIDALTGQKAAAKNHLHALSATQETPKALLRDAKLAISQLEKRIDALAAEAMILVDTHPELKRVFELLTGIKGIAQTSAIALMGELLLLPPNLSHREWVKFAGLDPKAFESGKSVHKKMRLSKAGNRHIRSALYMPALSAKQHDPHVRAYFQHLIDNGKKPLQAVCAVMRKLLHAIHGMLKHDQPFDNTRFYAIPTPTAAK

SEQ ID NO: 185978 - protein, 412 aa, unidentified
MQVVHPVCCGIDVHAKMLVACLILANGEKKKRTFSTMTAELLQLRDWLVAVQCTHVAIESTGVYWKPVFNILEDALTVILINPEHTHALRGRKTDVKDAEWLVDLLRHGLLQPSFIPPPVIRELRELTRYRDSVVREQSSVANRIQKLLESGNLKLGQVASDALGVSGRMILKALAKGESDPRKLAALARGKLKEKSLSLEQALQGRLTVNQRFVLGELLSRWEQLEAADARVTSEIDKYVQANPKLARARELLDSIPGIGPRVAGVIMAEIGIEMASVFADAAHLASWAGICPGNKATGGKRLSGRTRKGNTYLRSALVQAAWGASLKKHCYLSSQFHRLVKRLGRKKALVAVGHSLLVIIFHVLQNDQTYTELGGDYFDRRHVEQQRDYYVRRLQMLGLKVTLEELPQAA

SEQ ID NO: 185979 - protein, 351 aa, unidentified
MSNKSDATVATMGIEIGKNSFHVDERGAIVLRQKWSRGQVEARLANMPSCLIGMEACVGAHHLSRKLQSLGHDARLMPARYVRAYLKGQKNDFRDGEAIAEAVQRPTMKFVATKTAEQLDLQALHRVRARLIGQRTGIVNQIRAFLLDRGVAVRKGPRFLRTELPRILATRCDVLSPRMVHVIEELAGDWHRLDERIKSVSSEIEALADQDPSCERLMTVPGIGPIISSATVAAIGNGAVFSKGRDFGAWLGLVPRQISTGDRTILGKISKQGNRYLRVLFVQAARVVLVRPNSWERYGLKSWIEAAKKRLHHNVLAIALANKLARIAWAVLNKERKFECVRTSAMASRSA

SEQ ID NO: 185980 - protein, 346 aa, unidentified
MKHINSKGTLKVLGIDLAKQSFQLHGVDEAGHTVLKKKLKRKQLSAFIANLPPCLIGLEACGGAHFWVRRFTEQGHTVRMIAPQFVKPYVKSNKNDAVDAEAICEAVQRPHMRFVPVKSIEQQDIQSLHRIRSQLIARRTAQANQIRGLLLEYGIILPKGISYIRKEIPEILENAENALTSLFRELLNELYDEMVHLDDRVCSLEQKLEAICARNQDCQRLLTIPGVGLLTATALIAAIGDITVFKNGRELAAWLGLVPRQHSTGGKPMLLGISKRGDSYLRTLLIHGGRSVVRVAHKHQDKRNQWIDEIKQRRGENISNVAVANKNARIVWALLTKKENYCAAGA

SEQ ID NO: 185981 - protein, 363 aa, unidentified
MFESTTVSVGLDVHARSVRFAAVRADELLEERTLPYDTEAVERVLRRWPAVRCCYEAGPTGFGLYRYLVDRGIDCWVVAPGLVPQRPGDRVKTDSRDARKLARLLAGGLLEPIHVPSRELEAARDLVRAREDARLDRMRDRHRLSKFCLRHGRRLPTSSWTVARRKWLGEQRFEFAAERCVFDTYVHTVDLVDARIEHLEHAIRETAEQGPWSQVVARLRCLRGVDTLTALALAAEIGDFNRFESAEEFMAFVGLVPAERSSGEQRRQGSITKVGNSHVRRLLVESAWHARRYPKVGYDLARRQRGHDPLLIERCWRCQQRLYQRWQRMAGRGKPQQKIVVACARELAGFVWAIATDQPLRTA

SEQ ID NO: 185982 - protein, 371 aa, unidentified
MLDTTTFVGLDVHARSIKAVSLDVMTGEARCATFGYDAGAVAGWVRSVDPKAKCVYESGVTGFDLQKRLSGLGVDRVVGAVSKMIKPSADRRRKNDRNDAEFLARMLSVGNVVEVWVPDDECEAARDLVRALDDAREDLRRQKQRLSKFLLRHGLVFDERTPSGQRKGNWTGAYWSWISSISFAEKADNDAFAFYVDAVRQAEEDKRRLEKLVADEAAKPRWKKRVDSLRCLKGIDVMTAADIVFEAGEFARFRNARSFAAWLGLTPSEHSSGEKVAQGGITKAGNKHLRRVMVEAAWHYLNASPHSKGPAPGQAPDPAARRHASKGVRRLVGRRAALLERGVHKNKANVATARELACWCWAVGSMAEGAR

SEQ ID NO: 185983 - protein, 358 aa, unidentified
MMYVGVDVHKRVCRAAMVNGEGEMVDEFSFRNSKRGIEDFMMKIEAFKDRMLVAVESTANLWIRLYDSLEEHGIQVVLSNPAKTRLIAEARVKTDKVSARVLAQLLRADMLPLCFVPTRRQRDRRQFIRHRVHLVKMGTEVKNRIHALLDKHGLRCPYKTLFSKRGLEWLRSLRLSFTDDAVLRSDMALLESLDEQVGFMEAKIAAVAVNDERVRLLMTMPGLGYFAASLLVAEICDIHRFSSDKRLVSWAGLAPGVHQSGDRAVHCRITRQGNKLVRWVLVQAAQVARIHDERFSEFYERYSGRKGDKKAVVAVAHEMLRIVWFMLKRNEAYRGERRGLSWGKLKRLERVAGIGFQA

SEQ ID NO: 185984 - protein, 416 aa, unidentified
MKKNTNSPMQKEPRAKRAKAQRPVQRDTKEVLAELVEKLQGKLAVKATWASPAEAGARGELSPNLNRLTVGLDLGDQWSHFCILGFEGETLSEGQLQTREEEVAEFFQALPGARVVMEVGTHSAWMQEIIAGEGHEVVVANPRLMEGSKRRKRKNDRIDAKKLARLGRVDPQSLYPIRHRSREVRQDLVVLRAREALVAARTELINATRGLVKSMGTRLPKCSSESFGHKVKDAIPEKVREALLPLVQLADALSACIQSYDQKIAELGSEKYGHTKLLRQVKGVGPITALAYVLTIENPELFAKSRDVGPYVGLVPKQEDSGESQPQLGISKTGDTMLRKLLVGSAQYILGPFGPDTDLRRYGLRLCERGGKNAKKRAAVAVARKLAVLLHRLWVSGEVYEPLGYTASRRIVQQAA

SEQ ID NO: 185985 - protein, 430 aa, unidentified
MKSNTQNAKIEAITEKTLVLGIDVGSETHYARAFDYRGIEYSKKPFKFSNTEAGFVTFKEWILDLKDRHEKEKVVPGMEPTGHYWFNLGKFLQDNEMKPVLVNPHHVKKSKELDDNNPTKNDRKDPKVIAGLVREGRYMIPYLPEGVYADLRTASNIRFQLQAELTRIQNRISRWFNIYFPEYKTVYGKPDAKSGMLILKAAPLPEDILTLGIDGVNQIWRDAKLRAVGKARAKTLIEAAGHSVGSKEGAVSARMEIRMLLEDYESRNMRLQEVMVLIEELVKGIPMAEKLLEIKGVGIRTVSGFLAEVGDISRFNNPKELQKLAGLALVENSSGKHKGGTTISRRGRKRLRYLLFEAAMSLVAKNPEFRELHNYYTTRRRNPLKKMQSLMAVATKLIRVFYAMLTKGVDYDPKKMVSDIRRPEAYLQAA

SEQ ID NO: 185986 - protein, 340 aa, unidentified
MSSMQIGVDLAKSVFEIAVSPAPGRVRDRRRLTRSRLGPFFAAQPPAQVILEACGSAHHWGRELQRLGHTVELLHPGDVARYRDGNKTDRADAKALLEAARNAALSRVPVKSVEQQAVVALHRLRQGYLRTRTARINAVRGHLREFGCVIPVGAQHVLPRAYAALAEEAVPALLRPALETVLEEIGALEAKAEALREALAALAQQMPDAQLLLTIPGIGVLTATALVAFVGAPGRFRSGRHFAAYLGLTPREHSSGPIRRLGPITKHGNSYVRMLLIHGARSALRAGHVAPQPDDLRTWARAVAARKGHNVAAVALANKLARVCWRVWRDQRPFERREAR

SEQ ID NO: 185987 - protein, 365 aa, unidentified
MNECHLNTELSSLEGTRCQFNGGTGAIKLGIDVHQDFYVVVEQVGGSNPKPPQRFPKEGFLHWAARLKRKSGAEVYAVYEACGFGFSLQRNLSALSIKCYVVCPQKLDERNKRVKTDGLDAKALCLKLDRFVQGNRDALALVRVPSEEEERSRAIHRQREQLVGARKRLEAQGRSLMVNHGLEPVQNWWKPRTFAALPVPQWMRELLLNSQPILLALQQKIAALTLQLQSAASPNQPRGLGKMTSVIIDREIGDWRRFNNRRQIASYTGLCPGEYSSGNTRLQSCVTKHGNPRLRAALVELAWRLVRFQPNYKPVRKWRQILAKGALATGAARKKAIVAVARQLAVDLWRVRTGRCKPEVLGLVS

SEQ ID NO: 185988 - protein, 331 aa, unidentified
MKFEEVIGIDVSKLTLDACIHSQQIFTQVPNTKKGYSKLLTWATKSTGCSMANVLFCFEHTGMYSYALACHMSEKQMNYIMVPGLEIKRSLGIQRGKNDRVDAIRIAQYAYRRREEVTTCQLPEKAINKIRQLLSLREKLVKQRAGYEATLKDLSDFIESSESKVLVGVQRNMIKALAREIDKVEKEIDSVLEASPDIMNNYRLITSITGVGRQTALYLIIVTNNFLSFDDHRKLASYAGVAPFANTSGTSIKGRTKVSPLANRKLKSLLSACAISAIRHDPEMKIYFNRRTDIGKHKMNSINAVRNKLLARVFAVIRRGTPYVPLCQYAA

SEQ ID NO: 185989 - protein, 417 aa, unidentified
METYAALIAIDWADRQHAVSLYDATTGKRQQFFIKQQPAALHEWVRSLRQRFAGQKLAVCTEQSRGPLIYALLQYDFLVLYPVNPATLAKYRQAFSPALGKDDPTDADYLLDLLQHHRERLKAWRPDDEQTRTLRLLVEQRRRLINDRTRISNRLTALLKCYFPQVLDWFPDLCTILVCDFLTRWPTLEKLQQSKPATLLKFLRAHHSVRTATNERRLAELKTAVPLTTDGAVLSSAKLLVKVLVTQLRTVLAAIAEYDRHIEAICQTHAEYELFASLPGAGPVYAARLTAAFGSDRSRWKSADELLRFAGVAPAMERSGKQQWIRWRYFCPKFLRQSFHEYAAESVAHSFWANAYYNMQRLKGKKHHAAVRALAFKWIRIIWKCWQTRTPYKEVVYLESLRKSASPLLNFAATHKQ

SEQ ID NO: 185990 - protein, 313 aa, unidentified
MGDLYVGIDVSKAHLDYAFYGTNETGQVDNQPAGISQLVAECQRRQVTLVVVEATGSLEMPVVAALLTAGVPTAITNPRQVRDFAKGLGKLAKTDKIDAQTLAHFGYTVKPRVYVLPAADAQALEALLTRRNQLLDMLTAERLRISSTHTSVRQRLEKHIEWLKAELAEIDKDLDQSIQHSEIWKAKDRLLQSVPGVGRILSTAILAWLPELGLLNGKAIAALVGVAPFNRDSGLMRGRRMIWGGREQIRSTLYMAALSAMHCNPVIAAFYARLIKAGKPAKVALTACMRKLLTILNAMVKHNTVWKNPAPAV

SEQ ID NO: 185991 - protein, 364 aa, unidentified
MYDSTTTVTVGLDVHARSIRLAAVRADELLEERALPYDEQAVEQVLRRWPVVRCCYEAGPTGFGLQRFLVERGIDCSVVAPGLVPQRPGDRVKTDPRDARKLARLLAGGLLEPIHVPSRELEAARDLVRGREDARLDRMRDRHRLSKFCLRQGRVLPTSSWTVMRRKWLGEQRFEFAAQQITFDSYVHTVDLVDARIEQLERAIRETAEQEPWRGLVARLRCLRGIETLTALALVTEIGDFDRFTTAEELMAFVGLVPSEHSSGEKRRQGSITKVGNSHVRRLLVESAWHARRRPKVGYELARRQRGQDAVVVERTWRCQQRLYQRWQRMAGRGKPQQKIVVACARELAGFVWAIATEQPLRNT

SEQ ID NO: 185992 - protein, 351 aa, unidentified
MMIVLGADTHKRSHTIAAVAAGTGEVSGEKTVPVGSRGFADLLVWARGLGGERVWALEDCRHVAGSFERFLIARGERVLRVPTKLMADARRGGRERGKSDRIDAIAVARAALREGLGALPVAQLDGPELDLRLLVDHRERLVGQRVGLNNTLQWHLHDLWPELRLPGGALFSVKWSTRIARRLARAEQTMRVRIARDELRRLRELTQTIKALEGEIAQLVARIAPQLLAEPGFGPLTAAKLVGEIAGAARFASDAKLARAAGLAPIPVSSGKTNRHRLDRGGNRQINAAVHRIAVTRARCHPETRDYIARRRAEGKTTREAIRCLKRHLARRIWHLLQPPTPSEISLNLLT

SEQ ID NO: 185993 - protein, 387 aa, unidentified
MIYYIGIDISKYKHDFCIISNTGEIIVENSSFENNIKGFQSFLDQLKPYDKTQVRIAFEATGHYSLNLEMFLTNQGFSFMKMNPLVVHQYLKAQSLRRTKTDKADSLTIASYLMSIPYIPNSSLLYHTYTLKSLCRSREALIKEKSKFILLLTNELDKSFPELKSFFNNSISNTLLFILNKYKNAKSISLMKDYEALRKISHGKFSYAKFAKLKELAKNTVGYYDSNSDLLISTYVSIINDFNDRIDPINKQISTIIKELNPKMLTIPGLGEIAAATILAEYGDISNFSSSSKMLAFAGLEPSIIESGTLHSNGKMVKHGSGHLRYAIMNAAMIILRYSPTFYDYYLKKRSEGKCHRVALSHVCKKLIRVIYSLEKYNKNFDPSLLK

SEQ ID NO: 185994 - protein, 417 aa, unidentified
MESPYNLVAGLDIHKKTVVVVVLQNAQPEQDYASSTFGTTQFGLKELAAFLRQHGVTHVAMESTAQYWRPVWMTLEEEFTLTLAQARSTRARRGRKWDKADARRIAKRLLSGDLTVSYVPPPEQRNWRLLSRTQVAMRESLVRLRNQVEVLLEQAQIKLSSVVSDLFGKSGRRMLEALLQGMENPAELASLGDRRLHASKEQLADALTGQLTEAHRIVLRLLLQQIDQIEQHVIDLDRALAQALAAHQEAVERLCEIPGISVRTAQYLIAETGPGAEPFESPGKLASWVAICPGQQESAGVTVSNRSAKGNWMMRRTLSQTAWAAVASKGSEARRRFLAWRPRLGTQKAIWAVAHYQLRVVWKVLHDRVRYRSPDTEALSHRALMARATRVFNQLRNLGYDVSITPPSKPVCINSES

SEQ ID NO: 185995 - protein, 316 aa, unidentified
MEAIFENCCGIDVHKKTLTACIMIGGEGKITKKEIRTYSTMTEDIEGLRDWLKSEGVTHVAMESTGIYWRPVYNILEEGFEIMLVNARHIKNVPGRKTDVADSEWLCRLLRNGLLNGSFIPPIYIRQLRDLSRYRSKLNNNIAAEKNRLQKYLEDANIKLSSVATDTFGVSGRLMIREIIKGNTDAEGLSELAKGRLKSKKEELKKSFNSRVTEHHRMLIEMSLKHIEYIESMMVKLEGKMDELIKKQDLAKDLELLDTIPGVDKIGATAIVAEIGADMSKFPTDAHISSWAGMSPGNNESAGKKKAQVPRMETYG

SEQ ID NO: 185996 - protein, 402 aa, unidentified
MNCVGIDVSKGKSMIAVMRPFGEVVVSPFEVRHTANELSELARLLKSLDGETRVVMESTGNYHAPVAWLLHGAGLYVSVVNAMLVHDYGNNSLRRGKTDKKDAVKLANYGLDHWLTLPRYVPEEDTRLMLKTCYRQYQQYSKVQTMLKNNLISLLDTAFPDANRLFTSPPRADGSEKWVDFVATFWHCECVCGRSEKAFTTQYQKWCRKHGYNFSEDKALDIYASACRHFGVIPKTDTAKLLVEQAISQLQTTSSALAALKQEMQSLAASLPEYPVVMGMFGVGPTLGPQLIAEIGDVRRFHSKKALVAFAGIDAPPYQSGQIDVRSRSISKRGSASLRRTLFLVMGVLLQCAPMDEPVYQFMNKKRSEGKPYRVYMMASANKFLRIYYASVKAYLDSLEHD

SEQ ID NO: 185997 - protein, 333 aa, unidentified
MLGEAGSVVLEQRVSTSPKAMKEVFGGMPRCRIALETGMHSPWVSRLLSEGGHEVIVAHARSVRLIGESRKKDDRMDARTLARLARIDPQLLCPVKHRSAKAQADLTVIRVRAGLVRARTALVNTARGLAKSYGERLRGSNVRNMNPEKAEGLSPELQRALEPLLAGIESLSERILECNERIEQLAQESYPQVARLKQVKGVGTLIALTYLLTLEDAHRFRKSRDVGCYLGLQPGRRNSGQSEPQMHISKEGDPYLRTLLVQGAHHILGPFGADRDLRRWGLKLAERGGKNGKKRAVIATARKLAVLLHRLWVRGEAYEPLRNSQQRALPAAA

SEQ ID NO: 185998 - protein, 340 aa, unidentified
MGEVTTIGLDLAKHVFQVHGVDAEGATVLRKQLRRAQVLAFFSRLPPCLVGLEACATAHYWARELRALGHEVRLMPAQYVKAYIKRNKHDAADAEAICEAVGRPTMRFVPVKTADQQAAVLLHRGRERLVRQRTGLVNALRGHLAEFGVIAPQGLRNVGKLIAIVRDEGDARLPDLARQVLQVLAAQIEQLEAAVAAIEKQLMAWHKSNPVSQRLASVPGIGPIIATALAATVVEPSGFRSGREFAAWLGLVPRQNSSGGKHRLGGISKRGNQYLRRLLINGASANLLRSKATKADPWVIGLRRRRPPLVVAVALANKTARIAWAVMHRHENYQRVAAAA

SEQ ID NO: 185999 - protein, 316 aa, unidentified
MKKSVVQNINVGVDVGKDCLDIHIRPLEEYLKVSNDKKGIGEALKRLRQLTVERIVIEATGRYEMAFVSACAKAALPFSVVNPVHVKRFAGAIGRKAKTDKLDAALIAHFSEVIQPALSTLKPENIQKMADAVARRNQLLEMQTREKNRLQIMPKTVQSSIKAMLTVLKKQIQKMDDELADLIQSCPEYQAKSELVQSMPGIGKVSAAALISYLPELGLMNSKQVAALVGVAPMNKESGRYKGKQVTQGGRHQVRTVLFMAMMSAMQCNAKFKATYERLVAAGKPKKVAIIACVRKMVAILNSMVRDGVMWEEKAA

SEQ ID NO: 186000 - protein, 433 aa, unidentified
MEEVEDEPLFADRVAGLDIAKAGVEVTIRVPGHTAVGRRRQQTRTFGTTRRELLDLAAWLACWEVTKAGMEATGDYWKPVFFLLESQGLDCELYNAGQVKALPGRPKTDRADSIWLAKITERGMIGSSFVPPEPIRRLRTHTRYRRHLTQARTAEKQRVEKLLEDGHLKLSSVISDIHGVSGRDMLDALAAGQRDPKALAQLARGSMRGKIRRLEEALDCSFFTDQHAAVLAMMLAAIDYYSAQIEALTATIEALAEPWLRQLEQLDAIPGIGPICAQDIIAEIGTDMTVFATAPHLVSWARWSPQVKQSAGKRKGSNSTGRGNPYLGAALGEAVIGASRTPSFLGARYRRLARRMPKKKALVATGNSMLTIVHALLADPSMDYHDLGPGYYEQRLHTRRQARNHIRSLERLGYKVTIQAIHPDTGELLAPTG

SEQ ID NO: 186001 - protein, 417 aa, unidentified
MSEYAALVSIDWADQKHAVCLLDQTTGRREQAIVKHTPQALQEWALNLRQRFAGAPIAVCLEQSRGPLIYALLQYDFLVLYPINPASLAKYRQAFSTAGGKDDPSDADYLLDLLEHHRGRLRVWRPDDQKTRTLSLLMEQRRRLVNDRTRLSNRLTALLKGYFPQVLDWFEDIRTQLVCDFLERWPELSLLQRARPAIINQFLRSHHSTSKATNTRRLAEIKSAVPLTTDAAVMTASVINVKVLVAQMKTVIAAISEYDRHIEALCLTHEDYQLFAALPGAGLIHAARLTAALGSDRSRWQSADELLRFSGIAPIIERSGKQFRIRWRYFCPKFFRQTFHEFAAQSIQDSFWARAYYYSQRAKGKDHHAAVRALAFKWIRVIWKCWQTRTPYNEVVYLETLRKKGSSLLKFAADYQP

SEQ ID NO: 186002 - protein, 425 aa, unidentified
MNFTQNEKISQVTNETLVVGIDISSETHYVRAFDWRGMELTGTFKFESTSYGFKQMMEWLEGTCKSNNKTKIIIGAEPTGHYWFTLAEYLKENSIKLVFVNPMHVKRTKELDDNHPSKNDRKDPKVIAKLVIEGRYLIPYIPEDIYAELRVANESRMRITSEIVAIKNRIQRWFAIYFPEYTHVFSSWEGDSSIEVLRNCPLPADALALGTDAINKLWREKKIRAVGIKRAKALVETARTSVGVKNGTNAARLEMSMLIEDYLIKKEQEARIIEVLETLCIQVPNSEKLLSIKGIGILTVASFFGEVGDIRRFNSPKQIQKLAGLAIANNESGKHRGKAGISKRGRKLLRCILFQAVTSLVIHSPEFRHLHRYYTTRSNNPLKGKQSKVALCCKLIRVFYAILTKGVEYDSEKLMSDIVRPELSA

SEQ ID NO: 186003 - protein, 404 aa, unidentified
MKGPIVSIDVSKGKSDYQAFKNQNVKYTGSRSIKHTKEGFDEIVNLVREMEKKLETEVCVVYEATGVYHRVLKKVLEDNNIKQFIINPLLSAKTRKNDSLRSPKTDKLDPKSIAKTYYSHSLHNSHKPETIYHELRELSRYYEDILVHIRKDKVAFRAQLDVVFPGYDTLYDDLYGPVALAVIEKYPHPEMLQKKKINTVSKVIQNKTCHRQAVSDTMADKAIEYSKTIYSGCDKDDIEVLILQRFIKKLNEDMAEAERTIGEIIKLAQELPDFNIIKSIPGIGDNLAARIIAELGDMTRFKKKNELVAFAGLDPRISESGKNDGDHMHITKKGNKRLRCLLYLAVTCSIRLKRDDNSIKDFYIKKKQQSNPMCSKAAKTACASKLVRIIYSMCKTGELYQYNK

SEQ ID NO: 186004 - protein, 460 aa, unidentified
MGKQHKAPQQQQQVLNLSIIYPGAAGIDVGSTSMYVAYQNADNIQTVAVFDAFTADLHALAQQLKQAGVTHVAMEATGNYWMALFDVLESYQLQVTLVNARHYKNVAGQKTDVHDSQWLQQLHAHGLLRASHITEEQYRELRTYVHERNILQHQKSDTLNRIHKVLTSMNIKWQHVISDIEGVEGMKVVRRIAQGITCAEQLLEGVNLKRLKASKEVLIKSLEGLFKPHYQQVLRQHLECYDFFKEQMLEYEQFIEAALQQLLAGRQHNDEQSQPPPVAIKAKTRKARKNQYHFNLKEYLHQLAGVDLTEIDGLDESSVLMIIAVVGLNMHKWPTAEHFASWLNLAARPKKSGGKVLGHQKRFTSNAATMAFRMAAQSLHSSKSALGSLYRRLASRKSSAKAIKAVARRLAIIFYNMVKKQTAYDPKIVVADEQQLRARKIARLKKEAEKLGCRVESLVA

SEQ ID NO: 186005 - protein, 367 aa, unidentified
MNKSSKAFIGMDVHKESIDWAVAELDGEVRAFGRTGGDLSAVARTVRKLVASGKTLVFVYEAGPCGYGIYRWLQAQGHECWVVSPSLTPKKPGERIKTDTRDAVKLARLARAGELTTIYVPEAADEALRDLVRACEDAVAMQRQVRHRLQALLLRNDIRYVGKTAWTPAHQRWIARLKLPLATQQIAFEEYVQAVQEATTRIDRLTAAIRAAVSTWRWQPVVAALQAMRGVQLIHAVRIVAELGDLTRFGAPRAMMGFLGLVPTEHSSGAKRAQGAITKAGNSSARRAMVEAAWAYQHPARITPIIARRQGGVPKSVLDIAWKAQLRLCARFRKLAVRGVNRNKLVVAVARELAGFVWAIGQQVRPV

SEQ ID NO: 186006 - protein, 351 aa, unidentified
MIIVGVDYHPSVQQVAFLDTETGETGERRLNHSDGEAERFYRDLQRRQVKVRVGIEATGHARWFERLLAELKFELWIGDPARIKAARVRKQKTDRQDAQLLLRLLVEGRFPQIWVPSPENRDLRQLIWHRHRLVQMRTRAMNQIQAAAMNEGVRRKKTLWSKTGRRQLEALPLAPWATRRRQDLLELVDRLNTTIGELTAAAEQEARKRPEVLRLMTHPGVGPITALAFVLVLGSPDRFGCGHQIGSYLGLIPCEDSSADRQRLGHITKQGSSLLRFLLAEAAQAAVRWDPDWRRRFVHLAMRRDRRIAKVAMARKLAVSLYWMWRKGFDYPQTLPFGSHAGEPGYVHGVK

SEQ ID NO: 186007 - protein, 320 aa, unidentified
MNTIGLDISQKTIDATLHKTDGSTYYTKVGNNREGFQSLKDWIKVNKVRKCVIGMEATGIYYEAAAENLSETHTVYVINPLKIKDYGKSQFNRTKTDKADSNLIAEYTKRHADKIIPYSKPKNRYLQKLINLKQQLKDHQKQIKNRLHSSDDEMIQAIHQDLIQAYQEKIDQTQTAIEAQIKEQAETDGHYRNLQTIAGIGKDTAAILYAQLTDKNFQTASQFVSYAGLSPQTEQSGTSVNKKGRLSRYGHRRIKRSLYMPALVAYRTGAFPQLVRNLTNAGKPKMVIIVAIMRKLAKLAYYIVKTGKPYDSTRHKVAQA

SEQ ID NO: 186008 - protein, 383 aa, unidentified
MRHGGILIEANDSEGEAMKKHTTINQSLSADLAACTTVAVDLAKRVFQLAGEDALGQVLFENRIKSREAFQAFLHKLPASVTVLVETGPGAQAWARLLQTQGNPVRILPAQHVANHRSGPKNDRNDALAILRAGRDCKISAVPLKSAAALAMQALHRARQGYVRRRTAVGNQMRGLLLEHGVAMAQGEMAFSQLVPRILEDATQPLPDLLRELIAELLGEWSQLGERINVLTGRLEAAAKENETAKRLMTVRGVGPIIATALLAKQTKPERFANARLFAAYFGLVPSQHSSAEKVRLGKMSKHGDAYLRSLTIQGAHAVLRQLRPDSQQPDDQRLQRWISRLGRKEAAVRLANRNLRILWVLLQNDQTYRRQPGAEQEAAMSH

SEQ ID NO: 186009 - protein, 402 aa, unidentified
MAYCGGLDWGSAEHGICIIEHDSGKIIARFPVPHDAAGIADLMRRLARFAPPADLPIAIERPSGLIVDALVAAGHPVVPIHPNVVKASRPRSRAAGGKSDRGDPYLLADLLRTDGHRFRRLMPCSDEIKALRALVRGRDALVAQRLVLANQLRALLDSFWPGAVAIFADIDSPIALAFVQRYPTPDSAARLGEKRIKAFMAQHRYCGRRSASELLARLRRAPPGLAGDSEADAKGELVRAWAAVLTALVAQIAELTSRIEHTIGELPDGKIVTSFPRAGRICAAQILAELGDVRERFQAEDQLAAEAGVCPVTHQSGKSRGVVFRWACNHRLRAAVTCFADNSRHSSPWASDIYQRAKGRGCDHPHAVRILARAWVRVLWRAWQDRTLYDPARHRGSRASAA

SEQ ID NO: 186010 - protein, 419 aa, unidentified
MKEFNPAQHRVETASALERVRAGESLGAEPYAAYVGLDVHKETIAVAVAEPGRGEPLYHGEIANKPKSIEKLIAKLSAAYEGGLLLFCYEAGPCGYVLYRQILASGHDCQVVAPSRIPKAPGERIKNDRRDALKLARLLRAGDLTPVWVPDQEQERMRDLSRARDDMKAQERKARQQLNAFLLRHGYHWPRGKSRWTPAHENWLAGLKMEHPWQQVVLEEYIAAERAAGERVAQLTDHLMRALPEWSLAPVVDSLIALRGIDKLAAIVLLAELGDISRFESPKQLMGFLGLVPSEHSSGGRRRQGAITLTGNGHARRMLVESAWSYRFPARQTKHLKGKAINASQAAKQIAWKAQTRLCGRYRTLTRAGKNAKLVCVAIARELAGFIWDIVRQEMPRRLSRGSEVLDATPAPTRPSMGN

SEQ ID NO: 186011 - protein, 423 aa, unidentified
MTKLTSTPAGAVLVAIDMSKSRQEVLIERPEGGRRRRMTVMATRQDYDGFAEQLAAIGRPIIVGFEATGNYHRTLAHRLLTAGFELRLISSVALARTREALHNGWDKNDSKDAQVILHMLRIGATQRYVDPLVAGINDLQELSKTHETISRMKTQTWHRILTHYLPLYFPEIARFAGNSRSDWFLALIERFPTPATITALDREAFSAAAWPLIGRKVSKARLINDIYETASASTALPVPENSAAITMFRMVIAQGRSLIHQRDEIERLAHARLADDVDYQLLRNIPGIGPINALTILAEAGDLRRFNHHRQFLKFCGLDLATCQSGTFRGRTKLSKYGNARLRRTFWMAAQVAARQRDNSFRNKLGRYVAGHADDADRRRKAMTALTAKMARVAHAVIKTGTEYRPFLERSDARWKDPSLQVP

SEQ ID NO: 186012 - protein, 343 aa, unidentified
MDYYAGIDVSLELSSVCILDGSGQIVREAKVASEPEALVTFLASLSLPLTRVGLEAGPLSQWLHAGLVQAGFEVVLLETRHVKAALSAMIVKTDRRDARGIAQLLRMGWFRPVHCKSPPAQEVRALLMARKQLQAKMRDVELSLRGLLRGFGLKVGEISKGQFAARVRTLTAGHEMLETIAAAMLRARDALQTEFARLHRAMLAIARTNDVCRRLMSVPGVGALIAVTFTSAVDHPERFSHSRAVGAHFGLTPKKYQSGETDITGAVSRVGDPMVRTALYEGAHILLTRAVRFSALKRWALEVAKRRGMRRAKVALARKLAVILHRMWIDGTTFRWNREGVAA

SEQ ID NO: 186013 - protein, 343 aa, unidentified
MNQIIRIGMDTSKHFFQLHGVDAAERPVLRRKLRRNEVLAFFAKLPPTVIGMEACGAAHYWARELRKLGHEVKLMAPQHVKAYVKRNKNDGRDAEALCEAMSRPTMQFVPVKTEEQQAALMLAGVRQQLIARRTQLSNAIRGYAAEFGLTAAKGLDKIEPLLARIALDESLPALARELLAMQGHDYARLQAELKAIEARLMAWHRANADSRRLAQIPGIGLIGATTLVMKTPDPRAFASGRHFAAWLGLTPKDHSTAGKTRLGKITRAGDEMLRSLLVAGATAVIQQVRRGRGRPSPWLVALLARKPPKLAAVALANKIARIAWKLMTTGESYDGARMHGAAA

SEQ ID NO: 186014 - protein, 353 aa, unidentified
MPIVAEKYQFVIGVDTHAASHAFAVVDAVHGSVISQEEFPATTAGVSRAAAWVARRSAQFDAVLVVVEGIGSYGAGVARVFGRVGYRVVEAGAQPRGNRRGKGKTDALDAVRIARSVLGMDSDSLRVPRADGTRNALRILVIAREMITRESTAGINALTSLLRTEELGVDARKALTMSQLRQVAAWRARTDEPIDVAVARAEATRLARKVLELREQAKTNEHRLRDLVLNVAPDLLDMRGVGPVTAAVVIVAWSHRGRVRSEAAFAALAGTCPIPASSGNTQRHRLNRGGDRRLNWAIHTITMVRMGRDSSTKAYVARRIAEGKTKREAMRCVKRYVTKHLHRTLQNSPALAT

SEQ ID NO: 186015 - protein, 313 aa, unidentified
MKQYIGIDVSKDRLDVAVGDAGQCFSVENTEKGIEGLVKQMKALEPELIVMEATGGYERLCAAMLAAAGLALSVVNPRQVRDFARSKGILAKTDRLDARVLALFGEAIKPEARALPDAQQQLLDELMLRRRQIVAGLVAEKNRLGMAHTAAVKKSLRKAIAFYERLLADVDRQIGEHIERSPLWRAREDLLRSFKGVGPVSSRTLIGDLPELGSLDRKRIAALVGVAPMACDSGKRKRTRAIFGGRGQVRAALYMVAVTAIRANAPIRRFYQRLRAAGKPAKVAIVACMRKILIILNAMVKTHTRWNEHLTVS

SEQ ID NO: 186016 - protein, 408 aa, unidentified
MARKRPLSTLDTSIAYEAVGLDLAKEDTAIAAFGPDHEGPYLIDRMPYDKLYELLADMAPTLVAMEPCSGAHQIAEQIQELGHEVMMISGRHVQAWVKDHCNGQKTDLNDAFAILNLAYDRWLTPIRGKTREECRLLALQSSYRQLKGQRTKTMVHVEATLHAWGFPIRTGSFNQKALHELIDANREAFGDEVVETLHLMINRVHDLDHDIATVLKLLTEATQRDPRASLLRSIPGFGVLTTSRWCAVVGDIARFDTPKQTMAFIGLVPNNRITGHHTETSSGREARGQGKMSKRGDKMLRSLCILGAGALCLMVRNDRLPDCPFVASIKERLASPRPWFKVLVYVAAKLVRIATALLKYGETFSFEKAGISKAVLKQWELEQAKAAKALTARKRIVRPQARLIHEMP

SEQ ID NO: 186017 - protein, 420 aa, unidentified
MKVVYPICCGVDVHKSFLVATIIKTTSGIEPSYQKKRFSSFNNSILQFKEWLTENKCRDVCMESTGKYWVPVFNLLEDEMNVTIANPKWVKAVKGNKDDTKDSKWIGDLFRLGLVPGSYIPCKPIRILREFTRYRYKLTSCRTSEKNRYQNALTVCNVALDSVVSDIFGKSATSVIDYLIEQSGNSINHEEIASRLLRSLKKKSDSVIESIEGYQMTDSQKYRMRLIRAHLDYITSTINDIDTMLNSLIAPYENAVQLLCTIPGVDRNSAITVISEIGTDMTPFSNSKRLCCWAGLTPGNNESAGKKKSVRITRAGVYLKPALVQVAHAAVKSDKWPYYKQKYERIMKRRGKKRAIIAIARMILTAVYQMLSTGEAWNPSDLYKTDMPNPLKEKQKEKAIRQAKKLLISEGIISESQLAS

SEQ ID NO: 186018 - protein, 444 aa, unidentified
MSSKSKKQRLKIIHSDCAGVDIGSKEHWVAVDPDKAKDPVRCFSSFTDSLNEMADWLESLGVKIVAMEATGVYWIPLYELLDRRGFDVQLVNSRSTRQVTGRKSDVLDCQWIRQLMSYGLLKGAFRPADSVCSLRAIVRQLATKVQDQSRCIEHMQKALTQMNIQLNNVVSNLMGKTGTAILRAIVSGERDPQQLALLRDNRLRADKETVARSLYGNWREEHVFALTQALEHYDFLSQQIKQCNQCIEQQLVDLPKLADNPSEPGKALRNPHRSKCQQMALHQALYGMMGVDLTAIPTIGIETVLIIASEVGPDLSRFPDEANFCSWLNVVPPTCISGGKRLKGQKPHVFNRAGQALRQAALNARNSQSFIGASHRARLARMDGASAIKATAHQLARLIYAMLTKGQPYVEKGIKAFEARTQDRQLRALQKKAQKLGLELVEAA

SEQ ID NO: 186019 - protein, 423 aa, unidentified
MKPAIEQSFTALVGIDWSDRKHDFCLQAAGSSQREFGVLEHSPEAITLWAKALYRRFGGPIAVCLEIAKGPLVYALQRHEFIVLFPVNPATLAKYREAFVPSRAKDDPTDAQIALELLLRHRDKLQPLQPQSADMRTLATLVEQRRLLVGDKTRITNRLGGTLKEYFPQALDWFEDRDTVMFCDFLQRWPSLKHAKRARQATLRAFFSAHNLRRASLIEERIHGIRSATALTDDPAVLGPHQLLVQALVVQLRVTLQAIDDFDAEITAVAKRLPDYALFAALPGAGSILAPRLLVAFGEQRERYASAAQLQQYAGVAPVLERSGNKCWVHWRLACPTFLRQTFVEWAGSTIPRSFWASVYYHRQRAKGSSHQAAVRALAYKWIRILYRCWQTRTPYDESVYLLALKHRGSPLIAAMATTPQNT

SEQ ID NO: 186020 - protein, 326 aa, unidentified
MQYILGIDVSKDKLDLVLITERGKFHKVISNNSEGYKALDKWLVSRQVEQVHACLEATGQYGEEVAEHLYKQGHAVSVVNPARIKHYGESKLHRNKTDKADADLIAEFCLKENPTLWQPLSPEIKHLRALVRRLEDLKTNCQQEKNRLSSGEKDEWVVKDLSTHVAYLETCIAATEKEIQNFIKQTPNLKKQQDLLNSIPGIADKTSARLLAEIGDISTFESASQLAAYAGLNPKGFSSGSSVHKKTRISKQGRRELRSCLYMPGIVASNHNPVVRSLKVRLHDRRLANKAIIVAAMRKLLHIVYGVLKTQMPFDAEYHKQFNFSA

SEQ ID NO: 186021 - protein, 354 aa, unidentified
MINLSDKLAEESEMNIKRIGIDLAKQVFQLHGVDSQEKAVLRKQLRRVQMLDYFQKLPPCLIGMEACSSAHYWGRELQKLGHTVKLMAPQFVKPYVKSNKNDANDAEAICEAVARPTMRFVAIKTIAQQDIQALHRIRSELVQQRTAKVNQIRGLLAEYGLVVGQRVDTLRNALPLILEDAENGLTIDFRALLEGLQQDLTTLNERVGDLDKKIKTLASSNAEAKRLQQIPGIGPITATALICAIGDGKQFKRGRDMAAWLGLTPRQHSSGGKDRLLGISKRGDAYLRTLLIHGARAVLKVVGNKDDSRSRWLQNLCSRRNKNIAAVALANKNARIVWALLTQKTDFLPEGKPA

SEQ ID NO: 186022 - protein, 355 aa, unidentified
MSSEKYIGLDVHQATISVAVMDSQGKIIMESILETKASTLLEFLAGLRGSLFVTFEEGTWAAWLYDLLKPHVAEVLVCNPRKLPLLKQGNKSDKIDARKLAERLRLHDLKPVYHGQNGVRMLRELARSYLTVVKDLSRVMNRLKALYRSWAIPCAGRDVYYTRHRRQWLEKIPEAGTRRRAEQLYQQLDMLQHLRQQARRELLAESRKHAITAKLRQIPSLGPIRSALAVALIQTPHRFRSKRQLWTYSGLGLETRDSGEYHYVDGQVRRRKKQATIRGLNKDYNHDLKGLFKAAAIRASVQPGPFQEFYQRSLAKGIEPTMVRLTLARKIAAIALTLWKKGEDFDVNKVNSQAA

SEQ ID NO: 186023 - protein, 429 aa, unidentified
MARFLPRSAATTSKNRDIAESDNMKRPPVCYKTRINSILEANTCIPHTNGGPFMTRVIYIGMDVHKDTYSLCSFDSHENYMFSEATIKSETTAVLAYIKTIENRFKDDDVMVVCGYEAGPTGFSLCRELQKKNISCVVMAPSSLPKSTDDKKRKTDKIDARQLALHLAHNTYKSVNVLTPEMETIKELTRTRATALKAQKRAKQILLSFLLRKGMVYPYGNRSKYWTQKFYAWLKTLEFTNDIERYSFEEYLSEVNHQMSRVSRLDDKIAEIAETPLIKDDVKKLCCFSGISILTAVTLISEVEDFNRFEKATYFASYLGLCPGIHASGLSSQNRGITKAGNKHLRCLLIEAAQSMSHSQLCGKKSLRLLARQKDMNPLIVFYADKATERIKRKRNSMIFRGVNPNKATTAAAREMACFIWGMMTNNIA

SEQ ID NO: 186024 - protein, 359 aa, unidentified
MLYLGVDQHRKQLTVCVRNEQGDVVLRRQVSTQWERVRAFCSEIRRLAGSEGYVVIVEVCGFNDWFLELLLEYGCRQTILVQPEKQSKRKTDRRDASALSELLWVNRHRLLAGQGVKGLRRIELPTAEDAENRQLTTVRQRLGQLRTRTINRIKHLLRKHNLEQEQPAKGLDTLRTRKWLKGLALGAMDRLEMDLLLSQWKLWDEQMEQIEAEIRQRQPQHAVATVLATIPGCAAYSSLALGSRIGDIQRFPRPASLANYWGLTPGCRNSGEVTDRLGSITKQGSAMARFILGQLVLHVLRRDARMRAWYGRIKKRRGSKIARVAVMRRLATIIWHMVKHHEPYVIGGPPRRKLAGQAA

SEQ ID NO: 186025 - protein, 356 aa, unidentified
MKKNHTSPPAPQGRVIGLDLHPDVFSAAALAGRDAATAQVEQSWDRLRTAELEKWARKLQPGDVVVLEASGNSFTAVERLRAAGVPAIVLESQRAGQIRKSYCANDRLDAVKLARIYLSGLAQPVWTPDETTRARRETLATYRKAVVTAVRVRNRLKSFLSDHHVRLGNGAQLTRDSGAKAVLAAAPWSSLQRMVLEEMLAELRMAHDRRQRLSAAIAREVAAYPRILQLMRLLGVRHIIAFAIMAVVGDIERFANPRKLVAYLGLTPSVEDSGLTIRGRGALVSAGRGDLRSLLTQAAQNAMNQKASPLHAWGWKLCLRKGHRNIAVTAVARKLTVSIWYLLKACSAPSPRSTTA

SEQ ID NO: 186026 - protein, 339 aa, unidentified
MENITAIGLDLAKNVFQVHGANAQGKKLVVKRLKRSEILSYFATIKPCLVGMEACGGAHQWARQLEQLGHKVKLMPPQFVKAFVQGNKTDARDAAAICEAASRDSVPTVVVRSRESQQTQSLHRVREGWMKQRVATANQIRGLLAEFGYTITPGMRRLYNEVREWQAKSGNELGILSGLIEELLAHLRQLEERISKIDQQILRVYHESSACKLIESVPGVGIMTATAIVGTFGNASMYTTGRKFACALGLTPREHNSGDKHVLLGINKRGNGYIRKLLVHGARSVLRARTGKEKYADDWAVKLAERRGHNKAACALAAKNARRIWAMLQSGEVFRTEYA

SEQ ID NO: 186027 - protein, 327 aa, unidentified
MDILFYTNFIGIDIAKAKFDVAVRLQNGKFKHKVFVNDKQGFNLFYQWLKQFNGQSYCLLEATNVYHMDLADFLYDKGLTVAVINPKSTPNFAKSANLRSKTDKVDAKLLAEFACFNASKLHTYQPKPANERKLLNMMRQLEHLKTKVAQETVRLGMLKDDDCIQSSQELIDYLSLKIKELESKIALLVRQDRALNENFKLLKSIPAIGDVTAYWLLAYLASCGFKNGKEAATFFGLTPMLRQSGSSVYAVCGISKIGHSDIRKALYAPAMNFAFGRWKDDVYKPFVERLVANGKAKKVVIVALMRKLVTIAFAVLKTQKYFDPALI

SEQ ID NO: 186028 - protein, 400 aa, unidentified
MLSVGIDVSKEKSTVCGMRHLGEIVFGPFEIAHTESDLSELARMIVRLDDDTRVVMEATGIYHLPVATFLREQGLFVSIINPYEMKVYRSQDIRKVKTDKRDSMVIANYGVDKWINLREFTPQEDVYAELRLLGRQYRFYMESRIEQLLNLTHLLDYTMPGLKSCFSGWSEYSGKDKLCDFVEEYWHYDNIIKFSESKFVERYQKWTKKKGYQFSETKVVQIYRLAKEGIPTVPSNAPSTKMLLLEATKALREINSALFAILTRMKELAKTLPEYPVVRAMSGVGDVLAVKLMAEIGDVRKYHSSKSLVAYAGIDPPPYESGKLIGTNRHITKRGSSTLRKIGYEVMRCVKANGRSEDDPAVYDFMLKKESEGKAKKAAKIAALNKFLRIYYARVLEVYA

SEQ ID NO: 186029 - protein, 463 aa, unidentified
MAKKNTTIGKSKSKARKNVLERINPNAAGIDIGANFHLVAIPEDRAEENIRKFGPFTSDLHRLADWLSEHRIESVVMESTGVYWIPVFQILEQRGFEVKLVNAAHVKNLPGRKSDVSDCQWLQQLHTFGLLNGSFRPKDQVCILRTFMRLRDILVKDCSSHISRMQKALTEMNVQIHRVLSDITGYTGMAIIRAIVAGERDGLKLARMKHPQVKASTEQIVKALEGDYRPEHLYALQTAIELYDAYQLKITECENKIEQQLKHFETKLDLGQVLEQSGALKARSAKVRQELHRQAYLASVCGVDLTRLPGLSTLAVEVIISETGLDMNCWKSEKHFCSWLKVCPDNRISGGKLLSSRPRKTKNRAAGMFRLAAQGAMQSKTAVGAFIRRLRARLGAPTAINAGANKLARLFYRMLKFGAAYVEQGQTYYEQRYKERVLHNLSKRAKELGFQLTPFQPATVSVS

SEQ ID NO: 186030 - protein, 342 aa, unidentified
MEYYAGIDVSLECSSVCVVDASGKIVRETKVPSEPKALIAWFGSLGFGLERIGLEAGPLSQWLFAAMKKAGLAVELLETRHVRKAFEAMPVKSDRNDARGIAQLMRLGWFRPVHCKSMSAQETRSLLTARKLVQSKLLDVENSLRGILRGFGLKVGKTTGQTFAGRIEELVAGHPHLQTIAKALLAVRAVLRTEFAAFEKQTRRMVRSDTKARLLASVPGVGPIVALTYASAIDDPARFKSSKQTGAHFGLTPKKHQSGETNYTGRISKLGDASVRTALYEAANVMLTKPVKGCSRLKCWAMRIKKRAGMSKAKVALARRLAVIMHRMLADGTPFNPAAAAA

SEQ ID NO: 186031 - protein, 347 aa, unidentified
MVIIGCDFHPGFQQIAMMDMDTGEVRQQRLVHREEAQRFYAGLRGQEVMVGLEACGYTQWFEQMLEEMGHRYQIGDAGAIRASYVRKQKTDRRDAGHILRLLLEGRFPALWVPRGAERDSRQLIVHRHKRVQMCTRVKNQLHALALNQGLRLGWKLWSREGLEQLRALPLLPHATARRADLLKQLEEMNAEIDRLDRAVRQEAAARPAAVRLMSHPGVGPVTALAFVLTIGDARRFEKSRQVASYLGLIPSEHSSGGKQRLGHISKQGNSLMRFLLVEAGQSAVRKDVELRRFYMRVQHRHSTGVAKVAVARKLALRLYWMLRRTMEEAQFQAGPYAGKPESFCGRG

SEQ ID NO: 186032 - protein, 356 aa, unidentified
MEQVMNIIAADLGKYNSMFCHYDSESQEQSTAKAATDRGYFRSVFKNHRPDLVVVEACGPSGWVSDLCEELKIPILVCSTHEDAWLFKNVKRKTDKDDAIKLAELAAIGRLKPTHVPKKEVRERKRLIKYRKSLVGRINKIKNTIRAIFANQGIKISSGAKTWHTGRVELEEQRKSLADCEIHELWRGELGLELTQLDAVTDHQKQVDGRLEAIAKSDAHTQRVMQINGVGRVTAEAIVTYIDDPHRFKNANQVGAYVGMVPRQYQSGNTDRFGRITKRGPGLLRTLLVECAWCSLQYNTWARQTYDRIHHDTQARKKKAAIALARKILIVAWAMMRDETDYDPERNIKQPDTSST

SEQ ID NO: 186033 - protein, 340 aa, unidentified
MGTTTYGLDVAKRVFQMYWIDARTGEAINRQFRRDEIIRFLARRPPGRVALEASGSGHWWARKINSLGHEAVLLHAKFIRPFVQTNKTDAADARAIWTAVHQPQMRLVAPKTEEQQAVLAQHRMRALLIKFRTMQVNQLRGLLYEFGVTFRGGRQAGLKEIRARMPELESTVPAAMFVCLQDQLRRIDGVQQDIEQLEARIGVWHKQEAACRAIAAVPGIGTLTASALIATIGDARTFKSGRELSSFLGLVPRQNGTGGKVRLGSISKRGDPYLRTLLIHGARSVIYHTRAPTKWQRDIQSRRPPNVVAVALANKMARTAWAILAHDRPYRTDYGCARAA

SEQ ID NO: 186034 - protein, 361 aa, unidentified
MLKHIFVGIDLGDKNSVGRIAVDREKTERFGFVNNRRGRARLFSEAKRRAQEAGGAKIVMAYEASSCGFVLHEEAEAMGICCWVLAPTKMEKSVEQRQHKNDDRDADDVVEKLRGHVLAGNRLPTVWVPDQQTRDDRELVRARVELGEKQTQVKSQIQMLLKRHGVEKASGLGAGWTVRYRRWLQALTESEPLGRGGRQTLGSLLRQLSFIEGEIERMQQPVERLADEPRHKPIVDELRQECGVGLLTAMVYRTEIGYAGRFRRGRQTGKYVGLTPTSYESGEQNDRKGHISRQGPPRLRKMLCQASWSQVCHDVSAKRIYQQLVSRNPKKKKIAIVAVMRRLAVRLWHRMRKVEVEMGLA

SEQ ID NO: 186035 - protein, 375 aa, unidentified
MKEKVRFLGLDVHAETIAVAVAEHDGEVRSLGTIANREESIRKLVKKLGPVEQLRACYEAGPTGYVLYWQLTQLGVECAVVAPTLVPVKAGDRVKTDRRDAEKLARSHRSDDLTAVWVPDEGSEALRDLVRAREAAKQDQLWARHRLSKFLLRTGRRPAMGLKAWTERYLAWVQQIQFSQPAQEFTLLDYLHEVQHMDERVQRLEQAITEAVKLASSQVQEVIRGLQALRGVAHLSAVTIAAELGNISRFESARKLMGYSGAVPSEDSSGQRQRRGNITKTGNAHLRRIAIESAWSYRFRPAIGPRLRQRQEGVPEEIKEIAWKAQIRLHKRYLKLTAAGKDKKKIITAVGRELLGFVWAIGIKAETAGKLQMAA

SEQ ID NO: 186036 - protein, 436 aa, unidentified
MPGCEQKCEQAPLASRQPDNDLDVRLRHAYPSRPYEGSALRRSDAGLAGTPRIDVRGLGVGVVPAPTPQLWEVPTMSESMALVGLDVHKSQTVAAVLDPVSGELRVERLRGEPERVVPVFLEELERPVEAVYEAGPTGFVLARVAEQRGLDIRVVAPGSIPRAPGDRVKTDRRDAKRLVRLFAAGELRFAFVPSEVDERFRDLVRCIDDVRRDLMRARHRLSKFLLRRGVRFAGKAWTQQHERWLCTLHFEDPLSQATFVDYQCAVQGLAQRRKTLTGVLEAAVPDSSHAETVSRLRCFRSIDTLTAAGLCAEVGDFTRFPKPALLAGFLGIVPSEYTSDEKRTQGHITKAGPSNARRLLVEAAHNCRHRPAVGENLKARQSGQDPRVVRIAWRCQQRLHQRWMHLAGKRGKPAGTVAVACARELAAFCWEAATLD

SEQ ID NO: 186037 - protein, 459 aa, unidentified
MNRKQRRELTRKIQSQDLSLEVVHPDAAGIDIGNESHYVAVPSTRDSQPVQRFGCTTGELKAMAEWLKQCRIRTVAMQSTGVYWVAVYDILEQAGFEVYLVNARDTKNLPGRKSDVQESQWLMKLHTYGLLRNSFRPSQEIRMMRTYWRQRNDLVQSAGRHIQRIQKALTQMNLQLANVLSDVSGVTGPAIIKSILRGERDPQKLAALRDLRVKASEEQIAESLEGNWQPDLLFVLKQEQDGYEFCQKQIAECDHQLSQYLQQRKDRSQGAPLPEEERKGRRRKKKGNTPQFDLREGLFRMSGTDLTRIDGIDVMTATTVISEAGWDMSKWQTEDHFVSWLRLCPDNRISGDRIIGKGRLPTNNRVTIALKIAANGLRLSNTYLGAQFRRLRTKLGDPIAIKAMAAKLARLVYRMLRYGMKYVDQGALFYQAQHRQLQIKQLKWKAIKLGFRVVQADAA

SEQ ID NO: 186038 - protein, 399 aa, unidentified
MYYCGIDIAKRNHEASVIDAEGKPLLESITVTNTQEGCEKLFSLFARLSIEKDNVIIGMEATGHYWLSVYEYLTEQGCDVRVINPIQSEAFRKMYIRQTKNDSKDSFIIAQVMRFGQYSETMLSDENLVAMRQLTRFRFALVDNCGDCKRRIIALLDQVFPEYEKLFSDTFGKTSKELLLQCPTPEDMLTVSTRKLTNLLNKASRGRFGEEKAKEIRSAAAGSFGVGFAKNAFAFQIRQLIEQLMFSENQIEELEEQISLLLHQTNQVITTISGIGDTLGAVIISEIGDIHRFDAPGKLVAFAGLDVKVTQAGEFIGTKNKISKRGSPYLRRAIWLAASRAAFCDPILAEYYQSLKARGKHHSTAIGAVARKMCNIIFTILKENRPYEATPPKKRSVEM

SEQ ID NO: 186039 - protein, 445 aa, unidentified
MGQRTIGIDLAIRGDHVARIFDDGRPHAKPIRFRLTSESLSSLVARLRERLPADSTITAVMEPTGMSWFPVARWLERAGIKAIRVKGQRVRALRRYLSEHTKTDAADAYVLGAIPWFGGVPVDPVYVPNADRHALQRLTRQRERLEDEVSTIKRRLIDLVRWACPAIEAVLPDFRTNLALAVLHDLLNPMTVIKARRTTLLGFIAKHASGNHPHSGPFAHKLVDGLKAAAMETRRLHGDAVNFEHLQLEAAIEIDRMRLLESQLGSLGREIERLYGKLHPSDALRTIPGIGHALAPLVLGVLHEARRFAGLHQLRGFCGLFPRTNSSGGADQPGQSITQSGNNRIKRALYLAADAARRIDPGLAEVYWRLMVRKGHHHKQALCGVATRLVNRIGKVLRTGEPYELRDTTGKPITTAEGRAIIAERFSIPVEIRNARRRHRAESLS

SEQ ID NO: 186040 - protein, 350 aa, unidentified
MVVVGADVHKRTHTFVAVDEVGRKLGEKIVKATTQGHAEAVMWARERFGAPLVWAIEDCRHLSARLERDLLSAGQQVVRIPPKLMAQTRASARTRGKSDPIDALAVARGFLREPDLPIASHDEVSRELKLLVDRREVLVAQRTATINRLRWRVHELDPERAPKTASLDRTKHRQILGAWLITVSGLVAELACEELADITRLTEQIDALAKRIGERVRAVAPALLAMPGCGDLTAAKLVGETAGVTRFKSEAAFARHSGVAPIPVWSGNTAGRVRMTRSGNRQLNAALHRIAITQIRLNGVGQTYYRKRLTAGDSNPEALRCLKRRLARIVFHHLHTDHQNRIQPCQPAAA

SEQ ID NO: 186041 - protein, 346 aa, unidentified
MEHYAGIDVSLELSSVCVVDAQGKIVRETKVASEPEALVAFFASLGFAVKRIGLEAGPLSAWLHAGLKRAGFDTVLLETRHVKAALSAMMVKTDRKDARGLAQLIRMGWFRPVHAKSMGSQEVRALLVARKQLLGRLIDVELSIRGILRGFGLKVGVVTRKGFEGRIRELVTGHITLERIAGAMLSARATLKVEYEKLHKIVLTIVREDAVCRRLMTVPSVGPIVAITYKSAMDDPNRIAKSKAAGALFGLTPKKYQSGEKDVTGGITRTGDEMVRTALYEAANVLLARITRFSKLKRWGMDVAKRRGSKRAKVALARKIAVILHRMWVDGTTYRWTNAHPTAVQV

SEQ ID NO: 186042 - protein, 501 aa, unidentified
MSDRKPRAPEVRNPPRPHPAHPTTAAQVQAASDLRRAARRAEQARRDAQECAKLTALPVRHEHAAGIDVGDASHWVCVESTPDGSDTVREFPAHTPGLRQLVAWLRQCAVTTVALEATGVYAHVLFLTLLEEGFTVVMAPPQFARQIKGRPKTDKRDCQWIQRLHKHGLLPAVFQPDEATQTLRDYVRQRANLVRLSGQHIQRMQKALELMNLKLTKVLGDVTGVTGLKIIRAILGGQRDPQQLAKLRDRRCKHMADQIAMALDGRWRPEHLTELHCNLALWEKYREVIGELDAVIAEQLRAMRRQTELPPLPPKPRLRGRKPHDPGFDVRTALYYATGVDLTAIEGIDEVHALTLVSELGTDFSKWPTVKHFTCWLGLCPNWQKTGGKVKSSQTRRGKNRAAHALRLAAWCLMRSHSYLGAYLRRQRSRLGAAKAITALAHKLARIVYNLVRYGLAYVQQTEAAYAEQVRERLEKQLRRRARELGYELHKIDPQAAPAVQ

SEQ ID NO: 186043 - protein, 343 aa, unidentified
MSVIIGVDPHKATHTAVAIDRSESEVARARVRATRKQVPQLLRWAEPLGERAWAIESAGGLGYLLSQQLVAAGETVLDVPSTLASRIRVLGTGRSDKNDPNDALSVAIAALRTPVLREVAAADHAEVLRLLAKRNIDIGNHRTRVVCRLHNLLMELAPGGIAKELNASDAVAFLDRIEPASPVEAARRDQAAELLIDVQRLDEQLKASHRRIRMAITASGTSLTELFGVGPIIACYLIGFTGDISRFANREAYAAYNGTAPVERSSGGRVVHRVSQRGNRRLNHALHLAAICQIRQPSSDGRAYFERKLAEGKTKKDAIRSLKRHISNAVYRQLVIDATRSRR

SEQ ID NO: 186044 - protein, 475 aa, unidentified
MVSASVVHWPGGVGVLFVLSEGRTLVSIQSSDPPRLVRVGIDAAVVAQHEVCIRSTDAAGRVEVDRFRVPPTLAGLRSLADRLAVTPGVLAVAEPTSMTWLGLSVALADAGCDLSLLGARHAARLRGAISGKSKSDVIDADVLARAGEVFDLHPLRPVDPGQLALRRACVRRGSAVIDGNRFLRRLISLARWAFPDVWNGFRGSLPTAVAVLERWPQLAQLATTRRSALTGVVALHTRGVADVPARVEAIRSAAGAWAAFWDGHLDLDALAFDVSEHLTDMADAKARTERATAAAQRHWRQLYGDDELLLSLPGMGPITGCVVRGFLADGHMFSSAKAAASYAGLNPSTWSSGTVSQPSRAITKEGPAVLRLALFQAANAARRQDPQLAGFYYRLMTQQRHCHTQACVAVARKLMERTWTVLTRGEPYQLRDLDGRPVSHLEAKKLIKEKCTVPDHIRAAARARSAATNRAKLTR

SEQ ID NO: 186045 - protein, 430 aa, unidentified
MTRPQLTPPAGVLVAIDVAKARNEVLIEVPGSGRRRRLSVLNTRAEHDRLIALLSNLGQPVTCGFEATGNYHRPIAWRLLQAGFAVRLISSVGLARTREALHNGWDKNDPKDAQVMLHMIRIGASQVYHDPLAAGINDVQELSKTHDAVSRAKTEVLHRILTHYLPLYFPEVDRFRHNSRSDWFFAFLDRFPTPACITALSKEAFIAAAWDVVGRKVAKAQLLGDIYETAHSSIGLPVPPDAPAVSMFRLVIGEARGLIQQRDAIEATADALLTDSSDYKLLRRIPGIGPINALTILAEAGDLRRFSHHRQFLKFCGLDLATQQSGTFRGQTKLSKYGNARLRRTLWLAGQVAIRQRENGFRDKFERYIARDRHNADLRRKALTAITAKMARVVHAVIKTGADYRPFVEGRCQVGEPSQQSREGVRTTTL

SEQ ID NO: 186046 - protein, 320 aa, unidentified
MMSKIILGIDVSKKTLDAALIFDNRTFCKQFKNSADGFRLLAAWLESLQITRVHACLEATGTYSEAIALFLHERGHWVSIVNPLRIKGYANANMQRNKTDRLDARLIADFCQTQEPEEWQPPSAAVKCLQSLVRRVEVLEEMRQSEENRLANAAPQIKPSIERMITLIKEEILQLERQIKQHIERNPDLKEQSELLQTIPGIGERTANVLLSEIEFDRYSSARAIAAQAGVTPRRKQSGTSLKQTSLSKLGNARIRRALYFPAIVARQHNEIVKEFAKRLKKNGKTPMQIVCAAMRKLLHIAFGVLKHKRAFDSSLAFSA

SEQ ID NO: 186047 - protein, 345 aa, unidentified
MQPMYYIGLDVHKLKISYCVKDGSGKIHAEGSIPATRMDLDRWMKALPQPWSAAMEATMFTGWIYDHLKPQAAALKVAHPLMLRAIAAAKKKNDRIDASKICDCLRCDFLPECYMASTAIRERRRTLRYRNLLVRQMVQTKNKISMLLMEAGVNYSKQRLHKAGYFRELLATNPDINEGLKPLLQLCRETVVRLQKTESALVRSLERDSLLMDRVERLMTIPAVGPITALTWALEVGDVQRLSSIKKAISYCGLCGAEKSSGSTVQRTPLSKQRNKHLQTTLIEAAKMGPRYSVDLAMLYDKEKQKGNANRATLAVARKLVAYLMAVDRGQRNFQVVQTSNCVAA

SEQ ID NO: 186048 - protein, 358 aa, unidentified
MTAYPAETHVIGGVDTHKELHVAAVVDHRDRVLGTESFPTTRHGYRLMLAWMRSFGDLRRVGVECSGSYGAGLLRYLQAADVEVLEVTAPDKHDRRRRGKNDDYDAESAAHAAFAERHTVTPRSRDGMVESLRVLRVCRKTAVQARRIALQMIQMTIVCAPDKIREPLRSMTRMQLIRTLAAWRPDLTAYRQIDEAYRISLKSLARRYLELHDEVSDLDDMIGAIVKDLAPELLAQTAIGLNSAAQLLLTAGDNPDRLKSEASFAALCGVSPVPASSGKTVRHRLNRGGDRAANSAIHIIAIGRLRLDPRSQDYVAKRIAAGNSKLEAIRCLKRYIAREVFGIIMRRHREINQSQIAA

SEQ ID NO: 186049 - protein, 457 aa, unidentified
MARQSSRSTHQRDKLQVVHPNAAAIDIGSRFHVVAIPPDRDPQPVRRFDTFTGDLRRLADWLAEKNIVTIAMESTGVYWIPVYELLEERGFDVILVNAREAKNVPGRKTDINDAQWLQRLHSYGLLRGSFRPTQELASLRALLRQRERLLEYCASHIQHMQKALMEMNLQLHHVVSDITGKTGMRILRAIAQGQHDSVVLASFRDPRCKASEETIRQSLEGHYREEHLLALRQSLSLYDTYHEHVAECDQFIEATLKRLSLATPMPENSLPAARHRDANPNAPAFDVRSALFQVLGIDLTQIHGLGPYLVLKLISECGTDMSRWPTVKHFTSWLALSPGSKISGGKVLSSRTRRTKNRAAALLRLAATTIGRSQTGLGAFYRRLASRLGKAKAVTATARKIAVLFYNVLRYGWVYQDPGADYYEERYHQRIVRNLQRRAQSLGFELSPISDPGQRVS

SEQ ID NO: 186050 - protein, 341 aa, unidentified
MGEVITVGLDLAKQVFQAHGADASGGVVFRKKLRRDQVVPFFAGQPRCLVAMEACASAHHWAREIGALGHETRLIAPAYVKPFVKRQKNDAADAEAICEAAQRPTMRFVQPKGAESQAAVVIFRTRDLLVRQRTQLINALRGHLAEFGYIARKGPGHVTKLAELVRDPASELPAEARSVLLITVETLEVLHGRVRGLDREIEARARRSPLARRLMSIPGVGPILATAMVALAPAPSTFRRGRDFAAWVGLTPRQHSSGGKERLGRTTKMGERSLRRLLIIGAGSSIVAAVRNGARDPWLARMLARKPRMLVMVALANKMARIVWALMAHGGSYRAPIAMAA

SEQ ID NO: 186051 - protein, 351 aa, unidentified
MAGSKRLVIGGVDTHCATHHAAVIDRNGRLIADAEFSATPVGYASMLTWMRSKGKLGQVGVEGTGAYGAGLARYLHQQGIEVLEVPRPDRRLRRQRGKSDPIDAEAAARTVLAGKASGAPKLADGPIEAIRMLRVARNGAVKARTAALNTLRSMVITAPEPLRTQLRSLSSAQLVTACARLRPDPTNLLDPAQSAKQALRSIAQRAQHLDTETRSLRKQLDALIQPAAPATAAIFGLGPDTVSALLVTIGDNPDRLRSEAAFAHLCGVAPIPASSGKTHRHRLHRGGDRASNSALHIATVVRLRYDPRSRAYADRRTTEGLSMPEIIRCQKRYLAREIFHSLRADYAQLST

SEQ ID NO: 186052 - protein, 329 aa, unidentified
MSALVCGLDVHKDSTYATILNPEGKIVNQTRMNNERVLSYLSHFKVERVAMESSNQVAPLYRQLTKEGYSVMVSHPKKTRYIAEAKIKSDRVDSKAIAELARLDALPLAYMPDKETAILRENVRRRAFLVRERVKLRVKIKSLLTYEGLKWPSDHGLFTVKGEAWLHGLNLESVESYLRVLKPLDDEIRLVSRQLKGMADEDEDVKLLMTVPGIGYYSALLVKSEIGDVNRFPFGERLCSYAGLVPSTHASGNTVRHGGITKEGSKWLRWVMVEAAQAHVRMYDTAMTQAYHRIAERRGKRVAVVAVARRLLMCCYSVLKNRRPYQDQI

SEQ ID NO: 186053 - protein, 366 aa, unidentified
MNRVKKSEKKFGVSTREVKSLSMTLKSHHVSEVCMESTGIYGKPIWHLLENDFRLYLVNPQFIKQLPGRKSDVKDAEWIATVLLKNLVRNSFVPDNRIQQLRLYGRRINDLNKDLVRCQQRIDMILQSCNIRISNYVSNINGKSYQKVVQAIMEGERSPEELVKLIHGRTVNKHGREVVRDSLEGNIGHADVDMLKQYMEVLRMYQAQKETCLAEMIKSCKKHYHRAFSLLLSLPGIKEQTAAIIISEIGADMSLFATAAALVSWAGLRPRNDESAGKIKSLKITHGNKYLRKALMEAAWGASRTRRSIFYNKFWRLRQRGKNRNKCTVAIARHLLGIIWSQLSKDEYFDSEYRLDANPRRAREAT

SEQ ID NO: 186054 - protein, 366 aa, unidentified
MREQQNNKRDRTTIGLDLGDRWHRFCVLGESGQVVEEGSVANNRVALSELSSRYPGALVVMEAGCHSPWVSRHLKQAGCEVIVSNPRKTRAIYQHERKSDRRDALMLARIARMEPALLYPVRHGSEEAQQDLLRIKLRDSLVRARVGLINSLRFTLKSLGYTIANPSTERFHKVIQSALPESVVQMIAPSMQAIEELSLRIKLLDWEIRTLAHTKYPETSWLEQIPGVGPITALYFVLKIGDPARFERVRDVGAFIGLCPRRDQSGENDPQLRISKRGDAYLRRLLVSSAQYILGPFAPPSALRQYGLALAAGATARAKKRAVVAVARKLAVLLLTVWKNKSPYQAFPQQREKMRIHDLERLRCIA

SEQ ID NO: 186055 - protein, 361 aa, unidentified
MRIIGCDLHARQQTLAMLDTGTGEVVNRTLMHEGDEVRKFYSDLPRPVLVGIEAIGPMQWFLNLLEELGIDCQVGDAAKIRAAEPRKQKHDRRDAELILKLLVEKRFPAIWRPSKEQLDLRALLLHRHHWVRLRTQIQNALQAIALANGLRRGPSLWSYDGQAKIAFLPLPPHASLRRTALQALYRQMEEEIEKLSAQVAEQVGQRAAARRLMTHPGVGPITALATEVFLGDPQRFADGKALASYVGLIPCEYSSGARQRFGSVTKQGSPLLRFLWNEAGAHAARRDPELQRFYRRKFVQKGLGKARVAVARKLGIRLWIMLRDQIDYQEFCRRGQKQQSGAACAGMLETGYGANRHRPVD

SEQ ID NO: 186056 - protein, 482 aa, unidentified
MAQRKKSTFERLQRSGSWKREDYRELRRRLQAEDPGLEIVHRDAAGIDVGGASHFVAIPPDRDESPVREFGSWTGDLEKMAQWLKQRGIRTVAMQSTGVYWIAVLEVLEKAGLEVYLVNARGTKNLPGRKSDVQECQWLRKLHTYGLLRNSFRPPEQIRAVRTIWRLRDRWVRESGRAVQQMQKALTTMNVQLTHSISDLSGVSGQKIVRAILAGVRDPWELAQLRDCRIAASESEIAHSLQGHWREDVVFELRQVVEAYDFYQQRMRACDEQLARYTAAVESRPIVAKPELGEREEPLPAKRARRAAKKPKKNQPSFDLAAELQRTMGVDLTRIDGLDVMTAQVIFSEIGPDFGAFRSEHHFASWLTLAPQRDLSGGKVIRHVKAMGRQRVADALRMAAQSLSRSDSYLGARYRRLRSRMEGPKAVKAMARYLACLVYRLVTKGQAYVDRGAAHFEQRQQDRELLALHKRATALGLQLVAA

SEQ ID NO: 186057 - protein, 411 aa, unidentified
MENVFPCCAGLDIHQKSVEACVRRLEPTGQLHHQTRHWGTMTRDLLAMADWMAAQGVTHVAMESTGVYWKPIYNILESRFTVLLVNARHLKQVPGHKSDVRDCQWIAQLLQHGLLKGSFIPPRTQRELRDLTRHRTQLVEEKTRTVNRLHKVLEDANIKLASVATDILGVSGRAMLEALMEGQEDPVQLADLAQRQMRGKIPELEKALEGHLTEHHRFLLRLLWKELAQQEELIAELDRKIEEHTRPFANEIERLDAVPGVDRRVAEVVLAEVGSDVKPFPTHSHVASWAGICPGNEESAGKRRRQRITPGNRWLKRTLVQAAWAASHTKNTYLASQYRRLAGRRGKKRALVAVGHSMLVIFYHMLKERTTYKNLGGDFFDRLEPERLTRYYVKRLKDLGHKVTLEPGVAA

SEQ ID NO: 186058 - protein, 323 aa, unidentified
MTHSLIAGVDVSKDRLDVTLYDGERQKSYDIAYTTKAFNNLMKPYQDRQIHIVCEATGNYHLKLGKIAHDRGLKFSSVNPFIIKRYGDICMKRAKTDRVDSRLIAQYGYEYTPAVTEQISQSRIIMQQLLKAIDDLHSTEGDYRNRLEAHLVNPYGIGEVEAVYTHILETVVAKRKLLEEHLAKLVQTKHKESYELLLSIPGIGPIGASVIIAFFGTFEGFDSSKQVISYMGTSPVVKKSGKYQGKTMISRKGNAYLRKKLYMCAVAAKRYNPYCISLYQRLTEKGMATKPALIAVLNKLVRQAFGVLKSNKPFDLNIGKNNT

SEQ ID NO: 186059 - protein, 398 aa, unidentified
MVATLHADITQQVDVTMQTMTRRSESSAVGIHLLVAFELGQQWWKVGFATGFGPRQRTRRIAAGALDVLATEVARAKASYGLPADAPVVSCYEAGRDGFWLHRYLTAQRIQNHVVDSASIEVNRRARRTKTDRVDLGGLLNLLARYLGGDRRCWRVVRVPSMVDEDARQLHRTWETLQADRTRVINRLKATLATQGVQLRITAAFLEQVVGARLWDGSPIPAGARERLTRDWRQLEGIDAQLTEVRTRRAALPVDRQTTTGRYVQGLQTLRAIGPGGAWVLATEIFGWREIRNGRQLGALVGLVPALYQSGETQRDRGITRAGNDHVRRMMVQLAWGWLRWQPSSALAQWYQRRFGGGGGRMRRIGIVALARKLLVALWRYVDAGVVPEGAMVKAAAT

SEQ ID NO: 186060 - protein, 315 aa, unidentified
MTVTCVGIDIAKEEFVVACRPERPEWAASNDAAGIAATVTGLQRLVPTLIVLEATGGYETALVAALAAAGLPVVVANPRQVRDFAKATGQLAKTDRLDAHLLALFAERVQPTPRPLPEPVLEQLTALLTRRRQLLDMLIAERNRLEHATPPIRRDITQHIRWLERRVADVDRDLDDTLQSSPVWRAKENLLRSVPGVGPIVSRTLLADLPELGHLNRKQIAALVGVAPLARDSGTLRGKRVVWGGRAPVRAVLYMGALVAARHNAVIRAFYLRLLAAGKPKKVALTACMRKLLTILNAIMRTQTTWRQPHQAQIT

SEQ ID NO: 186061 - protein, 402 aa, unidentified
MNCVGIDISKGKSMIAVMRPFGEVVVSPFEVLHTDSELSKLARLLKSLDGETRVVMESTGNYHAPVAWLLHDAGLYVSVVNAMLVHDYGNNSLRRAKTDKKDAVKLANYGLDHWLTLPRYVPEEDARLMLKTCYRQYQQYSKVRTMLKNNLISLLDTAFPDANRLFTSPPRADGSEKWVDFVAAFWHCECVCGLSEKAFTAKYQKWCKKHGYNFSEDKALDIYASACGHFGVMPKTDTAKLLVEQAISQLRATSAALAALKQEMQSLAASLPEYPVVMEMFGVGPALGPQLMAEIGDVRRFHSKKALVAFAGIDAPPYQSGQMDIRSRSISKRGSASLRRTLFLVMGVLLQCAPMDEPVYQFMNKKRSEGKPYRVYMMASANKFLRIYYASVKAYLDSLEHD

SEQ ID NO: 186062 - protein, 348 aa, unidentified
MNATTLSFVGVDVAKNVFQAYEVMPGSGEIRNIALRRAKFLAYFVNHAPCVIGMEACGGAQHWARELIKLGHEARLMPARAVKAFVTGNKSDAIDAKAIWMAVRHEGIKFVAIKSECRQGILAIHRMRAQLMKTRIMQSNELRGLLTEHGEVCARGEKALSENIAPMLERVRERLPAVVVDSLRELWARIGVADGEITVLEKRLKLLLKEDKNAQRIFEIPGVGLLSATAASAMIGDDPHAFKSGRQFSAWIGLVPAHTGTGGKTRMLGLSGRGDPYLRTLLMHGARSVLLHTKNPSPWLQAMLRRRPVNVVVTAIANKMARTIWALLAHGRDYEPNHRGVGPLAPRG

SEQ ID NO: 186063 - protein, 323 aa, unidentified
MKLYGGIDLHSNNNVIALLDEKDEVVYQRRLGNDLSYVLSELAPYKQAIEGLAVESTFNWYWLVDGLMEAGYRTHLVNTAAVKQYEGLKYSDDHCDSRWLAHLLRLGILPKGYIYPKAGRAVRDLLRKRGQLVQLRTSNILSVQNLLSRNTGSSISANRIKKLKLEEVDELFSDPDIALAIKSNLVVMHTLHEQIKILESAVTKKAKLQPEYRYLLSTPGIGMILGLTILLETGDIQRFSKAGNYASYCRCVGSTRKSNGKHKGKGNTKNGNKYLSWPMWKQRISLFVTTTGLKAITNASRREQTTWWRSKPLHTNSPEPAIT

SEQ ID NO: 186064 - protein, 324 aa, unidentified
MNDTVVGIDVSKKTLDTSYAQGQRKQARIFENSSDGWKQMLSWLKAKGSQPAHVGMEATGRYSLGAALMRHDAGHTVSIINPAQIRDFARSKLGRNKTAKADAALIREYTTLFRPQPWTPPSPAMRRLCELQTVRAGLVANRTEWKNRLGSGLGDSTAIQVAKAVIDALSSQLKVIDQAIAETIEQDGDLRGRRDLLLSVIGVGDTLAALLLAEMPEPGVLRHSAEMIAYAGLNPSHHRSGTSIDRPTRISKIGNATLRSALYMPALSAMRFNPVVAALAARLKSAGRLKPKQIVVAAMRKLLVLCFGVLKTGKPFDPAIAMPT

SEQ ID NO: 186065 - protein, 343 aa, unidentified
MAIVILGIDLGKNICSLVGVNEDGAVVLRRRMRRQTVLTFAAKLPSCVVAMEACCGAHHLGRLLTAQGHTVKLMSPEYVRPYVKAQKNDDRDAEGIAEAASRPTMRFVDLKSQEQLDLQSLHRVRSRLVGIRRTLLNQLRAILLERGHIFPQGRRKFEAAIDTLVADPACEISSRIRQLVIDIRSEWQALDSRIEALNGEFVAIARHDETARRLVTIPGVGVLNATALVAAVGDGAAFRRGRDLGAWLGLVPKQHTTGGKPKLLGISKRGNKYLRMLFIHGARAAMPSLSASQSPLGEWLRGLLARTHRNIAIVALANKLARIAWATLRRKTSFDPRHLAVAG

SEQ ID NO: 186066 - protein, 411 aa, unidentified
MQVLYERCAGIDVHKKTVVVTILVTPATGQVQKQTRTFTTMTNDLLTLDDWLRAQGVAVVAMESTGVFWRPVFNLLEAERTIILVNAQHMKAVPGHKTDVKDSEWLAELLRHGLLKASFIPPAPIRALRELTRYRQLLIRQRADDTNRLQKVLETANIKLAAVATDILGASGRAMLAALTGGEQDAETLAELARGRLRAKLPQLRTALEGRMQPHQRFLLQQLMAHIDFLEASLAEVQREIEQQLRPFEEAIDLLTSVPAIQAGAAATILAEIGADMRAFPSHKHLASWAGLCPGNKQSAGKRLSGKTTQGNLYLRHVLCEVAWAVAHTKDNYLAAQYHRLARRRGKQKAILAVAHSLLVIIYHILQTKQPYRDLGADYFAQLDMERLQRRAIEQLEHLGYTVTLTPQVGA

SEQ ID NO: 186067 - protein, 347 aa, unidentified
MEKIKLVAVDLAKRCYQVGAIDEHDKLLYNRRLSPAKFALAMQQLEPTTIAMEACAAAHYWGRRLSALGHRVRLIPPQHATAFRRVHKSDAHDVLSILEAAQRPKLHFVPVKTVPQQDLQLLGRVRERLVAQRTALINQVRGFAQEYGVSFPKRRDVLMAQLPEALADASNELSAIAREALAELLLQIRELDVRLKTIMQRLSTLASEDPAYDRLLTIPGIGPTSAPALLASIGHGQQFKSARSLSAWVGLIPKQHSTGGRTQLGAITKSGDRNLRVMLIHGARAVILWAHRHDHAQSRWIGALIARRGKHKTIVALANKLMRIVWAVLRHGVSFNMSKAYRPQAAH

SEQ ID NO: 186068 - protein, 346 aa, unidentified
MVEGVDEFIGIDHHKKRCQVMVKDRQGNVLRRGNIPTQREALERFLGERNGAVRMAVFEAGPRYRPLYRWLVDLADEVVMANPGRLKIISETAYKDDAIDAEKLADFGMLGMVPEAYVCGDEAWDRRQGLRLRAALVKMQTSVKNRVHALVDQHPDALPARPEATDLFGSLGMEWLRAIALPEADRKRLEQLLEVYEFLHGQVRRSDAAVRQIVKADERCGWLATVPGIGDFFAALLMAEVDDIRRFRRSKDFVSYTGLVPGRDRSDEVDKPRRMHKRGSKWLRWALVEAAIPATKSNLALKNLYDRVCRKKGPLAGPNVAKVAVARKLAEIVYRILVEERPYEVR

SEQ ID NO: 186069 - protein, 351 aa, unidentified
MLIVGCDYHPSFQQIAWVDTESGECGERSLLHSTGEAERFYRNLKEQGVKVRVGIEATGHSRWFERLLMELEYELWVGDAAEIKAKRVRKQKNDREDARLLRTLLVENRFPRVWLADQLNRDLRQLLWHRHRLVQMRTRVMNQLQAVALNEGVQRKKGLWSQAGRAQLEAFQLLPWAARRREDLLKLLDGLTPRIQALTAEVNKQAEQYPEAQRLMTHPGVGPLTALAYVLIIGSPDRFRCGKQIGCYVGLIPSEESSANRQRLGHITKEGNSLLRFLLLEAAQAAVRSDADWRREFLHLTMRRGRQIAVVALARKLAVRLYWMWRNGRDYEKSLKFSSHVGQPGTGYGVK

SEQ ID NO: 186070 - protein, 347 aa, unidentified
METYPINAQFYCGIDMHARNSYLCVMNSTGDILFKRNISNNFEVFKQFMQPFLPDLAVGVESTYNYYWLLDGCQQGGIPFHLGHALYMKAISGHKKKKDPIDARTIANLMRTNFFPPAYPYPREMRVTRDLLRRRHRLVRIRAEAYTHIQLVFHQYGITDILPTEVRHKPTRHQLIERFAEEDLQANIATDLAVIEALDPLIDGLEKQILAQAQQHNPCDYQILLTVPGVGPMITLNIIYEIHSIARFKTVQKFSSYCRVVKCMRESGGKIKGYKNQKIGNPYLKWAMSQIIISAQSGSESIAKYYQRLENKYGRRRARAQIAHKFAVAIYFMLKDGKVFDQKRFVS

SEQ ID NO: 186071 - protein, 330 aa, unidentified
MKSVAGIDVSAHKLDVACLTEGQRPIFVEFKQSQAGHDQLVAFLKKHRVEVVVMEATGIYYLDAAVALFRADIAVSVINPRSAHHFAKAMLQRSKTDRIDAAVLAEYALRMNLKPWRAPREDWLALRDIARRINQLTGIRTGEKNRLHALKAQRHTRRALIEDLETHIEMLDASIKRLTTSALGLIKHDAVLSAYRSHMTIAQGIADASVVAILGELCLLPLELRSAQVSRQAGMDVRLTESGTSINGPGRLSKQGNAYLRAALHMPSLSFVQHDERAKAHYEALIGRGKKKMQALCAIQRKMLTGLWACMKTGQPFDSAKLFAIEPEKA

SEQ ID NO: 186072 - protein, 403 aa, unidentified
MTVRPLVWVGIDVGKTSHHACAVDETGKVLWNQKVSNEQRAIEQLIARAHKGADEARWAIDLTSPMALMLITVLLGAEQSVVYVPGHVVNTMTGAFRGEGKTDAKDARVIAETARMRSDLSEVAMPDELVVELAQLTGYRTDVMADWVRGVNRLRSLLGSIFPGLEAAFDYSNRTPLILVAHLCTPAEIRAAGITGVTAYLSDNGGWPTAIAKTAATAVAAAKQQPLALPGEAGTAALVKRLARKLLDLDHEIKDIDKTITERFRDHPYAHIIESLPGFGPGLGAEFVVVTGGDLASFATAGRLASYAGLVPVPRDSGRISGNLHRPKRYNRRLRRVFYMAALSSIRGDGPSRQFYDRKRGERLIHSQALLALARRLVDVLWALLRDGREFTPDKPTPATAAA

SEQ ID NO: 186073 - protein, 326 aa, unidentified
MKKVFFVGADVSKEKVDFCFLTSVENVKPKFVSLPNDTDTIKAYFQSFIKDDIFITFEYTNNYHLPLQSALSDLKIKYSALSPAKTSYFLKHLTLQKSDITDAYGLALYCKIFKSDLNPSTHNHQYNLIKSYNSTILLLSKIKVQLRNFKKSQEFVADTELSEIIKSLTVQVQKTQEKLKLIAFEILKSFVPNCEQIIKSNKGFGIDLALNLFPQLHFNRAKSEKQFISFLGLSPRIYESGSSVHKSPKINKRGSSAIRRILFLNAFSCVRFNDKFKKRYDHLVSKGKSKKVALVAVMCAIVRYLKSLFPLSESYLNENLYNAHTS

SEQ ID NO: 186074 - protein, 350 aa, unidentified
MMIIGCDFHTRYQQIAMMDEATGELIERRLEHESGEAHTFYRGLQGPVRVGIEATGPIHWFERLLAELGHELWIGDAAKIRASEVRKQKTDERDALLILDLLLAKRFPKIWVPTPAERDLRQLLWHRHKLVCMRTMLGNQLHALALSQGLCRKKQLFTQKGRMELVHLGLAPWASRRREELLKLLDQLEPAIAELDRAVMEEANRREDAVLLMTHPGIGPVTALAFVLAIGPITRFARSKKIASYLGLNPTEESSGGRRRLGAISKQGNTMVRWLLIEAVYPAVRKDPALRQDYQRLKFRRGHAVAKVAIARKLAVRMYWMLRSGAEYARLVRRQGSPGATLVDASSSLG

SEQ ID NO: 186075 - protein, 343 aa, unidentified
MSHYVGLDVSVRHTSICIVDDGGRIVRETRVPSDPAAIVPILTVPGLDCHRIGLEAGPLCQWLFSGLAEAGLPVTCVETRHMKAALAAQVNKTDRNDARGIAQMMRVGLYRPVHVKTVASQEKRTLLAARKLLQGQNRAIENDLRGLLRTFGLKVGPTSAGAFDARVRQLIDGLPRLTAIIHPLLEARAALRTQFAILHRQLLDLVRDDSVCRRLMTVPGVGAVVAITFQATVDVPQRFASSKAVGAHFGLTPRAFSSGETDYTGRISRCGDALMRAMLYEAAHTLLTRTQRWCSLKAWGIRVAQRRGLQKATIAVARKLSVILHRMWVDESEFRWSTGSAAA

SEQ ID NO: 186076 - protein, 518 aa, unidentified
MTNTQRWARGCKLDNRRWLDTATGGMCVTGHSIGIDLSINGAHDCTVLDATGQLVQRFTFDSSSAGLQKLEQCVRATDPSYGAPVVIMEPTGLAWFLPCLCLRAEHPEVKVVRIKTSKVAALRRYLKQDAKSDRLDSLTLAKMPLVDPEKLYAVDLPPAAVQGLDRMTRRRARLVASLTGRKNRLQALVGGYLPGLMAVAGKPWEPVFRAMLAVSLNPFTLTDQGTTALRKSLQDKRSREALPEARLPRLRIACEQLTRLYRPIIEAGLLTEAFFDDVQDEVARELRLMDVEEQEVKELEAAIARRYQEIVPEDHLRTIKGLGAVTAPTILAAVGTPQRFHSQAAFRGWTGVVAHASQSADSDAKGLPMTKAGPRRVKLALYQAAEIARQWDPQLAKIYYDQMVHKGKPHYKAIGAVMSHLASRIHAVLSEQRDYVLRDTDGREVTPQEARAIILTRYRVPAEIRAERRTRKRRKPDVSTGSHRGSTKRSSRRSSTSSHLHSTRSQEAHQTGAVAITQ

SEQ ID NO: 186077 - protein, 411 aa, unidentified
MDKVYDKCCGIDVHEKLIVACFRKGSKQELRNFGATTRELLELANWLQNGGCEMVAMESTASYWKPLYNILESSELKAMVVNASHMKAVPGRKTDTKDAEWIAELLQHGLLKASYIPDKQQRELRELVRYRKSLVSERTRELNRLQKMLEGANIKLSGTVSDINCMSARNILEYLLTGEFFDEAKYDEMYKQKIIAHNLKASKEQLIDDLNGVMTPLQRRMMKELLSHLDELNVHINNLEDEIDNFMKPEEKKATQAIQDVTGIGKNSSQAIISVIGTDMSRFPTAGHLAAWAGLCPGNNESAQKRKTGKMRKGNALLRSTLVVCAHSATRNKNSYFYAQFMRISSHRGKKRAYVAVAHSMLIAIYHILKDGVVFKDLGADYYNQFNKERKINAYLKKLKALGWEVPVVAA

SEQ ID NO: 186078 - protein, 371 aa, unidentified
MKDTIKYVGLDVSKEKIAVAIADEGRDEPRYWGMIPNTAESIRKLVKKLGEKENLRVCYEAGPTGYGLNRLFLSLGIECEVIAPSLIPKKPGERIKTDRRDSIKLAKLFRAGELTPVYVPTEDDEALRDLVRAREDAKEDELRAKHQLSKFLLRNDIHPPFKGKKWTRRYREWLNTLKFERSASKVVFQEYLHHLQEIEQRVKRLEEEIKLQSTEGYHAPMIQALQSLRGIATITATSLVAEIGSFKRFASPKKLMSYVGLIPSESSSGETRRQGNITKTGNRHVRRLLVEAAWSYRFPPAIKGDLKKRLEGQLPNVQMISWKAQNRLHKKYFRLLSRGKAFGKAITAIARELAGFIWAVTQEIENNSMAK

SEQ ID NO: 186079 - protein, 340 aa, unidentified
MDQVVTIGLDIAKSVFQLHGVDAQGAAILRKRLTRARMRAFFEKLPPCLVGMEACGSSHYWGRELSALGHDVRLIPPSYVKPYVKRQKNDANDAEAICEAVSRPSMRFVAIKSPEQQAIMIAHRTRSILTRQRTQLSNAIRGHMAEFGLVAPQGRIGLESLAAIISDARDGRLPLQARASLQMLIAQLRLVNEQILESDRHIIASARSTEVGRRLMGIPGVGPVLASALVAAIADPKSFRSGRGLAAWIGLVPRQNSSGGKERLGGITKQGDRYLRQLLVVGAVAVIRYAQRNGARRPWLVQLLARRTPKVAAVALANKNARMVWAIMTSGECYREPVAA

SEQ ID NO: 186080 - protein, 350 aa, unidentified
MTMVGGLDVHRHQITFDYVDDDGLVHWGQIRPATRHTLRVWLGERCPQRDAEFALEGCTGWRYVSEELAAAGVGVHLGDPAEIAALRGPKKRAKTDRADARLLRTLLLEGRFPESWIPPAHVLEIRTLGRLYCTLMDQRRAWQQRIHAQLFHQGCPPIRALLSAAGREALAGAELSAVGRQYVDAALWRIDELSAEIEPLRTQIVNFARRQAGCRALQTHYGIGWLCAAIIWAEIGDARRFTSSDQLVRYAGMDVTVYSSDNKRAPGHLSRQGSPELRWAAFEAAKCAARRGSPDYAYYRRLAAKHERHNGKNPTLAVERKILRRCYHTLRELGAPALALPDTSSQQAAA

SEQ ID NO: 186081 - protein, 317 aa, unidentified
MELSPIFIGIDVSKARLDVAIRPSGQTESVSNDTAGIEALVKRLSENRPALIVLEATGGVERSVTRALASAELPVVVVNPRQVRDFAKATGQLAKTDRIDAQVLARFAQAVRPALRPLPDEVSWELRAGVTRRRQITEMIVAERNRLGATSKAIRKRIEAHIRWLESELDRADQDLDQSIRQSPIWQENQELLQSVPGIGPVISRTLLAELPELGQLNRKQMAALVGIAPLNRDSGTMRGRRTIWGGRARVRAVLYMAALVASKRNAIIRTFYQRLRNAGKAPKVALVACMRKLLTILNSMIKHKTRWSENFSVQPC

SEQ ID NO: 186082 - protein, 347 aa, unidentified
MRFYNTNHKQYCGIDLHARSMYLCVLSHDGKTLLHKNLPTDPDVFLNAIAPFREDLVVAVECIFTWYWLADLCAQEGIAFVLGHALYMKAIHGGKAKNDRIDALKIATLLRGGMLPQAYVYPAEMRSTRDLLRRRLFWVRQRGQLLAHIQNTHHQYNLPTPKARLAYRKNREGVAEHFADSAASKSVSSDIELAEHYDSLITKLELYLCRQTKLHDQDNFYRLRSIPGIGKVLAMTILYEIHDIDRFERVQNFASYSRLVKCEKSSSGKRLGTGGNKIGNVHLKWAFSEGAALFLRANPVAQRYIENLRRKHGKAKSLSILAHKLGRAVYFMLKRQKSFSMQTFRMA

SEQ ID NO: 186083 - protein, 373 aa, unidentified
MPKYSTAFGMDVHLRSTTVCALDADTGEAVTRRFPGNPWGEIAGWMDGFPGPSLAAYESGYLGFAPQRELAGLGVECVVAAVSKIPRSAADSASKNDRNDAARMAKAILAHDISPVWVPSPEVEGIRDLAGAYDGATARLATAKQRLLAFLARRGFVYGGTTPAGNPRKYWTYDFLRWLDKVRPEDDGGVRTLAALRNEVEAAAEARADLLSEYRAAVDASPIAAEVAALQSIKGCAFALAAAFSAEVGDFTRFRSGRQVTAYFGLAPSQRSSGDSVRLGGISGAGNALVRKLAVEGSWCYAAARHQPKLMPRDTGVPLEIRVHGRKGSERLLRRREEMLARGMPAAKANAATAAELVRWLWALGMMCREGAE

SEQ ID NO: 186084 - protein, 411 aa, unidentified
MELLRQAVPATALVVAVDPGKVSNRVWLTSGERGLIGEPVSLPVLREGIDTLAGLIAASGVAGVPRIGVEATGRLHHAWVAELERRWPGSVRLFAPSETQAARTQLGSRRSKTDDRDCAALVWLVRQGAGRPAATDTVDALLGAVRHRRGLVADRKVLQQRLHDQLQALCPGLSAPAGQGRALDLADSTGQAVLACAAAFAGRPPTVRSLQARTPGRLTRATARFWADRWRRLLPPPKDAALRAERLGRDLARHQRLQADIAATEGQVTQLLAATPGQILTTLPGVATVRAASFAAHSLPIARFPTPEQLYAATGLAPATWQSASLKRRGRISRQGLPEHRDALMGIAWGLSQYSSSFRERDQELRGRGMRPIQARVALARHACRLCYALLTTQQPFDEARYRLARHSRGR

SEQ ID NO: 186085 - protein, 341 aa, unidentified
MDKELYFGVDVSKKTLDLAYYDGETIDWKNAHIKVSNDDAGFKKIGSWVAKVGKDFDTFLFCMEYTGLYNQNFRLWLESKEYIYGMVEPRKMHRFEPDLDDDQRSLDRIKTDELDAFRIAIYCEQNHKKILRNPSKLPSPVYFKLKRLLAERKQNTKQSTLYKQQLHDICAYDTDLSVERKKLLLKNMQENQKAIDKEIDSYMNEDASISKNYNLLTSIPGIGRIIALETIVLTENFTAISNPRKYACYIGIAPFKKESGTSVRKKTGVSKKGFSEAKADLSIAVLSAIKNNPSIRDYWIRKRKEKCGGIVLNAVKFKLVLRMFAVIKRGTPYVETDAYKN

SEQ ID NO: 186086 - protein, 347 aa, unidentified
MRGAVHIQITTIGLDIAKNVFQVHGIDVSERVVVRKQLRRAQVKKFFEALPPCLVGLEACATAHYWARELTRLGHQVRLMPAKDVKAYVKRNKNDAADAEAICEAVRRPTMRFVGVKSAEQQSRLMQHRTRDLLLRQRTQVINALRAHLAEFGIVAAQGREGLKELLQLIPDKADKRLPIDARASLIVLAAQLQALQTMIGSIERRIMAQHRANEASKRIATIPGIGVLGASAITATVSDPSAFRSGRDFAAWIGLVPRQDSTGGKQKLGPISKQGDRYLRRLLVVGAHSVLRRAKQSPEKYPWLTQLLARRPFKVVAIALANKMARVAWALLARGGTYRAPRLAAA

SEQ ID NO: 186087 - protein, 346 aa, unidentified
MEHYAGIDVSLERSSVCVVDALGKIVKEAKISSEPTALVAFFEALGFVVKRIGLEAGPLSQWLHAGLQRAGFEAVLLETRHVKAALSAMTVKTDRKDARGLAQLIRMGWFRPVHAKSIRSQEVRALLVARKQLLGRLIDVELSIRGILRGFGLKVGPVTRTGFDGRIRELVTGQATLARIAVAMLSARAALKAEYEKLHKAVLAIVRDDAVCRRLMTVPSVGPLVAITYKSAMDDPNRITKSKAAGALFGLTPRKYQSGEKDVTGGITRAGDEMVRTALYEAANVLLARITRFSKLKRWAMDVAKRRGSKRAKVALARKIAVILHRMWVDGSTYRWTEMQPVAAQA

SEQ ID NO: 186088 - protein, 353 aa, unidentified
MTGTKYIGMDVHKESISIAVRNDAGKIVMECVIETKANIILDFIHGLRGELQVTFEEGTWATWLYDLLKPHVTKLVVCDPRKNSRQGNKNDRIDARELADRLYMNKLNSVYHGGAGVRTLKELARSYLTISKDLARVMTRVKAIYRSWGIPCAGKQVYAPRHRAEWLAKITEVGVLRRAEFYYQQLDALRSLRHEVRRALLAESKKHKATKLLCQIPSIGPIRAALLIALIQTPHRFRTKRPLWKYSGFAIETHSSADYRSVQGQLHKSKKQVSVRGLNRDCNHDLKNLFKSAATIASVKPGPFQEFYAALVAKGMRPEMARLTLARKMATIVWIVWKRGVSFDAQYLKPQTA

SEQ ID NO: 186089 - protein, 338 aa, unidentified
MFYVGVDLHKQSISLCVVELAGRERKIIERRRFRCDEEESMADYFAELGEYQLVVEATASYEWFVQLVEPTADRVVLAHPGHLRVIAQSKRKTDKLDAQTLAEFLALDQIPEAWRPTPRVRQHRALVRHRHYVVRRSTSVKNKLRRVLSHYNADLRNLFTHAGRKYLATIELSEADRFVTDQLCEELDQHSTRLKAVDQQLKAFAKAAPVAEQEARAVLESMPCVGPVTIDVVLAEAGDVRRFGSQRKATAYAGLAPGIRESAGKGKQLGITKEGSRLLRCILVETAWRLVLRTRRWASVYEKLKARCGAKKAIVAVARRVWCVMVSMLNSGQKYQLT

SEQ ID NO: 186090 - protein, 434 aa, unidentified
MTTDSAAVRATKGKLMKPWIQITHYAGFDWARDHHDVVIVDRQGQIAADFRFEHSLAGWQQFRDQVKPFPALAVALETAQGAAVDQLLQQDCNVYPVNPLSAKSYRERKVPSGNKTDRLDAWSLAEALRLDGQQWQALRPLDPLTQQIQLLCRDEISLIEQRTALVNQLQQALVEYYPAALQAFDDWTQPFCWDFVVQFPTPEKLAAAGRRRWEKFLHTQKLWRPETAAKRLEIFQNARQFCGSAAVTSAKSLLALSLAKLLKALQLQLDQYRQQIAALFKQHPDHDLFGSLPGAAQTLAPRLLGEIGGEPHRFADTQALQCIAGTAPVSFQSGQIHRVHARYQCNKILRHTVHLWAQCCVRVCPWAEVYYKQKRAEGKSHACALRCLGQRLLKILGKMIQTRQPYNADLHARNQRQHGSWVLTLMQPNAKPAQ

SEQ ID NO: 186091 - protein, 399 aa, unidentified
MRKIIGIDVSKSTAKLSVAIDAKTVYEGDITLDMIGFTSLKAIIDSYGGAEVVFEATGVYSRRLERYLLDESITYHILNPLVAKKRLDDGSRTRKNDVRDARGLAITEFAKHPKPFKPSFYDPVYRELMDISRYYDQQTEDLKRTKNRIHRLIQLSFPGIEEELDLRKPSALHTLTLFSHPAELTGLSFENIKTQILDMHLKGVGAVRSSNLARALWRSRARSYPAVSGNSFVVQAVKHETQKALKLLSEREETVQAMVSLAERTPEYVILLSIPNIAENTAVRLVAELGDIRRFKTRAKLNSFIGLDLQEMQSGNYTAQRKITKHGNAHTRKLLYWTVINMIGSGAQPSHIRDFYAKRQATASRRKPLLVACMDRLLKTIHYLVNTNQLYSYELACSR

SEQ ID NO: 186092 - protein, 403 aa, unidentified
MVFLGIDWAEAHHDVCLLDEQGKVLGKRRVVDGLEGVRRLHELVAEHAEEPEQVVVGIEIDRGLLVHALVAAGYQLYAINPLAVSRYRERHGTSGAKSDPADAKLLADLVRTDRHNHRPLAGDSELAEAIKVLARTHQNLVWSRQRQVNQLRSLLREFYPAALEAFGTDLAAADAIAILERAPTPYQGRSISQAKITSALRKAGRERNLESKAAEIQTGLRAPQLEAPALLAQAYGRSVASTIRLLRQMNQELAALEQELAASFELHPDTEIYLSLPGLGKVLGARVMAEFGDDRTRFKNPKARKSFAGTAPITKSSGRRKTVLRRLACNHRLLDACYLWAFASLRRSPGAKHYYQQLRNRGQSHPQALRALANRFVGILHGCLDHRELYREELAWPLLRAAA

SEQ ID NO: 186093 - protein, 414 aa, unidentified
MSRSSFPMPAPAPLAYVVGIDIGMESCMMCGLTMEKRQVIKPSPFVNTAEGFTSLFERLERLGAAPDQILVGLEATSRYGENLYHVLLKRGYRVCLLHPAQMHAFAQQRGLRAKTDQVDATTIARALLSGEARFGYVPTEQVAIYRELVRLQQQLSEDVVRYKNEIHALLVVLFPEFTQVFADPTRPTALAFLKRYPSAQAVAQAEVSVLSQVLHQLSPKHYGRQTAERLLDVAKKSISSGVAISARSTSLRILCDQLEHTQANLKQLHQEIETLLDQDPKAKGVLLIPEFGVMTVAVLRAELGDLDRFARMDQVVAYVGMDLQVKQSGKWIGQTKLSKRGSGRVRRILYLAALRSIWLPNSPFGAYYHRLVERGMKKGMAVVAVMRKLLIVAAHLILTEEMYEPGKVAALSVR

SEQ ID NO: 186094 - protein, 421 aa, unidentified
MKGLRTKRVRAVKEGTLIATVDIGVASNTGYCTTLDGRSTKSFRFDNTKEGFEKFWCMTIASKNRFGCDEVVVGYESTGPYAEPLVHYLASKEVKVVQVNPMHTKKMKEVNDNSPLKTDSKDPRVIADIIRLGRALSIVVPEGDAASLRRLNNARERHVGEQTALLNQLQQLVFLIFPEFKTVLKNVKSKTAQHILKRYSTPERIGGLSKEALGEQMRKWSMGKFGIKEAESLIGLARETVGIKEGIAGIFLDIRHILMQLEAEVRFISEIEAEMGATLDRIPYSVRLLSIKGLGAVSVAGLIGEVGDFSKFGTQSEIMKLAGLDLYEISSGKRKGQRRISKRGRSLLRKILFYAAIQMIRKNGIMYDYYARLTGRGMERMRALIAVSRKLLRIIYAIVRDNTDYVGEYQVPQRMVIKKAA

SEQ ID NO: 186095 - protein, 349 aa, unidentified
MQSTANLPVIGLDLAKSVFQLHIVDMQTGEIQRRQIKRAKLTEFFAKCQRSLVAMEACGTAHHWARVIGSLGHQVKLLPAQHVKAFLLRDKTDAMDAQAIWVAAQQPHLKPVPVKTERQQTCMALHGMRRQLMKMRVMQTNALRGTLAEFGIALPVGHNQLLKTIQSELARAQQADQLTADLVLSVQEQLKRIDALQEDIDHLGQRLRAMIRDDRQMQAIQHIPGVGDLTASALVAAVGDFSSFKSGRQFASWVGLTPRQVGTGGKTQQLGISKRGDTYLRTLLIAGARAVVARAERSSWITRLLERRHYNVVVVALANKMARTAWAVLAKGAAFDKERWNPLAPMSAS

SEQ ID NO: 186096 - protein, 395 aa, unidentified
MYFLGIDIGKRTHVASIMNEEGKVLLKGFSFPNTTEGAESLIERMVDYSGVPSDFVIGMEATGHYWLSIFSYLHESDYLIHVVNPLQTDGWRKGTEIRKRKNDIIDSVLIADLMRYGSFVETVLSDENVFSLKQLSRYRTYLVGTASDFKRKIIAVLDQVFPEYATIFTKQGVFGKASKELLLAFSAPIDLENISSETLAQYLAELSRNRIKAEKADQLKQAASNSFGVKFAQEAFTFQLRSMIEQLKFIESQIKETEREIKYIMDTLNSVILTIPGIGPINGATILGEIGDIQKFSNPKKLVAYAGIDASVTQSGQYEATHNVMSKRGSPYLRKALFSAALVASQCDPVFSAFYQKKVSEGKHHLTALGAVSRKLCYVIHAILTKNEPYIIVSD

SEQ ID NO: 186097 - protein, 403 aa, unidentified
MNAVGIDVSKGKSMVTILRPFGEIVSSPFEIKHTSSDIHSLIKLIHSIEGESLVVMEHTGRYYEALAHQLSAADLFVSAVNPKLVKDFNNDSLRKIKSDKADSVKIARYALDKWQNLEPYSITDELRAQLKVMNRQFHFYVKQKTAMKNNLIGLIDQTYPNANTYFNSPTRSDGSQKWVDFFSTYWHVDCIRKMSLNAFVEHYQNWCKRKKYAFNKSKAEEIYTKTKELVPVFPKNEITKHIIRQAVDQLNSTSVTVETIRTLMNETASKLPEYSIVMQFKGIGPSLGPQLMAEIGDVTRFTHKGALTAFAGVDPGVNESGSYAQKSVPTSKRGSSNLRKTLFQVMDVLIKTMPQDDPVYQFMDRKRTQGKPYYVYMTTGANKFLRIYYGRVKEYLSVLPDPS

SEQ ID NO: 186098 - protein, 347 aa, unidentified
MTEAYDGRQVVGIDLHRRRSVIVRMTDDGRKLETVRITNSPAALRREIAKAGQHPRVVVEATYGWYWAADVLEEAGAEVHLAHPLGVKAYTYRRVKNDERDAADLADLLRMGRLPEAWIAPPEIRELRELTRYRDKLVKLRTSVKDQVHAVLAKLGIPVTCTDIFGTWGNTWLDGLDLPQPYAGKVASLRQLNTELTGEITLLEQVIGDLLAGHEGYAAIQQLPGIGPVLGAVIVAEIGDIRRFRRPEQLCSWAGLTPRHRESDTKISRGHVTKQGSRILRWAVCEAIQRQPDGTRPQQVKDGIIARRGTEARNTAKIAAARELLTLVFYGMRDGCIRRAVRPGQAA

SEQ ID NO: 186099 - protein, 343 aa, unidentified
MDVSTIGLDIAKSVFQVHGIDAAGEVVVRRQLRRRQLMGFFEKLGPCLVGIEACATAHYWGREIAALGHEVRLMPAHYVKAYVKRGKNDVADAEAICEAVQRPTMRFVSLKSPEQQSCLMLHRTRELLVRQRTMLVNAIRGHMAEFGIVTRVGLPQIKELLAVIADREDHRVPPEARACLESLGRQFLSLHEEICAADKRLHAWHRSNPVSQRLATIPGVGPVTASALAASITDPLVFRSGREMAAWIGLVPRQNSTGGKQRLGKISKQGDQYLRWLLVAGAMAVIRHAKRRGTANQLWLDSLIARRPTKVAAVALANKMARMAWALLSHGGAYRQPVITANL

SEQ ID NO: 186100 - protein, 425 aa, unidentified
MKKIDYLSTLFVGIDIGSRTNVISALNFDQEYLIKMVPLPNVQYGAEQMEDLIAEVLLNHHEFKAVIIGLESTGLYGVHIANYLSTCEKLAPFSVKVYCLNPNEVKQYKKSFNSLDKNDGIDSFVIADFARVGRIRIEPWRGSQYLALQRLTRHRLHITECIAREKVYVLNNIFLKFSEFALLGKSEHPFSDKYGATAKSILTEYMSTEELVSASVEELVAFVSDRGKGRIADPVETVELLKAAAMNSYRLDKCLYEPLTASISCSFNCIKAFEKELKAIDDAILRAVKGLNPVEYQVLTSVPGIGKVYASGILAEIGSIRCFKNNDALAKYCGIVWRENQSGEFEADDTPMNKAGNRYLRYYMIEAAGSVVNYCPEYRAFYQKKFAEVRTHQHKRALALTSRKLIRMLFGLLDKSQLYSPQKSR

SEQ ID NO: 186101 - protein, 428 aa, unidentified
MASVTDAIAPCTWVAIDIAKGVNVALVEHADGRQQRFRFTHERGDYDRLVEFLRGCAQPCRVALEPTADYHRTIAYRLIAEGFDLVLVSSVAGARLREAVFNSWDKNDPKDAQVIMRLLKQGMTQRYCDPLLMHTHDLQELAKTYHHISRARTRLQHVLLTHYVTLYFPEIERFWSPQRNEWFIRLLIQFPTSASIAALSVEEFRDRIWKSMGRRVHKEAKIQEIHVLATRSIALPIETDSTAVSTFRLQLERYLQLCQTRDALERNADALLSENPDYQRLRTIPGIGSIIALIILAEAGDLRRFGHHRQFLKFCGLDLAKSQSGAFRSRDQLSKRGNARLRCALWMAAMSAARMRETAFRDKYRRYIARAPEDLDLNRKARTAVAAKMARVVYALIKHGQSYRHCFDAGLPSGSIPLTRAVEAFGTS

SEQ ID NO: 186102 - protein, 422 aa, unidentified
MKNNAARKLRQVPEGYLIIGVDPHKKKHAAVAITQDLTIHDRFKVDNTREGLEFLLRRVKTVMVKSGCRGIMFAIETGGHYWRNIAYYLDERGVPFRFINQYTLKRRREGKDLNKRKNDYRDSEVAAQLLCTGEFVESGIPQGVYAELRTAHNAYRRLVKERTRITNLAKGLLDALFPEFVRVFKDPCGLTSLSVLSTCSTPGIIAGMTEEEFIALIEAAHHGRRLMRKKLGELRSVAKSSIGIEAGAHSVSVEIAFLIEKQKLIKGQIQTIERTLIKLVDASEEGKYLLSIRGIHYIAVAGLLAELGCFKSYRTAKQMIKMAGSNPTESESGGKRRSRTPMSKQGRPVLRYCAWTSVIPMLRLNPDFRAWAKERRERPAHANPLNGREVVGAALNRLLRLCFAMVKNKTYYRSPHLVQVSN

SEQ ID NO: 186103 - protein, 358 aa, unidentified
MAKNSLSGLHQFVTGFEQEVFYVGADVHKRSYHLALRRADGRSLSLVIPASPQAVLDLLDGLNIRIGAVAYESGPTGFSLARMLHDADIPVIVAAPSKIPRSVTPGAKCDRLDCLKLAEYAAKGMLKPIAIPSPQEEARRALLRRRHMVVDAVRRCKQRIKGLILFLGIDEPRELEHWQHGVDAVLLALPLEPAAHLTLESYLRELTFDLEELRRIEHQLKSLAKSEDLTNTMACLQSVPGVGAIVATTFALELFRPQRFKRPEEVASYLGLAPVVRHSGNKTPSGRLVPVGQTRLRSLLVEAAWMWKAKDTYADTLYRRLLGKTGIAQKAIAAVARRLAIILWRLCVEQRMYRTVVV

SEQ ID NO: 186104 - protein, 412 aa, unidentified
MEPIYTSCCGLDVHKKSVQACVRRIGKDGKIQEEVRGFGTMTQDIRGLADWLSQEEVTHVAMESTGIYWKPIYNILEGSFNILLVNAKHVKTVPGRKTDVKDCQWLAHLLQSGLLKGSFIPDRAQRELRDLTRHRAKLVDQRTSVVNRVHKVLEDTNIKLGSVAADIMGKSGKDMIRALIEGCTDGSEMAEFARGKLRGKIPKLQLALDGHVTDHHRFILGELMDQLDYLDAKIDRFSKRIDEIALPFAEAIEEVARLPGFEKRSAENVIAEIGCNMDQFPSADHLSSWAGICPGSNESAGKRKSGKTTKGSKWLRATITQAAWAASRKKSSYFHAQYRRLAGRRGKKRAVIAVGHSLLNVIYYVLRDHVEYKDLGPDYFDKLNSKRLVPYLVKRLKNMGYEVNLIPLESAA

SEQ ID NO: 186105 - protein, 351 aa, unidentified
MPRTTTLHAVTTIGIDMGKNTLHLIGLDARGAIVLREKVARGRIALRLANLPPCLIGIEAGMATHYVARELAALGHNVKQVPATYAKPFRQGHKNDFRDAHAVAEAVQRPTTRFVPAKTNEQLDLQALHRVRSRLVSERTAVINQIRGFLLERGIVVRQGLRFLRQQLPDILAKRADVLSPRMVRIVAELAGDWRRLDERIETVTDEIEALAKSDDSCRRVMTVPGIGPIISSAMVAAIGNGAAFARGRDFSAWLGLVPKQMSTGDRTILGRISKRGNGYLRTLFMQAARVILLRSANWPKHGFGLWLVRAAQRLHPNVLAAALANKLARIAWTVLAQERSYEARVTKAAA

SEQ ID NO: 186106 - protein, 376 aa, unidentified
MSEITRLMLLVVRVGVDLAKNLIQVHAVDAAGKRLVSRALKREQFIAWCEQLPAGCLVAMEACSGAHHWARKLRAMGLDARLIAAHFVTPYRMEGRSGKNDATDAAAICEAASRPSMRFVPVKTVEQQGVMSLHRMREGYKEERTACINRIRGVLAEFGLVFAKSPKVLRARLADVLEDADNELSGTARLVLQEAFEQWRQLDEHLLWCDRQVGQHVRSTPQAQRAAQITGIGELGASGLVASVGDFAQFKNGAQFGAWLGIVPSQHSSGGKTSLGRITKRGDDYLRTLLIQGAKSAVMSAHRRDDPTSKWLLQLKERVGWQKACVAMANKNARILWAVMTRKQPYDAGYASVKPHSKLPLAERTGVDGAAVPCAA

SEQ ID NO: 186107 - protein, 365 aa, unidentified
MQKISTMQTSGKNIFQGQLTMGVDLGDRSSAYCVLNEAGEIVLEHKLATTPVAMKQVFGSMPRCRIAMETGTHSPWVSRLLTALGHEVLVGHAQKVRLITKSRRKDDRLDARTLARLARIDPELLSPVQHRSAQAQLHLAEIRARAGLVSARTALVNAARGLVKSYGERLRQCGTQQVSRETTSGLSAELREALKPLLQEIESLNEGIQEYDRRIEKMAKETYPETALLKQVKGVGDLIATAYVLTIEDPHRFRKSRDAGCFVGLQPGRRNSGESEPQMHISKEGDEYLRTLLVQGAHYILGPFGKDSDLRRWGLKLAARGGKNAKKRAVVAVARKLAVLLHRLWVSGEVYEPLRNSQEAMSAAA

SEQ ID NO: 186108 - protein, 333 aa, unidentified
MYDHYIALEWAKRNMVIARITGRTGFKAEIYEGRPRIPEVLGYLRRLNGSKALTFEESTGAQWLYTELKDEVDELIVCDPYRNHLLKEGPKTDRIDARKLAELLRAGLLKPVYHSGEEFLRLRKLVRGYSGVVRAMVRVKCQHRALMWASGKDAESGEITGKTDRFVMEGLDRMLETCKAEKARYEAEFKHLTSRHRLMRYLKSVPGIGDIGAVKIVAIVVDAHRFPTVRHFLSYCGLVTLDRISGGKVYGRKSPRCCRELKSVFKTAARCTIREHNDNPMRDYYCHLLNEKNLASYNAAHGVARYIARVVFGILKSPAKYNPERREACSVSA

SEQ ID NO: 186109 - protein, 340 aa, unidentified
MTIVMGLDQHRAQITAEWIDTETGEIGRTRVRPADRAGVRRFLGRFGGQRLEVALEATTGWRFVVGELLAIGADVHLAEPAETAARRGRKKRPKTDRADARHLRELLMVDRLPESWIPPEHILDLRARVRLRHTLVDQRGEWQQRIHAVLYHHGCPHHHGVGLLTAKGREWLDSLGLPSTAREQVVVALRMIDMLDVQLAPLDKQLRAYARRQPGCKALMAHYGIGHLTAVTILAELGDARRFSSSREAVRYAGLDITVKRSDQRRAPGHLSRQGPPALRWALYEAAQSARRHSSPDRDYYLQAAERLGGNRACLAVARKLLKRSYHTLRELGDEALQPA

SEQ ID NO: 186110 - protein, 457 aa, unidentified
MHKHRKQLQWETLPYVHPHAGGLDIGAREIWACVPADRDLEPVRRFGTFTPDLIALVDWFVRCGMDTVAMEATGVYWIPVFELLEARGLKAYLVNAQHLKRVPGRKSDYLDCQWIQKLHTLGLLAASLRPDAEMCALRAYLRHRAQLLQHRAPHILHLQKALHQMNVQLTQVLTDVTGVTGLAILRAIVAGERDPVKLACFRNPACKSSEDEIAKALTGTWQPEHLFVLKQSLELYDFYTAQVAACDAAIEQHFSALKPRWEGIPPVDLPRVKRGSKSKNQPALNVRSHLYRLTGVDLVAVHGISASTAQIILSETGTEMSKWPSEKHFASWLGLAPHNDISGGRVLRSRTLKTSNRAGQAFRQAAQSVARSDCAFGAYYRRMKARLGPEQAIVATAHKMACTVYYLLKHRVQYQDIGAPAYAQKQRDTQLARLKRQAAKLGFTLTSHIPELPAVGG

SEQ ID NO: 186111 - protein, 339 aa, unidentified
MCNQVLGPDPIKMMEVGMSCKGLRVIGIDVGKRMLDVAREGVRAGERYSNDVVEIARFVRSLDPERDIVVFERSGGYERLLEGQLAEAGVRWAVVHSKRVPAFRIAKGIKAKTDTIDCRLLRDFGRDQLDSGELRLGRLGDVTMAALAARRRQLNDMLHAERCRQEAAAIELVRSSIDCTIATLEAELTAIEAAIATHIRTDPELHLKEDVMCRRIGVAETTARGLLAILPQLGRASAREIAALAGAAPRVHQSGTTQKRRGLEPGRIVVKVILFYPAQTAMRFDPEIKAFAQRLRNRGKPGKLIMVAVMRKMLVKLNAAVRDALASSNRLAPAGSAAD

SEQ ID NO: 186112 - protein, 425 aa, unidentified
MNYKQNEKINQVKESTLVVGIDIGSTKQYARAFDWRGIELGKIFTFSNSREGFEAFKAWMRHLQDKYRKSDVIVGIEPTGHYWFDLGAYLEDEGILLVMVNPYAVKQTKELDDNSQSKNDRKDPKVIAKLVTEGRYSAPYTPDGVYADLRIMVTNRKRLIREMTQIKNRFARWFAIYFPEYTDVFGDYEAQSSMLLLKKVCTPEAIVELGAEKINKIWRDAKLRAVGMKRATTLCETAKRSIGLKKGSSAARYEMKLLLEDYEYKKAQLDAVMEEIEKLCRKIPESEQMLAIKGIGVITVAGFLAEVGDVRRFESPRQIQKLAGLSLRENSSGKHKGQTTISKRGRSNLRAVLFNAAIPLIATNPEFKSLHEYYTTRANNPLKKKQSVIAISCKLIRVFYAILANGVTYDAQKMLSDIHRQPQAA

SEQ ID NO: 186113 - protein, 313 aa, unidentified
MKEAERVYAGVDISKSSLDAAVSRGGEVMSFKNSDEGIAGLVSYFKGFTLELVVMEATGGLEKMVAASLTEAGIAAVVINPRQARDYAKATGLLAKTDTLDARTLARFARDIRPHVRPMPDETTLKIKAAMARRRQVMGMITAEKNRLHGTDLSVRPLIEAHIVWLSGQLKEIDRNLDSQIKNSPIWQAREKLLRSVPGVGPVLSRTLMGLLCELGEMNRKQAAALVGVAPYNRDSGTLRGKRAIQGGRTAIRSPLYMGALVATKCNPVISAYYQHLLDVGKSKKVALTACMRKLITILNAILRDNRPWQYAG

SEQ ID NO: 186114 - protein, 385 aa, unidentified
MANQNDLSRSVVAFEQHNTIIAVIEMSLNSWLVAGIVPGIERHPLKKLSVNEEVLLKLLHRWRDEAVKAGHTISRIVVAFEAGRDGFWLARWLRARDIEAYVIHPTSVAVSREHRRAKTDRLDTELLKRAFLGWLRGEPDHCNMVAIPSLQEEDAKRPTRERENLVGERTRIINRMKACLVRFGIRNFNPTLRTAPERLNALCTPEGASLPPNTLAELRRDLARLRFVMDQINEIEVARLQRLERAPTAEPHAMVRLLARVIGVGIETADMLVHEILSRKLRDRRAVARYAGLTGAPDESGSKRREKGLAKAGNARVRRGMIQLAWRFLLFQKDSALSQWYRTRTESAGKKRKTMIVALARKLLIALWRLVTTGEVPAGVVLRAA

SEQ ID NO: 186115 - protein, 402 aa, unidentified
MNAVGIDVSKGKSMVAIMRPFGEIVSTPFEIKHTASDIRSLVELINSVEGESRIVMEHTGRYYEVLAHQLSEANLFVSAINPKLIKDFDNDSLRKVKSDKADAVKIARYALDKWQNLKQYNVMDELRNQLKTMNRQFGFYMKHKTAMKNNLIGILDQTYPGVNTYFDSPARSDGSQKWVDFASTYWHVDCVRKMSLNAFIDHYQNWCKRKKYNFSQSKAEEIYGKAKELVPVLPKDAITKLIIKQAVDQLNSASTTVESLRTLMNETASKLPEYPVVMAMKGVGTSLGPQLMAEIGDVSRFTHKSAITAFAGVDPGVNESGTYEQKSVPTSKRGSADLRKTLFQVMDVLIKTHPQDDPVYQFLDKKRAQGKPYYVYMTAGANKFLRIYYGRVKEYLSSLPES

SEQ ID NO: 186116 - protein, 431 aa, unidentified
MLKINPLSTLYVGIDVSSKSNYVCALDFYKNKYINSSFANNQPGAEELALKILECLKEHPDITTIVAALESTSVYSIHIANYLSSCEELMRFKPYVFVLNPKCTANYKKSYIGLGKSDPIDAFVIADYARAGNIESEPWRGSQFLALKRLTRHRLHLVECMTREKTYLVSNLYLKFSELQMLEGDDQPFCDIYGATSSSVLMEYLSPEEILASSEENLIAFLAEKSCNRIKDISKTADLLKKAARDSYRLDKALYEPLNVSIASSFNCIETFKREIKVIDNAIEKEIKGLNPNAFIILQSIDGIGPVFAGGIIAEIGDITAFHSSDALAKYAGLTWKSNQSGDFDGEDTPMIKAGNRYLRYYLGEAANSMRKHNVEYGTYYRKKYNEVPKHQHKRALALTSRKFVRLVYGLLARNQLYSGVSLDTSIKDSN

SEQ ID NO: 186117 - protein, 430 aa, unidentified
MAYRIAGIDVHKKMLAVVVSDVEVESEFRFERQMFGSNPEQLRSLAVWLLEQEAEEVVMESTAQYWKPVWEVLERYWKPIREQRQGASRKSGMLHLAQAQSNRGRRGRKRDFPDAERLVKRLVARELTLSFVPDAEQRLWRTVTRRKYQLTRDHVRLQNQLESLLEEAHIKLSSLVSNLLGASARRMLKALADGETNPAALAALADQNLRATPEQLCDALGACTDLKPVYRRLLKMALEQLQFLEQQIGQLDQEMASLLHPHQDAVQRLAEIPGLGVDSAQQIIAEVGPTAATFPSEKCLSSWVGACPGDDESAGVNYSHRSPQGNRHMRRLLNQSANAAARTKGSIFEIVYRRSVVRLGHNQAIGAIAHRQCRLIWLILHQGVRYEERGPAVTKRSKQKRTAKMIRQLRSLGYRVELINSQQAAPGPAQ

SEQ ID NO: 186118 - protein, 343 aa, unidentified
MQKVATVGLDLAKSVFQIHAIDCDGLIVTRRALRRSQVLEFFRKLSPCVVGLEACASAHYWAREIAALGHMVKMIPPIYVKAYVKRSKTDAADAEAICEAVTRPTMRFVPIKTADQQATGMVLKTRDLLIRQRSQTANAFRSHMSELGIITAAGMVSLAKLAQMMRDPDNIVVPDAARYALMEMIEQIDALTERIERLDRDILARVKKDEAARRLMTIPGVGALIAATVRTVVQDAHGFKTGRDFSAWIGLTPRAHSSGGKERLGAISKRGNQQLRTLLIVGATSILKLGKRGVKLPAWLAGLMARKPFKLVAVALANKTARTIWALLVKGGIYRKAVLPTPI

SEQ ID NO: 186119 - protein, 424 aa, unidentified
MMKLVYPICCGVDVHKNIFVATIVSTDNVGIATYQQKSFSTINYDIKIFHNWLIKNNCYHVCMESTGKYWIPIFNYLENDIDVCLTHPKYVRAIKGKKTDKKDSKWIADLYKFDLVRNSFIPPKDIRELREISRYRFKLVCMKSSEKNRIQNSMTVSNIGIASILSDPFGKTATEIISYLLTHTSESFDEKACRKLIKKGAKAKSDDIIAAINGYTIEADQRLKMELARNHLDYLDEMITKTEVELYIRIKPYWHLVELIASMPGMTEISATFTLAEIGIDMSVFEDAKHLTSWAGLAPTNNESAGKKKSVKIGKAGQYIKPLLVQCALAAVKSKKEPYFAIKYQNIKKRRGHKKAVIAIARMMLVCIYHIVSEEKPFNPTDYTELMDPHHHVDKVALNEANVFAYLQQQGYDISLIKKICNDN

SEQ ID NO: 186120 - protein, 351 aa, unidentified
MKYYKTTTEYNCGIDLHSKQMYVCLMDKDADIKVWCNIKGNDFDFFLRRIEPYRHDLTVTCESTFNWYWLADACMDADIEFVLGHALYLSSVRGSKHKNDKEDSKELADCLRSNRLPPGYTYPREKRPARMLLRRRMKYVWMRSGLMAHSTNSLMVEGLDPVTCGQHNRDRWRDALKDRHNNEQWKLSVDCDAHMIKEYDRCIGKIERAIVAYAKEHMSQDMWLLRSIPGVGDILGMTILYETDTVERFVSPENYSSYCRLVKGSVSSAGQIKGLKGGKLGNPYLKWALMEAVTIMKRHERVKKMSDKLEAKYGKQVGNAILANRLARAIYSMLSRKQPFDLDRFVTRRSK

SEQ ID NO: 186121 - protein, 351 aa, unidentified
MIYVGLDLHKRYITACALDALGQLLAEERRLTTDLAVLLAWLGRLTGPVTVVLEATLYWAWLEQRLTAAGYTVQVAHPYQVKLIWHARTKTDPIDARKLAELARVHLLPATWIPDPATRAQRQLLRGRAFLVRQRTVLKNRIHAYLTGENLRSPAVDLYGRTGRAWLATVVLPPVVRRYVDLLLANLDLLTTQILGLDKYIQRHVRQDLVAQRLQTIPGVGPFGALLLQAEIGPISRFHSAQELAAYAGLVPSTHSSGGKTHHGAIGRGSPWLKWIVIEIIQAHKLAPGPVGAHYQKLLRAKGKPKATVAAARKFVTYLYWMLKEEWSYSEWLRQHDHPEVRPTQLLGSVA

SEQ ID NO: 186122 - protein, 362 aa, unidentified
MFRPHTLYIRIRIVRKVHEPVFAMRDQDVSDVIKTKNRTAMQYIGIDVSKATFVVAYSSDKGGEIRTFNNTTAGIKQFIGTLPKDGSIHCVMEATGNYSALLLYMLNVAGITVSMENPLKVKNFARAMLSTVKTDKIDARLIALYGEKMNPQPFKVQGEAILRLRQKRTVIRQLTKQITAMSNLRGSLACLPVPDKGATHTVDETIKFLEKRRDRLQSELTDLVEVEFSRQLALLTTIKGIGITLATALILTTGGFTYFQNAKQVSRYLGICPTYEQSGTSVNIRGHINRNGDAYTRGLLYIAAWPASRFNAQCKETYTRLRQNGKPGKLAMIAVANKLVRQAFAVVAHDKEYIDGFVSNRP

SEQ ID NO: 186123 - protein, 387 aa, unidentified
MSQASDLTRCFAPYDQATTLIAVIELSLSSWLIAGMIPGFERQPLKKMAPDEAGLLQLLERWREEAVKAGSVINRMSVAFEAGRDGFWLARWLRTRGIDAHVIHSSSVAVSREHRRAKTDRLDTALLMRVFIGWLRGERGHCSMVAVPSIEEEDAKRPNRERENLVGERTRIINRMKSALARLGIRGFKPELRKAPQRLDTLSTPEGIPIPINTLDEFRRDLVRLALVREQIDAIERTRIAQLEAAPKTGPHAMVRLLAKILGLGIETADMLVNEVLSRNLRDRRAVARYAGLTGSPDESGKKRRERGLAKAGNARVRRGLVQLAWRFLLFQKESALVLWFRARTESAAGVRKTKMIVALARKLLIALWRMVTTGEVPAGVVLRPSP

SEQ ID NO: 186124 - protein, 350 aa, unidentified
MQMETEKKMSQSVWGGIDVAKDKFDAALYLPVEPGQMPRDIMSLPKKTFALTPDGVKKFHQWSVHIRDEAGIEGGKMRLVMEATGRYSKDLTRWFNEEMPFTGPAIEDPKTIKDFIKSLKLRNKTDEIDAGALARYGAERMPEPFQEMPEDYRYLQGLTRMRSALIDQLTAAEARLKEINGFKKLEKIQQQVVKSIAQAVKKMELEIKRCVNDSRELCENVKLASTIPGVALITASTVLGECGPLSRHTSRQMGSYSGIAPQIRQSGTSVRGSKISKHGPARLRKALYMASISAIECNPKMRALYDRLVAKGKTAMQARCAVMRKLLLLIRAVVVNKTEYQDNFSNKIRI

SEQ ID NO: 186125 - protein, 345 aa, unidentified
MYYCGIDIAMKSSYIYITDSRGRKKTSGEVATKAGVFRQRLRPYLRRGLGVAIEAGNQTAWIYDLLVDLGAEVTVVNPAKVKLIAESRRKTDKIDARVLCELLRLDGLPHPVHVPDKQTRSLRGLLVARRQLVSARSKLCNVVRGMLRQEGIGLPARSLMSFVGWQRLMDRSYTHEHLPIVLDSYYQSFVSLTRSIQALDKQLAKRERQDERAARLKTIPRVGRIASLTFLAAVDQVDRFDTSRKLVSYSGLCPTVRSSGERTEYGSISRQGRSELRAVWVQIAHLVVRDQSRSTARLRRWYSKVASHRGKRTAIVALARKLLAIAYRILKDETVYCSCLVSKAG

SEQ ID NO: 186126 - protein, 431 aa, unidentified
MTAVMIGIDPHKGSHTAVAISADEHPLGKMRVRACPAQAEQLAAWAQAWPERAWAVEGAAGLGHLLAQQLVAAGEYVVDVPPKLAARVRLLEAGDTSKNDPNDARSVAVAALRSKAPRPVIAEDHPVVLKVWAKRHRDLSRAHNQAACRLHAVLCDLVPGGVPEEITAARAEAILGQIRAWNAVATARRELAAELLADIRHLDAQRRATKNKLAAAVKASGTSLTTRVFGAGPVIAATVIGDVRQVSRFPGRDHFAAYNGTAPVEVSSGNRKIYRLSLHGNRRLNHAIHMAAITQIRHKHSDGRAYYERKIAEGKTGKEALRCLKRRISDAIYAALIADARQAATARPGGPGGQPGNHSVSRAAGSHPERRLFGQATPGPHPHPTAGRRTRTPGHRKGQPVPAPDAGDSSRTTPVGNRRPISISKKPSETS

SEQ ID NO: 186127 - protein, 385 aa, unidentified
MGNQRFIPRDYDVFAGLDVDKKSISATFIDHQGFLKSLNMPYKVEHLLNYVRKHYPDKKVAFAYEAGPTGYGLYDGLEAQAYPCLIASPSMIPKAPGQRVKTNRLDSRGISENLRGGQLKSIHVPTPLYRELRHLTQLRDTLVSEMVRMKQRIKSLLLMEGLEFPPAPAGSQWSFLVKKKLRELPCSSTVRFKLDRLLDSLEFDEKQVLKATREIRRFCQANPELFGCIEYLKTLPGIGWIVASQLVPRVGDWRQIKNIRQLPAFLGLVPTENSTGERTERGSITHTGDGRLRSKLIQASWSAIRQDGELREFFRTVAKKHPRHLGSRIAIVAVAHKLSVRAAVVLMKQRPYEVRQKVQSAPLTQEETVPQGTTRREPVPGEKHS

SEQ ID NO: 186128 - protein, 405 aa, unidentified
MLAVVITDAAREGEFQFQKRKFGTTASQLRDLRQWLTEHQVRVAVMESTAQYWKPVWQELEGRCQLQLAQAHSNRAPKGRKRDFADAERLLRRHIAGELIVSFVPDAEQRLWRTMTRAKHQLTRDRVRMHNQIESLLEEGRIKLSGWVSDLFGVSSRRMLRALAAGEADPAKLAALADRSLRATQEQLQDALSEASRMGALHREILGLFLARLDLIEEQMQTLDRNVAKALQAHHEAVQRLAEIPGFGIASAQQVIAEVGPTAASFPTPEQLSSWVGTCPGREESAEVSKSNRSPKGNRMMRRVLTQVANAAVKSKGSVFQILYRKMVVRLGHNKTIWAIAHRLCRLTWKILHLKVRYVEYGSRPNPQAVQKRANKLIKQLRSLGYQVQIQPVALQGTTPQAVTS

SEQ ID NO: 186129 - protein, 340 aa, unidentified
MPLYGGIDLHANNSVIVLLNEQDEVIYGKRLPNALSTVLDQLAPYHTEIKGLVVESTYNRYWLVDRLMEADYQVHLANPAAIQQYSGLKYSDDHSDARWLAHLLRLGVLPEGYIYPKAERAVRDLLRKRAHLVRQHTSNVLSVQNILARNTGARFSVKRIQELTKQELKSLLAEEPQVLAVTSSLAVLDCLRQQIKTLEKTVHKRLHHTPAYEQLLTVDGIGTILAQTITLETGAISRFPTVGNYASYCRCVDSNKISNGKRKGTGNVKNGNPYLAWAYMEAAQFALRFQPAAQRFYQRKLAKSRNNTVLARKAVAHKLSRACYYIMRDLVPFEAAKAFG

SEQ ID NO: 186130 - protein, 330 aa, unidentified
MVDEAGRILGSAEFVASTAGYRRLLGWMRCYGDPARIGVEGTGTYGAGLCRYLQAEGVQVVEVDRPDRRMRRRQGKSDAIDAEAAARSVLAGTATAVPKNRDGIVESIRALRTARSGAVKARSAALNALHGMIVAAPAELRSALEGLPRSALVRTCAALRPDRQRLAGPTQATKVALRSLARRIVMLDAEVDELDVALSQLVHRAAPRTIALRAIGVDHAGQLLVTAGEQPERLRSEGAFAHLCGVAPIPASSGRTQRHRLHRGGDRAANRALHLAVVVRMRCCPRTRRYVERRTAEGLSKPEIMRCLKRYLAREVFRTLTADLLELRGA

SEQ ID NO: 186131 - protein, 369 aa, unidentified
MADRITYVGLDVHKESIVVAVAEGGLRGEVREYGRIANTATALDRLLRKLGDAGMVLRFCYEAGPCGYGIQRHVSARGHECVVVAPSLIPKRAGDRVKTDRRDAASLAKLHRAGELTAVWVPDPQHEAMRDLVRARLDAVHSLRRARQQLSGFLLRQGCHYGRPAWTKLHRRWLAGLIFEQAIHHIVLEDYIAAVEAAEARRDRLTAQIGTMLPDWTLAPVVAALQTMRGMAMVNAATLIAELGDLSRFADPRQLMAYLGLTPSEYSSGSSVRRGGITKAGNGAARRLLIEAAWSYRFPARLSRELLLRQESQPKPIRDIAWKGQVRLCARYRRLARTGKPANVVTTAIARELTGFVWAIARQVTVTPG

SEQ ID NO: 186132 - protein, 407 aa, unidentified
MVVFAGIDWGSGAHAVCVIDDKGAVRDRFNTKHDGEGLAGMLSRLRKVAAPGDLRIAIERPSGLLVDTLVEAGFVVVPIHPNVVKACRPRYRAVAAKSDPGDAYILADILRTDGHRLRPLVPQSDAIKSLRSLVRGRDDLVSTRVALANQLTALLDGFWPGAANVFADIASPIALAFLDRYPTPEAAHRLGPKRLAGFLAQNSYCGRRSPENLRERLQVQPRGHAGEAESEAKGEIVRALVATLRVLVAQIAQITARIEYLVAQLPDGRIVMSFPRTGKICAAQILAELGDVRERFQTEDQLAAEAGVAPVTYESGKSRGVGWRWACNKRLRSAITCFADNSRHQSPWADDVYKRARQRGCDHPHAIRILARAWVRILWRAWQDRTLYQIQKHPAAALVQTAALPNG

SEQ ID NO: 186133 - protein, 414 aa, unidentified
MELLHERCAALDIGKKDLKACVRTPSPKGKRSRRQEIRTFATTTNALLELRDWLVAEQVSLVVVEATGDYWRGAFYLLEDQLNVILVNAAHAKGLPGRKTDVCDAAWLCQLGECGLLRASFVQPEPIRQLRDLTRYRTTLTAERSREAQRLEKELEDAGIKLSSVATDITGVSGRAMLAALIDGERDPQVLAEMAKTRMRPKIPHLVQALTGNFGEHHAFLCRLHLQRIDELTAAIAELSARIAEQMRPFARQLEHLMTIPGVGQTVAEVIVAETGTDMGRFRTGANLASWAGVCPGHHESAGKRKSGKTRHGDRWLTGALGTAAMAAARTKDTTYLGARYRRLAPRLGKKKALVAIEHSILVAVWHMLTNNVDYHDLGGDYFARLDPERAMRRIIRQANSLGFTVRFDPIQAA

SEQ ID NO: 186134 - protein, 403 aa, unidentified
MNAVGIDVSKGKSTVAIYQPGDQLVLKPCDFRHTQSDIRSLIGIIRELDGETKICMEHTGRYYEPVASWLSDAGLFVSAVNPILIKNFGDDSLRAPKTDKADAKKIARYTLDRWAKLKQYGRMDETRNQLKTMNRQFGFYMNQKTAMKNNLIALLDQTYPGANAFFDSPARSDGSQKWVDFVYTYWHVDCVRGKTLEAFTEHYKNWCKRKSYNFSAAKAKEVYSNSSDLIAVFPKNTNTKMLIHQAVEMLNLASRTVESLRSEMDQVASTLPEYPVVLAMNGVGPTLGPQLMAEIGDVTRFTKRGALTAFAGVDPGKNESGQYSQKSVPTSKKGSPHLRKTLFQIMDSLIQRSPADDPVYAFMDKKRAQGKPYYVYMTAGANKFLRIYYGRVNEYLSSLSEDE

SEQ ID NO: 186135 - protein, 370 aa, unidentified
MNSIIYVGMDVHKASFTLSCFSVTTQETFATVKISPDAKAIKKYLDGVSLSRSEECEFVCGYEAGCLGYTLYHQLTAMNIRCVIMAPTTILRNGKRVKTDRIDAENLARCLAYGGYKSVYIPTAQDEAVRDYLRMRDDHKLMLKKIKQQINAFCLKHNKIYPGNKSKWTQAHVKWLNALEFDGYLQDAFNEYMITYRELADKVERLESQIEQLAELEEYRDKVKKLICIKGIKTHTALSLIVETGDFSRFQSAERYASYIGLVPGEHSSSEDQNRLGITKAGNRHMRMLLIEAAQCYSRGVPATKSKDLKSRQKGASPEVIAYADKASIRLRRKYIRMELVNKKKANVAKTAVARELACFIWGMMTDNIA

SEQ ID NO: 186136 - protein, 345 aa, unidentified
MKLYGGIDLHSNNCVIAIINEHGETLSCKRLNNDISVILSFLAPYKDKLTGLVVESTFNWYWLVDALMDAEFKLHLANPAAIQQYSGLKHADDHSDARWLAEMLRLNILPEGYIYPRELRAVRDLMRKRMDIVQQSTKNLLSVQSCYMRHLGYKLSSNKIKQMAAIRKGVNVEQVHTDFSSTNTALSVISNLSLIRCAQQQINAIESAILQQTSLSPEFINLTSIDGIGNTLALTIMLETGTIKRFDSPGNFSSYCRCVKGARYSNGKKKGATNQKNGNRYLAWAFTEAANFAIRYNPTVKKYYQRKLAKTNQVIAIKTVAHKLARACYHVLKDNVPFDEYKAFA

SEQ ID NO: 186137 - protein, 342 aa, unidentified
MSELTTVGHDLAKNVFQAHGADASGRTVLRKKLRWDQVLAFFSQLRPCLVTMEACGGAHFWGREIGKLGHEVRLIPPAYVKPLVKRQKNDAADAEAICEAAMRPTMRFVPVKSEETQGAALVFRIRELLIRQRTQAINALRGHLTEFGQIAPKGAANASRLVAIFEAPLNGLPEQAVTTLRVLVEVIRGFDTQIAKLDAEIRHRAVENELARRLMTIPGIGPLIATALDTLAPPPETFRRARDFAAWLGLVPRQHSTGGKQRLGATTKMGERSLRRLLILGANSVIIKRHVHALAKPGTWLAGMLSHKPPMLVRVALANKMARIVWALMMKGEAYRAPTVAA

SEQ ID NO: 186138 - protein, 384 aa, unidentified
MPDVSSNAPAMVRMRAALDVHKRSIVCASQPDDPRAGELRVQEIPNTERAIRGLVRRLGGPEGLVVCYEAGPCGYDPYRLFTAIGVACDIVAPALIPRAPGARVKTDRRDAKRLLVLHRAGALKFVYPPTPAQEGLRDLVRCRDDLVCARRAARHRVVKQLLRYGHIYREGKKGWTKRHIAWVRRQRLDDPLAQAALEHMLAHLDSVDAQIAALDHQLDEIAAREPWSDPVRWLCCFRGITTLTALALLAEIGDFRRFATARELMSFLGLTASEYSSGDQRHRGHITKTGPRHARRLLIEAAWHYQHAPRVSQRIAAVQPHVSPDVAERAFSAQVRLHHRHRHLTQHSKRSTVATVAVARELAGFLWAAMTRQPLNQPDPTPTA

SEQ ID NO: 186139 - protein, 367 aa, unidentified
MAIGKPIAISEDREGYETLLRALGAPPVLVAVEATGHYWKNLFAALTAAGHQVALLNPLLARRFQDASLERTKTDAIDATGLARLAFEKRPAPTRLHDEASEVLRELVRHRDRLRQDFDDRVRQLHRLVDLGFPEFTRYVRSLDSMLATCLLAEYPTAHAFARATPRRLARLRYDGRHLVGDELARQLIETAKHSVGHHHGPAYTLQARHICQDLDLWRRRLAEIEHDIEDLLDTHEVGKLLLTIDGIGPQSVARIIAAVGDPARFTCAAAFAAYVGVVPGLRQSGKRSSVRAAIAPLGNARLRMALWMPVLGAVRRNPWLRAFYERLRAAGKPAKLALIAAMRKLMHAIYSVAKNRRPFTPNLATG

SEQ ID NO: 186140 - protein, 423 aa, unidentified
MAAREKVGEPEFVAFVGIDWADQKHVWCLQAANSSKREGGELEHKPEVVEAWVSELCRRFGHGPIAVAVEQVKGALVYMLGKYECLHLYPVPSTMSASMRQALYPSGAKDDPRDADLLLQNRDKLRRLTPDNEVTRRVQNLVEERRKLVEEKTAQLNRLTGYLKVYFPQMLEWFAKLDTKLACELLERWPSLEELQAAAPAEVRKFFRQHRGRHPELTEWRLQGIGQAMSAIRDGAVIEAKGMVVQVIARVLRTLLEGIAALDGKITEAAEAHPDFFIFQSFPGAGAALAPRWLAALGSQRDRYASAEEVQKYSGIAPVTERSGKKKWVHFRWACPKFLRQSFHEWAGHSIAQSVWARAYDQQQRQRGKDHHAAVRALAFKWIRIVFRCWQVGAVYDENRYLATLAKRGSPLIPVSAAAATGL

SEQ ID NO: 186141 - protein, 408 aa, unidentified
MNPLYVGIDVSSKSNVVYLMLPNGDKHSNFSIANSHDGSTQLVKRIHSALTSHSLDTVLIGLEATSVYGDNLVYFLREDATLAPFSRKIHVLNPKQVKKFKDAYNDLPKNDYVDSFVIADCLRFGRINKEVYLGDYHYKALQNLTRARFFAVNNLIKEKQRFMNVLFKKYSTMTQEKVFSDTFSATALAVYDEFESAETLANMDLQELTDFIMEKGKNRFPDPNAVAKAIQKAARSSYRLPKTVNDSVNQVLSISITSMKALESQIKEFDKAIAAQMELLPNVLTSIPGIGPVFSAGIMAEIGDINRFENHAQLAKYAGLAWKQHQSGDFEAQNTRLIKSGNRFLKYYLCEAAFSLVRCDKEYNDFYHLKYKEVNRYQHKRALALTARKLVRLVFRLLKDNRLYRPAE

SEQ ID NO: 186142 - protein, 342 aa, unidentified
MAIVILGVDLGKNSCSVVGVDETGAVITRRSMRRQTLIGYVAKLPACMIAMEACCGAHYLGRLFETHGHQIRLMSPEYVRPYVKAHKNDDRDAEGIAEAASRPTMRFVDIKTQQQLDVQTLHRIRSRLVAERTNLINQLRAILLDRGVIFPAGRRKFQQGVDSLPIDESCILSPRIRQLTGDLRQEWRELDAKIEALNDEFIALARNDDNMRRLTSIPGIGVLNATALVAAVGDGRTFAKARDLGAWLGLVPRQHTTGGKPRLLGISKRGNTYLRTLLIHGARAALPILSQNNTPLGHWLKAMIERGVHRNAVVVALANKLARIAWAVLCKKGTFERGYPAV

SEQ ID NO: 186143 - protein, 345 aa, unidentified
MTITTLGLDLAKNVFQVHGIDEAGEVVVGKALRRRQMMPFFSKLDPCLVGMEACATSHYWARQLSQLGHQVKLMPPIYVKPYVKRGKTDAGDAEAISEAVTRPTMRFVAIKSLDQQSMLALHRTRDLLIRQRTQLVNMIRGQLAEFGIVLAKGIQHVHKFTGQLLGGEVLDIPPLAVSVIVTLAEQLRDLQARIGGLDKDIRTWSRGNEVVKRLLTIPGIGIITASALVATVTDPHQFTSGRQFAAWLGLTPRANSSGGKERMGRISKMGDQYLRRLLVNGMTSLSQSVRRNPDAHPWAASLMRRKPDKLVAVAMANKTARIVWVVMTRNEIYRLPQTSTMKEPA

SEQ ID NO: 186144 - protein, 422 aa, unidentified
MLEETHDSDQIIQRVGALDVGKAELTCCVRVPGQGGPGRRRQEVRTYQTMTRSLLVMADRLGELGVTRVVMEATSDYWKGIYYLLEAHGFEVWLVNARDVKHLPGRPKTDTLDAVWLCKLAERQMLRPSFVPPPAIRQLRDVARYRADLVAARTAEKQRVEKLLEDAQIKLSVVASDIFGVSGRAMLAALVAGERDPKILAQLARTRLRAKLGPLVEAFTGFFTDQHAFLLAKMLARVDGLDADLAELDAKLAELIGPFAQAVDRLDEIPGVGQTAAHLLIAEIGVDMTRFPTAGHLVSWAKFAPGVKESAGRRKGSGSTGHGNPYLGRVLGEAAVAAGKTNTFLGERYRRIARRRGKKRAIVAVGRSILVIVWHLLSDPTVRFHDLGAGFYDTRIGPERAKRNHIRQLEALGYKVTLEPAA

SEQ ID NO: 186145 - protein, 423 aa, unidentified
MVVIFLLDQLNSVYVGIDVSKLSNQVFITDFNQSLSKAFSAPNNNHGAELIETNLLSFVKNTQFTHIIAVLESTGIYSTHIATYLSASEKLFPYHIEVYCINPKISKNYRASFADMDKTDPKDAFILSDLARVGRTTSMTPFKGSQKLALQRLTRHRVHLVELLTKEKNYVLTNIFLKFSEFGNKDSKFTSNIWSKTAIAILEEYSSPEDIINTPFKNLVAFIMKTSKNRFDNSNEVAELIKKAANASYRLDKSAYKPINHAISSSLVIVHCYEDEIKKIDKSIDLLMKGFSHHEYLSLRSIPGIGPVFAAGILSEIGSIYQFDSEESLAKYAGITWRKNQSGKFEADDTKMTKTGNHYLRYYLIQAGNSVKNYIPLYNDYYHKKFNEVTNHQHKRALALTSRKLIRLIYGLMSKGQLYNKNY

SEQ ID NO: 186146 - protein, 398 aa, unidentified
MTESSDYESVQVFIGVDVGKDTHHAVAINRSGKRLFDKALPNDENKLRSLISDLKQHGQILLVVDQPATIGALPVAVARSEGVFVGYLPGLAMRRIADLHAGEAKTDARDAAIIAEAARTLPHALRTLKLADEQIAELSMLCGFDDDLAAQTTQASNRIRGLLTQIHPALERVLGPRLDHPAVLDLLQRYPSPEKLASLGEKKLAAQLCKLAPRLGKRLAADIAQALAEQTVVVPGTNTAAVVLPRLALQLITLRKQRDEVALAVEQRVLAHPLYPVLTSMPGVGVRTAARLLTEVACRAFASAAHLAAYAGLAPVTRRSGSSIRGEHPSRRGNKALKRALFLSAFAALRDPLSKAYYTRKMSQGKRHNQALIALARRRCDVLFAMMRDGTFYTPQAS

SEQ ID NO: 186147 - protein, 341 aa, unidentified
MSVIIGIDPHKALHAACAIDRTEVELSKLQVRTGPRQLPELLAWAAPFECRTWAIESAGGLGYLLAQQLVARGEHVVDVPATLSARVRVLGSGRSNKNDANDARAVAIAALRSPSIAAVRAEDHISVLRLLAKAQLDTTHARSRSCSRLHALVRELVAGGIRKEIVVGQADQVLASIVPVSAAQRQRLELAHETLDEIRLLDARLKRSKTRITEAVNASSTTLTGIFGVGPIIAALTIGYTGDITRFPTAGHFAAYNGTAPIEFSSSGRTVHRLSRRGNRTLNHAIHMIAVTQIRHLDSEGRSYYDRKLTEGRTRREAMRSLKRHISDRVFKQLRLDAATK

SEQ ID NO: 186148 - protein, 320 aa, unidentified
MSALSVVVGIDVAKASVDVAVLGAELHVRHFDNAADGHSLLAAALTPLQPTLVVLEATGGYEAALVCALQAAGLPVAVVNPKQARDFARAMGRLAKTDRIDAQALAEFATVLARRSDLPRLVQPLPDALQRELSALVTRRRQLLTMLGSERLRLPLATPTVRPSIEVMIQAIKAQLDEIEGQMTRHVDAHFAALDTLLRSAKGIGPIASATLIATPPELGRLNRRAISALVGVAPIANDSGTSRGRRRIQGGRFEVRRVLYMATLTASTRNPTIRAYYQRLIAAGKLPKVAWVACMRKLLTTLNAMVRTGTHWMSPAQLA

SEQ ID NO: 186149 - protein, 366 aa, unidentified
MKKISTLRTFRSKRFKEHKLTIGLDLGDRLSHSCILNEAGEVILEQRVPTTAKGIDEVFGKIPPSRIALETGTHSPWVSRQLARWGHEVIVAHARTVRLIGDSSRKDDRLDARTLARLARIDPGLLGPVQHRSAKAQIHLTVIRARAGLVSARTALVNAAWGLAKSYGERLKKCGTAQVSRDLGAGLSAELRDALEPLLREVESLNARIAEYDRRIEQIAKEVYPSVALLKQVKGVGTLIALTYVLTLDDPHRFRRSRDAGCFVGLRPGRRNSGRSQPQLHISKEGDRYLRTMLVQGAHYILGPFGEDSDLRRWGLRLAERGGKNAKKRAIVAVARKLAVLLHKLWVSGEVYEPLRNNRKAVQAVA

SEQ ID NO: 186150 - protein, 368 aa, unidentified
MMEWMAPLRHLGAKMLGGQRPPANGEPSMGEITTIGLDLAKHVFQVHGVDAKGAAVLRKQLRRGQVLTFFSKLPPCVVGLEACATAHYWARELGALGHEVRLMPAQYVKAYIKRNKNDAADAEAICEAVVRPTMRFVPTKTAEQQAALLLHRGRERLVRQRTALVNALRAHLAEFGVIAPQGLRNVGKLIAIVRNEEDARLPDAARQVLQVLAAQIEQLETAVAALEKQLMAWHNSNPVSQRLATIPGIGPIIATAIAATVVEPSGFRSGREFAAWLGLVPRQNSTGGKNRLGGISKRGNQYLRRLLVNGASANLLRSKATNADPWVIGLRRRRPSLVVAVALANKTARIAWAVMHRQEGYQRAAAAA

SEQ ID NO: 186151 - protein, 374 aa, unidentified
MSQSSTLYVGMDVHKESIAVAYVAQAHGAEVISLGTVGTRQCAIDKLLRHLQSKSPQLVFVYEAGPCGYWLSRYLMNKGDVCWVVAPSLMPKKPGDRVKTDRRDARQLARLMRSGDLTPVYVPAVDDEAIRDLSRAREDTLRDLKAAKLRLKAFVRRHDIRSTGRANWSPAHLRWLSEVVCPTPAQHIVFQEYVQTVTEQTERLQRLEHELHEQVKTWRFQPVVEALQALRGVQCTVAVTTVAALGDLTRFDNPRQLMNYLGLTPSEYASGARRQQGSMTKTGNTHARRALVEGAWAYRYPAKVSRHLHLRLENLPKAIQAISWKAQVRLCKRYRQLLAKGKNAHQVVVAIARELSAFMWAIAKQVTMAPKDQI

SEQ ID NO: 186152 - protein, 356 aa, unidentified
MTQAEPARSGHVVIGIDTHKHIHVAAVMDTIGGILATLTIATDTAGFRQLLDWAGTFGRIISFGIEGTGSYGAGLTSFLRRQGHKVVEVSRPDRRLRRLNGKSDTLDAENAARAVLAGFATATPKTMDGAVEMIRQLKVAHDTAVKQKAATMVTLKAMLVHAPEQLRTETARKTQRALARHCAAFRPRSLESPEDANRHTLRSLARRWLMLDEEIKELNGMIEELVLGRAPHLLEEFGIGVDTAAEILIVAGDNPGRIKSEAAFAKLAGISPVPTGSGMTSGKHRINHGGHRQLNAAIYRTVIVRMRFHQPTIDYVARRTAEGKSKRDIIRCLKRYVIRELYHLIKVNPRTGEIMS

SEQ ID NO: 186153 - protein, 412 aa, unidentified
MDVYCGIDWAEDHHDISVVDRDGQLLARRRISDDAAGLAALLGLLAEHGDNPGDLIPVAIETPRGLLTACLRATGRKVYPINPMSVARYRDRHSVAGRKSDHGDSFVLANVLRTDMHAHRPLPADTELAQAIAVLARAQQDAVWDRTTAHNKLRSCLREYFPGFLAAFADARGGITRPEARIILAAAPTPADAATLTLTQLRGLLKKAGRIRGLDTEATRLRDAFRVPQMRQLPLVEDAMGRQALALLGQLDAACAAADGLEQAATQSFNLHPDAGIITSFPGLGALTGARVLAEIGDDRSRFQDAKGLKAYAGAAPITRASGKTKSVTHRRVKNNRLNAAGYSWAFSALTASPGARAHYDRRRDDGDRHAAAQRNLFGRLLGCLHHCLTTGQRYGETIAFPAIGKELPQAA

SEQ ID NO: 186154 - protein, 382 aa, unidentified
MNENAKSSVSVYAAIELSKSTWLVAVLSPSSDRVKLRQVRGGDTEALVAMLNRTQADAAQIDGRPAEIVVCFEAGYDGFWLARFLRKRGIRTSVLDSTSFLVNRRSRRAKTDRLDAESMVRMFRSFDQGDRTVCREVRVPTPEEEDAKRLDRERLQLSAERTRHVNRIRALLNLHGIREVKALWGGDWRKWLQVVRTADDQPLGKFLAAELTREFERLELVHAHIRDLDRDLEDGLKDCTLGIPNVDKVYRIATLKGIGRLSAVLLVSKVFHRQFANRKCLASFLGLAPSPYASGAVKHDQGISKAGNRFARRLLVELAWCWLRYQPASALSQWYRSSFGAGSGRSRKIGIIALARKLAVAIWHFAEDGLVPQGASLKADAS

SEQ ID NO: 186155 - protein, 339 aa, unidentified
MQVTTVGLDLAKNIFQVLGITDNGEVAFNRAIRRAQLLKFFESLDPCLVGIEACGTSHHWARELVKLGHDVKLIPPIYVKPYVKRGKSDAADAEAICEAVTRPTMRFVEIKTPDQQAILALHRTRDLVVRQRTQTINMLRAQLAEFGIVFPQGVGHATKFAKRRSEGEVIDLPDTAGGVIAELCEQLLFLHGKIANYTLEMTQMAKREKRVALLQTIPGIGPITASAIVATIGTGQQFSTGRDFAAWLGLTPLNRSSGGKEKLGRISKMGDRYIRRLLVIGMMSRMRQVQLNPDRYDPWFADIIARKPGKVAAVAMANKTARMVWAVLTKNEPYRVRAI

SEQ ID NO: 186156 - protein, 326 aa, unidentified
MKKNIIGIDISMDKLDYCNLEEDTVEVLQKGVLLNEKKTISKWLRQFDSDQVIFAFEHTGHYGAMLAECLTNKSFKYYLLNPYNLKRSLGVKRGKTDQKDAYNIAEYAILNKHKLNYYKLPTQQLRKLKALMTAREKFVKISVQLQNSIKANIILGKTIDLKMLIKEEKKQLKNIKQSIKNIKREIKEIIESQQELKQSYDKITQVIGVGPIIAAKCIVVTNNFLNFKDGRKFSCYSGFAPFPYESGSSVKGKTKTHFLRDKPLKALLIKGALTAINHDPQLKKYYNRKVSEGKDERSVRTAVANKLILRIFAVVNREEPFIKLSA

SEQ ID NO: 186157 - protein, 406 aa, unidentified
MNAVGIDVSKGKSTVAVLRPFGEIVVSPFDVSHSPKELSKLVTLLKTLNGDTKVVMEYTGNYYLPIALFLRNNGFFVSVVNPILVKDYSTKSLTVRKVKTDKKDALKIASFALDRWNELSPFSAQSEARLLLKSYNRQYNQYNKLKIILKNNLIALLDQTFPGANTLFSTPTRKSDGHEKWVDFVLKFSHSECISKKSFSFFLKSYLSWCKKFGYKFSKSKAQAVYDFACNCSPSLSFSDSSVLLVSNAIIQLNSINETLASLASEMNKIAATLPEYDSVMSMFGVGSVLGSQLIAEIGDVSRFPNKKALVGFAGLDASPFQSGNFNPQSRSISKGSAALRKTLFQVMSVVLQRAPTNNVIFQFMDKKRSEGKHFYVYMTAAANKFLRIYYARVTEHLNLFTTTTA

SEQ ID NO: 186158 - protein, 321 aa, unidentified
MQGKVTTEETASVYVGVDVCKDHLDVCLHPLGERFRVGNDRDGRRALVRRLGRHKVALVAMEPTSKYHRSAHRQLATAGFAVALVNPLRARLFAEACGRLAKTDAIDAAMLALMAERLAPAPTAPPTLAEEQLEELASARSSAIAERVALDNRRSMASAPFLRRELAARLRSLDRHIARLEREIEIAIAADPATARRAEILRSIPGVGPVTTIAFLAWMREIGQLNAKQAAALAGLAPVAHDSGPARGKRRIRGGRGALRTTLYMAALVASQRNPDLKRFYQQLKSRGKPPKLALTAVARKLVILANRLVSENRTWMPLAS

SEQ ID NO: 186159 - protein, 343 aa, unidentified
MKLSRVGVDLAKNVYQLHGVDRFGKTIWKRRLKRHQWLKVLLDKTEPGCVIGMEACASAHHWGRELQSRGYTVKLIPPQFVKPYVKSNKNDARDAEAICEAMSRPNMRFVTVKTVAQQDIQATHRIREEFKIRRTAKANQIRGLVAEYGLVAPKHMRSLRAAIPCWLEDAENGLTHYFRSLLHGLWNDLLALDDRMCEMDKTIKRLAKDNEDCVRLEQLRGIGPMTSTAMIATVGDARQYHKSRQMAAGIGITPRQHSSGDKHRLLGISKRGDVYLRTLMIHGARSVVTGAKHKDDPLSRWVTEIAKRRHPNVAAVALANKNARMAWAILRNKTDYDPDFAMS

SEQ ID NO: 186160 - protein, 345 aa, unidentified
MTIVEAGRPITGGVDTHRDVHVAAALDPLGGLLGVESFETTPIGYRSLVLWLSSFGNLTRVGVEGTGAYGAGLARFLRRAGVEVIEVDRPNRQARRHQGKSDGADAVEAARAVLSGRASGVAKTRDGQVEAIRTLLVAKRSARDARIRALNQIRHLSFTGPDELRARLKGLSSAAVAAKAARLRARRGDPVVFATTVSLATLGRRVLALDDETTRIDELLGELVATTAPNLLEIYGVGVDTAAVLLVTAGDNPERLRSEAAFAHLCGVSPVPASSGKVQRNRLNRGGDRQANQALWRIVMTRMSFDPRTRAYVDRRTKEGRSKREVIRILKRYVVREVYRQLPRA

SEQ ID NO: 186161 - protein, 316 aa, unidentified
MNSTECSVIGIDASKQRLDCCWGKTNSSFHMANTAQAIKAKLVALRQEREDIFLVVESTGKYHAVLFRVATELEIPIAIVNPKRIRDFAKALGQLAKTDCIDARIIARYALTVALEPTKAPSEELQNLRALVTRRTDLVRMVTQERNRLGDIDDPILTKSLRRHIKWLLGECKALEAQIKATLKSAEFVSKLSMLRGFKGIGDLSAAALIAFLPELGTLTKSSIAALAGVAPFADDSGSSCKGNRRILGGRSSVRSALYMSALTAARWNPIIKSFYQSLRDAGKPFKVALVAVMRKIIIILNAMLRDNSNFRTVQA

SEQ ID NO: 186162 - protein, 327 aa, unidentified
MRQPVLGIDISKATFDVVLLIGEKKLHRQFANNSEGFNQLDSWLHKNGANKVHACMEATGQYGESLAEYLYQNGHNISVVNPARIKAYAGSKMRRNKTDKTDAELIAEYCLKENPSLWSPPEADFRDLQAMERHLEDLQAMLLQEQNRLESGVKTFWVVEELLNHIKYLKERISATKEAMQDLIKTNAKLKREHDLLVSIPGIGELTAAKILGEIRDIHQFESARQLAAYAGITPRQFFSGTSVHKKSRITKTGNSNIRRILYMSAISAKKYNPIVAVFCARLLQNGKTPMQAVCAAIHKLLHLIFGILKSGRPFDPNYLQVSTITP

SEQ ID NO: 186163 - protein, 372 aa, unidentified
MEYPEPPLVGAEPCRGRARITSSAGDGTGSGDRTRTIRPTGLLSHPLLVGVAVSRHRHHAAASDGRTRRFDNTASGHRALAVWLQRTARVVIEATGTYGLDLALALHGDDRCEVMVANPRLIKGFAQAVAQRSKTDAADAKTILAFAERMPFEPWSPPEADVLELRAMARRIGDLPVERTRERNRLSALRASAAHSRAVAGDIEVNLRHLERRIERMVARAVALIEDHAGLAEAYDHLTSIKGVATKSAVALLPELLVLPPTLSPKQWVAHAGLDPRDHESGTSVRRRARISKVGNAHIRRARYMPALVASRSEPRVKAYYEELRARGKPARVAHVAVMRKLLHAVHGMLRHGADFDGERFRATPQKAAAEA

SEQ ID NO: 186164 - protein, 364 aa, unidentified
MTLYLGLDVHSKMTVYCAQNERGTVIAQGQTPTSPAGLTQMLQALAAPPATPIALESGTQAGWVCGLLEDLGMAPRVIDAREVRAKARNKRQKCDRRDAFEICDGLRRDLWVSRVWVPTPTIEQMRSILSRRRHFVSLATAQINAVKFLLRARGQSRLYRSLQSEVAWDKLLAQSALVGLAAHLALHRAVWSQARAATRMLESELLEVARPLAATLELLQTLDGIGPIVAATFVATLGTPERFPDASRVVGYTGLGVSTYDSGETQRHGRITKTGSGELRAMLCEAAHHAARATHPLHPYFARLVARKGVKAAVVAVAQRLARILYQMWRNGQPFDADRLNVAPVRKLKSRTIHWEIRPVAAQR

SEQ ID NO: 186165 - protein, 355 aa, unidentified
MSQEKYIGMDVHQATVSVAVVDSGGKLIMECILETKAGTMVEFIKGLRGTLSVTFEEGTCAAWLHDLLKPRVSRLVVCDPRKNALLKDGSKSDRIDARKLAELLRGNQLTPVYHGDHGLRTLKELGRSYLTITGDLTRVMSRIKALYRSWAIPCSGTTVYAARHRSEWLAKIPQPGVRLRAERFYQQLDLLRPLHQQARCDFVVESHKHPAVKLLRQIPFIGPIRAALLVALLQTPHRFRTKRQLWAYSGFAVETHDSGEYRYVRGKLLRNRERISVRGLNDNYNHDLKNLFKSTAISASTRPGPLRDFYVALLAKGMRPTMARLTLARKIAAITLPMWKKGVDFDAKQLDQQAV

SEQ ID NO: 186166 - protein, 339 aa, unidentified
MNKITTVGVDLAKNVFHVVCCDVQGKIVKKKRLKRYQLKAYFAQLPACLIGMEACASAHYWGREFRQWGHQVKLISPQYVKPYVRGNKNDYNDALAIAEAVVRPEMRFVTIKTIEQQDIQALHRLRERRIQDRTALCNQLRGLLAEYGLILAQGVNVLRRSIPDFLEDAENGLTPFFRTLLAQGYEQLQQLDAHIEAYTQMLNVHSQQHEACQRLQDIPGFGPIVASAFYSAIGNGSGYRRGRDASASLGLVPRQHSSGGKDTLLGISKRGDRYLRSLLVHGARAVVSRAANKEDRLSRWINRLVAQRGFNKAVVALANKLARIGWAVLAHNTVYQAAK

SEQ ID NO: 186167 - protein, 425 aa, unidentified
MAMVMIGVDPHKASHTAVAIGAAEEPLGQLRVRASAVQAGRLLEWARAWPERTWAVEGAGGLGHLLAQQLLSAGERVLDVPPKLAARVRLLATGNINKNDPNDARSVAVAALRSADVREARRDDHAAVLKLWSKRYRDLGRARTQVACRLHQVLCELIPGGVPGEITAGQAGQVLASVTPAGAADAARWELAAELTEDLRGVDARIRETRKKAAAAVRAAGTSLTGLFGVGPVIAAAVIGDVRHVSRFGNRDRFAAYNGTAPIEVSSGGRKVYRLSRRGNRRLNHAIHMVAITQIRYRHTKGRAYYDKKLAEGKTPKEALRALKRQISDAIFACLQEDARRAVAAAKSPGGQPGNHSASRAAGSHPDHRLFGQATPGPAAQPTTPAPFPAQLPSRASGQPGQGPGAARPRSGARRASSTRPPASR

SEQ ID NO: 186168 - protein, 367 aa, unidentified
MNSLIYVGMDVHKETIAIAVFRDSNRNVEFEKTIKNEPGKIKKFFNKLKEKGESILSCYEAGPTGFDLYRILEEMNITCYVAAPSLLPRKPGDRIKTDKRDAIMLAKVLRNGDIVSVHVPTRSDEAVRNYLRMCNNTKSDLKRQKQRLLMFLLSIGIKYETGKKYWTGAHRKWLKALEFEEELSQSVFDEYYIAICELEEKISKLKDKIEEIAAEARYTEKVSKLRCFKGIDTLTALTFVSEIGDFRRFRKAAEFMAYMGLVPSESSSGDKRRLGSITKAGNSRLRKLLIESSWHYKHYVPSKRLTMRRKGQSSETIAYADKAGRRLSKKYNKLLLRGKISQKIVTAVARELSGFIWGMMAGKTSLV

SEQ ID NO: 186169 - protein, 324 aa, unidentified
MNYAALDLHERTVQCVLKDQDGRIVKESKTVKDEGRILAFLDGTDASVVMESGRNHQHIYDVLKERGYDVTVAHPLMVKAIAYAKVKTDRVDARVLADLLRADMIPESYVPGRDIREIRDLVRRRHYMVKLRTMQKNKVHAELATRWLKYEGDPFTEDGKIYLRSLAIDAVIDYLETIEFLNRKIHQLDEKVRRVVESDKSAKLLMTVPGISYYSALLISSEIADIDRFPDHEHLCSYAKLSPGVRQSGETQRTSRSIGNSLMNWIMIQCTRVHVRRYDSAITRFYQQVSKRRGEKVAIVAAARKLMRAIYIMLKEEQAFRLDG

SEQ ID NO: 186170 - protein, 404 aa, unidentified
MNNVAGIDVSKGKSMVSVLRPFGEVVAKPFSIGHTGSELKELADYLKSLDGETRVVMEHTGRYYEPVARFLHEEGVFVSAVNPKLIKDYGNNTLRKVKTDKADARKIARYGLDNWAELRQHTPMDTIRMQLKTLNRQQSLYAKTKTMMKNNLIALLDQTYPGVNALFDSPVREDGSQKWVDFAASFWHLDCVRGLSLASFTQRYQKWCKRHGYNFSSGKAAEIHESTKNQIAMLPKDAMTKMLVHQAIEQLNAASKAVELLRTEMNHLAQQLPEYPVVMAMGGVGKSLGPQLMAEIGDVTRFAHKGSLAAYAGVDPGANQSGTHEAKSTASSKSGSPELRKTLFMVMSVLLQNSLANDPVFQFLDKKRAEGKPYYVYMTAGANKFLRVYYGRVKEYLLSLESAD

SEQ ID NO: 186171 - protein, 370 aa, unidentified
MLALLGWYIVNLNNLLVINGDKKMDQYVGLDVSQDETHICVVDRDGNKLWEGSCESTPESIGASVRKHAPNAVKIGLESGHLSTWHWHGLNDMGLPAICIDAYHAHGVLRLQMNKTDKNDAHGLAQIMRCNWYKEVTIKSFENHESRALFRTRSNLVSMRTDVVNQIRGMLKTFGILIKGIAGVSFENRVQEIIGEYTAIAAPLQVQLDMLQMIKQKIDELDELVLDHAYACQNCRILMSIPGVGPMTAANFVLAVYDADRFKNSKSVGAYFGLTPRRRQSGEMDYNGRISKRGDRVIRHQLYEAANSILTRVKKPSSLQAWGLRIAKRSGMKKARIAVARKLAVIMHQMLQTGELFCFNPATGERAIYA

SEQ ID NO: 186172 - protein, 355 aa, unidentified
MSDSKFIGLDVHKTSISAAVVDESGKLVMQAVFMTNAAAVLGFVRGLRGTLRVTLEEGTHAAWLHSVLKPQVAEVVVCNPRKNALLKSGNKNDRIDARKLADLLRTNLLTRVYHDDSQTLTLKELGRTYRALTDDTTRVMRRLKALYRSQAIDTGGKKLYTRRRREQWLEQLKQVGQRYRAERMFEQFDSLQAMRRQIRCDLIQEARQHAATATLSSVPFVGPIRSALLIARVQTPFRFRTKRQFWAYCGLALETRSSADHQVIAGELRRKTKPVFIRGLNLNHNHDLKNLFKSAATTASATPGPFRDYYENLLTKGMKAEMARLTLARKIATISLSVWKKGERFDPEQLRTPAA

SEQ ID NO: 186173 - protein, 312 aa, unidentified
MNAETQICYVGIDVSKGALDYALTPTEEGQELNTDTGHRRLVERLRQVPHARVVCEATGGYERPVVAALLAAGVEVCVVQPGRARAYAQSEGLLAKTDRIDAQSLRRYGQNVTLRLAQPTPEKLAVLRDLLDRRRDVVERLVELENQLGTARKTLREWLERELRFLKKERDALDQAVKKHVAADEQLRVKEARLRELKGAGPILAATLLAYLPELGSLPDKTISALAGVAPHPRDSGKTRRPRHVRGGRAALRHVLYMAAVAAVRFNPILRAVHERLRAKGKPGRVCLVAIMRKMLVVLNRMLANPNFCLVQ

SEQ ID NO: 186174 - protein, 356 aa, unidentified
MTPKRTPPRIYCGVDTHADTHHAAIITDTGILIESRQFDTTTDGYRELHTWILGHGAPIAVGIEGTASYGAGLTRHLCSRAVAVVEVPRPNRKLRRNVGKSDPIDAEAAARAVLARNQLSEPKHCDGPIEAIRALRVARSSAVKAATASMNAVRSMIVTAPETLRTHLRGRTTTALLDACIALEPDLTALTALTDPTNATIVALRSLAGRCRELRREAKELKKYLTALVKRSAPRTSEILGLGPDTAAALLVTVGDNPDRLRSESSFAHLCGVAPIPASSGKTTRHRLHRGGDRRANQALHTAVVVRLKYSDEARAYANRRTAEGKSMPEILRCQKRYLAREVFSALRADYGALTA

SEQ ID NO: 186175 - protein, 346 aa, unidentified
MNNHNKECTIKVLGIDLAKQSFQLHGVDEQGKVVLRKNLSRNKLTSFVANLPPCLIGLEACGGAHHWVRVFKSLGHTVRMMAPQFVKPYVKSNKNDAVDAEAICEAVQRPNMRFVPEKSISQQDIQCIHRIRSQLIARRTAQANQIRGLLMEYGIIIPKGISYIRKVIPHILEDADNKLTSLLRELLNELYDEMVYLDERISSLENKLKTISHQNEDCQRLLTIPGIGLLTATALIAAIGNISVFRSGRELAAWLGLVPRQHSTGGMPTLMGISKRGDCYLRTLLIHGGRTVVRVAHLYTDKRNLWISELDKRRGKNISAVAVANKNARIAWALLSKKESYQVTAI

SEQ ID NO: 186176 - protein, 421 aa, unidentified
MDVLYEACAGLDVHAATVVACVRRPGTRGRRTREVRTFGTTTGELLKLADWLTEQGVTHVAMESTGVLWKPVFNILEGSCTVILVNAQHIKAVPGRKTDVKDSEWLAQLLEHGLLRASFIPPPAIRELRDLTRRRKSLIEQRASETNRVQKLLESANIKLGLVATDILGASGRAMLRALVAGERDGAVLADLAKGTLRQKRARLAEALTGRFTAHHAALLDDLLAHIEFLDGAIERLSQRIAAALEPQAEAVERLEGIPGVNRQAAEMIIAEIGLDMSQFPTAAHLASWAGICPGNEASAGKRKTGKTRKGNRWLKSLLAECGWGAGPARHTYLGAQYVRLSHRRGKKKAVLAVGHSILVAAYYILRDGVPYRELGPEHFDRLAKERLTRHYLHRLEQLGHHVTLAPEPVQAAEDAEPGAA

SEQ ID NO: 186177 - protein, 416 aa, unidentified
MKKNSKSAMKKEQKGKRAKAQRPVQREPKEVLAELVEKLQGKLELKATSARPAEASPGTELGPNLDRLTVGVDLGDQRSHFCILGLQGETLSEGQLQTREAEVAEFFQAIPPARVVMEVGTHSAWMQEIIAGEGHEVVVANPRLMEGSKRRKRKNDRIDAKKLARLGRVDPQSLHPIRQRSREVRQDLVVLRAREALVAARTELINATRGLVKSMGTRLPKCSSPSFGQKVKDAIPEKVRDALLPLVQLADALSDCIQSYDQKIEELGSEKYGHTKLLRQVKGVGPITALAYVLTLENPEHFAKSRDVGPYLGLVPKQEDSGESQPQLGISKTGDTMVGKLLVGSAHYILGPFGPDTDLRRYGLRLCERGGKNAKKRAAVAVARKLAVLLHRLWVSGEVYEPLGYASSRAIVQPAA

SEQ ID NO: 186178 - protein, 346 aa, unidentified
MEQYVGLDISLTMTAICIVDRTGKIEREGVVASDPEAIAAFVRLHAPHVARIGLETGATSTWLWTELNKMELPVICIDARHAKAALKIQINKSDRNDAVGIARIMQCGWYKEVRVKGLDSHAIKALLVSRALLVKIKRDLENQIRGLLKNLGLVIGRAKMNVFLMRAVELTEARPELAAAVEPLLKAREPVEKQIADLDRKVMQLARNDVQVRRFMTAPGIGPITALCYLAIIDDPTRFKRSRSVGAYVGLTSRRYASGEVDWTGRISKCGDAMLRSYLYEAAGVLLTRVAKWSVLKAWGMRVAKRSGLRKAKVAVARKLAVILHRMWVDGTEFKWSSKEVATQPA

SEQ ID NO: 186179 - protein, 359 aa, unidentified
MGSIAFDPADVIVGVDTHKHQHVGVALDGLGRRLGQWLVPATPAGYAELLAWATGLGRVAVVGVEGSGSYGLGLARFLRRHDVTVLEVARPPRKGQRRLQGKSDPVDAEHAARQVLAGAGAVTPKTGEGSVEAIRLLKVARDTAVTAHSQAMITLKATLVTASDALRAELEPRTDFALVTACAELEVTGELADPEVAMRHTLRALACRWLALHEEIKLHTRQLKTLTNKTAPALVATFGIGFDSAAELLCAAGDNTARVRSEAAYAKLCGACPIPASSGKTTRHRLNRGGNRQANAALFRIVVVRLRWHPPTIAYAQRRTAEGLSKREIIRCLKRYVAREVFRLLPAPAATPAQSLQAA

SEQ ID NO: 186180 - protein, 359 aa, unidentified
MIQDPNLFPKEAFMRFYTNQHKFYCGIDLHARTMYLCILNQEGKIVLHRDIKTNPDIFLKTIEPYREDIVVAVECLFTWYWIADLCSKEHIPFVLGHALYMKAIHGGKAKNDKIDSHKIAVLLRGGMIPVAYVYPSDMRATRDLLRRRTHLVRKRAELLAHIQNTNHQYNLPDTGKLAYKSKRKGVSERFQDICVQKNIELDLSLIDHYDQILLPLEQQISVIAKVHDADSYFRLRSIPGIGRILGLVILYEIHDIDRFPRVQDFVSYCRLVKAAKESAGKKLGTSGKKIGNAHLKWAFSEAAVLFLRRNPQAVKYRDKLMRKHGKAKSLSILAHKLARAVYYILKRKEVFQPEVFFAK

SEQ ID NO: 186181 - protein, 391 aa, unidentified
MTKPKTKTVNDFSRCLDPLDMDATLIAVIEMSQSSWLVAGIVPGVEREPLKKLAIDEHALLNLLRRWRAEAEKQGHRITRIAVAFEAGPDGFWLARWLAAQGVEAHVIHASSVAVTREHRRAKTDRLDTGLLKRGFLGWLRGERGHCKTVAVPTLAEEDAKRPSREREKLVGEASRIITRVKAAFVRLGIRGFNPKLKAAAMRLETLRTPEDEPIPPNTLAALKRDLERHQIVKKQIREIEQTRLDVLTQAPEKGPHAMVRLLARVIGVGVETADMLVQEVLSRTMRDRRAVGRYAGLTGSPDESGAKRRDKGLARSGNARVRHGMIQLAWRFLLFQKDSALAQWYRQRTADAPSMRKTLIVALARKLLIALWRLARDGVVPEGVRMRPAA

SEQ ID NO: 186182 - protein, 351 aa, unidentified
MPRTTTLHAVITIGIDMGKNTLHLIGLDARGAIVLREKVARGRIALRLANLPPCLIGIEAGMATHYVARELAALGHNVKQVPATYAKPFRQGHKNDFRDAHAVAEAVQRPTTRFVPAKTNEQLDLQALHRVRSRLVSERTAVINQIRGFLLERGIVVRQGLRFLRQQLPDILAKRADVLSPRMVRIVAELAGDWRRLDERIETVTDEIEALAKSDDSCRRVMTVPGIGPIISSAMVAAIGNGAAFARGRDFSAWLGLVPKQMSTGDRTILGRISKRGNGYLRTLFMQAARVILLRSANWPKHGFGLWLVRAAQRLHPNVLAAALANKLARIAWTVLAQERSYEARVTKAAA

SEQ ID NO: 186183 - protein, 371 aa, unidentified
MVAPFLNGIKSAKVGVLSSTEKEATNMNITTIGIDLAKNVFQVHGVDERAKGGLKKQLKRAQVLPFFANHPPCLIGMEACGSAHYWARKLKELGHTVKLMAPQFVKPYVKTNKNDAADAEAICEAVSRPSMRFVPVKTGEQQAVLSLHRARQGFVKGRTAQANQIRGLLAEYGIVIPVGINNIAKRLPDILEDGENDLPGVFRQLLQRLGDHLKELDRQVDELSGQIQLWHKENELSLKLADIPGIGPITASALVASIGDAKSFENGRQLAAWLGLVPRQHSTGGKQTLLGISKRGDTYLRTLLIHGARAVIRVSEHKHEQANDWLNQLVLRRNKNIAAVALANKNARVVWALLAQKREFRSDYAPAKAAA

SEQ ID NO: 186184 - protein, 342 aa, unidentified
MDSMVAIGVDTHRDSHVAVALDGLGGDLGSLVVGADSSGYARLWQWASELGSPLFAVEGTGSYGAGLTAFLVAAGGEVFECERPRRRDCRKGKSDLIDATLAAKRLLTGEPLGRPRGGGGVRDDLRLLLMERQGAVRARTAALNGLQAAIVTGPDTLRTRFRGLDGKQAAKQAARLRSRTDETAVTVSVLRRIALRVQHLDREIDELDRQLETITSDLVPALLQECGVGPVCAAQLVVSSGDPGRMRSEASFAALAGTSPVQASSGQTQRHRLNRGGDRQLNRALHIIALHRSRWHPDTAAYHQRLLATGKTPREARRCIKRQLARHFYNQLKTTPPLNLTQ

SEQ ID NO: 186185 - protein, 399 aa, unidentified
MISVGVDVSKGKSTIFILKPYGEIISTAYEINHTEQELSELAAMILRFNDEVKVILEATGVYHLPILTYLRDQGIFVAVINPFEMKQYRNQGLRTVKTDKQDARTIANYGIDFWFRLKNYEMSEGVYQELKILGRQYSHYMKIRIESMQSLTHLLDYTMPGIKGLLKGWMEVNGKDKLSDFVDQYWHFDNITKKTEKQFINSYLKWAKKKGYHQSQDKAVKIYSLAKEGIPTLPVDMSSTKMILQQAVSVLQQVNTTLMTILNQMKALAKTLPEYPVVRAMGGVGNVLAPKLIAEIGDVQRFHSGKALIAYAGIDAPPYQSGQFTGTNRRISKRGSSTLRKIGYETMRVLKTHAAPDDDAVYCYILKKEAEGKPKRVAKIAGLNKFLRIYYARVMEVYK

SEQ ID NO: 186186 - protein, 430 aa, unidentified
MAQRNRAGGRAGLQLTHPDAAGIDIGSASHFVAVPPQRDDEPVREFKSFTADLMRLADWLAACGVKTVAMESTGVYWIALYELLDARGFEVLLVNARHVRNVSGRKSDVLDCQWLQQLHSYGLLRGAFRPADGVCALRSYARQRAALLRTQSRSVQHMQKALVQMNIQLANTIADVAGQTGQAILRAIVAGERDPHALAALKNSRIRASDEDIAASLQGHWRAEHLFALKQALDAFDFCSRQLAECDAQIEAQLERLRKTEADPAKARRRGAARNAPKFDLRARLFQMCGVDLTRIDGVDVTTALVVVSEIGCDLGRFPSDKHFTSWLGLCPGTKITGGKVMSGKTKPCANRAAQALRLAAAALRTSQSALGAYYRRLCARMDKPKAVTAAAHKLARLIYAMLTKGEEYTDHGQQLGMTLVPNADQPQTA

SEQ ID NO: 186187 - protein, 432 aa, unidentified
MSKFFYSPTVGIDVSADFSMVAILAPNGDIYRKTFKIKHDVDGFNHLVKEIKKVEKEFNMKTGIFMESTGVYHLSLFHFLKTNNLEAYVINPLVTNSNKNKEIRKVKNDKKDALAIAKIGKFENIKAYSYFDVSVFTLKSLCRDYYKLVDTRSTFKKKLSADLRIVFPGYNSVFSDVTGATSLAILKCYQTPQSILDASKEDVLKILRESSKKNLIWCNNTYDKLIKAASNATHIAISSFGLSIKITINIGTIENLNKQIELILKEIENVSCSNSISSEFKQNILLLMSIPGVGFISAVTILTEIGDFQGFLKPKQLVAYFGIDPSVNESGKFKSDKDKISKRGTRFGRRALYAVALASIRTKRTGEANNKILLDYYKNNLKAKKKKVALVAIMHKLLNYIFAILRNQKEYEQRLPKIHHKMYLENSNKPAA

SEQ ID NO: 186188 - protein, 306 aa, unidentified
MLRPDGRHRTKKFANTTKGHDELVSWLKGHKIDHAHICIEATGTYMEPVAECLYDAGYIVSVINPALGKAFAQSEGLRNKTDTVDARMLAEFCRQKRPAAWEAPHPLERALRALVVRHQALTDMHTQELNRTETAREVQRPSIDAHLLWLEAELKRLEKQIKDLTDDDPDMKHRRKLLESIPGIGEKTSAVLLAYIGLKDRFAHARQFAAFAGLTPRRYESGSSVRGASRMSKAGHVSLRSALYMPAMVATSKTEWGRAFRDRLAANGKKGKVILGAMMRKLAQVAYGVLKSGVPFDASRHNPVAA

SEQ ID NO: 186189 - protein, 370 aa, unidentified
MSNATTFVGLDVHARSVKACAFVPETGETIRKSFGYEPGEIASWVSSLPQPARCVYESGVTGFHLCRELNAMGAACVIGAVSKMHKPAADRGRKTDRRDAQFLAVQLALGVVTEVHVPDAECEGARDLARALADARDDAVRAKQRLSKFLLRHGLVYDERNAAGQRRNRWTGDFWAWVGRIDLGDAAAMATLDHYCERVREADAAKAALEAKVKSLAQQPRWKPTCDALKCLKGIDAVTAASIACEADGFARFATASGFAAWVGLVPSEHSSGESRFHGGITKAGNKHLRKLLVEAAWHYKGASRSPKDLAKGQVVDAATRRHANAGVRRLVDRRRSMDDAGKQSSVANVAVARELACWCWAVGRMAEGA

SEQ ID NO: 186190 - protein, 346 aa, unidentified
MMIIGCDFHPSWQQVNWVDSETGETGEQKLVHAGGQAKAFYQELRVPALIGMEATGNSQWFIELVQELGHVILIGDAAQIRASYVRKQKTDKRDAAHMLKLLLENRFPTLWTPDAEQRDLRQLVLHRHKLVEIRSRVKNELQHLSLNKGMQKKRTLWSQAGQKMLRELPLKPWAACRREDLLGLLGMLNQQVGTLDVAVLKAAEENPQAKLLMTQPGVGPNTALAFVLTIGDVSRFPRGKQVASYLGLIPREESSGGRQKLGAISKQGNRMLRSLLVEAAQIAVRFDPGYRKQYLHRCHQKPKGVAKVAAARKLAVRLYWMLRTNVAYPEIVRIESSPRVPLVGAS

SEQ ID NO: 186191 - protein, 342 aa, unidentified
MQITTIGLDIAKNVFQVHGIDATEKVVVRKQLRRGQVMKFFAALPPCLVGMEACATAHYWARELTKLGHEVRLMPAKDVKAYVKRNKNDAADAEAICEAVRRPTMRFVRAKSAEQQGRLMQHRTRDLLLRQQTQVINALRAHLAELGIVAAQGREGLKQLLAIIADQADARLPLDARACLIVLAAQLQALHTLIKSIEKRLLVQHRANEASKRLESIPGIGIIGASAIAATVTDPKAFQSGRDFAAWIGLVPRQDSTGGKQKLGPISKQGDRYLRRILVVGAHAVLRWAKRNPGKYPWLTQLLARRPFKVVAIALANKMARVAWALLASGAKYRAPRLAAAT

SEQ ID NO: 186192 - protein, 420 aa, unidentified
MIAVDPHKASNTAAVLDPVTKTLVESARFANTADGYVQLTAFAARWAQRQWAVEGCHGAGRFLAQRLVADGELVLDVPAKLAARVRVYSRGHGRKTDKDDAVSVGLAALDGTGVTPVTRDDALVSLRLLCDRREELTAQRTQAVCRLHRLLAELTPGGMRRELSANKAQALLARIRPAGEASQVRVHIARDHLADIRALDARIKYIGAQIAALVTTSGTTLTSLYGIGPVIAGRILAEVGDVARFATKDAFASYNGTAPIDVSSGDQIRHRLSRAGNRRINHALHMMAVTQIRNPGIPGRLYYERKRTEGKTPKEALRCLKRRLSDLVYYQLVTDRQGTIGACGSPTTPPPTRSTSTSPASRSRQAAPPSKPAPRPAPKGSSRSTGKMTASPASRSPAPAPASTTTSSKKPKSTANAAAS

SEQ ID NO: 186193 - protein, 347 aa, unidentified
MGNDTLVAVDLAKSVFQLAVSDRPGRVVRRERLTRDKFLEFFAQQAFSTVIMEAWGSAHYWARRIEGLGHKVVLLPPQYVRPYVLRNKTDRTDTDAMLEAYRNEQIRVVPVKSVTQQVLGTLHRLRSGWVGERTARINALRGLLRELGFFIPVGRREVLPHAWEIIQDAESGLPDALRPSLSALCEEIVGFSKRIEDIEKQLHALAQQVPAVGRVYSVPGIGILTATALYAFVGDPYACFPSGRHLASFIGLTPREYSSGSRRHLGRISKRGDAYLRTLLIHGARATLWHAKKLEHPDRLRAWALRLEKQSGHNKAAVALANKLARIAWAVWKNDRDFEPAPEAQAA

SEQ ID NO: 186194 - protein, 338 aa, unidentified
MNATTIGLDIAKSVFQLHGEDAEGRLVVQKRLSRRGMAEFFAKLAPCVVALEACGTSHYWGRTLRAMGHEVRLIPAAYVKPFVRRNKTDARDAAAICVAARRPDMRPVAIKSEEQQASRALERSRELLIKQRTQLMNSLRAMLAEFGIVAAQGARGFAELRARLASGDGLPKTLVTALRLVAAQLDGLTPAIESMEDKIKTIVRADPTMRRLSRIPGVGFITAHAVVAAIGDGRQFVSSRCFAAWGGMTPRETSSAGKRRTKGLSRQGESRLRKLFALGAAMLMRNARSRDDRASAWQRGILARRPMKVAVMAQAAKTARIAWAVLTSGKDYAPPAAA

SEQ ID NO: 186195 - protein, 391 aa, unidentified
MVCVGIDVAKDKHDCCILDSDGMVRADCFTIPNNMDGFKQLLQTIRNCTKKSDKIKVGLEATGHYSYNILGFLLDNGLPTYVINPLHTNLYRKSLSLRKTKTDRVDARTIATMLLSDVDLKSYTDIAYHNEELKSLTRYRFDKVQECAKLKQSVSRLATILFPELEGLVSSIHGTSIYALLSEYPGAKQISEVHLTKLTNLLTTASKGRYGKEKAIQIREAARASIGSVMPAKSLELKHTIKLIQELASEIDEIEDSIQKIIDELNPPILSIPGMGVNSAAVILAEIGDFSNFSSPDKILAYAGCSPSTYQSGKLTNCYAHMEKRGSRYLRHALYNATKYVCYWNPVFAEYLAKKRAEGKHYNVALSHAMKKLVRLIYALQKSGKVYLTAA

SEQ ID NO: 186196 - protein, 312 aa, unidentified
MDTLIFVGIDVAKEHLDIAVRPNGEIWTIKNDEQSAMELAIKLKELRPAVVVMEATGSYEMCVASVLSITGLPVAVVNPRQVRDFAKSTGKLAKTDTLDAHVLAHFAEAIRPEVRSLSDEQAQQLHALVVRRRQIIEMMVSEKNRAHVSHKSIQEQVRKHIEWLENELKELEKDIGESIRESPVWREKDKLLQSVPGIGPITSGVLLASLPELGLLDRKKIAALVGVAPFNRDSGNMRGKRTVFGGRSHVRSMLYMATLTATRYNPVIKQFYDRLIQVGKATKVAIMACMRKLITIINAMIRYSEPWRINTA

SEQ ID NO: 186197 - protein, 429 aa, unidentified
MGRLKIVYPICCGMDVHRDFVIACIASTNAQGVTQYQSRRFSTYTGGLRECATWLEENNCRDVCMESTGKYWIPVHNILEKTCHVVVTHPKFVKAIKGKKTDKKDAMWIADLFKHDVVSGSFIPPERIRQLRDLCRYLMKLTWNATSEKNRAHNCLTVSNLKLDSVFSNVFGKSASAIIDFMLEHPGEQFDVAPFVHSRCKSPIEDIQAAVDGSFSPWQAEKLKIIQEHMKDIDHCRKLLEDLIFRLAEPYNRQIDLIMTVPGIRDRMTAIRIISEIGVDMNQFESSKHLCSWAGLTPQNNESAGKKKTTRIGKAGQYLKPLLIECSIGAANPRSQKHPEVSAKYRQLQKRRGAKKARVAIARRLLTAIYHMLLKDEPYQPFVAPVQNSIPKQRRMTAEDAIAMLRRKGYILVDAKGTIIEDYHFASPV

SEQ ID NO: 186198 - protein, 357 aa, unidentified
MKCHDGRCSFPSTTCERGSHDHCVHWYDLAKNVFAVHGVDQAGKPALVRPSVPRGRLHELIASLPACTVAMEACSGAHHWARLFAQHGHTVRLIAPKFVAPYRMSGVRGKNDAADAAAICEAVQRPTMRFVPPKSLEQQSQLMVHRARQGYVENRTACINRIRGLLSEFGHVLETKADTVRRQACALLEELPGWANTVIGDLLSELHHLDERIAGYDRHIQAIVKEDARAQQLMQLRGVGPTTATTIVAMIGSGHEFRCGRQFAAWVGLTPGQYSSGGKTRLGRITKAGDAYLRTLLILGAREVLAAAKNKDDSISRWAMALEARCGYWKAVVAIAAKNARMAWAVLARGESFKMPA

SEQ ID NO: 186199 - protein, 308 aa, unidentified
MIAQNYVGCDISKQWLDFFDETSGRLRRIDNQADAIAAYVAGLDPSRDFVVMEATGVHDRLLRHALAKAGVPFSRHNPAHTHHYSKSTRRRAKTDPLDARMLSGYGRRYNPEAEPAPSEEVEQLQSLAGHRDQLVGMRATLKKQLSEAFEEIVITSLEDLIADLDTRIKAFESQIAAVIRQNQDTARDHALMVSVPGVSKVGALSLLALLPELGQRSPKAIAALVGLAPFDNKSGKLSRRSQIQGGRSRVRRALYMAALTAIRTCERFKTFYTALAARSGSKKLAIIAVARKLLVVLNAIIRDKTAFA

SEQ ID NO: 186200 - protein, 410 aa, unidentified
MEVLHPRCCGLDVHKDTVVVCVRLVIDGKTVKEVRTFSTTTADLMALSQWLAENKCTHIAMESTGVYWKPVWHILADGQFELVLANAAHIKGVPGRKSDVKDADWVSDLLAHGLIRASFVPDSPTQEMRTLIRTRKQLSREQARHILRVQKTLEDANIKLDSVISDLMGVSGRKMIEALIAGQRDPVKLARLADPRVKASQETLRQALRGRVTKQHRFLLRLHLDQIDGIDAAIAKIDREVEAAIAPFRTAVEQISSVPGVKNLAALQIISEIGTDMKRFPSDANLVSWACICPRSDESAGKRRSTRIRKGSPWLKTALVQSAHSAVRMKGTYFHALFHRIRSRRGVKKAIVAVAASILTAIYHMLKDGTMFHDLGPDHFNRRTKEQQKDRLVKRLAELGYAVELAPLPN

SEQ ID NO: 186201 - protein, 318 aa, unidentified
MDQPLQWVGIDVSKATLDVYLRPSGQSFQAKNQASGMIELIEQLQSFKIGQVILEATGGLELEVAQALQDQGLAISIINPRQARKFAKASGKLAKTDRIDAAVLAHFGQAMQPAVTVLASANEQALQETVTRRCQLVEMLTAEKNRQSSLRGRMRQDVNDHVEWLEKRIRELDDEIEQLSQAHDQWRSQLALLTSVPGIGKVIATTLIAALPELGKVSDKRISTLVGVAPLNRDSGKYRGSRTIWDGRANVRAALYMGALVAVRHIPVLKAFYSRLVSQGKAKKVALTACMHKLLRILNTMIRDGKPWQPPTLATEED

SEQ ID NO: 186202 - protein, 283 aa, unidentified
MEEHIGLDVSLKETMISVRQNGKRIWRGQCPSDPKLLAEVIRKRAPNAKRIVFETGPLSVWFYHALTAEGLPAICIDARHASAALNMAPNKTDANDADGLAHLAEVGFYREVRVKQYDSMLTRTRVSARSQLIKIKTELSNQIRGLMKTFGLIVPKGAGRVFDANVRSLIAGNSGLERIILPLLETWRSVRARAAELDRQLVAAARESAPCQLLMSIPGVGSVVAASFAAAIEAPENFRTSRAVGAWLGLTTRRYQSGEVDFGGHISRRSDGSGKKVGVRTFR

SEQ ID NO: 186203 - protein, 343 aa, unidentified
MQSISTIGLDIAKSVFQVHGVDAAGQVVVRRQLKRRQVLAFFAKLPPCLIGIEACASSHYWARELQAVGHTVRLIPPAYVKPYVKRQKNDAADAEAICEAVTRPNMRFVPIKTIEQQGCLVLHRTRHLLVRQQTATINSIRAHLAEFGIVAPVGRRGVEHLLEVVADADDPRVPEVARACVATLGVQLRQLKAQVLELDRRILAWHRSSEASRRLNHIPGVGPLLATALVASIADPKVFRSGRDFSAWIGLVPKQNSSGGKDKLGNISKRGDRYLRSLFTAGALAVIRYAKIHGTKHRPWLVALLARRPTKVAAIAFANKLARIAWALMTKGIRYRQPAALLV

SEQ ID NO: 186204 - protein, 437 aa, unidentified
MLSHQPFSCKEGKPLKIVYPVCCGVDVHKTFFVATLITTEGIQPKYKKRRFSTFNNQILAFKAWLLENNCRDVCMESTGKYYIPVLNLLEDSINVTVANPKWVRAVKGCKDDEKDSKWIGDLFRLGLVPGSFIPSKDIRILREYTRYRFKLVSCKASEKNRYQNVFTVCNVALDAVVSDMFGKSASSITDYLVSSDTFNPAHCVSLLQRSLKKKADDVVASIEGFHMTDAQKARARFVKGHYDYLVSHIQALDDKIKELALPLEGYINLLCTSPGIDRSSATTVISEIGTDMAQFGSSKRLCSWGGLTPGNNQSAGKKKSVRINRAGVYLKPTLVQIAHAAVKDKENPYYRIKYEQISKRRGKKRAIIAIARMILTAIYHMLSTCEIWNPCDLQQVDMPPELREKELQKSLRRAASLLAAHGIITPDAISIPEANSA

SEQ ID NO: 186205 - protein, 423 aa, unidentified
MELLHERCAALDIGKKDLKACVRTPSAKGKRVRRQEIRTFATTTNALLELRDWLVAERVSLVVLEATGDYWRGAFYLLEDDLNVILVNAAHAKGLPGRKTDVCDASWLCQLGECGLLRASFVPPEPIRQLRDLTRYRTTLATERTREAQRLEKELEDAGIKLSSVATDILGASGRAMLTALIDGERDPHALAEMAKARMRPKIPHLVQALTGNFGEHHAFLCRLHLERIDQLTAAIGELSARIEEQLRPFARQLEHLMTIPGVGQTVAEVIVAETGADMSRFRTAGNLASWAGVCPGHHESAGKRKSGKTRHGDRWLVGALGTAAMAAARTKDTTYLGARYRRLARRRGKQKAIVATGNSVLTVVYYLLSDPMATFCDLGPGYYESRINMHRRARDLATQLQALTGQHIVIRDGKAVITDAAA

SEQ ID NO: 186206 - protein, 419 aa, unidentified
MIKIETKKLRIVNTKTLMVAVDMSKATLVGYCRCPDGRDCKPLEVSNNTEGFKKLWDRICWMKAAHHLEEVVVGFESTGIYGEPLAHFLRSKPVRLVQVNPLHTRRMKDLEGNSPAKTDQKDPKVIADLMQLGHALSVVIPEGAAAQLRRLTQARERSVQRRTALYNQLHDLVFLLFPEFVQVMKDLRTQSAQYLLRHSPTPQAVGQCGLEALTSILKRVSHGKLGRERAQALYEAAQESAGLQEGRDGMLLEMEHLLLEIDSSSRFIEQVEREMSHSLEQIPYSSLILSLKGIGEITAAGLIGEVGDFKKFPTASEVEKLAGLDLFEISSGKHKGNRHISKRGRPLLRKLLYFAAMNTVRTGGVMHAPYQRHLERGMPKIKALVAIARKLLRTVFALVRDHSFYIENYSQQETLKLAA

SEQ ID NO: 186207 - protein, 347 aa, unidentified
MRFYTKFHPYYCGIDLHARLLYVCILNEWGEKVLHQKIKADPKQLLRLLKPYIGQVVVGVECMHCWYWVSDFCRELKVDFILGHALYMKAIHGGKAKNDKIDSYKIACLMRGGNLPLAYNYPSEYRTTRDLLRRRTHFMRHGASLKAHVVNTDSQYNLPSQSLNLKNVSAREGLRHHYDDPVIQRMITFEMNILDCYVKELKHVESFIEKEARDDFPVLRNIIRTFPGIGQILALTILYEIGDIGRFASVQKFASYSRLVKCKAESAGKIYGTSGNKIGNGYLKWAFSEAAVLYLRGNDKAKRYLKRLQKRMSKGKALSALAHKIGRCIYFMLKNKQVFDEDKFLKG

SEQ ID NO: 186208 - protein, 359 aa, unidentified
MCQSGGVEAPLKEASVSQVTTIGLDIAKNVFHAHGADERGAMVFSRKLTRAKLLEFFAGQPACVIALEACSGAHHWGRELRTMGHEVRLIPPSYVKPFVKRSKNDAVDAEAICEAAQRPGMRFVAVKSEDQQAAGLVFRTRDLIVRQRTQLINAIRGHLAEYGWVAPRGRAHMAMLADLLEGDEITSTLPEAARPMFTLMVELLGDLDARIATLDREIARRVKDDEDARRLMTIPGIGPIAATAILALAPPAETFRKGRDFAAWLGLTPRQHSTGGKQRLGGISRMGERTIRRLLIIGGSSMVRQASRFGAPAGSWLERMMARKPRMLISVALANKMARMVWALLTKKEDYRAPAAVAA

SEQ ID NO: 186209 - protein, 355 aa, unidentified
MGGAIPGVERQPLKKLAPDEEELLRLLHRWRDEAVKSGHTITRIAVAYEAGRDGFWLARWLLMHEIETHVIHSSSVAVSREHKRAKTDRLDNAMLLRVFTGWLRGERGHCGMVAVPTAQEEDAKRPHRERESLVGECTRIINQMKGALARLGIRGFKPELRKAPHRLEGLRTPEELPIPSNSLDEFRRNLARLAMLREQIAAIEQARLERLKQAPATGPHAMVRLLTSILGLGLETADMLVQEVLSRNLRDRRALARYAGLTGSPDESGSKRREKGLAKSGNARVRRGLIQLAWRFLRFQKESMLAEWFRARTEGAKGARKKTMIVALARKLLIALWRMVTTGEVPQGVVLRPAA

SEQ ID NO: 186210 - protein, 311 aa, unidentified
MEADCIAIGIDVSKHRLDFATLGSQQRGSELNTASGIAALAKTLAAIGPHRIVLEATGGYERAVARTLYDAGLPVCVINARQIRHFAKALGVTAKTDSIDAEVLARYAAMVCPPLRPLKAENEQEMAELMARRRQLFTMIVMEKNRLQAPSRTQAIRIAAHVRWLEREVARVDRDLDRWIAADPERVATDAILQSTPGVGAVVARTLIADLPELGKLGKREISALVGLAPLNRDSGAMRGKRKIRGGRASVRGILYMAALTGARFNPVLAAFYKRLCDAGKPKKLALAAVAHKLLIILNAMMRNRSHWAHE

SEQ ID NO: 186211 - protein, 366 aa, unidentified
MGEYIGLDVSMKENAIFIRHDGKRIWRGKCPSDPKLLAAAIRKHSPAPQRVVFEMGPLSVWFFHALTSEELPAICIDARHAKAALDMAPNKIDGNDADGLAHLAEVGFFREIWVKGYDSMLVRTLIGARIKLTRMTTDLYSQIRVDEDFRLLAPPGKGGKFEDNVRRLLIGEKELACIILPLLEVWRSLRVRAADLSLQRITSARQSKACQLLMSIPGVGMVMATSFEAAIEDPANFTKSRSAGAWLGLTTRRYQSGEVDYDGHISRRGAPHVCTLIYEAATVILTRVSAAAPGCRRNRARPLPQAETQHGRSALCRSARQKACARRLRRHSQQDGADRMGGHGAWRCLRTWACAYASGSIVQELG

SEQ ID NO: 186212 - protein, 343 aa, unidentified
MQITTIGLDLAKSVFQVHGIDATGQVVVRKSLRRSQMLPFFAKLPSSLVGMEACGTSHYWARELIKLGHEVRLMPPAYVKPYVKRGKTDAADAEAVCEAVTRPTMRFVPVKSPEQQAALSIHRTRDLLVKQRTQLINMIRGLLAEFGVDIPKGLERALLMARQIVDGKAPDVPLEAAKIVGTLSQQALDTHVRLREIDRDLAIWLRGNDVARRLMTIPGIGPIGATALAASVTDPHQFRSGRQFAAWLGLTPLQKSSGGKERLGRITKMGDKYLRKLLVVGMTALVRRARQNPEGDPRLADLLARKPTRVATVAMANKTARIIWAIMTRGETYHAGHRPALAA

SEQ ID NO: 186213 - protein, 351 aa, unidentified
MASSKHHRGTTMSYYAGIDVSLEVSHVCVIDGSGKILREARVVSEPEALIAWLGSVGLELTRIGLEAGPLSQWLYAAMRDAGLAVELLETRHVRNAFKIMPVKTDRKDAHGIAELMRLGWFRPVHCKSMEAQETRAMLTARKLVQKALHEVEMSLRGILRGFGLKVGKVAPTQFEARILELVEGHPSLEVIATAMLAVRATLRQEFNGFEKRLRTMARSDMRARLLMSVPGVGTIVALTYAAAIDDPARFTSSKTVGAHFGLTPTRYQSGETDRSGRISKIGDASVRATLYESANIIITRPVKGCTALKSWAMRIAKRAGMKKAKVALARKLAVIMHRMLVDGTTFTTRPA

SEQ ID NO: 186214 - protein, 415 aa, unidentified
MALKIVYKICCGIDVHKTFVVACIASTNDKGVTSYESHRFSTYTSGLKTLLQWLLDRNCKDVCMESTGKYWIPVYNILESDCSIVLAHPKYVKAIRGKKTDKKDAKWIADLFKHDLVAGSFMPPADIRQLRDLMRYRFKLTCFKSSEKNRLQNCLTVSNIQLGNVVSDTFGKSAQAILDKLLENPADTSFDLEPLVYKSLKKKLPELRDAIDGYITPEQAGKLKVIKAHYENLESRKAELEELILALAAPYQQELAILQTAPGISSPFTAIGIISEIGTNMEAFPSAKHLCSWAGLTPTNNESAGKKKSVRVSKAGCYIKPLLVQCANAVVKSTKHPEMRNRYLRLKKRRGHKKAIIAIARMLLTALYHMLKNGENYNAELYQKSDLLPVDREITVEQALMIARNQGYKIKSATA

SEQ ID NO: 186215 - protein, 397 aa, unidentified
MYIVGIDIAKRKHEAAVIDGEGTVIIKPFSFTNNCSGYNRLLAMLTKAKLPLDEVSFAMKATGHYWLALFTRLQKEGFRVQVINPVQTNSIRSFYIRQVKTDPRDALLIAEVIRFGHFSESTLHPENIYELRELCRGRHAIVSMQADVKRKVVALLDQVFPEYETAFTNLFGDTSMAILQTCPTPKELSETPLEELCHLIEVSSHKRFRMAKAQELQALARNSFGFAMAGDVFSTMIRLYAKHLDFLKQQVREMDRKIAEIMETLDTPITTITGIGPTLGAYILSEIGDISRFSSAAKLAAYAGIDPTMRQSGEYNGVRNRMSKRGSPYLRHAIWLAASSAVLHDPALKLYFQKKRDEGKPYMASVGHACRKMVSIIYAVMRDNKAYTPYIPNEISA

SEQ ID NO: 186216 - protein, 346 aa, unidentified
MDHVGIDVHKKSSQICILTAGGELVEQRTPTTRECLAAALEHKPRTRILIEASTESEWVARVLEEFGHEVIVADPNFAPMYAQRTRKVKTDRRDARALAEACRLGAYRPSHRTSDAQQHVRAHVAVREALVQTRCKYVYLAGALLRRQGLRWESGGPETFPLRVGRLSLPGTLQEEIAPLLTMVKILTSQIQDADRQLVRMVASDPRAQRLCTIPGVGPVTAATFVATVDRVERFSGAHQVEAYLGLVPRELSSGEKQCRGRITKAGNGRARWLLVEAAWSILRYKKPETLALRRWTERIAARRGKFRAAVALARRLAGIMFAMLRDGTTYQPEKLRAGMERRPAA

SEQ ID NO: 186217 - protein, 349 aa, unidentified
MFAGVDTHKDTLAVAVIDHAGRVVRQLELPNQDSGYARLLALLSSHNVVRVGVEGSGNFGWPAAIYLLKRDLNVVEVPPLMTSRERLSRPGQGKTDPVDAVAIARITAREPSLPPVRPMTGEAADLRVLTEYRDQLVNERTATANRVHTDLGWLRPGYQHQLPHLTHMAHLHAALELLSGDDSVRAAVTRSRLARMLTLTEQLADLRIQIDALVKASGSTLSEVYGVSPVVAAIIIGHVFDVRRYPTRHHFATANGTAPIPASSGRTVRHRLNRGGNRQLNRALYTIAITQIRADTEGRAYYQRKRAEGKTSREALRCLKRRLSDLIYRTLRADLANAAQPTPTLSIAA

SEQ ID NO: 186218 - protein, 322 aa, unidentified
MHAFHLGIDVAKAKLDCALRLPDGKIFHKVVENQRAAFVQLLTFLDKHHAQGVHVCMEATGIYWEAIAEFLAAREGFTVSVMNPAQIQAFAASHLTRTKTDKVDAKLIAAFCAERRPEPWQAPSAPERNLRALVLRLENLQAIRIQESNRFEVARECVKDDIHEHLQWLDKKIEALIKDIRQLLHNDDDLGPKQKLLISIPGIGERTVAILLAYYAHPERFHNARQAAAFAGTDPRQHDSGSSVHGKPRLSKIGHAFLRKALYMPAMATLYKTAWGQRFRQRLAAAGKAPKLIIGAMMRKLIHVAFGVLKSGKPFDPARHGV

SEQ ID NO: 186219 - protein, 350 aa, unidentified
MESESVYKDKNLFVGIDVHKKRWVVCVRSYDLELKTFSMSPSAEELEKFLVSNYKDALFHIVYECCFSGFWIYDYFHERAYDIIVTPTNRIYRDGSVVKTDKIDSRKLAFQHSRGLLREVKVPMMKIREYRSLFRIYDKEKMREGQILRQVRCILECKNHQLKWEKWNKEFIEKLKLVRFQEDIFNRKFEVLIKEYEFVKEQIKDSEKRIKEIGEDEELGERIKRIEKINGIGIVSAVRLVVYLFDRKGRFESGEKVAHYVGLTPGEHSSGEEIIRSRTGLIGNRQLRSIIIQLAWVAVRKDGSLLNKFDRVYKRSGCKQKAIVAVARKLMMKVYAITEKEEEYEINKAA

SEQ ID NO: 186220 - protein, 391 aa, unidentified
MSAAQRVVIGMDPHKRSVTIEVMDADENGLGVGRFGTDVAGFKAMTEFAKQWPDRVWAIEGCNGIGRHVAQRLLATGEDVVDVPPKLSARARVFSTGQGRKTDATDAHSVALVGTRVTGLRPVVAEDQLTVIRMLADRRRSLGEEHTRKVSQLHALLLELVPGGAKKDLSAAQAKTLLARVRPRDSVGKTRRRLAAELVADLEQIYARRKAADKELRELVAATGTGLLDLHGIGPSGAARLLAEVGDITRFPDRNHFASWTGTAPIDASSGDVVRHRLSRKGNRQINRTLHIMATVQLRNATEGRAYYDRKKAAGKSSNEAMRCLKRRLSDAVYRTMLDDAVKTKVTGPGGQRGNDSDSSATGSQPQHRHFGQATPGPVSTQPKPPLPKVS

SEQ ID NO: 186221 - protein, 453 aa, unidentified
MAEQAKKATNSTETGRVRARRPRAARPAGESPRARRRPSLGTTAMTAKRHVRSGKAQRSAGTKEAPAPTAPVGRRRCAKGEPGNVFGADPHKRTLTATVLDCRGGVLGTRVFRVSGDGHREMEAWATSFGPIGRWAIEGASGLGRHTAMYLARAGHDVRDCCPNRTNERRRSRQGGKTDAEDSVRIAREALADHEMPVAFKRAGGDAGPDETAELTGLWHRARRSILKSRQHLLNEAEGLLCELPEGVRADLPDVKDVRRRLQALAVLGPRPVDPATALRLKLLAEHARFVAELDARDKEATAELENLARRAGSTLSGLCGIASRSEAELLVEVGDPRRFTGEGGFARFNGTAPLPASSGEGEGEPKRHRVNRGGNRRVNAVLYRMAITQLRCNPRAKKIFEDARARGHTKKEAIRVLKRHLSDVVYRRMMHDLEPQASTPANQPKTRRRKAA

SEQ ID NO: 186222 - protein, 409 aa, unidentified
MQQLFERVAGLDVHRQTVAVCVRVPGAGGERAQHIRTFGTTAADLVALRDWLEAHQVTQVAMESTGVYWKPVFYVLEEAMSCLLVNALHVQKVPGRKTDVQDCVWLAQLLEHGLLRGSFVPPPPLRELRDLTRYRKVLIQERTREANRLHKVLEDAGIKLATVATDILGASGRDMLHALVAGTTDPQVLADLARGTLRKKLPALRQALAGRFRAHHAFMVSQHFGHLDYLDEAIATLSTQIEEALRPFALAHHQLDSIPGVGPRTADVLIAEIGVDMRQFPTAQHLASWAGLCPGQNESAGKHKSGRIRPGNRWLRMALIEAASLAARSRTTAFGARYRRIARHRGHKKAVVAVAHAMLVTAYHLLDRQTEYREPGVDYFERRHAERTTRRAVRALERQGYRVTLEPAA

SEQ ID NO: 186223 - protein, 362 aa, unidentified
MAQVRSWVGLDVHRASVVAAVMDRDSGELRVWRLPGTTEEVVAFCAGLPGPVRVAYEAGPTGFGLARALQAAGVQCVIAAPGKIERPTSDRVKTDERDAQRLLRLLMIDGLHAVRVPSIQEEALRDLVRAREDVRGDLMRARHRMSKLLLRHDVRFDGTASAWTTHHRAWLAKVDLGERGAQVTLLDYQGAIDALLIRRDTLERTIDELVPDSPWADTVARLRCLRGIDTLSAVGLCAEIGDWQRFPRAGHLMSYLGLIPSEHSSGQTRRLGAITKTGSGHGRRLLVEAAWHYRRPPRKGDALKRRQAGQPAHVLAISWQAQQRLHRTWQRLDRERGKRRTVVAVAVARELAGFCWAAANAD

SEQ ID NO: 186224 - protein, 348 aa, unidentified
METMYYIGLDVHKKTISYCVKDGSGGIYAEGSIPATRLTLDMWMKTLPQPWTVAMEATIFTAWIYDHLQPHAAAVKVAHPLMLRAIAVAKKKNDRIDAQKIADCLRCDFLPECYMASTEIRERRRTLRYRNLLVRQAVHMKNKIAVLLMEAGVSYNKQKLHKVGYFRELLATNQDIDEGLKPLLRLCRETVVRLGKTESALVRSLQRDSLLVERVERLMTIPAVGPITALTWALEVGDVQRFSSIKKAISYCGLCGAERSSANIIQRTPLSKQRNKHLQTVLIEAAKMAPRNSPELAMVYEQEKQKGDANRATLAVARKMVAYLVAVDRRQKGCNCQDVNADHNNQIR

SEQ ID NO: 186225 - protein, 344 aa, unidentified
MEKLSRIGMDTSKHIFQLHGVDAAERVILRRKLRRKEVLGFFAALEPTLVGLEACGGAHYWARELTRLGHTARLIAPQYVRPYVKRGKNDAADAEAICEAMSRPTMRFVAIKSAESQAALMLAGMRDRLVRNRVQLANAIRGYAAEFGVVAAKGSAKIGPLLVRLQADETVPAMARELFAEHAREYAALTAQLAAIDAQLMAFYRANELSRRLAQIPSVGPVIASLLAMKAFRSGRQFAAWLGLTPKDHSTAGKTRLGVITRAGDETLRSLLVVGATAVIWQARRGKSRSASPWLLALLRRKPPKLAAIALANKTARIAWKLMMTGESYQAHRALPGIALPVTA

SEQ ID NO: 186226 - protein, 315 aa, unidentified
MKQNNWVGVDTHKETLACYKNGKFKEFKTNKNGYEAAVKWAGDDSKWAVEGAYCFGRPFTFFLIRNGCKVYEINPLLTKNWRRVVSMANSKNDFGDAKVISMFADEANAQEVSFKTVELKEKLTARKLAVKQRKQIASSIKMLYSQRGQEIPYKDLTTAKAAKYFSNQTDIIIKNFGSTLTSLNAMIKEIEKDIKKNLPEKARKLMYLKGIKELTAATIYAETKGKLYSRESLANYSGVAPVENSSGKQVKHCNNKAGNRILNSAFYRLSLHQSRYDEKGKTYYEKKCREGISKRHARKCLARQLVNIVFKLLKD

SEQ ID NO: 186227 - protein, 360 aa, unidentified
MFIERTSVGLDVHARSVVAAAIDGVTGELFQSRLTPSYDHVLSWLAGLPGPVAVVYEAGPTGFGLFRSLTAAGIRCEVVAPSKLQRPSGDRVKTDARDAIHLARLLRLDEVTAVSVPSVEQEAARDLVRAREDARGDLMRARHRVSKLLLRRGIVYDGGLAWTEAHDAWLRRLRLDSAGVQMAFESDYEAVLAVKSRRDRLDRAIAAMAADSEFTPIVHRLGCLRGVSTLTGFALAVEIGDWHRFTGKTIGSFVGLVPSEYSSGASRVQGSITKTGNTHVRRLLVEAAWHHRTRYAIGKTMLDRWDLASPAARARGDAGNRRLHARWVRFNDRRKRHVIANVAVARELAGWCWSLAVLED

SEQ ID NO: 186228 - protein, 369 aa, unidentified
MKQVTTIGLDLAKAVFQVHGVDAFGAVTLRRAVRRRQVLVFFAKVPRCLVGMEACATAHYWAREIAKLGHDVRLIPPAYAKAYVRRNKNDPADAAAICEAVSRPSMRFVTIKTEAQQAAAGIHKVREMLMKQRTMLINTLRGLMAEFGIVVADGPHHVGELVAILADPADRRIPTPLHEGLLAIVESLRGLERRIEIVDKQIVGWGRGNQTCRHLITIPGYGPILSSAMAAIAVDPASFGSGRHFSASLGLVPRQDGPGGKVKLGPISKRGNGYLRRLLVNGAMSVLCSKQATQDPWLVKLLETKKRKVAACALANKMARIGWAVMVRQEDFRSRRHDQPCPDLGEPGAVLAAVKTAARAPAAVAFGQS

SEQ ID NO: 186229 - protein, 362 aa, unidentified
MQIIGCDLHARQQTLAMLDTGTGEVVNQTLAHEGNSVREFYSTLPGPVRVGIEATGSMKWFLHLMEELGIDCQVGHPATIRAAEPRRQKHDQRDAELLLKLLVENRFPSIWQPSKELLDLRGLLLHRHQWVRLRTRIQNALQAIALANGLRRGSSLWSESGQRAIASLPLATHTAHRRSELQAMYARFEAEIEQLNQQVLEQAGQRPTAELLMTHPGVGPITALATDVFLGDPKRFRDGKALASYIGIIPREHSSGGRQKLGGLTKQGNPLLRFLWCEAAAHAVRRDPELRRFYRRKLVQKGLGKARVAAARKLGIRLWIMLRDQIDYQEFCRRGQRQQKSGDACAGMPGRRYGAKSHRLID

SEQ ID NO: 186230 - protein, 334 aa, unidentified
MGNVPVFVGLDYHQDSVQVCVLDRQGRRLLNRRCPNDWRAIAEAVAPLGRVERAAVEACCGAADLAEELRGKAGWRADLAHPAYVAKLKGSPDKSDFSDGHLLADLTRVGYVPVVYLPSSYERDLRQLVNHRQDLVDRRRAAKLRAGAVLREHRARPPQKLSRWTRAWERWAASAPQLSEHARWVVGELLAEVVHLDGLVDAADARLRRATKGDRLVGRLMGEPGVGEVTAWVLRAYVGDFARFRSGKGLARYCGLSPCNASSGGRQADAGLVRGCNRLLRATLIQAAHRLARTEPRWVALSKSLRARGKPGSVAAAAVANRWARGLWHRMVAA

SEQ ID NO: 186231 - protein, 292 aa, unidentified
MNKFNHFVGIDISKKTFDAALIICSNTATVKHQAFNQNAAGFADFIDWLAYYKVAGDEVLICMEHTGLYSYGIIDALVAANLNLWVEMPLRIKRSMGLQRGGDDKAAAIQIALYAYRYLDQVSLWKPEQSIVAELRQLSAQRDRLKLSFNLISEDPSVKTTIQQVSSIKGVGKQTAIHMFIYTKGFTTFSSGKQLASYCGVVPFTKSSGTSVRYKTQVSPFANKHLKKLLHLCAMAAIQHNDELRHYYNRKIEEGKNKMSVINAVRNKLVQRIFAVVRDDRNYVENYQYQRA

SEQ ID NO: 186232 - protein, 367 aa, unidentified
MGKHSTAGESVIIRNGTNRRLTVGIDLGDRSSRYCILDEQGELLTEGSVATTKKGFAQVFGSKPRSRVALEVGTHSPWVSRYLGDLGHEVIVANARRVRLITDSTRKDDRLDAKTLARLARIDPELLSPIRHRSAQTQADLMIIRARAVLVEARTMLVNAARGLTKSCGERLRGCSTRQVGEELAQSLSEPLQNVLKPVLAEVESLTQRIREYDRQIENIAKASYPETERLQQVPGVGALTALSYVLTVGDAQRFRRSRDAGVYFGLRPRRRDSGENQPQLGITKEGDAYLRKLLVQCAHHILGRFGADSDLRRWGLRLAERGGKNAKKRAIVAVARKLAVLLHKLWVSGEVYEPLYVHRERKTTAA

SEQ ID NO: 186233 - protein, 342 aa, unidentified
MKFYCGIDLSARDCHVCVIDEQLQIMVQQKLRNDLAKVCQLLAPYKANLKIVVESTFNWYWLIDGLQAAGFEVVLAHTLGLYLITGAKVKTDRRDAYALAKLLLVGAVPAAYIYPVETRPVRDLLRRRLHLVQLRAGEYGSLRRLLLRQGILSSKQQEIKTATEAELEQWFEHPLVRLHASQELRRIELYSEQIAALEKTILALAQTEKSYDLLLQLPGVGQTIALTILYEVGELTRFANAKVFSSYCRVVPGIAQSGNVSRRGRASKQGNHYLKAAFSQAAVHAVRCYPKVRRYYERQLKRHQGRGRQMICYNIIAHKLAQAAFHVLKEQTEYRAELLFGR

SEQ ID NO: 186234 - protein, 399 aa, unidentified
MDERYEVFCGLDVGKFEHHAAALNAAGERVFDKPLSQDEARLRELFTGLQQHGRVLVIVDQPNTIGALPIAVARDCGCTVAYLPGLAMRKAADLYPGKSKTDARDAFIIAETARAMPHTLRAVDRDSEVLAALKVLSGFDADLTHECTRAINRLRSLLLQIFPALERVFPGTVLTRSLVLELFIKYAGPTGLRAAGRSNVLRWARNHSRKDPVNVVDAIFTALGEQTVTVIGSEAVELVIPRVAAQIKELKHQRAIVAEEVEKLLDDFPLSQVLMSMPGVGIKTAATILLTIGDAGTFTSAGHLAAYAGIAPVTRRSGTSIRGEFPARSGNKQLKNALFRSAWIASCHHPASKAYYQKKRAQGKKHNAAVICLARRRCDVIYSMLRNGTFYEEKPALAA

SEQ ID NO: 186235 - protein, 419 aa, unidentified
MNKIETKKQRIVNAKTLIVAIDIGKTTDTGYCRCPSGEECKPFEFSNNAEGFKKLWDRICWMKMSHHLEEVLVGFESTGAYGEPLVHYLRQKPVKLVQVNPMHTKRMKELQGNSPGKTDRKDPKVIADIIGLGHALSVVIPEGAAAELRRLTLARERSIERRTALYNQLQDLVFIVFPEFLQVMKDVKTQSAQYLLRHYPTPQDMVTCGSEALIRILRQVSRGKLGKERAQALYDAAVQSVGLEEGRRGILLEMEEILSGLEACKRFIERMEEEMVPYLEQIPYCDSLLSVKGIGEITVAGLIGEVGDFRQFRTLREVMKLAGLDLFEISSGKHKGNRHISKRGRPLLRKLLYFAAINTIRKGGVMHASYQRYLERGMPKIKALIAIARKLLGILFALVRDHSQYVENYSPKEVLKLAA

SEQ ID NO: 186236 - protein, 403 aa, unidentified
MSVFVGLDWGGSSHAVCLLDGTGKVIDHFAVGHDHEGLADLVARLRRHGQPDKTPIAIERPSGLLVDSLVEAGFLVTPIHPNVVKACRPRYRAVAAKSDPGDAYILADVLRTDGHRLAPLSPQSDAIKALRALVRGRDDLVAARVALANQLRTLLESFWPGPVACFADIDSPIALAFIDRYPTPDSAARLGEKRMAAFLAQNQYCGRRAAADVLTRLRSAACGVAGEAEAEAKGEMVRALARSLESIVAQLAKLTSRIEHTVAELPEGRIVMSFPRAGKICAAQITAELGDVRARFQSEDHLAAEAGVAPVTYQSGRSRGVGWRWACNKRLRAAVTCFADNSRHASPWAALVYRRARERGCKHPHAVRILARAWLRILWRAWQDRTTYDPQKHPAARALSVSG

SEQ ID NO: 186237 - protein, 347 aa, unidentified
MRFYTTQHPFYCGIDLHARTMYVCILNQAGETLVHRNMTATPEALLKAIAPYREQIVLAAECMFTWYWLADLCAEHGIPFILGHALYMKAIHGGKAKNDKIDAHKIAVLLRGGMLPQAYVYPAEMRATRDLLRRRMHLARKRGELLAHVQNTNSQYNLPAIGKKIAYKANRDGVAERFADPAVQKSIEVDLALIGYYDALLRDVELSIVKTAKHHDANTLYLLQTVPGIGKILSLVLLYEMHDIERFPRVQDFASYCRLVKCARESAGKRSGTSGNKIGNAHLKWAFSEAAVLFLRDNPAAQKFLARLEHKHSKGKALTILAHKLARAIYSMLKRQTAFDLDTFLRG

SEQ ID NO: 186238 - protein, 392 aa, unidentified
MIAVGIDVSKDKHDCFIMDSEGTILADVFTVTNDQMGFDQLYRVLYSVAQDLSKVKVGLEATGHYSYNILGFLLDKGLATYVLNPLHVNLFRKSTSLRRTKTDRVDARMIAAMLLSGMAALQPYSDTSYHNEQLKSLTRYRFDKVRERGKLKQSVSRLVTILFPELEKLIPTLHMASIYTLLLELPSAKQIAGCHLTHLTHLLDSASKGHYKRFAAEAIREAARHSVGISMPAKSLELQHTIRLIRELDSEIAEIEREIKHMMDKIDSPLLGIPGMGFRMAAMILAEIGDISRFDSPDKLLAFSGVSPSTYQSGKMDNAYAHMEKRGSKYLRFALYNAAKYVSYWDPIFAAYLEKKRSEGKHYNVALSHVVKKLVRLIFALQTSGKAYCPVT

SEQ ID NO: 186239 - protein, 364 aa, unidentified
MASIPRRDLIHLGMDVHKDSISIATLRPDDSMDVEKIFHDEASVRRFLHRFPDRRSLSTCYEAGPTGYELHRLIEGMGIRCDVVAPSLIPKAPGDRVKTDRRDARKLARLHRAGELSAIRVPTPVEESVRDLCRVRADMVADLDRARRRLGALLLRHGQVWRGGTRWTLKHHAWISSLSFDRPALQATLSHYRAVVEVRTAEVEAIERDLLAYSDLEPFADAVRRLCAYRGVARVGALTLASEVCDWARFPRASAFMGFAGLGVTEYSTGGKTRRGHITKTGSTHLRTQLVEAAWSYQHGPSVGPTLRRRQEACTPDTVARSWAAQRRLCARFRTLAARKNVKSVVAAAVARELGGFLWGEMTA

SEQ ID NO: 186240 - protein, 422 aa, unidentified
MSCLPALTGVCPTQRTVRRDVTILTETTLFVAGADTHADTIHIAAVSMTGVMLGDREFPTTRAGYAAAIGFLSSLGQVQRIGVEGTASYGAGLTRALLAAGIEVLEVARAVKSTRRLKGKSDPLDAYSAARSVLAGQGLAIPKDEATAGLRALHIARRSAVKHRTAVINQIKAMLISAPDAVREKYRGLTTLKLIEAIARCRPDTQSQPWAVSLLTAAKMLAQRVQFLDAQAAELQAQIDVLVSAANPALRAAYGVGADTAAQLLITAGANPHRLHSEAAFAALCGAAPIPASSGKTTRHRLCRGGDRAANNALHRIALVRLAHHQPTKDYAQRQRLKGHSKREILRKLKRAIAREIFKLLTRQIAIPEYADLRQARQAKNITLTAAAKHFGTWPTTITRIETGRQRDDAFADTYRTWLTTA

SEQ ID NO: 186241 - protein, 343 aa, unidentified
MKLSRVGIDLAKNVYQLHGVDRSGKTMWKRRLKRHQWLKVLLDKTEPGCVIGMEACASAHHWGRELQSRGYTVKLIPPQFVKPYVKSNKNDARDAEAICEAMSRPSMRFVTVKTVAQQDIQATHRIRAELITQRTAKANQIRGLVTEYGLVAPKHMSSLRAAIPCWLEDGENGLTADFRSLLHGVCGDLRALDDRVYEMDQVIKRLAENNEDCVRLQQLRGVGPMISTAMIATVGDARQYHKSRQMAAAIGITPKQHSSGDRDRLLGISKRGDVYLRTLMIHGARAVVARAKHKDDPLSRWVTGIATKRHPNVAAVALANKTARMAWAMLRNETDYDPDFAIR

SEQ ID NO: 186242 - protein, 341 aa, unidentified
MDKELYFGVDVSKKTLDLAYYDGETIDWKNAHIKVSNDDAGFKKIGSWVAKVGKDFDTFLFCMEYTGLYNQNFRLWLESKEYIYGMVEPRKMHRFEPDLDDDQRSLDRIKTDELDAFRIAIYCEQNHKKILRNPSKLPSPVYFKLKRLLAERKQNTKQSTLYKQQLHDICAYDTDLSVERKKLLLKNMQENQKAIDKEIDSYMNEDTSIRKNYNLLTSIPGIGRIIALETIVLTENFTAISNPRKYACYIGIAPFKKESGTSVRKKTGVSKKGFSEAKADLSIAVLSAIRNNPSIRDYWIRKRKKKCGGIVLNAVKFKLVLRMFAVIKRGTPYVETDAYKN

SEQ ID NO: 186243 - protein, 366 aa, unidentified
MDPIYIGVDFHSRQQTICYLKTETGELVTCELKHQDKDEVRDFYRKFQGHVIVGLEASGYSLWFEAMLEQRGFEVWLGDATEIRRRARWRYKDDRRDAELIRDLMVHHEFPRLHQPTPQSRDILRMLRYRQKLIKVRTMTKNSLQAIAMQAGLAKGRRLFTLAGQTEFKAIAMSPVLQYQRDHWFELLKPLNQELLETMKWFKAAAKGDATVARFRTHPGIGFLTALCLLHTLQPVSRFRNQRKVVAYAGFDPMVRRSADSALHLGISKAGSRMLRYLTVEAVHTAIRHDKDLDRFYKRLTERRGRPKAKVAAARKLLIRAYIMMRDEIDYAEFNRRAVAARPARKSQGTPGVPEVLIGRSASPGA

SEQ ID NO: 186244 - protein, 311 aa, unidentified
MTLPQDVVGVDIAKDWIDCHRLSTGEAWRVDTSPRSLRRFAARASGALVVFEASGGYERPLVAALDAAGATYARVNARQAREFARASGRLAKTDRVDAEVLAELGRALAPRPTPPADPAESRLAELAARRDDLVGMRKAETQRLGQARDPFLRKQIAAHLRMLRGRIARLEVEIAAHLDRHSPLADRATRLQGVPGIGPVLAAGLIARLPELGRLDRRAIASMAGLAPHACDSGAMRGRRRIWGGRADVRRMLYLAAFVASRYDPRLRVFRIRLQDAGKPFKLAIIATARKLLTILNAMLRDGTDYAKPAM

SEQ ID NO: 186245 - protein, 409 aa, unidentified
MVVHAAPVTPSTVVVAIDVGKNEFAVSVTDVTRTKLLRPRLGCPMTGSSVRDVVGTIQRLLPPDALVKIGIEAAGHYHRPLLTAASWPAAWELLELNPGHVTEQRRVLGKRTIKTDAVDLEAMTELLLAGRGLPVRDRNGVLTELTAWSAHRTGGVLIRTATKNKLLGQLDRSFPGLTRALPDVLGTKVGRLIAAEFADPARLAALGSSRFIRFGATRGLQIRRATADKLIAAARDALPMPDAAVARAVLAADLALLADLDTQIDAADGELERLVRRSPFKTLLTVKGWGSVRAGNYGGALGDPARFATSRQIYRTAGLNPIQYESAGKRRDSVISREGSIELRRALIDLGLGLWLNDPAAKQHATALKARGKTGLVIACAMAHRANRIAFALVRDQADYDPTRWIRED

SEQ ID NO: 186246 - protein, 337 aa, unidentified
MDSQGNNQQKVKLSNDKQEIISFFNQLPRSASIAIEATYNWPWLVDTLEDLGFTPKLAHPKKVRIIAESAIKTDDVDSEALAHLDRLNFLPLSYIPSQEDRQLREQLRYRQYLVKIRTALKNRIHSTLAKLGIFHQFSDLFGKAGREFLVNIDMNPAYKTPIIEQLELITLLDKKIDAAEKSVVKEQIAGNPAFSLMRTIPGIGSLSAALLTIEIGPISRFRHYKKLISFGGLCSTISQSANKTRYGHINRDSNPFIRWVLIEAVPKAIKKDAKLAAYYHKIMIKKGKAKAKIAIARKLLIALYFMLKNNESYGLAHNINKTTKKIYRLNPVLTLGA

SEQ ID NO: 186247 - protein, 338 aa, unidentified
MALYCGIDLHSTNCWVSVLLEGQQVIKEKRIGNDLDLVLEFLEPFREELEGIAVESTYNWYWLVDGLMDAGHRVHLTNTWAIKQYDRLKYADDRHDARWLAHLLSLGILPEGFIYPKEERGVRDLLRRRLFLVQKKTAFLLAMRGAFECRTGLRTKTNDVKKWTIDDITPHIDDPFASMGISCLLGPVGAMNEQIQLIEKAVLKRGRLREEYRHLTTVWGIGKILGLTIMYEVGEIDRFKKVGNFASYCRLVKSDWWSNGKRKGTGNVRNGNPYLSWAFSEAAHFATIHYEDAKKYVQKKRSKTNGIVAIRALAHKLARASYHVMKDQVDFDPERLFT

SEQ ID NO: 186248 - protein, 356 aa, unidentified
MEIIAMDSHKRYSLANVQTPDGRRLCEQRIEHRRGNIRDFLSAYRPGSPVAVETIGNWYWIVDEIEAAEMVPRRVHARKAKLMLGSINKTDKLDVRGLNMLQRIGTLPTVWIPPASIRDQRELPRTRMVLGVSRTRLKNRIHSVLDKYGLQDQFEGVSDIFGKKGRTILQDTLVQLPLHTAYTAEVLLEQLDQIQEAIGKIEKQMAEVFKPTPEMTLLASLPGVALILSVVIGLEIGDIRRFKWADRLASYAGTVPRVHSSGGKTRYGRTRPDVNHYLKWAYAEAGNSVAVNRKRFPYRHVSQLYTRVRTRRGHAQAVGAVARHLAEATYWMLSKNEPYQERGSKQVQGAVSATLS

SEQ ID NO: 186249 - protein, 319 aa, unidentified
MKKIELNLSEKPIIGIDVSKDNLEVFNDRSSQHVVCPNQTRNLKQLAKDLKKESPELIVMEATGGYETQAAIEFSKACLPYAVVFPRRVRLLAQGAGVIAKNDQVDARVIAYYGRVGGIKPKPLDSEELRGLHALTTRRSQLVKMRQMEENRLHTIHSAMRKSVKDHIAWLSRQIENLNKEIDQQIKRSEVWNEKRKLLMSVPGVGSVLASTLITELPELGVLSNRQIAALVGVAPFDCDTGKRKGTRFCKGGRSSVRRVLYMATLSAARFNPVIKTLYDRLCEKRKRNKIVRIACARKMLVILNAMARDNLSFRSSSA

SEQ ID NO: 186250 - protein, 339 aa, unidentified
MELYGAIDLHSTNCHLAMVDGQRNRVFYRKFPNRKETVLNALSPFEAQIRGIAVESTYNWYWLVDALMEQGYQVHLVNTTQVIQYSGMKYGDDRHDAFWLATLLSLGILPEGYIYPRKERPLRDLFRKRAHLVRVRTALLLSQQNMILRNRGLKVSAYELKRFSHDGVASLFQGDPELTLAAEANKAVIDLLTIQIDRLEKAIRVRMVPREGFTKVMSLPGVGDILAMAILLETGPIDRFQQVGDYASYSRKVPGVWLSNGKIKGRGNTRNGNRYLAWAFSEAADHARRHHALSRAFYQRKLAQSNAAVAHHALAHKLARAAYYIMRDNVVFDEGKMFR

SEQ ID NO: 186251 - protein, 361 aa, unidentified
MKRALKDNQEAFAGQEFYIGIDVHQKQWTISIQSNQIALAKPLTLDPSARSLSSYLKRQYPGGKYHAVYEAGYSGFWPARDLLSEKIETMVVNPADIPTMHKERSTKTDSVDSRKLARSLENKELRAIYIPERKAEEYRLLNRYRSQLVRDETRIKNRIKAILAEFNYRVPVELEGNRWSGAYVRWLQTNTFETPYAQIAYNERLEQLAESRKRLAKVLRELKLMATREPSIASLVKLLQSVPGVGFLTAILLVVELIDMTRFKRFDELASYIGLAPSIHESDERSYSRGLTKRQHHELRSRLLESAWIAVRKDPVLTMKFGQLCKRMNKNKAIIRIAKMLLNRIRTVWKTETPYVYGVIE

SEQ ID NO: 186252 - protein, 287 aa, unidentified
MYNTTIFVGMDVHKETFSLCCYTIEKDEFSHPHTTEADYIHVLSYLASLRAALGENVSFICGYEAGCLGYTLYHQLTEHNITCVILAPTTMPVVKGKKKIKTDKRDARNIAKCLAHHDYSPVYVPTGQDEQVKDYIRMRDDHRLPLKKMKQEINAFCLRHNLRYGGRSTWTAAHTKWLRWLEPEGLYREILEEYLLTLSTLMDKIDRLDRRIGELAAREEYCEKTKQLSCFLGIKTHTALAVVVETVDFKRFPSAEKYACYLGLVPGGIQAAQARRGLGSQRRGTAM

SEQ ID NO: 186253 - protein, 388 aa, unidentified
MPAAERPVAYLGIDVGKSSHSACALDAGGGVAFRAELANRPDDIDRLLERAGSGALVVVDQKRNIGALVLARAHAHGNPCAYLPGYAEKQARGMFPGTAKTDAIDAEVIARTALGVPRALRPAPEEPEGTASLRILSSQREFASSARTRAKNRLRATLLEADPALEGAVDPSSRWQVSMLAEFGGAAGCSAAGWRRFSNAARRAGAPAAGARRLWEALLASSRSGRRLPAGEDVAVRMLAREIASLDADIEELDSLVADSLAGDEVYECLLTVPGIGPKTAAALVTSIDISAFRGHDELASYCGVAPSDRRSGSSIRSTSPQRGGNRQLKNLLIFSCNSLIGTDNRFGRYYGECRARGMRHSKALKAVARKRLKVIYAIMRDAVPYAA

SEQ ID NO: 186254 - protein, 344 aa, unidentified
MNHVAIDLGSKESQVCMRAPDGTVVLEKKHPTRRLGELMTSWPQSRVVVETSSEAFAIADAARAAGHEVRVVRSTLSRQLGVGERGIKSDLRDARKLSEVSTRIDLASVHIPSAEARALRSRIRSRDILVTTRTALVNHVRGWLRTHVITLTTKGTPATFPARVIATVASRELELPSYIGHSLSTIDVLNQQILAATKELAAIAKAHDVCRRLMTVPGVGPITSLAFVAAIDDVSRFSHAHRVSSYLGLTPGEDSSGERERRTGITKAGASSVRRLLIQAAWGAYQRAKHDPMVVWMKRIADRRGKFIAIVALARKLSTILFALWRDQTTYRPARAAQSGPMPS

SEQ ID NO: 186255 - protein, 469 aa, unidentified
MERKAGGGGAAGAVPGRRQSEGQGRRKRARKASFKLAHPDCAGIDVCSSSHFVAVPPDRDSDPVREFRSFTDDLYRLADWLSACGIRTVVMESTGVYWIALYELLESRGFAVYLVNARHVKNVSGRKSDVLDCQWIRELMSFGLLRGAFRPSQEVCGLRTVMRQRDMLLASQARHVQHMQKALAQMNIQLANVISDVVGETGQRIVRAIVAGERDRSRLAALRSPRIHASEQEIARALEGTWRAEHLFALKQAVALFDAYAQMLAECDCELERMLDELARHDGDPGKPKRRGRQKNAPRFDVRTGLFRACGVDLTRIDGIDTTTALKVLSETGPDLGRFPTSKHFTSWLNLCPNTRITGGKRLKGRERNRCNRAGRALRQAAVGLSTSKSALGAYFRRMAGRLGKMIAIKATAHKLARLVYAALTKGMVYVDRGMAAEDERYRVRALEHLAKRAAALGYSLAPTLQEAN

SEQ ID NO: 186256 - protein, 309 aa, unidentified
MLSSVGIDTAKATLEICIKPQKIRFEVANNSAGFEALLERLKDFNISRVLIEATGGYEKDVLIALASAGLETICINPARARKFADAMGKKAKTDKIDAEVLADFAAHLSVPQGQPISPEREELRELVKQRAQFVQSRDDYKRRRLQCRSAMAMAHFDEHIEHLKVLIKRLDEEIDQAMVQLDDTRASQLLAVSGIGRVTAANLLASLPELGQLDRRQIAALVGVAPYNNDSGSHRGHRQIWGGRAHVRRVLYMSSWIIIRQNTEFKARYEALRARGKCAKVALVACMRVLIVRLNAMLRDNTPWREQTA

SEQ ID NO: 186257 - protein, 353 aa, unidentified
MDKITRIGVDLAKNIIQVHGVDSMERVVVRKAISRQKFLEWFANLEPCLVAMEACSAAHYWGRKLRALGHEVRLIAPQFAAPYRKGGKHVKNDRLDAEAICEAAGRPHMRFVAVKTADQQNVLVLHRMRDGFVEERTALVNRLRGELVEFGVFLPQGIDAFRAHFVEALEDGATELNGVARTALLRGWEHLQALDQQIAWCDVQVATHVKQDSNAQRVMAVIGIGPLTASATVATVGDARLFKNGRQFAAWVGTVPKQKSSGGKTRLGHITKQGNTYLRTLLFQGARSAVTSAHRRTDRLSRWIVQLQARVGWYRTLVAVANKHARILWAILAKGERFDPSYVSTPSTPGQPR

SEQ ID NO: 186258 - protein, 368 aa, unidentified
MEKACGLDVHKDSVFACILDEQGKKIFEKRYTTLTPDLMELRDTLVEKGCGRVAMESTSIYWMPIWHVLYGDFSLTLANPYFIRQLPGRKSDVKDAHWIAECLQKDLIKSSFVADGVLQRMRQYSRQHRRLTKSRVRWEQQLDNQLQRCNIRFSNYVSNQGKNVSMRKIIKAIISGERDPVRLCRLVHGRTRNKHGNQVITDSLSGVVQQTDVEILIQCMEQIDLIEIQQATCLNHLEELANKYFAEEISLLCTIPAIKRLSAMFILAEIGSDMNVFSRAGSLVGWAGLRPRNDESAGKIRSRKTLHGNKYLRQILVEVSWSAARSKKSFLQRKALIAITGKFLVIIYNVLNTEQPFDTMRNMQAISA

SEQ ID NO: 186259 - protein, 352 aa, unidentified
MKYYIGCDAHKKYSVFTAINESGEISPAKRVEHDRNSFRSFLKTLPPASQIAVESTGNWYWLIDEMEKAGHVPSLVHAAKAKLMMGHINKTDKLDAQGLAILARNGTLPAVWIPPGELRDRRELPRMRMALSQVRTKFKNRIHSTFAKYGITFDEVSDLFGKKGRILIEKSLDELPPETRNSVQEQLWLLDQLEQSINKAEKRIREVIKIDHDMQLLLTLPGVGPILTIVIALEIGIVDRFPTGERLSSYAGKVPRVKSSGGKTYYGKVRPDVNRYLKWAFTEAANAVVLQQHRLPDCHVLRLYWRVRKHKGHAKAITAMGRHLAEATYWMLKKNEPYHEPKVKTLVSYNQG

SEQ ID NO: 186260 - protein, 400 aa, unidentified
MLSIGIDVSKGKSTVCGMKPGGEIVYTPFEVQHTREGMSELVSLLRSSGEEVRVVLESTGSYHCPVVATLLENGIFVSVVNSLRMKRFCSQSIRKVKTDRIDAMQIALYGLAYWQELQPARLPEDTYRELQLLARQYYQMTSLLIKAKVDFNAICDQVLPGMQELMNDHAGRHKLSDFVLRYHHATHILEMGETRFQKDYCKWAEKKGYRNCERMAVLIFATAQNGIPVLPNAPSTQIVITEAIRVLHTVEASRDAILTQMQALAKTLPEYSLVREMPCIGDTLAPRLIAENGDVRRFHSKRALIAYAGIDAPPYQSGKFCANNRHISKRGNRYLRKTGYEVMQSYVMHKPTNDPIFTFIEKKRGEGNSAKLAMVAGLNKFLRVYYGKVTELYRSLPTIE

SEQ ID NO: 186261 - protein, 376 aa, unidentified
MREKLRFLGLDVHAETIAAAMAEPDGEMRSLGTIANREDSIRKFIKKLGSPEQLRACYEAGPTGFVLYWQLVQLGVECTVVAPTLVPKKPGDRVKTDRRDALKLARSHRSGDLTAVWVPDEASEALRDLVRQREAAKQDQLRARHRLTKFLLRTGQRAPIGLKAWTERYMRWLAQIRYTQPAQEVTRLDCMNEVEHMSARVKRLEEAILEVVKQAPQAMQELIRGLQALRGIAHISAVTIASELGNVSSRFESARKLMGYSGVFPSENSSGTRIRKGGITKAGNAHLRRIVMESAWCYRHLPRVGEKLRKRHQGIPADIIEIAWKAQNRLHKRYVKLAMAGKDQRKVVTAVGRELLGFIWAIGVKAEQAYRQPLAA

SEQ ID NO: 186262 - protein, 317 aa, unidentified
MDTPPVADRFVGIDVSKDRVDVHVRPDATAFACTTDPEGLVELANRLAPLQPQLIAMEASGGYEGVVAAALTEAGLPVAIVNPRQVRKFAGAIDRLAKTDAIDAGVIAHFADAIRPAPKPMTDALMLRLRELLARRRQLVVMINAEKQRLGKAADKLAQRSFRTILRSLEAERARIDRAIDKLIEESPVFCARQDLLKSVPGIGDVVARTLIVELPELGSVDRHQIAALAGVAPMNRDSGRYRGKRRIQGGRVEVRAPLYMACLVAIRHNPPLRRFYRRLRQAGKPARLALVAVMRKLLTTLNAIVRDNRAWAHAQT

SEQ ID NO: 186263 - protein, 354 aa, unidentified
MEIDTIGIDLGKTVFHLVGLSPRGEIVVRKKLSRTQLLHFTANLRVRLIGMESCGGAHFLGRALCKQGHDVRLIPAQYVKPYVKTNKNDYIDAEAIAEAVGRPKMRFVPVKSDDQLDMQSLHRVRDRWVGRRTSLINQIRGLLLERGITVRQGRRWLEAALPGILEDPDARLSGPMRMLLVQLQRELKQLQIQIEEVDEVIVKNAGEHDACRRLMAIPGIGPLTATAVVAAIGNGVAFSKGRNFATWLGLVPGQYSTGGKQKLLGISKRGNSYLRRLFVHGARAVLCRTEKQSSGLRAWLTQLAARAHRNVVAVALANKLARVAWAVLSTGEAYRPPLLTADAGSGSTPELVCN

SEQ ID NO: 186264 - protein, 232 aa, unidentified
MADGICFAGLDVHARKTAGAAVQLGSGEVFRAQLAGSSTAAIEWLQSLPGEVRAVYEAGPTGFGLARAARAAGIEMMVCAPGAIPRQPGDHTKTDQRDALKLARLHAAGQLRAVVVAEPAYEALRDRVRCREDLRGDLMACRHRISKLLLRREMVWAGPGHTWSQAHLKWLSTIRFGEPIVARLRCLRGVDTLTAVGLIAEIGDIGAFAHPRQLTSYLGLVPSEHTRGSTRR

SEQ ID NO: 186265 - protein, 357 aa, unidentified
MPSENTVHVAIELSSSTWLTAARLPGAEKSRLRRIEGGDTTGLLALLSDLGQQASTKLGRVVDVACCFEAGRDGFWLHRLLTVHGVAAYVLEPTSILVNRRARRAKTDRLDAEGMLRVLAAWLGGDRGVCSMVRVPTPEQEDAKRPHRERERLVRERLRIENRIEALLFTQGIRNRPSLRSWERDMAELRTGDGRAVPPLLRAELDRLRRRLVLALELIRDLEAERAAALAAAADAAAADNAMALKITALQRIRGIGENFSAVLVREVLYRSFANRRQLASYVGIAPMPCQSGGMDRDRSISRAGNPRARTTLIQLAWLWLRYQPGSALAAWFRERVGALQGRTRRISPLWPWPGSC

SEQ ID NO: 186266 - protein, 342 aa, unidentified
MDKIEACGIEVSAKELVVAMSGKKREAVLRRFANTPVGHRQLLQALTRGGKRVRACREATGLYGLDVALLLSAHAGIELMVANPRAVRHFAKARMQRSKNDQLDAVMLREFAMRMEFTAWARPDKSTLALWAIARRLEALTKQCTAEKNRQHAAGISQAMPACVRASVARTLRSLQREVKKLREMAREYIAGDARLQRRYQLLRTMPGIGEISALQILAELALLPADRDVRQWVAYAGLDPREHSSGTSVNKHARISKVGNRHLRCALYMPALVASHCEPHLRGFYEHLVAEGKKKKQALTAVARKILHAIFGMFRWDRPYDGNCVYPLPLPSLPPQTAKIA

SEQ ID NO: 186267 - protein, 356 aa, unidentified
MEYIAFDAHKRYTLASVARPDGGLVREQRIPHERGALQQFLERCEHGSPVAVETIGNWYWIVDEIEAAGCVPKLVHARKAKLMMGEINKTDKLDARGLNRLQRAGTLPTVWIPPGELRDQRDLPRTRMVLVRQRTQLKNRIHATLAKYALHDLEVTDLFGVRGRALLRQRLDLLPLHTAYATQQLLEQVESLDRQVRGFEQRIQAVFKPTPVIQWLLTLPGVGLTLAVVIALEVGDVARFATAEKLAGYAGTPPRVHASGGKTRFGPARPDVNRYLKWAFVEAANAICLTRGRAPHRHVSRLYERIGRRKGHAKAIGAVARHLAEATYWILSKGECYRDPKASGRFVHGGISAEAP

SEQ ID NO: 186268 - protein, 337 aa, unidentified
MDRIPVFVGLDYHQNLVQVCVEDAKGQVLLNQPCDNDWLAIRTLAETHGRVVRASIEACCGAANLAEELVEKTGWNVDLAHPGYVARMRLNPDKHDWGDARMLADLERVGYLPRVWLAPAYIRELRRLVRYRQQLVAERKNAKLRIGALLRDHRIRNAPARRWTRRWLWWLQEYEGLPDASRWIMECYLARLQGIGQELKLVEKRIAAFTEEDPVVQRLLELPGVGPVTAWLLRSEIGRFDRFQTGKQLSRFCGLTPRNASSGQRQADAGLIKAGNPHLRAVLIQAAHRLINHDARWNAFGQRLQSAGKPYSVVVAAVANRWIRWLFHQMVSQRSAA

SEQ ID NO: 186269 - protein, 443 aa, unidentified
MNPSPTAQTIKYVGLDVHAQTVAVAIAHAGGDVVSYGTVPAHSHSMDRLHKKLSEGGAQVRYVYEAGPTGFWLARHLRGKQIPCEIVSPSLVPKKSGDRVKTDRRDALALARLYRAGELSFVHVPDEADEAMRDLVRTRLRAVEDLRRCRQRIKGFLLRYGRRYDGRSAWTAEHLNYLSRQKFDHPGQQIAFEELLNAVQDPAQRIERLTKAIEAQVQPWSRRPLVEALMCLRGLALINAVTWVAEIGDFTRFTHPSQLMSYIGITPSESSSGQKRRQGAITKTGNEACRRAIIEAAWQCRLPARVTPHIRQRHHGQPQAVIALAWKAQTRLCARYQDLIRHRKKTVVVVTAIGRELVGFLWAIAREIHTPGTAAAEALKRKTPDALKKETQTPVKPVAKAGRSHPLDARKKHEATPPAVGKQVLPAGARKAPRKKKKNPAAR

SEQ ID NO: 186270 - protein, 449 aa, unidentified
MEILYARCAGFDVHKKTVRVCLLIRQENGKIDKEFRTYSTTTRDLLNLLDWLLSQECSHVAIEGTGVYWKPVYNLLEGHIEVLVVNAQHIKAVPGRKTDTKDAEWIADLLQHGLLKASFIPSAPQRELRDLTRYRVRLTEERAREVNRVQKTLEGTNLKLGDVVSDIMGKAARLILWAIAEGESDPARLASRAVGRVRASQEQLEAALTATISDHHRFLLREHLTQIEHLERAVERVTAEIARRFSPPDPASDAEDSQPLKSEGKEGSTGSCPPLLPPSKQGLGWEEAVVLLCSIPGISERAARGILAEIGVNMQQFPTAAHLASWAGVCPGNHESAGKRLSGKTRKGNLWLRRLLLQAAHVVGRQKQGYLAAQFRRIAARRGKKRAGMAVAHSMLVIIYYLLHEGVPYKEKGEAFFEEQDRQVIQKRLVRQLERLGHQVTLQPLAQAG

SEQ ID NO: 186271 - protein, 371 aa, unidentified
MSTKRILSNTIDTTQEYEVVGLDLAKNCVSAALITIEGELIGIDRLEYQDLRKCAQEMPATTFAMEPCCEMNLLVNELESWGHRCVVIDGKNVQNYIETHFSNQKTDLNDAQALAFLARDKQIRLIKPKDRQQLEFACLTTLREQYVKQYRQTLVSLKGICQSWGLNISKGISGKARLSEMIEKYEKFPEELRRELQNMVKHAQEVQKALTEINKTLKQVSKGDELCKMVQTVPGIGLVCACRLKATIGDISRFKHPKNFPAYFGLVPRSISTGHNEKKGRLTKRGDKTMRSLMIQAAGSVILMANKGNLKARALSKWILKKQREKMPWGKLTCAVAAKLLRIIRAMLISGKSFNPKVAAIAKCSLPKQTV

SEQ ID NO: 186272 - protein, 354 aa, unidentified
MSQQLNTTIAVIGIDIGKNSFHIVGLDKPGAIALRQKWSRGQVEAHLANMPPCLIGMEACVGAHHLSRKLKALGHDARLMPAKYVRPYSKGQKNDFRDAQAIAEAVQRPTMKFVATKTTDQLDLQALHRVRERLVSQRTGIINQIRAFLLERGIAARQGQRFLRAGLPTILTTPPDVLSPRMVRIIEGLASDWRRLDERIEGLSSEIKAIACQDSSCERLMSVPGIGPIISSAMVAAIGTGDTFSKGRDYAAWLGLVPKQMSTGDRTILGKISKRGNRYLRVLFVQAAWVVLIKPKSWQRHGLKPWIEAAKKRLHRNVLAIALANKLARIAWSVLARGRGFEASTISDTATQPA

SEQ ID NO: 186273 - protein, 426 aa, unidentified
MLNSQINKIQAITSDTLIVGVDIAKNIQWAQFINFRGIEVSKHICFENNYSGFNSIMEKIEEIKSKNNFLSVIVGMEPTGHYWKTFATFLHNNGIKVVQVNPYHTKKAKELDDNSQTKSDEKDALVIAKLIKDGRYSAIYFPEGEYADLRNLSNTRLEVSRLLNICKNRIHTCVDEYFPEFETVFKSFIKGKVALHILKRIPFPTDILELTLEDIISVIREAAKKSVGKKKAEELIRAAKVSIGVKVGLEGARIRLNNLLEEYELYHNQLEKIEKEMAQELEKTGYKDILTSIPGIGIISAASFIGEIGDPKRFSNPQQIIRLAGYNLVEDSSGKHKSKTMISKRGRKILRTILYKISLIVVCKNQEIKLLYKYLITRKENPLKKKQALIVISGKMVKIMYSLIKKEEVYDKEKVLGIYRKQQIVA

SEQ ID NO: 186274 - protein, 453 aa, unidentified
MAQGSGLTRGDQNRNRRIAALREAVRRDRAVLAIDLGEDKQAAVLVDHEGKVLARKVVKAKAYQLGGLLGWAADRAARAGFAGVTVACEPTGHRWKAVMGLADAAGLGFVCVQSLAVHRSREADDYTRDKTDHRDAWLIGRLVIRLDCYRPERAGETWGRLRHLGARRFALVADVTSCMQQVGDLLGCAWPAALGAAARPLESTTWLAAMSAVTGRCGGNPARLRKMGYEKFAAAVRRELPPWGGSKLRYRIVQGLWEALADTGGVASERRGALERVRLLLGDWMSLRARLADAEERMTGMLDELGLTALVTSIDGLSATGAAVILAETGDLTRFHSARAVVKHAGLNPAENTSATIAGRTRIARRGRPRLRAAAWRAVWGGMRHNQVLQGKHAHLTGRDSGRLNDGQARTACAAALLRWLHAVVTTRRAWDPRIASGAVPSRAGTAPARQAA

SEQ ID NO: 186275 - protein, 412 aa, unidentified
MDTIAAYIGLDWADERHSVHLQSADGKIEHLELEQKPAVLHEWVAQLQQRFGGGKIAVALEQRKGAVIHALLMDDCFVLYPINPKALARYREAFSTSGAKDDPLDSELLLDLVVRHRDQLRAWVPDTVESRKLQALCEQRRKLVNQRVALTNRLTSLLKQYFPHALDWVGDLASVQACDFLTQWPTLAAVQRARPNTIRQFYRAHNCRKADVIEARLAAIAGARPLTTDAAVIEPLSLSVQTYAAQLRTLIAAIQTFDERIAAVFAAHADHDVFTSFPGAGDVCAPRLAAVLGTDRSRWDSAAELQAHSGIAPVTERSGKRLWVHHRLACPKFVKQTFHEFADQSIRFSRWARAYYDQQRARGNDHHAALRALAYKWIRILFRCWKERRPYDEDTYLDALRRRGSPLAKNFA

SEQ ID NO: 186276 - protein, 398 aa, unidentified
MTESSDYESVQVFIGVDVGKDTHHAVAINRSGKRLFDKALPNDENKLRSLISDLKQHGQILLVVDQPATIGALPVAVARSEGVLVGYLPGLAMRRIADLHAGEAKTDARDAAIIAEAARTLPHALRTLKLADEQIAELSMLCGFDDDLAAQTTQASNRIRGLLTQIHPAPERVLGPRLEHPAVLDLLQRYPSPEKLASLGEKKLAAQLCKLAPRLGKRLAADIAQALAEQTVVVPGTNAAAVVLPRPALQLITLRKQRDEVALEVEQRVLAHPLYPVLTSMPGVGVRTAARLLTEVACRAFASAAHLAAYAGLAPVTRRSGSSIRGEHPSRRGNKALKRALFLSAFAALRDPLSRAYYTRKMSQGKRHNQALIALARRRCDVLFAMMRDGTFYTPQGS

SEQ ID NO: 186277 - protein, 312 aa, unidentified
MTEHCYCGIDVAKERLDVQVLPHRQRLSVDNNATGWSELVARLHALPIAAVGIEPSGGYERGIIRTLLAAGLSVRRINPSKLRQFARARGILAKNDRLDAQLIAEYVSIMPTRVVQRAASAERLGEVVTIRRQLCNQHVTIENQAAHVEDAILRRLNKRRLARLKADIHLLDKRMAEIVAADAILAQRFELLTSMRGVGPTLAFTLIALLPELGQMSRKQIAALVGVAPYDFDSGKLKGHRCIYGGRMAVRNVLYMAALSACRYNPVLKIFHNRLAAANKKPKVVIVAVMRKMITTLNAMLRDNAAWQPRAA

SEQ ID NO: 186278 - protein, 394 aa, unidentified
MKLIGIDIGKNKHFFCIMDQQTGEIISQPISFSNDKEGFDFLIQKIKSYSKDSILIGMEDTGHYHFALLKYLLDLQYTVALINPKTTDFNRKIQGGITKNDKLDTINICDVLDTPERKKQYRITKVNSFDLYEQKQLTRHHHNLKEEENVYKNRLQKCIDIVFPEFNNLFNSKYGTVYMNILKMFGSAENIANTDIRTIRKCFEIEGRGNRISLTPERLKECAGSSIGISSSAEVIQIKHLTAQIELIEEQLTEIDKKIEEFSIQNNSPILSIPGISHFSGTSILAELGDISNYSKPSQIIKFAGVAPLHYESSQFNAQHTAITKKGSKYLRKTLYQIILPVIRHNPVFTKYYQLKISQGKGHRCAQGHCVRKLIRIIYHLLKTNQQFDPQLLR

SEQ ID NO: 186279 - protein, 357 aa, unidentified
MGVSPRLPRACKPATELGAAPAFAVPNPDSRLGLSPHSQGRVMDESSAVFVGIDVSKDRLDVHLRPTGEAFCVPRDAIGLDSLTGRLNDLAVTLIVLEATGGYEATVAAALAGAGLPLSVVNPRQIRDFARAMGRLAKTDMLDAEVIALFAERVRPQARPLPEPERNHLAALVSRRRQVIQMIGMEENRRPQAIDKRLAKRLDRHVAFLEKELAEVDADISQAIKASPVWREAEALLKSVPGIGDVTARTLLAELPELGTIGRHQLAALVGVAPINRDSGLMRGHRSIAGGRTSVRNVLYMAALTAIRRRSPFRAFYDRLTSRGRPKKVALVAVMRKLLTTLNAILRSRTPWQPLSA

SEQ ID NO: 186280 - protein, 453 aa, unidentified
MKKETEKKGIVKMGKGLPVFNNNAAGIDIGDTLHCVAISDESGGYEVKTTSGFTCDLLEIVDYLKNNGITTVAMESTGVYWLPLYIMLEDAGIEPYLVNAKHVKNVTGRKKDDTDAIWLQKLHTCGLLQKSFQPDNEIRLLREYTRQRKNLVKLGADSVRRMQKSLELMNIKIHTVISDLLGKTGLQMVRAILAGERDAEVLSTLCDPRIKAPKSEIIKSLEGIWKEEYLFMLAQAFENYEFHQRQIKDCDKKIKDQLLKQVALVNKGDITIIEETLKKKPKKNVRKNQFDVPINPFLIAISGVDLCKIPGISEVTALEFLSEVGLDMSKWKSAKHFAAWLNLTPNTKISGGKILSSRMTRKKNKAGQYLKQAASGLATNKSPIGDYYRRMRAKLGGKGAVLATAHKLARIIYTMLLNKTEYNCEIMSENQQLMKENKIKNLEKQLERLKNAS

SEQ ID NO: 186281 - protein, 378 aa, unidentified
MTAVLQHKDSANGTTLYMALELSNKKWKLGFSNGEKNRLTTIAAGDWIDLHKQMDLAKQKLRLPEDCRIVSCYEAGRDGFWIHRGLEAEGIENHVVDSSSIEVNRRKRRAKTDKVDVKALLRLLQRYWHGDRETMSVVRVPTIEEEDQRRLHRERTRLIKERGGHSARIKSLLVAHGIRLEIRSDFLQQLESSRGGSTDYELGADLKAEIRREYERYRMVHLQIKALEGEQQLRAGEEETGAMQQVNQLLKLKGVGWQSSWILVMEFFSWRDFRNQRQLGACAGLTPTPYASGDSEREQGISKAGNRQVRSLMIELSWLWLRYQPNSTLTQWFQQRFAGGGKRMRRIGIVAMARKLLIALWRYVKEGVVPEGAVFKAA

SEQ ID NO: 186282 - protein, 340 aa, unidentified
MAPPRRPEIVIGLDVGKSSHWACVATRDGEVLASKPVANRENALDSLFAEFPGALVVVDQVRNIGALALSRARAAGMPSAYLPGLAAHEAARLFGGDAKTDERDAMVIAKTALGIPDALLPVPHPDPAIAAARALAAQRDFLTCESTRSKNRLRSILLESCPEFESLVDLSDVSELRLMAALGGPWSVRFLARRIAENAAELQAATAEISALLERDETYRCLLTIPGIGPKTASELAISVNIDDFPNHDRLASYCGLAPRNRQSGTSVSSVSASQQGNKRLKNLLIFSCNCLARTDGRWGEYYARCRDRGMPHGKALKAVARKRLKVIYAVMRDKVPYVA

SEQ ID NO: 186283 - protein, 323 aa, unidentified
MADKQTVEFEQLASKCCGLDVHKKEIVATVDGEGLPKETRTFSSTTRSLTELKDWLLELGVSHVAMESTGVYWKPVMNILEPGGFTILVVNARHIKYVPGHKTDKKDSAWICKLLRAGLLKGSFVPSQSQRDLRDLTRYRRKLVQNLAAEHNRLIRIFEDANLKLSSVFSDVTGKTCTAVIDHVVDGNTNPEYLASLCTHWRLKSTQEEIALAVEGHFRDHHKFMLRAIRRSMDNLAEEIKALDEEIALRMQPFEEEIARLCQIPGISKTSAKDLLAEIGVSMEVFPSSAHLASWAGVSPGNNESAGKKKARTRTMATSRRKR

SEQ ID NO: 186284 - protein, 416 aa, unidentified
MKPPSDIEFTAFVGIDWSDTKHDICLQAAHSDEREFTVLPHRPDAIAAWAGALRQRFAGRPVAVCLELTKGPLVYALQKYDFLVLFPVHPATLAKYREAFVPSHAKADPSDAQFALELLLRYRAKLRPLTPQSVPMRTLLRLVEQRRRLVGDQSRISNRLTDALKQYFPDVLAWFPDKDTILFCDFLTRWPTLKQLKHARRATLLSFFHGHHVRSQARIDERLHAIKSASPLTDDPAVIRPNQLLVLALIEQLRVTLQAIERFDTEIDAVSETLPDYALFRALPGAGATFAPRLLAAFGEQRQRYHSAAELQRYSGIAPVTESSGKQHWIHWRLQCPTFLRQTFVEWAGATIPHSFWAAAYYRQQRDKGCSHHAAVRALASNGFAFSTVAGRPGRPTMSQPISTHSSAAAHHCSPR

SEQ ID NO: 186285 - protein, 411 aa, unidentified
MDVVYDRAVGIDISKRDAKVCVRLPGQQAGTFTTTVTTWGSTTNQILALREFLEAQKVSVVVMESTSDYWKPFYYLLEESLPVLLVNAKNARNIPGRKTDVSYAQWLAQLAAYGLLRASFVPPEPIRVLRDLTRARALTVQDRTRQIQRLEKFLESSGIKLSFVVSNLLGVSSRMMLDALVAGERDPQVLSALVQRRLKAKIPELIEALNGRFTAHHAMMVRAHLKQIDTFTECIDAFTLEIEAAMEPFQAARDALETIPGISTRIAEVIIAETGGDMGVFPTAGHLASWAGVCPGSNESAGRVTSSHILPGNKHLKAALGIAAMAAAHSKTSYLAVKYRRIAARRGPMKAVVALEHTILTAVWNMLTTGEIYQDLELDHYTSLNPDRLKNRALKQLHNLGYEVTITHAAA

SEQ ID NO: 186286 - protein, 351 aa, unidentified
MTLYVALDVSLEKTAVCVMDTEGTPIIERAVPSEAFAIAELLTALPERPERIGLEAGPLSEWLVRGLADAGFTAMLMETRQVRAALSAMTVKTDRNDARGMAHLLRMGWFRPVHVKSMDAREQRVLLSARTTLVRRLRDIENSVRGLLRGFGFRFPRVLRVRWAQNVRDALAGNPTLLAIIDPLLAAGAALRDQLAILEKRVRDAARQDPVCHRLMTMPGVGAVIALTFRAAVDRPERFASSKAIGPCFGLTPRRYQSGETDRTGAISRAGDPAVRVALFEAAHVLMTRASTWSKLKAWAVAVAKRRGAKRAKVALARKTGVVLHRMWIDGADFRFTDKSEAGNRTTAAAI

SEQ ID NO: 186287 - protein, 323 aa, unidentified
MERTVAGHVLFRKRITRVKLLGFLAAQARCVVAMEACAGAHYWAREIAKLGHHVRLIAPACVKPFIKRQKNDAADAEAVCEAAQRPSMRFVPVKTEEQQANGIAFRARDLLVRQRTQCVNALRGHLMEYGHVFPKGITHVETLVALVEDLQSSLPDRVRVILKLLVDTFTALETQIAALDAEINRRSKSDPTARRLMTIPGVGPIASTAITALVPAAEGFPAGRDFAAWLGLTPLQKSTGGKQKLGAVSKRGERTIRRLLIIGASAVVQQASRRAAPKGSWLAQMLARKPKMLVTVALANKTARIVWALLVKGGTYRTPAAAA

SEQ ID NO: 186288 - protein, 347 aa, unidentified
MNIIGCDFHARSQQIAMVDTETGEMVEKKLEHENGEARKFYAGLEEPVLVGIESTSYTRWFTEMLAELGHELVVGDAAKIRAQETRKQKHDRRDAEHILNLLMKGDFPKIWLPSAEERDVRVLLEHRHQLVQLRTRAKNGLQAVALNYGLRRGSRLWTEAGREKLQKLPLREGPGRRRADLLALLAQLDTWVKELDQRIEEEVGRRPDAQRLTTHPGVGALTALGTVLVLGPAERFPTTRQVTSYVGVIPQEESSGGRQRFGHLTKQGNRLLRFLLVEAAQTACRFDPSLKRTYRRLVFRKGTAIAKVAVARKLLIRLYIMLRDKIDYEEFCRRGSHAGMLGDVALV

SEQ ID NO: 186289 - protein, 337 aa, unidentified
MVEGTEGSHHKEGSTKMAKRITICAGIDTGKRKLDVALDGRSEQLQVENTAEGHKALLKWLRGHKVKRVGIEASGGYEQAIVAELRRERFAVVVFQPAQVRAYAKYRGQRAKNDRIDAALIAACTAQAKEIRPAPDARLSPFAEHLTMLEQIGEDIARIKNRLETCRDQHIRQTWKEEIARLVRRRRTELKALTATMRKHPDLARRLELILSVSGAGLLTAVAVLVRMPELGQISRGQAAALAGLAPYDEDSGEQIGARHIAGGRERLRHALYAAALPASFRWNPQLIALYQRLIAAGKGHKRALVACARKLLIFINTVVARGTPWQANLPAAASLA

SEQ ID NO: 186290 - protein, 431 aa, unidentified
MKYKLKQKQNQRILGITDQTLVIGADVAKSTHVARAIDCRGIELGKDLVFENESMGFANLVSWMKEIGQQHAKTDVIFGIEPTGHYWFPLAEFLQNQGIKVVVVNPHHVNKSKELEDNSQTKNDYKDAKVIADLVRNGKYKEPRFPKKVYADLRILMNLREKINVNLGQVQRRIQNWLDRFFPEYLEVFKDWEGKASLITLAEFPTPQDITSLGSTDILKRWKKDVQRAVGIKRAEKLVEAASNSIGLTEGLMAARMEMKALLEQHELFTRQLESIMLQVDELLQQVPGSKEMLTIPGVGIATLAGFLAETGDLSAYDHGQQIIRLAGFNLKENSSGKKKGKSTISKRGRSRLRALLFRAVLPMVAKNREFKAMHEYFKTRSCNPLKKKQSIVALCGKLIRVLHTLGTKKIPYNAADVLGPVRQAQLQLAA

SEQ ID NO: 186291 - protein, 273 aa, unidentified
MVHAVTIGLDIAKSVFQVHGVDGTGEVVLRRQLRRSQVLPFFAKQQACLIGIEACASSHFWARELAKFGHQVRLMPPSYVKPYVKRQKNDAADAEAICEAVTRPTMRFVEVKSPDQQSVMVLHKVRMMLVRQRTQLSNAIRGHMSEFGLVGLIGREGLAGLLKIVEAADQRLPEEARICLELMAAQLGLVNRQILETDRRIRTNARATEVGRRLMTVPGVGPLLASALVATVADPKGFRTGRNLAAWIGLVPNRIPAGARSGLAASPSRETAI

SEQ ID NO: 186292 - protein, 409 aa, unidentified
MERVYPRCAGIDVHKDSLVVCVRLDGREPPVETFGATSGEILRLGDWLGGLGVTIAAMESTGVYWQPVWNLLEDRLQLMLVNPQHIRRVPGRKTDVTDSQWIAQLLEHGLLSPSFVPPKAQRQLRDLTRQRTQLLGDGARVINRVQKVLETADVKIASLISDLAGVSGRKVLTALAEGKLTPQEMAELVDRRMELKKPALREALAGNVGEHHRFMLRQLLAQLDHIDAQVEAFDLRIAEVMSPLERQAVQRLDEIPGFDARTGQNVIAEIGTDMSRFPSAAHLASWAGLCPGNNQSGGKRKHGKTRQANRWLKAAMTQSAWGASRTRNSYFAVQHRRLSKRRGVKRASIAVAHSLLGVAYELLKHPDLAYTDLGADHFDKQSSVERQVQQMLRRLKRLGCNVEIKRPAA

SEQ ID NO: 186293 - protein, 412 aa, unidentified
MDTVIERCAGLDVHKDTVVVCVRVPGPDGGRQQLIQTFGTTTTAVLALRDWLTAHGVTIVGMESTGVYWKPVYYVLEDALECWLLNARHLHKVPGRKTDIADAAWICQLVEHGLVRPSFVPPKPIRELRNLTRYRKAQIEERSRESQRLDKILQDAGVKLSSVASDVLGVSGRAMLGALVEGTRDPAVLAELARGALRKKIPALREALRGRFGPHHALLVGTILAKLEFLDDAIAQLSAEIEQVIAPFAHEAALLRTIPGVDRRNAEALVAEIGVDMSRFGAAGRLASWAGICPGNNESAGRQGSGKTRKGSKWLRTHLTEAAKAAGHAKDTYLAAQYARLRARRGSARATVAVAHSILVAAYHILERRQPYQDLGADHFRRRHSREQQTRRLVRQIQALGYKVTLELVEAA

SEQ ID NO: 186294 - protein, 384 aa, unidentified
MEKMSSNVACAGMDVHYKFSHVTFRDAGGRIVSRQRLDHPDRQGLAKRLGHWPRGIPVVMEASFGWGWLSDVVEDAGLAVHLSNCFKVEQMRQARGWVKTNKKDADLVSLLPFEPCDWWKVWRAPPEVRNRREQMRFRGDLVALQTEVKNRIHAVFHRHGIFHEFSDLFGGRGRRFLVELCIGGSEYLSPEALQALRGQVKLLDHLRRQLADVARVLRKQLAKTPLIRRLDHIDGFGLILSHVLTAEIGQIERFRNDKALASYSLLAPRSNDTGQEDPSQSPKGRHLGLRGNRTLKWAFIEAAHGAVRSGGRWRAMFDRVTAGGTKDRNRGYIKVARELVKVVYVVWAKGVDYQPTPPARPGRKSNKNNSRSGTGQLLHPMVPA

SEQ ID NO: 186295 - protein, 466 aa, unidentified
MKQSTKPKAKHNTKRRKTKRGLRIHHRHAAGIDIGSELHYVAVPEDRDPNPVQTFGCTTPELQRMALWLQACRVTTVAIESTGVYWVPVAQVLEVADIEVYLVDARQARNIPGRKTDVQDCQWIQQLHSFGLLSKAFRPTHAMLPLRSLWRRRKQLIQDISQSIQRMHKSFEQMNIQLHKVLSDITGKTGLAIARAILRGDHNPESLVKLCHPGCKRPQKDFIDALTGDYRDYHLFELKQTLETYDFHHAQLAQCDVELQRHLEALEPVVDKAALAQAPDRKKQRTYRRKNQPNFDLRAELYALTGVDLTQIEGIDATTAFTVITEQGTDMSQFPTEKHFASHLGLCPNNRVTGGRVIKRATRKVASRAANALRIAAQSLHRNQSALGAFFRRIRARSGPAKAITATAHKLAKLIYHMLKYKEEYRPQTQEENEARYQEKRLKQLAKQARAVGYELLNPQTGEVLS

SEQ ID NO: 186296 - protein, 341 aa, unidentified
MKDQDVSDVIKTKNRTAMRYIGIDVSKATFVVAYSSDKGGGIRTFNNTTAGIRQFIGTLPKDGSIHCVMEATGNYSALLLYMLNVAGITVSMENPLKVKNFAKAMLSTVKTDKSDARLITLYGEKMNPRPFKVQGEAILRLRQKRTVIRQLTKQITAMSNLRGSLVCLPVPDKGATHTVDETIKFLEKRRDRLQSELTELVEVEFSRQLALLTTIKGIGITLATALIITTGGFTYFQNAKQVSRYLGICPTYEQSGTSVNIRGHINRNGDAYTRGLIYVAAWNASRFNAKCGETYTRLRQNGKPGKLAMIAVANKLVRQAFAVIKSDSPYVDGFVSTRQTK

SEQ ID NO: 186297 - protein, 350 aa, unidentified
MDILGGFDVHRKQITFDYMQMDSGEVHRGKIRPADRESLREWLESFTERFPEHETAIAVEATTGWRYVVEELRRAGVEPHLAEPAETQSLQGRKKRRAKTDRLDAGHLRDLMVIERLPESWIPPDHVQEITTLTRLRHNLIEERTTHKQRIHAQLFHNGHPQQKNLDSMEGRAQLEEVELPAAARQVVDLSLQMIDHINEGLEPVEARLRDYARVQAGCQALMEHPGVGELTSVALFSELGDTRRFSSSKKAVRYAGLDVTVHSSDDKRAAGKLSRQGPPVLRWAAFEAAKGAWRKNSPDHEYYLGNKERIGANRASLSVARKLIRRAHHTLRELGEEAMSEPVFASSRA

SEQ ID NO: 186298 - protein, 343 aa, unidentified
MKVTTIGFDLAKNVFQVHGVDERGHVVVRKQLRRDQVAIFFANLPACLIGMEACGSAHHWARKLQGFGHRVRLISPQFVKPYVKSNKNDAADAEAICEAVARPNMRFVPIKTMEQQAVLSVHRVRQGFVKARTAQANQIRGLLTEFGLVLPQGISNVMRGVPQLIDVATDLPASMRQLIARLLENMKVLDRQVKELEAQIKAWHQGSALSRKLEKIPGIGALAASALVASIADARSFKNGRQVAAWLGLVPKQDSSGGKPKLLGMSKRGDTYLRTLLIHGARSAIVAAQRRGKPNVWLSGLLARRHPNVAAVALANKNARTIWALLAHEREFRPDYVPRLATA

SEQ ID NO: 186299 - protein, 348 aa, unidentified
MWAIGADVHMKTTTFFAFDDEAKPVTDFNRMFKSVRSNKEGFLLVRMYLENIDYQILMENSSKTHDVQWIWEEIGMNYIVAPSHELKRITQSDSKTDKRDARELATYMMARFAGAKQFHPCYMCSKEDMMNRQLCRTAKTYMVEIGKCKRRIRSHALVYGIDLPKDVTTAKAKEIMRCMDDPIFNSIIGVMEDLENHRDELLEIIKIRFQGNPIYEKILGIPYFGEITAAYLTCFICDINRFEGSKQFVASLGLAPRVRNSAETVSHCGITKKGDPHARWLLIQATIGHVRNVKDSPVTLFFNKKNGGSIEMRKELDEDRLMDRSAIVAASAKMARIIYTLVVKDRVW

SEQ ID NO: 186300 - protein, 410 aa, unidentified
MDAILERCAGLDVHQETVVACAMYGPLDRKPKQETKTFSTTTKGLLELHDWLHQYECTHIAMESTGVYWKPVWNVLEGSFTLVLANAKRIKNVPGRKTDVKDAAWIAQLLRCGLITPSFVPPEDIRDLRDYTRYRRKLLANATAEKNRIHKILQDANIKLTTYVSDVFGVSGRALLESIVNGEVLRPDQVKDLVKTSLKRKVPQLIEALNGRVRAHHRKIIGMHLDHLRYIEEQIREIEKEVDRLLSPYLDIVERLITVPGIQKDAAAVILAEIGYDMSCFPSDAHLSSWGGLSPGNNESAGKKKSSRTTKGNRSLKAVLCQAAWAASKSKGTRLSSFFYRVQKRRGQKKATMATAHLILRIIYHMLKNNITYQEFGWDYLQEQSRVVDYWIKRIESQGFKVTIEPTEVS

SEQ ID NO: 186301 - protein, 385 aa, unidentified
MGIETFIPRDYDVFAGLDVDKKSISVTFTDHQGLLKSMRMPYSVDHLVNHVRKYYGDKKVAFAYEAGPTGYGLYDGLVAQQYPCLIASPSMIPKAPGQRVKTNRLDSRGIAENLRGGQLKSIHIPTTLYRELRHLTQLRDALVSEMVAMKQRIKSLLLMEGLEFPPAPPGSQWSFLVKAKLRKLPCSSVVRFKLDQLLDNLEFGEKQILKTTREIRRFCHNDPELSQCIDYLKSLPGIGWIVASQMMARIGDWRQIKNIREVPAFLGLVPTESSTGERTTRGSITHSGDPRLRSKLIQASWSAIRQDGELLKFFRTVAKKHPRHLGPRVAIVAVAHKLCVRAAVVLMKQRPYEVREKVQSAPLTQEETVPQGTTRRRRVPGEKIS

SEQ ID NO: 186302 - protein, 540 aa, unidentified
MVVSQVVALRGPDGLALLPPAALLGLAFERRADLPGPRRGVAQKRRECHTVLKSGVPATVFTGHQEEGPFMAVVMIGIDPHKASHTAVAISAAEEPLGELRVRACTAQAERLLAWAAAWPQRTWAVEGAGGLGHLLAQQLLGAGERVLDVQPKLGARVRLLTAGDSNKNDPNDARSVAIAALRSAGVREARPDDHAAVLKIWSKRYRDLGRTRTQVACRLHAVLCELIPGGLSKEITAGHAARVLEAITPAGAVEAARCELAAAFAEDLRGIDARIRQTRAKLATAIQATGTSLTGLFGVGPVIAAAVIGDVRDVSRFPGRDHFAAYNGTAPIEVSSGPRKVYRLSRRGNRRLNHAIHMAAVTQIRHRHSQGRAYYDKKLAEGKMPKEALRSLKRQVSNAIFACLQADARRAAARVKGPGGQQGNDSVASAAGSHPRHRLFGQATPGPGDHPTATFSSPAPGPAHGRGTAGHSPVAATPPPPTPQVQVERPQRSEDERSGGAARRRPHSAARKAKAKGSLITPQRPKGTSHPAKKTDGNP

SEQ ID NO: 186303 - protein, 348 aa, unidentified
MKNTITIGIDLGDKFHIAVVFDGEGNELETAQVTNTKAGVSKFFQRYKHARVAMEAGTHSPWISRLLGEMGLTVYVGNPRKLRLIWDSVDKSDARDARILGMVCRIEPRLLHPLKHRNSQAQADLSSIKSRDMLVKSRTQLINHIRGLVKTNGERLPKCSTASFAKKCEPLVPPELRSALDAVFQTLFHLNEQIKALDLQIEQLSMERYPETQYLRQVAGVGPITALCFVLTLEDPARFAKSRQVGPFLGLTPRRDQSGDTDKQLPITKAGNTYLRQLLVGSAQYIMGPFGPESNLRLHGMSIAARGGKNAKKRAVVAVARKLSVLLHRLWVTQDKYQPFYGMNKKAA

SEQ ID NO: 186304 - protein, 465 aa, unidentified
MKRKSKQEKEAKRLKGHLDCVNLFAAGIDIGSTSHFVAVPEELDARAVREFSCFTRDLLRLSDWLVQVGIQTVAMESTGIYWIPIYEILEERGLEVLLVNAHHVKNVPGRKSDVQDCQWLQQLHTHGLLRGCFRTPENGIALRAYMRQRETLVRKASEPIQHIQKALRQMNLLLDNVVTDITGKTGMSIINAILEGEHDSAKLAKLRDGRCKHDEKTIASSLEGHYRKEHLFSLQQSVEIYNFYQQQIFACDMAIEEELASLESKENQKDTPATKKKRKNKSSLNFDVHSELYRLTGVDLTSINGMNENSVLKVLAETGTDMSHWPTEKHFSSWLGLSPNNKITGGKVLSSKTKSTANRAAAAFRMSAYTLHGSNSALGAFYRRQRARLGAPKAITATAHKLARTFYSMLKNGSEYVDLGKEYYEKKYEERVLKNLKKRAASLGFQLVSNIDQGGKNKDRVISEG

SEQ ID NO: 186305 - protein, 319 aa, unidentified
MLPHPTPFATHLVGIDVSKDWLDIAFDDTKVERVDNTPAALQRLARRLVKAGLTTAGLEPTGGYERLAVAVLREAGLTVLQVDSWRCRQFAKACGQRAKSDPLDARIIRAFMLHHPCRPFPEPSQAQSDLTAWVREITRAEADIRRLENRKAHPTLAAITARLDAEIAALRETVAAAEQAIEALIAADPAMDAKAKIITSVPGIANKTARVLLAEAPELGRFTPRQAGAIGGCAPYRNDSGKARRPAHIEAGRRALKRACYLAAFAAIHWNPWAKQLYADLKARGKPAKVALIAIARKLLTILNAMIRDNKPWRDPKTA

SEQ ID NO: 186306 - protein, 411 aa, unidentified
MSKEKARFVALDVHKSYVMVGAVDSEQEIVLHPRRVAFNGFETWISKHLRPNDEVVLEATTNAWLVHDMLEPLVGRVVVAHPYHVKLISAATVKTDKRDTLALAKLLAAKMIPEVWVPPHHVRELRALIAHRKRLISQRTAAKNRLHSILHRHNLVAPAGRPFADDNRSWWAELVLPSSEKLRLRQDWTIIEHLTGLIAEVEVELTQLSVSPDWADQVPFLIQLPGIGLLTAMTILSAIGDISRFPSAKKLVGYAGLGGRIHASGNVHHAGSITKQGRKELRSALVEAAWITIKNHPYWLAQFQRLEHKKGSKKAIVAIARKLLVVVWNVLTAHAADRRAEPELVAKYLMNWASQHGLSNQHLGIRRPLFVRQQLDCLGIGQDLQGFKWGSTYFKLPPSNLAAQPPQPMVA

SEQ ID NO: 186307 - protein, 323 aa, unidentified
MQGKIMSEQGKPEPVYVGIDVCKERLDVYLHPAGRRLCVANDRAGLKRLKRVLGGLGVALVVTEATAKYHRLAQRGLAQAGFCVAVVNPLRARLFAEATGTLAKTDRVDAMMLAIMGAAIGPKARPPAPVEIEALQELVRARSAATREMTRLRNRYGAALTSFLKAELRRRIANLERSTARLAAEIERRIAADPILARRYRILLSIPGVGPAVAPVLLADCAELGDLSAKAAGLLAGLAPIAQDTGDTTGQRHIKGGRKTVRNALYMASLSAARANPALKAFRQRLCDKGKKPKVVLTAIMRKLIVLANTLIKEDRLWTPAKA

SEQ ID NO: 186308 - protein, 346 aa, unidentified
MYQDNLFAIDLSKSSHQGVLFSKSHQIKFNREFSTRKLIEWVSRQQPLTVAMEACSMSNHWARVFDRIGHRVLLVPTRTAARYRQGQKTNGTDAEGIGVAARQPTTKFVAPKPINLQELQALMRIREHLKDHRLATSNLIRSLLAEFGLLIPKGWKALRERVPELLEDAENELPMELRFQLRDQLDDYLELEKRFAEVDRACTQRVNQDEACHQLLQLEGIGPVNAAGLLLALGEQGDSFRNGRNASACIGATPKQHSTGDQVRIGHISKDCANKRLRANLIQGAWAVIQQLRKRDPRNGKEVWLKGVINRRGEGIAAVALVNKTIRVAWALLHYGENFKLHPNMA

SEQ ID NO: 186309 - protein, 320 aa, unidentified
MSQVVIGVDIAKKKFDVASLSDGKYKHKTFTNDEQGFANFVSWLLTLFINDKPLICMEATGAYSIPLADFMVSQGYPVSVVNPAKIKAFAKSELSRAKTDKADAKLIARYAFTMHPPLWTPPPQNIRVLQALVRRVEHLLEMIQMERNRLDTATANITDSITTVLATLEAELEATRKAIHDHIDNNPELKRRRDLLITIPGIGETSIAHLLVVLSDHHGFLTAKQAVAYAGLAPALRESGQWTGKTHLAKSGDPALRKALYMPALVAWRHNPLLRIFCQRLKANGKNGKAIACAAMRKLIHLSFAILKSGKPFDPLFALK

SEQ ID NO: 186310 - protein, 363 aa, unidentified
MEREKRRYVGIDLGKREYTMAVIGKDGKVSIHQGKTSIQGRQVLYKKLEKGDKVALEAGNLAFIMAREIQDQVGSEVRVLNSSKLPFIWDAPTKTDKEDAMKLAHLVEERRDDKLPIVPLPSEKEMARRKLLANYSREMKGRTKTVNLLHALFVHQGHTTIVRKDLATAEKRQQAVTLLHGQEREEAQWLLKHLALYEQRIKELKAKMHSEARADEDMKRLQSIAGVGPVVAYAYVAHVGDGIRFSKGAQVSNYLGFAPRLDYSGTIQRQGHITKRGNGYLRGLLVQSAWAAVRSRKGGVLRERYLYKTTEKGLSRKKTIVAIGRRLAELMYSVLKNKTTYEPRRWKGVQNKTAVFAEQAMSA

SEQ ID NO: 186311 - protein, 337 aa, unidentified
MSYLGVDLHTNSFTVCYRSSKGKERTATFEIKRIGQFSKTLRKRDELAVEATGNTAWFVEQIIGRVSRVVVVDPHQFKVIRKSVKKTDKHDSRTLAFFLSKDMLPEARMKSKENAQLHSLAGTRDKLVKQRTALINKIHNILNGHGMKYKKESLSTDKHLKRVLSFSWDAIVRVELEVLAEQICSLSKSIKKLDDQMSEHGKDLKGHKNLASIKGIGKRSATVLLSVIDDVNDFADEDKLAAYFGIVPRVSDSNETVRHGRITKNGSKIGRTTLVQCTLVAKRYNPYLRKYYERIKRHRGSGKAIIATARKFLGIIYQTLKNDWIFEDFPNFVIANT

SEQ ID NO: 186312 - protein, 397 aa, unidentified
MYIVGIDIAKRKHEAAVIDGEGTVIIKPFSFTNNCSGYNRLLAMLAKAKLPLDEVSFAMEATGHYWLALFTRLQKEGFRVQVINPVQTNSIRSFYIRQAKTDPRDALLIAEVIRFGHFSESTLHPENIYELRELCRGRHAIVSMQADVKRKVVALLDQVFPEYETAFTNLFGDTSMAILQTCPTPKELSEMPLEELCHLIEVSSHKRFRMAKAQELQALARNSFGFAMAGDVFSTMIRLYAKHLDFLKQQVREMDRKIAEIMDTLDTPITTITGIGPTLGAYILSEIGDISRFSSAAKLAAYAGIDPTMRQSGEYNGVRNRMSKRGSPYLRHAIWLAASSAVLHDPALKLYFQKKRDEGKPYMASVGHACRKMVSIIYAVMRDNKAYTPCIPNEISV

SEQ ID NO: 186313 - protein, 430 aa, unidentified
MTFTGLDLHKKEVEAALLSQDGRLLHRSRFPATRAALEAFAAAHLSPLDSVVAVEATTNTWPVAAILQPLVHKVVVSNPLRTKAIASAKIKTDKVDALVLAQLLRTDYLPEVWIPDCHTRLMRQRSTERAMLSADRTRIKNRIHSVLHQRLIAAPCTDLFSTGNLAWLKALELDPFGRDSLDRHLRQLDRVEQELAALTSQIAVHAHQTPAVKLLMTLPGVDFTVAETILAAFGDFSRFPTPDHAASYLGLVPSTRQSGDRCYHGPITKQGARHARWLLVQAAQHAALHPGPIGAFFRRIAKKKNRNVAVVAVAHKLVVLAWHMLKNNEPYRYAQPKTLQAKLSRLRILATKQKRKGGNVKGQPRPPQYGKGCTKAVPSLDELYLKEGLPPLSQQLKPGEEAMLESRNLTAFAAAVRVPKRIPKGASRKA

SEQ ID NO: 186314 - protein, 422 aa, unidentified
METVVERPAALDVHKEQVTACVRVPAAGGKGREQHVAQFATTVAGLLTLRDWLAAFAVQQVVMEATGVYWKPIWAILEDEFDCLLVNARHVKQVPGRKTDVKDAEWLCQLAEAGLLRASFVPPKPIRALRNLTRYRKTQIQERAREANRLHKALEDTGIKLDCVASDILGKSGRAMLDALVNGTTDPEVLADLAKGRLRAKLPALREALEGRFGHLHQVWIGAILAHLDFLDGQIASLTDAIGEQIAPFETAVELLCTIHGVQRRTAEVIIAEIGTDMSIFPTAKQLASWAGQCPGNDKSAGKRRSGKTRKGSKWLDWALEEAAMSAINTKNSYLGAQYARLRPRRGHKKALGAVKHSIICVCWHMLSTGEVYTDLGGDYFRKRDPERITKRLIAQLEALGHVVTLQPTATTTSTAEAVVAG

SEQ ID NO: 186315 - protein, 386 aa, unidentified
MVYVGVDVAKHTHYACVTSDKQGVLTPPFPFVNDETGFAKLKDSFKKYRKEDVIVGLEATSIYGENLISFLADIGYQVALINPIETSSLRKTKIRNAKTDKIDSKLICKYLSQEEYRLLQPKELKSLRLRGLCRFRQTLKKSKTRLKTQLVSYLDVSFPEYHTAFNSVHGKGSYAVLSEFPSASAIAKTNVTKLANLLYTASRGKFNRNVADTLKTLAKHSIASPDCDMSFQIKQTIGQISLIESQLKDVENHISTIFDEIDSVIRTVPGIGAMNGSMILSEIGDIKRFSNPGQLIAFAGLDPIVRQSGNFRAKTTRMSKRGSGTLRYALVNAAWNASLNNDTFNNYYKEKLAQKGRHYAALGHVAGKLTRVIFKMLKDNVAFDLS

SEQ ID NO: 186316 - protein, 321 aa, unidentified
MQTFHLGIDVAKAKLDCALRLPTGKYRTKVVENNLKGFKALIEWLSNQGATTAHVCLEATGVYGEDVAEVLAASGMNVSMVNPAQIKAFGASRLVRTKTDKVDARLIAAFCAERSPAPWQAPTPSEQALRAMVLRLDALQTMRTQESNRLAVAREAVKPGIVEHIEWLDKQIDALIEAIREHLDNDPGLKDKQALLDSIPGLGERTIAVLLAFYANFERFGNARQAVAFAGLDPRQYESGTSVKGKPRLSKIGHAFLRKALYMPAMVALYKTAWGKRFRARLAASGKPPKLIIGAMMRKLVHVVFGVLKSGKMFNPALHGG

SEQ ID NO: 186317 - protein, 391 aa, unidentified
MFYLGIDIGKNNHVASMLNDEGKVVFKAFSFSNTTEGGESLLEKLHSYGATPETLEIGMEATGHYWLSVYSYLYDKSYKLHVINPIQTDGWRKGVEIRKRKTDIIDSQLIAELIRYGDFIETQLADEAYLSLKNLTRFRSYLIDSIGDLKRKIICVLDQVFPEYQSVFSNVFGKTSKEILLQFSNPADFEDISVGTLAKLLADLSRKKIHADKARNLSELAANSFGVTFCRDSFTFQLRMMLEQMKFIEAQVKDTEKEIGRIMEELQSPITTIPGIGTVTGAVILGELGDINRFDDPSKIVAYAGIDASVSQSGEFEAVNNKMSKRGSPYLRKALYQAAFVAAFKDADLSAFYQKKIAEGKHHKTVIGAVERKLCYIIYAILKNNRPYISH

SEQ ID NO: 186318 - protein, 433 aa, unidentified
MGLIVPTVMPPERADQPPSYDGFVGIDWGSQQQQVSVLDRDRRRMGERVVDHDGASLAQFVAWLWGLSAGQPQRVAVAIEVPRGALVEGLVERGFHVFAMNPKQLDRFRDRHSVAGAKDDRRDAFVLADSLRTDQPSFRRLRLDDPQLLVLRELSRAEETLLEAFRRSANQLRDQLHRFYPQMLQLCSAADAPWLWDLIDLAPTPAHAARLREEQVQGGLKAHRRRRLKAHEVLACLQTPARPVAPGAVQAAQAHCRFLLPCLRGLAEHLQACGQQVGALLHTLAEMPGAGEGPSDVAIVQSLPGVGRKMTAWLFAEAAQPLAERDYQVLRTHGGVAPVTKQSGKRRVVVMRRGGNPRLRHALYHMARVAMQRDAHFNSVYAALRAKGQRHGQALRSIGNRLLRILMAMLRHRTCYDASRIHREPVVQMGETI

SEQ ID NO: 186319 - protein, 469 aa, unidentified
MPFGNPVWNILERKDTCSMAFFKTKVMAAKQMTMKVVNTQAAGIDVGSRSHYVAVGQGVDQVKEFGVYNRDHELMIDWLKAHQVTTIAMESTGNYWQTLFSALQEAGFEVLLVNGRHTQNVRGKTDVKDCQWLQQLHSLGLLRGSFLPSGSIDRMRTYQRHRNWLIEQCAALSNKMQKAMRLMNIRLDIALSDILGKSGRRIIEAILNGERDGQQLACLVSGHVKKSPQQIADALTGNWKPELLFELQDCYELYKVYEQRIANVDSQLEALLKELTPMVAVPALDLKRKRSYRNQQQFDVPLLSHRYLGVNLFDIDGISHATVMSFLTEIGLDICKFPTAKAFTHWLRLAPNNKITGSRVVSSRTPRGKHAFALVLRNAANSIGLSKAGTLKSFFARIAFKKGRAAAITATARKLAVIIWNMVTKQQPYTPISEDCYADKIRTSVLSNIKKKLQKHHLSIPDLQAIMIS

SEQ ID NO: 186320 - protein, 413 aa, unidentified
MSIEVKEVVALIFVGNDWAEDHHDVHVMNEAGSKLAARRLPEGVAGVSAFHALLAEHAGDPHEVAVGIETDHGLWVASLVAAGYRVYAVNPKAVARYRDRHHVGGGKSDPGDAKVLADLVRTDAHNHRVVAGDSDQVQAIKVLARAQQSMVWLRSRETNRLRNALREFYPAAMTAFQDLHDHDALAVLTRAPDPDRAARLTRSQLTAALRAGGRRRNLHTTTERIHAVLHTQQLHAPEATAAAYASVVTAQVGVITAINTQLAQLEAQLEATFEQHPDADILLSLPGLSDVLGARVLGEFGDDPERFTDTKSRRNYAGTSPITIASGKKRAVLARHARNTRLYDALDQWAFCSLKPSPGARAYYDQRRAAGDTHHQALRALANRWVGILHGCLKHRTPYDEHTAWAHRQPVAA

SEQ ID NO: 186321 - protein, 340 aa, unidentified
MPVIRIGLDVAKNVFQAHGVDEQGTVVLRKQLRRREVLSFFASLPPCLIGIEACSASHYWARELTALGHQVRMMPARYVKPYVQRGKSDALDAAAICEAVSRPTMRFAAIKSVEQQSALTLHRAREILVKQETMLANLIRGCLGEFGIVAPLGIRRMAELVGIIRDEADSRIPPHARIAMTAVADQLGDLQRRIKEIEQAIRAWHRNNDASRRLATIPGVGVITASAIAATVATPTEFKSARHFAAFLGLTPKQHSTGGRQRLGRISKQGDGYIRRLLILGGTALVRYARGAGGTVWAKQLLARRPARVVTVALANKAARIIWALLVRGGVYRSAAPQAA

SEQ ID NO: 186322 - protein, 354 aa, unidentified
MSMLAELVDLVIGVDTHADTHTAALIAVDTRAVLDTITVAADPDGYAQLAALAESHGETRGGLRGWAVEGAGGYGAGLARHLHARGELVVELDRPTRPARRAGAKSDVIDAERAARDALARVRLAAPKTGAQRASLQMLLTARRAAVDAATDAKQQLRALVITAPEPVRARFRGQNTRQMLATATRLRPHHHGGDVEVFTALSVLRALARRSLALAAEAGEHERAILAIVRSWRPDLLALPGVGAINAAVVLTAWSHPGRCRSDAAFAMLAGAAPIPASSGKTVRHRLNRSGDRQLNRALHNITLSRLRHDPATRAYAQRRRTEHKTDRDIKRCLKRYIARQLYRQLEAGTAAA

SEQ ID NO: 186323 - protein, 415 aa, unidentified
MEGLSALHRRVAGIDVHRMLHVVTVLIEQPDGSVVKHSGEFGGFKRDCRALAAWLTDLQVQLVVMESTGIYWKSVYAHLENAGITAWVVNAHFIKHVPGRKTDMLDSEWLAVLARFGLVRGSFIPPKDLRELRLVSRYRRKLGAMCSSQINRLHKMLDDAGIKLGAVVSDIHGVSARAMVRGLIEGQSEAVLLSHARGALKRKTEQLAASLDGDLSERHLFVLRHLSDSIDALQRQLADIDHYLMRAMQPYTWAHQLLQTIPGIDETAAALILVEIGEDMARFGCPERLACWAALSPGNNESAGKRKSGRTRHGNNAIRYILCECANAARMTKSTLAAKYRSLMRRKSHKKAIVAVAHKMIRLIYMLLSRREPYLDQGIDYAAISAKKNAPRWIKQLKAIGKWPTPSAPAANAAH

SEQ ID NO: 186324 - protein, 357 aa, unidentified
MTTTTSMSEASGQRRVIVGVDTHKDAHVAVAVDEVGGHLGSASFSADRDGYRALIMWAMAFGGTVIFGVEGTGSYGAGLASAIRRSGIGVLEVLRSDRRDRRLRGKSDTIDAENAARAVLAGIVHAIPKTGDGIVEMIRVTKVAKDNAVKARSSAMISLKQVLVNAPDDLRQSLQGLPRMTLIRRCAGLQLGPVDSVTAATKNALRAIATRWLGLDEEIKSHDLLLASLTSTVVPTLVEAFGIGPDGAAEMLIVLGDNPERIHSEAAFARLCGTNPIPASSGKTTRLRLNRGGHRQANAALYRTVIVRMQYHEPTIAYVTRRTAEGKTKPEIIRCLKRLLAREVWALTRDFRQPQRA

SEQ ID NO: 186325 - protein, 345 aa, unidentified
MALFVGLDVSLKTTSVCIVEADGSSVWEGKAESEPIALVKVLIGRREQIALVGIEACPLSEWLYGALVESGFKTVCIETRHAQRFLSSRPNKTDRSDARGIAEMMRLGHYRAVHVKSKASQILRTVLIARRKFVDHMLAIEDTIRGLLKVHGLKLGLVHRARFAAKVEALLADAPELRLAIEPLVEVRNAMRVKKALLDRQLSQMARKDEVCRRLMTVSGVGPIVSLSFKATIDDPGRFKDSRAVAAHLGLTPRVYQSGEIDRSGNISKCGDKMMRHALYEAANSHLRIAKKWSVLRAWGVKLAKRIGAKKACVAVARKLAIIMHRMWVAGTDFHFGQPTAQRTT

SEQ ID NO: 186326 - protein, 360 aa, unidentified
MQGHAGFSGSDLVVVGVDTHKAFHVAAVIDSVGGLLGSTTVPATAAGYAQLVAWARSFGRLERAGVEGTGSYGAGLARHIAERGIAVIEVNRPDKSTRRRRGKTDAIDAESAARAVLSGYAHGTAKSADGPVEMLRMFKLAKDSAMKSRTQAINQLRAVLVNTEPSLRESLSGLGTTRLVQRCARLLPEDGGDALAASKYTLRLLARRIQNLTAEIEDLQREIHRVVTAHRPQLLEGYGLGPDTAATLLITAGDNPDRLRSEASFASLCGVCPVEASSGNTSRRRLSRGGDRRANAAIYRIALSRLRWDQRTQSYLQRRIAEGKTKREALRCLKRYIARELYPLLLGQPNTGPERLPEAA

SEQ ID NO: 186327 - protein, 273 aa, unidentified
MKQYVGLDVSQKETSVCVVDDAGRTVYEGRVKSDPSALTELLRKRAPHAERIGFETGAMASWLWHELRRVELPVVCIDARHAHAALSVRVNKSDRNDAKGLAELVRVGWYREVKVKSEESQRVGAILVARSRLVSIRRDIENQVRSIIKEYGFLFRRAIGLQFRNQVIELLGEDHHLRAIIDPLLSIHEQVCRQQDKFDDEVRHLAKSDETTRRLMTVPGVGVVTALTFRHTIDEPSRFRSASAVGAYLGLTPRRNQSGEADTNGRISRWGDR

SEQ ID NO: 186328 - protein, 341 aa, unidentified
MDTETGDYGEQRIEHSEGAEKFYRDLAGQGKKVRVGMEASGHARWFERLLAELTFELWIGDASEIRAKRVRKQKTDRQDAQHILQLLMENRFPKIWVPSGENRDLRQLLWHRHRMVQMRTRIMNQLQAVALNEGLRCKKRLWRQHGREQLESFRLAPWASRRREDLLQLLDRLNPTITDLTQVIEQEVEKCPDARRLRTHPGVGALTALALVLIIGRAERFQCGKQIASYLGLVPLEDSSGNRRRLGHITKQGSSMLHFLLVEAAQVTARSIPEWRSKYFHLAMRRGRKIAKVAMARRLAIALYWMWRKGWNYEQSRKWNYEQSRKFGSHAGQLGTGDGVQ

SEQ ID NO: 186329 - protein, 366 aa, unidentified
MPSIPQPQSSGQRDTGAQDVVLGVDTHKDIHVAAVLTTLGVVLGSATFPATAAGYRRLLAWARGFGPVGEAGVECTGSYGKALARYLRAEGVTVTEVNSPDKATRRRRGKTDAIDAEAAARAVLNGRATTTPKAGDGPVEMARMFKLAKASAIKSRTQAINQLKSILVSTDPELRESLAGLGYKSLVRRCAALAATAPTTATTAAVYTLRLLAQRIQHLSTEIRDLEAQIAAVIASHAPKLLQRTGVGPDSAAALLITIGDNPERMAGEASFAALCGASPVEASSGKTQRRRLNRGGDRQANAALYRIVLTRLRWDVHTRAYLDRRITEGKSRREAIRCLKRYVARELYPLLRAAGTATDPAATTA

SEQ ID NO: 186330 - protein, 491 aa, unidentified
MNSIFQRSNPAIEKIFADAGSPKKVMCVPIDYAKRQHTALVCNGEGMQLRGAFNIHNTAEGVDFLEDIIKGLCKKHSIRKDHVFFGGEDCTAFCYNFIHALLQRQYLGIGINAYEGAEARQNQLASTDKLDLLGIASVLINKKRGRTLTTEYGQARLMRELTHQRDSLVRAHTASALRIHHWVDQLMPGFLDPKQSGLEAFSDASLWLMGQNFSPRQLLARKNDVLAERLRLFMLKDTDTKVTQLKQLARNILPPPAGLVETLQDNLAREVRLYEHLRDTLHDLNQQIARRLAATPGAMLTTVPGIGLILASGLYAEIGDPARQRNVASMAAYAGVVSRLKQTGGPDKEARSLGRSRRACVPLKRRILDIALSIGQYGPEELKADYRRREEVHQDVRFTMARRLLRICAHLLHKQDFYLPTALRQGTALEERKAYFAKVWDPILIKWRNAGAIKQAFADGAPLEQWRLMINDLYNLNLSKLSPQYERLRDR

SEQ ID NO: 186331 - protein, 369 aa, unidentified
MADYREAFVAFDVAKIKHAVAVADSGRGGEVRFVGEIENRPVTIERTIRKLAKRYDRLHVCFEAGPTGYGLYRQVGDLGHDCMVVAPALIPKRSGERIKTNRRDAVTLARLHRAGELSAVWVPDIVHEAVRDLVRARQAGAEDLRRKRQQLLSFLLRHGRICDAGGHWTLAHRRWLARQAFEHQAAQIVFQETSDAIEDAAQRLHRLDEQLAAIVETWSMKPVVEAYQAMRGASFLVAVIFAAEIGDVRRFETPPQLMAFLGLVAGERSTGDTVRRSGLTLAGNRRARRALVEAAWTYRYPARVSEPLRARLEGLPKAVRDIAWKAQVRLCARYRRLAAAGKKPPVIAAAIAREMAAFLWAIGREVAPS

SEQ ID NO: 186332 - protein, 354 aa, unidentified
MVIVGTDVHKRTHTFVAVDEVGRKLGEKVVPATTAGHQKALGWAREQFGSDLLWGIEDCRNLSARLERDLLTAGQKGVRVAPKLMFQTRASARTRGKSDPIDALAVAQAVLRYPDLPVASHDEVSRELKLLTDRREDLVAQRTSTINRLRQRVHELDPAAEPKPASLHRAKPCAVLADWLDTQSGILAELARDELADIIHLTEAIDELAARIGERVREVAAALLALPGCGELTAAKIIGETATISRFRSEAAFARHSGTAPIPVWSGNTAGRVRLNRSGNRQLNAALHRIAITQIRLTDSAGQRYYRKRLADGKATKEALRCLKRHLARSVYRRLHTDDHTRRAHQNSDMRTAA

SEQ ID NO: 186333 - protein, 420 aa, unidentified
MELTGLPTPVFCGVDWAEDHHDIALVDVGGKQLAKVRIGDDAAGFGQLTDLLAEYGDTEDAPIPVAIETSRGLLVACLRATGRPVFAINPLAVARYRDRHSVARKKSDAVDAAALANILRTDMAAHRPLPADSELVQAIAVLARAQQDAVWARGQAHNKLRSQLREFYPAILSAFAPHKHGLCSREARTILAAVPTPSMAAKLTRRRLQSLLKQAGRVRGIQAEAERLHEVFRRDYLHQLPQVEAALGHQTSALLRQLNTACDNADQLEEAVTQAFEEHPDAPVIRSFPGLASLTGARVLAEIGDDRARFANAGSLKAYAGSAPVTRASGKSCKVMSRKVKNQRLAAVGYVWAFVSLTRSPGARAHYDRRRAAGDRHVAAQRNLFNRFMGMLFHCLQNGHTYDEAIAFPQPSAGPTAAAA

SEQ ID NO: 186334 - protein, 406 aa, unidentified
MKLPPNQRNNQSASVEKTLSTLEQINQNAAGIDLGGGEHWVCVPADRADKNVRRFGCFTPDLMAMTDWLIECRVDTVAMEATGVYWIPVFQILEARGLEVKLVNAHHVKTVPGRKTDVNDCQWLQQLHTYGLLSGSFRPEDQVCVLRSYIRQRDSLIKSAGTHVQRMQKALIQMNLHLHKVISDLTGLTGMKIIKAIVAGERDPQALAVLKAPRIKSSTADIAKALTGDYRREHLFVLGQELSLYQMYQAEIMAIDAEIEQCLLSFAAKTLAEPPTPKRKRRKKPTANHPDFDWRQYLYRIAGVDFTSSDGLDALNIQTIWSEVGLEPSRFPTVKHFTSWLGLCPGQKITGGKVKSSQTRKVVNRAGRCLPHGCFFSNTKSFGFGRFLQAFTFSSWCPKSDHGYCS

SEQ ID NO: 186335 - protein, 348 aa, unidentified
MLADQLDYVVGVDPHRDLHALAVVHVLSGAVVFEATVAANSEGYAQALSLVDAHALGRRAFAVEGSGSFGAGLTRFLSGRGEWVLEVGRLRRERRSGGKTDALDAVRAARSVLGRDQPATPRSGGERQALQALVAAREGAVNAKCAGLGQLRDLLITTPEPLRGELRPLTQARLLRRLAATRPGTRRDPELRGSMLALRSIARRVLELTAEERALGREIEALTRKLAPQLLEQPGVGPHAAAQLVLSWSHRGRIRSEAAFARLAGVAPIPASSGQTVRYRLDRSGDRKLNRALHMILVTRKRLHPPTIAYIERRLQEGKTRREANRCLKRYLARSLYRLLEHGAPLAT

SEQ ID NO: 186336 - protein, 416 aa, unidentified
MKTYILREPKTVEPQTPERPGRRSDPAVTVSVNAICGPAPATASGLILFIGLDVHTDSIAVSLAPSESTEVRRYGIIGGTHDDVLRLAKKLQAAHPGVRLKFCYEAGPHGYPLARCLQAHGYDCILVAPSKIPRQPGDRVKTNRRDADQLARLYRAGELTAIYVPDPQDEAVRDLIRARYQVLKQQHRARQQLKMFLLRHNFRYAGTKAWSAAHLRYLATVKLPFAEQQFVFQEMVNVITEAGERLARYEAQIPRVLPGWRWAPVVQALMSLRGVAWLTAATLVAELGDLHRFATARQLMGYLGLVPSEASTGAQRKQGGITKMGNGIARRALIEAAWNYRAPARLSRELLKRQEGLPKEVKDLSWAAQTRLHHRYQHLTKVKHKKATVAAAALGRELSGFVWALGRLVRPHAKKT

SEQ ID NO: 186337 - protein, 359 aa, unidentified
MQTQSNKIDFKGENIYVGFDVHLKSWIVTIMTEKLTHKTFSQAPKPELLFNYLSKNFPGGTYHSAYEAGFCGYWIHNKLVKFGINSMVVNPADIPTTGKEKVMKTDSRDSVKIARSLRNGELVPIHVPSLTTLEDRTLVRTRATLVKDLTRYKNRIKSFLHFHGIEIPEAFTKSKTHWSNRFNKWLEEIEMTELSGKDSINALIAQSKYLRTTILQVTRQIKELAKTNRYKKTLELLLSIPGIGLLTAMIILTEIESIDRFSNIDQLCGFIGLVPSTKSTGENEVIGDITPRGHSILRGAIIESAWVAARIDPALHMSYHNYCKRMEPNKAIIRIARKLTSRISFVLKNNQPYVYSVVR

SEQ ID NO: 186338 - protein, 343 aa, unidentified
MSSTQTIGIDTAKRVFFLHGEDARGKVILREKLSRERLLPFLANQPVSVIAIEAGCGAHHWARAFSKLGHEVRVIHPKFVRPFVKTNKNDWNDAAAICEASQRPTMRFVATKSLEQQDLLAIHRVRERLVGQRTGLCNQIRGLLAEYGVVLPQSVSRLRRALPEVLEDAENELTVRGRELIASLFDELRSLEERIKPYGRAIEQASVDSGTCRRVRSIPGIGPIGSTALVATMGDPKAFKNGRHFAAFLGLVPRQHSSGGKSQLGRISRRGDVYVRRLLIQGAHSILKRVDRIDGPCADWLRGLMARRGRQVAAVALANKNARIAWRLLSQEAFYDEALAAAS

SEQ ID NO: 186339 - protein, 384 aa, unidentified
MTKHNILFIGLDTHKVSTIVAHVEDQRGAKPVHNGKIKTTKAAITKLARQYQSKYPQATLHFVYEAGPCGYWIYRLLTSLGHCCYVVAPSLIPKKPGDKIKTDKRDALKLAKLIKDEELTPIYVPEPEDEAIRDLSRARETAMKDLKDAKYQLKALFLRNNITCKVNDNWSAQHLRWLTELVLPHPSQQIVLQEMIQIITERINREKRLANELFHQVRQWRFYPVVKALQAVRGIKLLIATGIVAELGDLRRFDHPRKLMSYLGLVCKEDSSGNKRVLGNITKCGNGRARRLLVQGAHTYKHKANISTELQKRQENLPKEITDIAWQAQLRLCRRYNRLLNRGKHRNVVVIAIAREMAAYIWAIAREVVISPVNARLRVSRVPA

SEQ ID NO: 186340 - protein, 337 aa, unidentified
MTQIVLIGLDVAKHVFQLHAVAADGHVVFRRQVRRAQLITLLMSLPHCRVAMEACGTAHYWGRQLQELGHEVLLIPPDYVKPFVKRQKNDAADAEAIAEAAQRPDMRFVHVKSEASQAASIVFRARDLVVRQKTQLLNAIRSHLAEFGYIFSQGAAASAKMQEVIESDDNLPPAAQGILRSLWQHLSSCEAQLTEFDREIQKRARDDLDARRLTSVPGIGPVTAAAIAALAPDPATFRKGRDFAAWVGLTPLERSTGGKQRFGRISKMGERTLRRLLIMGASAVVSWVRRGKIKPSAWLASILHRKPPMLAIVALANKMARVAWAILKHGGSYMQPA

SEQ ID NO: 186341 - protein, 355 aa, unidentified
MASMPRDDAARASQLVVIGVDTHKEFHVAVALDTLGRRLGELAVPTNAEGYATLERWALAFGQPQAWGVEGTGSYGAGLSRYLHRQGWHVIEVDRPNRQVRRKRGKDDAIDAEQAARAVLAGTATTLPKAADGAAEMIRLLKLTRDSAIKSRTQTICQIESVLITAPADLREELRRLPRKELIAKCGRFRVPASPANVIEATRYALRTLSRRYLALRAEADELTIQIKDLVTTYAPNLMTHVGVGPDNAAALLLAVGDNPKRMRSEAAFAALCGVSPVPASSGNTQRHRLNRGGDRQANCALHRIVIVRMQWHEPTKRYVERRLAEGKQRKEIIRCLKRFTARQLYPVLTNANAV

SEQ ID NO: 186342 - protein, 361 aa, unidentified
MSIVYYGGLDVHQKSIAAFLYCSETGECIEEEVPNDRVRLLRAVSRWGARGELRLCYEASSAGFVIKRWLDEVGVDCEVVAPAFIPKGSGDRIKTDRRDARRLAQLYQSGMLRTVRVPDSEEETVRSLVRYRDDLTRDMTRSKNRILKFLGLRGMRYTEGRNWGEKHRQWLQHLELEPLQDVVLQSHLSSLDQLEDQRQRIDERIAEVAQTPAYHDKVQRLMCLRGIALYSAMVLVTEIGDAHRFRGAPELMSYLGLVPREHSSGDSRHSGKITRVGNTRGRWVLSEAAWNQTRKPGTSVRLRKQRHSQPEAVAAISRKAEQRLYHKFWKIAVRKDRNTAATAVAREMAGFDWSLLTVEVA

SEQ ID NO: 186343 - protein, 330 aa, unidentified
MKSPIAIAVAALGIDIAKLKFDVCLIKPNGKAKHKIFANTRHGFEQLIAWLDSHQVSDLHACLEATGSYGEPLALFLFEAGFTVSIANPAAVRAFANAGLSRTKTDKVDAELIARFCLAQQPQAWQPPAPELRELQALVRRLDALIEMRVAEENRLSSGGLTETVRHSLEEHIAYLLAEIKQTEALIRQHINNHSDLKEQSDLLDSIPGIGETTAALLLAEIVNIKQYTSARQVAAYAGLVPRERRSGSSVKGRTCLSKIGNARLRKALYFPAITALRSSDFFKQWAEPLRTRGKSKMSVIGAAMRKLIHLAYGVLKTGQPFDPNWAKTV

SEQ ID NO: 186344 - protein, 421 aa, unidentified
MLDRDNAVITSRSSVTMEVVYERCCGVDVHKKSIVACLLTGKQKETRTFGTMTADIRDMSEWLSENKCEAIAMESTGVYWKPIYNVLEVFGWDLIVANAHHIKNVPGRKTDVKDAEWIASLLRHGLLNPSFIPDRDQRETREIARYRKSLVEERSREINRLEKVLEGANIKLSSVVSELTGVSSRNILHKLVDDTLNKDSIAGLLHGQLRGKTDELLKACDGVLSKTQKVLVKAILSHIDDMTRRIDDMDDFLNGKLKEYDDALKRLQELPGIGDRSAQVIIAELGADMSRFPSSKHLAKWVGLCPGNNESAGRKKSGKTGQGNKTLKTTLIQSAQTASKKKDSFFKAQYDRLVVRRGANRAKVAVAHSMLIAIYHMLKNESPFMDLGESYYNHFNPEKKINYHLKKLNQLGWTSPVGAQA

SEQ ID NO: 186345 - protein, 408 aa, unidentified
MDVMHQRCAGLAVHKDEVVACARVVAQGRVTRTAARFPTTTRGLLALSDWLTAQRIPIAVLEATGVYWKPVWHILEASVELVLANAAHVRAVPGRKTDMNDATWLADLLAHGLIRGSFVPPAPIQALRDLTRTRKQLVRQVAQHTQRLQKTLEDANIKITGLVSDLLGVSGRALLTGLIAGETDPDQLLARTTGKLRAEPARLRDALQGRVTAHHRFLLQLHLDQIRALEAGIQTIDARLQTLVAPFRPLIEHLCTMPGVSTVVAQTLLAELGTDMARFPTSAHVVSWAGLCPRLDESAGKRRSTRVRHGAPWLKTVMVQAAWAAVRRRDSYPRAQFHRLKARRGPKKALVAVAASLLTVAYVLLRDQVDYRDLGPHHVDALDKGRAARRLTRRLEALGFTVTLNDAA

SEQ ID NO: 186346 - protein, 349 aa, unidentified
MRFYTESHAHYCGIDLHAKTMYLCILDREGKTVLHKNLRSRSEPFLAAIAPYRDDLVVAVECIFTWYWLADLCRREGIPFVLGHALYMKAIHGGKAKNDKVDAFKIAILLRGGTLPQAYVYPPEMRATRDLLRRRQHLVRRRGSLLAHIQNTHHQYNLPVPAKKVAYAANRAGVAEVFSDRDARKSLEVDLLLIEHYDQVIRDLELHLEKRAKQHDAQVYYRLRSVPGIGKILALTILYEIHDIARFERVQDFVSYARLVKCEHSSAGKRLGTGGAKIGNVHLKGAFSEAAVLFLRNNPAGQAHLRRLAGRHGKAKALSILASKLGRTVYFMLSQDRAFEMERFLGRTH

SEQ ID NO: 186347 - protein, 335 aa, unidentified
MPLYCGIDLHSNNHVICVIDDKDNRLFEQKLDNHAELTIRALSKYKKRLKAIAVESTFNWYWLVDALMEAGFQVELVNTAKVVQYSGLKRTNDRYDAFHLAHLMRLGILPTGYIYPKADRGLRDLLRKRMQLVQDRSSHIIRYKSQIQMHTGQTVRADYIKAKKYRVPIVGDANVQLALQSHIDMIRALSTQIRLLEKTILAQVEPVPDFYRLKTASGIGDILAETILLETGDITRFKGPGNFASYCRCVDSRRESNGKKKGENNRKNGNKYLAWAFIEAATCAIRHSDKANRYYHKKCKATNPIVAKKALAHKIARASYWVMRSQVDFNEDLVF

SEQ ID NO: 186348 - protein, 343 aa, unidentified
MAYFAGLDVSVKETSVCIVDDAGKIVREVRVASEPEALLQVLTNTIYRFKRVGLEAGPLSQWLYSVLAEAGFPVICVETRHMRAVLKAQINKTDRNDARGIAQMMRVGLYRPVHVKTLRSQKLRVLLTHRKLLQSKAIAIENDLRATLRNFGLKVGMAGTVKFEARIKELVENLPDLAVLLEPLLVVRRVLREQLGILHRRLLAIVRDDDVCRRLMTIPGVGPVVALTYRATVDVPTRFRNSKAVGAVFGLTPAKYQSGENDRTGAISRRGDEMMRTMLYEAAQIMLVRSAKWSWLKAWAMKIARHRGMKKAIVALARRLAVIMHRIWVDGTDFRWTREVAAA

SEQ ID NO: 186349 - protein, 441 aa, unidentified
MKKVISFEEVNQAAAGIDIGSEKIFVSPDGSEVENFGTYTSEYHRCISYLQGLGIKRVAMEATGIYWISLYGLMEAAGIRVSLVNPTETKQKKGKKTDVRDCRWIQKLFSAGLLKESFIPEGKMLEVRYLVRERLDIIEMGSTYVNKMQRCLELMNIKLTGLISQIHGASGMRMLKAIIKGERDPQALLLLCDERIQKQKGVEVLKALEGNYNDTWLFMLEQNISLWEQHQRQITEIDKRIASLLEELTAGKSIDMSIIGKAKPVRHHKPQINDLHETLVKFFGVNVTSISGINSYTLLRLLGETGSDMSRFETKKHFTSWCGLAAGHHQSGKRSKWVKQAPCNKAGQIFKEVAQSLENSKYIAIGSFIRRLKARRGASIAYKAGARKIAEAFYNILTKGEAYVEQGIKQYEEQLKQKEMAILKKLAKKHQVQIVEKQQAA

SEQ ID NO: 186350 - protein, 342 aa, unidentified
MTITIGIDPHKGSHTAVAIDSNEHVLDEIRVRSCSTQTTQLRDWAQRFEERTWAVESAHGLGYLIAQQLVAAGENVIDVPPMRASRVRVLGSGRSQKNDPNDARSIAIAALRADDLAVVRADDHSRVLKLLSKRHRDLGRLKNKASNRLHALLLEMVPGGASFRITSVTRVNAVIDDFEPVDAMGRQRQEIAREFAVDIDRYNQLLDASKQRINTAVAASSTSLTTIWGVGPITAAMIIGQSGDVDRFKSKHHFASYNATAPVEASSGSKVRHRLNQRGNRQLNWAIHVVAISQLRHDNVGRAYFDRKVAEGKTSKEAIRALKRRLSDVVYRHLVADARQQS

SEQ ID NO: 186351 - protein, 352 aa, unidentified
MVLIGSDFHPSWQQVSWLNQETGETGEGKLVHETGAVEKFYRQFPAGTQIGMEATGNCQWFLELMAKLGHDVWIGDAAKIRASDARQQKHDKRDARLLLQLLMEQRFPRIWVPWREQKDLRQLLIHRYKLVRIRAQVKNGLQHLAMNQGLQKKKRLWSAAGQQALRALPLQPWAGRRREDLLKMRSELDAKIDALDLAVVEAAEKDARARLLMTQPGVGPITSMAFVLTIGDVSRFPRGKQVASYLGLIPREYSSGGRQRLGSISKQGNSFLRMLLVEAAQGAARCDPGFRNEYLHRCHSKPKGVAKVAAARKLAIRLYWMLRTNTAYPEVVRIESSSRVPLVGATCLRQAS

SEQ ID NO: 186352 - protein, 344 aa, unidentified
MEIITIGLDLAKSVFQVHGVDATGQVVIRRSLRRAQMLPFFTRLPSCLIGMEACGTSHYWARELIKLGHQVRLMPPAYVKPYVKRGKTDAADAEAICEAVTRPTMRFVAVKSPEQQAALSMHRTRDLLVKQRTQLVNMIRGLLAEFGIDIPKGLERALLMARRIVDGEAPDVPMEAARIVSTLSQQALDIHIRLREIDRDLLVWQRGNDVARRLMTIPGIGPIGATALAASITDPRQFRSGRQFAAWLGLTPLQKSSGGKERLGRITKMGDKYLRKLLIVGMTSLVRRAKYNPKAVDPRLADLLARKPVRVATVAMANKTARIVWAVMARGETYRAGHRPALAA

SEQ ID NO: 186353 - protein, 350 aa, unidentified
MQTLARAHIGVDLHRDVVQVSVLDERGHERKQRRFRLREAGGTEAVLAYLEGWGAGSRIAVEAMGLNRWLVNGCQARGLEVLVVDPVKLGLKTTGTKTDRRDAYELARRLWLGDLDRNARTYYPTDEEYAVRKLVRTRHKLVGMRQEVVNQIRAILNAYRLGTPAGHLYSGVNLSWLEQQVSELGRLGISLRALTMTLPEVQQAIRLLGVEVREVARHDRGVQGLMEIDQIAALTAVTLIYELGPADRFTRARAVASYAGLSPRVSNSGERTRHGRLTRRGNSLLRWILGQMAVRLLAYDPAVKRWAAPRLRRMHINKLRVVLARRLLISLVHCLRSGEVFSREKCLGIA

SEQ ID NO: 186354 - protein, 312 aa, unidentified
MGIDVPKRRLDASLRPTGEHFGLPNDPAGIDTLVGRLERARPKLVILEATGGFERAVAAALAAAAIPVATVNPRQARDFARATGKLAKTDRIDAEVLARFAEAVRPAAKALPDEEAREFAAILARRRQTVEMLTAEKNRLGAAASSPVGKRIEAHIKWLEKELARTDGDLDGAIRESPTWRENEALSRGVPGVGPVLARTLMAELPELGGGELTPKQLAALVGVAPLNRDSGTLRGRRTVWGGRERVRQAPYMGALVATRFNPTIEEFYERLVGAGKPKKVALVACMRKLLTILNAILKHRTPWRSPHALAP

SEQ ID NO: 186355 - protein, 394 aa, unidentified
MHVKADRPEAPSAIRSDLGAIFVSLELSRSTWLITSLSPGGGEKMSKHSVPAGDIGALLARFSEIRQKALARTGKSFPIIVIQEAGLDGFWIHRVLQKEGIESHVVDPASIATSRRRRRAKTDRIDGEALLRALLAYKRGEPRVCAMVKAPTPEEEDRRRLCRERKTLIAERVRHVNRIKGLLFCQGVSGYEPLRRNRRQWLGELKTGDGRALPDHLKAQISRELDRLELLLEQIKAVETERDALFAVAKAAAATPTPAPAPVTMLLDIKGIGPEFAGILWMEAFFRSFANRRQVAAYAGLAPTPWQSGSVDREQGVSKAGNPRLRTTLIQLAWLWLRHQPQSALALWFKERVTRNGGRFKKTTIVALARKLLVALWKYVTAGVIIEGAVMKVA

SEQ ID NO: 186356 - protein, 321 aa, unidentified
MKRYAGIDLHANNSVVVGIDEEDRILYQKRLRNELTELLQALTPYQETLQGIVVESTDNWYWLVDGLMAAGYRVQLANTTAIEQYKGLKHTEDESDARWLAHLLRLGILPEGYSYPKEERAVRDLLRKRSQLVRQRTSNLLSIQNLLTRNTGSSLSGNRIKQLTVEEVEQILPQAELALAVKSNLAVLQCLEEQIEQIEEVVLAHLKLREGFRPLLTVSGIGQILGMTIRLETGEIGRFATVGDFASYCRCVSSQKLSNGKRKGQGNPKNGNKYLAWAFVEAANFAVRYTAQLKRFYQRKHAKTNGVVAIKAVAHKLARAC

SEQ ID NO: 186357 - protein, 431 aa, unidentified
MNHNTTTNPTAPAGPASAAPAPTPVAWIGLDWGHQTHAFVLQDGSGPPEEGTLPHSAEALHAWLRDLEKRFGGRPVALALEASRGAVIHALVQYPWLTIYPINPVTSARYRSAFTPSGASDDLPDARVLLELARDHAAKLRPLETQDPQTLKLAGLVEARRDTVDRRTQVLNQITSLLRAYYPQALELVGELDTELAVDFLSRWPELITLKAVKPGVIKRFYHAHHLRRPELLEARLQLIQKAVALTTEEARVSVAVLHLRCLLDQLRAFRKHVAILDTEIKTVFAAHPEAALFRDLPGAGPALAPRLCVAFGTIRPLYPEPASLQKHAGVAPVREKSGQSLWTHWRWLAPVFLRQTLVEWAGQTVCDSAWAKGYYQRMKAKGKGHHAILRALAFKWIRILWKCWQTRTPYDEVRYLKQLVHRKSPNALPA

SEQ ID NO: 186358 - protein, 343 aa, unidentified
MEYYVGLDVSLKQTSICVVDRTGSVVREGVVDSDPEAISVYVRSKAPDAVRIGLETGPTSTWLWTELKRLGLPVICIDARHAKAVLKMQINKSDRNDAIGIARIMQTGWFKEVHVKDIDSHSVRALLASRALLVKIKRDLENHVRGLLKNLGLVIGRAKFNVFAVRAEELIEGRPELIAAIRPLLEARNAVGEQVSELDRKVMKLARQDAQVRRFMTAPGVGPITALAFKATIDDPARFARSRSVGAYVGLTSRRHASGEVDWTGRISKCGDAMLRSYLFEAAGVLLTRVPKWSALKAWGVRLAKRNGLRKAKVAVARKLAVILHRMWIDGTEFNWSTKEIAA

SEQ ID NO: 186359 - protein, 370 aa, unidentified
MSVRRILAKTIDTDLEYEAIGIDLAKNCVSAALLTTDGEVVCIDRLDYSELEKSAQVLTPTTFAMEPCTEMNYLVQKLEAWGHRCLVIDGKNVQNYVENHYSGQKTDLNDAQALAFLAQDTQLRTIKAKDIEQQKYASLTTLREQYIKQYRQTIVSLKGICQAWGLNISKGISRKAQLRDLIESHAAFPEELRESLVDMVTHAQTTQKVLNKITKTLEVLAKNDKACQLIQTILGLGPICSCRLRATIGDIRRFKNPKDFPAYYGLVPRSIATGHNEKKGKITHRGDRTMRSLMVQGAGCVIRLATSGKLKSKQLTKWILKKQKEKMPWGKLVCAVAAKLLRIVRAILISSKPYNPKIAGVAKCSLSKGS

SEQ ID NO: 186360 - protein, 318 aa, unidentified
MTSHPLALAAGIDVGQRFLDIGLAPSGKTFRVPNVADGIAIVVERLTQEGIGRVVLEAIGPYAQRLVSALAIAGFEVGLINPRRIKAFREFEGRRAKTDRLDARLIARFALAMTDAIRPLPTAEQLALKALSTRRRQLTEMIAMEKTRLKQAAEPLILASHRTAIAGLTTECRHIEAELARRIGDDPQLACSFEILTSIPGIGERVATALITELPEIGRTDRKAIASLAGLAPHISQSGNEPPRAAIEGGRPCVRTALYMAALVASRHDPQMKLAYQSLRNQGKPAKLALIAIARKLLVTANALVKNNTRFKPQSLDS

SEQ ID NO: 186361 - protein, 329 aa, unidentified
MSKLSKKVIGVDVGAKFLTVSFTDNVNQDQVFNIQNNQRSILSFLKKFPTEDYCLVIEATGNYSSRILHLSLDNGFESSLINCMSVKYFSRMKNIISKTDAEDAKVIRLYGEIFRPEVYIPKSIEIEDLDQEIKLLNDLEEEKRRYSVKLKSLRYNPQLNPNTEKHYEKRLKQLDKEIREVEMRLPQLQDEEFREIKGLIQSVSGIGEKTSLQLMTATSGFKNFDSSKSLVKYFGLAPRIYQSGKKSYSPGKCRTSKTHIRSLLYVCSWTAIKHNTQCKELYLRLLEKGKPKKLALIAVCNKLLRICFGVVKNKTAYQQNFQKNFKILT

SEQ ID NO: 186362 - protein, 359 aa, unidentified
MAGRVIDSAWVLRPCGSLIPAGIVRFSPNSRLGRCLASPYLQGRDNLMDSIVIGIDVSKDQLDVTTPDGARQWPNAPDGHRQLVKQLAKWSLESIILEATGGYERAVVAELAAAGLPVVVVNPRQVRDFARATGQLAKTDAIDAEVLAQFGRAVRPEQRPLASEKQLKLQQQLARRRQLIGMLTAESNRSEQVTDRLVRKTINAVRATIKSQINQLDDQLQQTLEETPAWREKENLLRSVPGVGPQTALALLADLPELGTCSRQQIAALVGVAPLNRDSGRRRGKRMIWGGRASVRSALYMATLVATRHNPVIRAHYLHLQKVGKRKKVALVACMRKLLCMLNAILREKKPWRNQSNTT

SEQ ID NO: 186363 - protein, 325 aa, unidentified
MEAQKLCCGIDVSHTKLDVCYQNNLGELFHLQVGNNNQGFAKILEHTGVHYHFVMEATGVYYIRLVFYLHSQGCCLSVVNAIAIKRYIQMQLERNKTDKKDAGWICRYAIEQRPAYWQMPDSAYFESKQLYNTIREYTEQIKRFNNQLHSLRLLPVPSEDTIKSLEKIIVQLEKEIKQLEQKLQLLLDQWQPDQLKNVSSVKGIGKRAAAMLIVFTQGFKHTHTHRQLISFAGLAPTQYSSGSSIQGKPRIYKRGGKNLRDVLYMCSMNAMKTNTACKALYERLRANGKTGKQALIAVCNKLLKQVFAVVKNNSLYQPNYCSAKP

SEQ ID NO: 186364 - protein, 412 aa, unidentified
MQVIHRVCCGIDVHAKMLVACLILANGEKQKRTFSTMTAELLQLRDWLVAVQCTQVAIESTGVYWKPVFNILEDALTVILINPEHAQALRGRKTDVKDAEWLADLLRHGLLQPSFIPPPVIRELRELTRYRDSVVREQSSVANRIQKLLESGNLKLGQVASDALGVSGRMILKALAKGESDPRKLAALARGKLKEKSLSLEQALQGRLTVNQRFVLGELLSRWEQLEAADARVTGEIDKYVQANPKLARAREQLDTIPGIGPRVAEVIMAEIGIEMAAVFADAAHLASWAGICPGNKATGGKRLSGRTRKGNTYLRSALVQAAWGASLKKHCYLSSQFQRLVKRLGRKKALVAVAHSLLVIIFHVLQNDQSYTELGGDYFDRRHVEQQRDYYVRRLQMLGLKVTLEELPQAA

SEQ ID NO: 186365 - protein, 352 aa, unidentified
MKIIGCDFHPSFQQISVLDLETKQRVRKKLDHASGEAEQFYRGLQGEAVKVGIEACGNTGWFERLLAECGHELVMGNAARIRAMAVRKQKTDERDAEHLLELLESGKFPVIWVPSAKNRDLRQLLLHRHKLVQMRTRIKNQLQHLAMNQGLQKKRQLWTVRGRQWLEQLSLSPWSERRRCDLLVLLDGLQERITELSQAVEEQARQNERAQLLQTHPGVGAITALAFVLVIGEVSRFERSRKLTSYLGLIPSEDSSGKRRRLGAISKQGNTLLRTLLVEAGQSAARCDPELRRAYRRLCHKKQHPGIAKVMVARKLAVRLYWMLKSNQPYVPARMPGSPSHSVNPREGGSTI

SEQ ID NO: 186366 - protein, 375 aa, unidentified
MSTVRFIGLDVHAETIAVAVAEPTGEVRSLGVIPNRSESIRRVMKKLGPVERLRVCYEAGPTGYVVYWQLTALGVRCEVVAPTLVPVKAGDRVKTDRRDAEKLARSYRAGDLTTVWVPDACHEALRDLVRAREAAKKDQLRARHRLGKFLLRHGRRPSERLTPWTQRHLTWIKQVVHFEQPAQEATLLDYLHEVEHAATRIERLERAIDAAILSAPPRMRAVIDALQALRGIAKMSAVTIVAEVGQLSRFTRAPQFMGYCGMGASEDSSGERQRRGGITKTGNAHLRRIVIEAAWAYRHRPAVGQVLRKRQAALSPEVTAIAWKAQHRLHTRYRRLLGRSKCQQKVVTAIGRELLGFIWAIGRSVDTDRRQSLAA

SEQ ID NO: 186367 - protein, 336 aa, unidentified
MKTFVGFDFHKRFSYGAIVTEEGRILKRERLDNHPKAVTRFLGRYAGSECVAVLEATRNWHVMHDWLEEHVGEVTLAHPLKLRMIAEASVKTDKIDATLLAHLLRANLIPRAHVSSRPARLIRRLLRHRIFLVRVRTMVKNRIHDLLDRHPLLRSEWAAEGVFSNTGVGWMRQLALPEGDRFLLDSDLDVLGDLDEQIRRAEKMLSRVGRADRRVHRLKSIPGIGAFISMLLVAEIDDLSRFPRVEKLHAYAGLIPTTHASGGKVRHGRVVATCNKYLRWAMIEAVWPAIRKDPGLRRYYDRLARRKGANTAKVATARRLLTIAYRVLKENREYRP

SEQ ID NO: 186368 - protein, 370 aa, unidentified
MLDTTTFIGLDVHARSIKAVSLDVMTGEVRAATFGYDAGAVAEWVRSVDPRARCVYESGVTGFDLQKRLSGLGVDCVVGAVSKMIKPSADRRRKNDRNDAEFLARMLSVGNVVEVWVPDDECEAARDLTRALEDARDDLSRSKQRLSKFLLRHGLVFDERTPTGRRKGNWTRAHWSWIESIRFAEGADNDVLAYYVDAVRRAAEEKARLEGLVEAEARKPRWRRRVDSLRCLKGVDTASAADLVFEAGEFSRFGNARSFAAWVGLTPSEHSSGESDRRGAITKAGNKHLRKALVEAAWHYLTCSGRPKDLAKGQAPDRVARRHAAKGVRRLVERREALLARGVHGNKANVATARELACWVWAVGLMAEEA

SEQ ID NO: 186369 - protein, 344 aa, unidentified
MTTEASTKFYAGLDLHANNTYCAVINQSGQPVFQQRLDNELPTICQALRPFQPQLHAVAVESTFNWYWLVDGLQAAQFPVQLANPAKIQQYSGLKRTGDQSDALWLAEMLRLGILPTGYIYPPEQRAVRDMARRRMLVVQQATRTLLSLQSMVTRHTGQTVRGRSLEDWTLVELREAFPAAASQETAAALLELLHAQRRIQRALEKNVLARTKLDGAWERLLTLPGVGNILGVTIMLETGPIARFASAGDYASYCRAVDSRCDSNGTKKGENNRKNGNKYLAWAFVEAANYAARYNARAQAWLARKTARTLRVVAVKALACKLAKAAYYVLRDDVEFSEAKLFG

SEQ ID NO: 186370 - protein, 341 aa, unidentified
MKIRTIGIDLAKEVFGLHAVDVHGKVLLHTRVPRKRLLSRLTRLEPCLVGMEACGSAHYWAREIERLGHQVRLMSPQFVTPYRKGNKNDPNDAEAICEAVTRPSMRFVPIRRDEEQDMHALHRVREQLIKNRTALANQIRGLLRERGIIVAKAIGRLRAALPLILEDENNGLSALMRELVGEMAERLRTLDDYIRRHDQRVARLCQQDERCRRLVKVEGVGPLVATALVAAIGNARQFKSGRELGAWLGLVPRQHSSGQRTLLLGISKRGDRYLRTLLIHGARAASRVAERKRDARSIWISRLKQRSGPNVAAVALANKNARVMWALLARNQSYRPSSSAT

SEQ ID NO: 186371 - protein, 418 aa, unidentified
MLSIKHFVCCGMDVHKKFVVATIALTDYRGVTSYVKKRFATFNSDLNSLKKWLLSFNCTEICLESTGKYWIPIFNILEDSCHVVVANPKYVRAIKGQKTDDKDSAWIADLFKFDIVPSSYIPCKEIRMLRELFRYRQKLIGHRSSEKNRLQNALTVSNIALASVLSDTFGKSATAIVDYILTCEVFDPEYCKSLLLKKAKDKADDVVTSIIGYELRRDQSVKIKVCRKHFDEINECVSTLEETISDLAKPYHKFIELATTIPGITEQSATFIIAEIGVDMAVFKSSKRLCSWAGLAPENNESAGKKKIVHVSRAGVYLKPLLVQCANAAIKSKNPYFRYKYDRIKKRRGHKRAIIAIARMVLTCIYHMFQKQEVFNPADTDYSAIPEEMYRKFQEQYDRNAIKRLEKRGYMITPPAMA

SEQ ID NO: 186372 - protein, 343 aa, unidentified
MDHYVGIDVSLELSSVCILDAAGQIVKEAKVASEPEALTTFLTRLGLPLTRIGLEAGPLSQWLHAALVKAGFETVLLETRHVKAALSAMIVKTDRRDARGIAQLLRMGWFRPVHCKSAPAQEVRALLVARKQLQAKMRDVELSLRGLLRGFGLKVGEISKGQYAARVRSLVVGHAMLEQIAEAMLQAREALRTEFGKLHRTMLAIVRADEVCRRLMSVPGVGALVAVTFTSGVDAPERFARSRAVGAHFGLTPKKYQSGETDITGAVSRVGDVMVRTALYEAAHIMLTRAVRFSTLKRWALEVARRRGMRRAKVALARKLAVILHRMWVEGTTFRWGREVGAA

SEQ ID NO: 186373 - protein, 404 aa, unidentified
MWYVGLDWADTHHDVEVQDEAGKRVGARRFAHSHAGLHELKAFLLGIAAAPEELACMVETNHGLLISFLLEAGIPVYPVNPKTANQLRKAAGAKTDRIDAHLLAKLGRFDLAELRRLEPDSPSVAELKTLTRDQDALIQTQTRLVNQLTACLKEYYPAALQLFAKLQQRSTLVFLQAYPTPQAAQAASLEEITATLRTGKHTNPTQVAPKIVEELHRPQLVANPVMVRAKSRLMLSLVKQLLVVIEEVASYDEAIRPLFLSHDDQKLWSSLPRAGKRLAPRLLAEWGDDRRRYAEATSVQTLAGTAPVPFESGNYAKAHKRFACLKPLRNALHQFAWQSTQHEAWALAYYQRKRAEGKTHSMALRALANVWVRIIYRMWVDKTDYQTATFEAARRAHAPRPHAA

SEQ ID NO: 186374 - protein, 348 aa, unidentified
MAHFVGLDVSVKETSVCVVDDTGKVILEQKVPTEPADIITLLSSLGVSYGRIGIEAGPLSQWLVNALTVAELPVICVETRHMKALLTAQQINKTDRNDARGIAQMMRVGLFKPVHVKTLVAQEQRMLLTSRKLLQRKLLDLESDLRGTLRNFGLKVGVVSGGRYEVRVRELIAGFPRLAAIAEPLLKVRQVMRQQLAVLHKMLLDTVRDDPVCRRLMTAPGVGAVVALTYLATVDQPQRFVHSRAVGAHVGLTPKRYQSGEIDYDGGVSKCGDALLRTMLYEAAQVLLTHGSKWSWLKAWGVRVVQRRGMRRAIVAVARRLAVVLHRMWVDGSEFRWSKDSAAVPTAA

SEQ ID NO: 186375 - protein, 357 aa, unidentified
MAVMIGVDPHKGSHTAAAIGPAEEPLGRRQVRACPDQARQLLAWAAVWPQRTWAVEGATGLGRLLAQQLAAAGERVLDIQPKLAARVRLLEAGDVNKNDPNDARSVAVAALRSRVWRQVAADGHAAVLKILAKRHRDLARSRNQVACRLHAVLCELVPGGFAGEITAGLAARLLDQLTPDGAVAAARCDLAADLLADLRRLDGQRRECAKKLAATVRASGTSLTGLFGVGPVIAGQVIGDVADVTRFPGRSHFAACNGTAPVEVSSGGRKVYRLSLRGNRRLNHAIHMAAITQIRHTHSDGRACYERKIAAGKTHKEALRCLKRRISDAIYARLRADARQAAAAAAKDPGRATGERL

SEQ ID NO: 186376 - protein, 433 aa, unidentified
MQDVQDEPLFAERVAGLDIAKAEVEVTLRVPSDTTAGRRQQETRTYGTTRRELDSLADWLHCWAVTRAGMEATGDYWKPVFFLLESRGFDCQLYNAGQVKALPGRPKTDRADSIWLAKITERGSVASSFVPPEPVRRLRTHTRYRRHLTQARTAEKQRVEKLLEDGHLKLSSVISDIHGVSGRAMLEALAAGQRDAKALAQLARGTMRGKIRRLEEALDCSFFTAEHAAVLAMMLAAIDCYTAQIEALTARIETLTEPYLRQVEQLDQIDGIGAICAQDIIAEIGADMTLFRTASHLVSWARWSPQVKQSAGKRKGSNATGRGNPYLGAALGEAVICAGRTQSYLGAKYRRLARRMPKKKALVATGNSMLTIVHTLLSDPAARYQDLGADYYEQRMHARRQARNHVRSLERLGYKVTIQALNPDTGEFLTPAG

SEQ ID NO: 186377 - protein, 326 aa, unidentified
MEHELHYIGIDTAKEKLDVDVLRPDGRHRTKKLSNTTKGHDELVSWLKGHKIDHAHICIEATGTYMEPVAECLYDAGYIVSVINPALGKAFAQSEGLRNKTDTVDARMLAEFCRQKRPATWEAPHPLERALRALVVRHQALTDMHTQELNRTETAREVQRPSIDAHLLWLEAELKRLEKQIKDLTDDDPDMKHRRKLLESIPGIGEKTSAVLLAYIGLKDRFAHARQFAAFAGLTPRRYESGSSVIGASRLSKAGHVSLRRALYMPAMVATSKTEWGRAFRDRLAANGKKGKVILGAMMRKLAQVAYGVLKSGVPFDVSRHNPVAA

SEQ ID NO: 186378 - protein, 401 aa, unidentified
MTTGTIDVIIGLDVGKTAHHACAMTSAGEIIYDKPLPQDEDQLRKVFTDLQEHGTVLMVVDQPNTIGALPIAVARDAGCVVGYLPGLAMRKAADLYPGRSKTDRRDAFIIADTARTMPHTLRAVDRDNEVLSALKMLSGFDDDIAKDATRTVNRLRSVLTQIYPSLERALPGSIITRPLVLEMLIHYGGPTKLKKAGYHRVLAWMSKRAKKDPTTLVDAIFEGLKAQTVTVPGTAAAEIVIPQLAANIKALLEQRRTIAEQVEELLEDFPLSEVLMSMPGVGIKTAANILLAVGDCSDFRSAGHLAAYAGIAPVTRRSGTSIRGEFPARAGNKRLKNALFYSAFASIRFHEPSKSYYEKKRAEGKQHNAAVMCLARRRCNVIFAMLTRGEFFREVPARTAA

SEQ ID NO: 186379 - protein, 342 aa, unidentified
MKFYCGIDLSARDCHVCVIDEQLQIKVQQKLRNDLPKIIKLLMPYQANMQIVVESTFNWYWLIDGLQAEGFDVVLAHTLGLYLITGAKVKTDRRDAYSLAKLLLVGAVPKAYIYPVETRPVRDLLRRRMRLVQVRAGEYGSLRQLLLRQGILSSQQQEIKTATEAELEQWFEHPLVRLHASQELQRIALYSEQIAELEKTILALAKTAPSYDLLLKLPGVGQTIALTIMYEVGELTRFANPKVFSSYCRLVPGIAQSGNVSGRGRASKQGNHYLKAAFSQAAVHAVRCYPKVRRYYERQLKRHQGRGRQMICYNIIAHKLAQAAFQILKEQSEYREELLFGR

SEQ ID NO: 186380 - protein, 316 aa, unidentified
MAESVVETFVGVDVSKSTLDVCIDSPSEMLHVEYDDQGLKAICTRLKALAPTLIVMEATGGLEMRLACELSALGLNVAVINPRQARDFAKATGQLAKTDRVDAAMLAAFAKAIRPPVRPLKDEQTRELDDMVSRRRQLIANRVQETLRLNTAASKPLQKSVKAHITWLDKRIAELDEDLSHRLKASDVWRTKDDLLRGIPGVGAVTTLTMLAKCPELGTLNRREIAALTGVAPLANDSGKHHGKRSVWGGRADVRAVLYMATLSAKRSNPALKAFADRLKQAGKPAKVIIVACMRKLLTIMNAMLKNNAPWRPKNA

SEQ ID NO: 186381 - protein, 342 aa, unidentified
MYYVGIDYHKSVAVACIIDGKGKELETIELPSTPEGMDMLIGKMGKKKFKVLGEAFTYSIDLHNHLIGKGVSSELVRPTDLKLITLSKKKTDKNDAATIAWYLRMKETDQIKLNYSFILKDKQLEFRSVCRLREKISDLKGQMSQQIKSHMRCNGEYLPVKEFGDKPKMSVKRVQKYIIENFDGDFTLQEYLREYIYLEERSKEVEKEMTRFEFDKEAVRLLETIPGIGELSAMELMSMIVDISRFPSSDVMRAYFGMAPKVRDSGDDVNHSHVTKQGDPMMRHVADRVVRLHLMHSDESVIRKSYESVRKRSNHGVAMMAASNKLLDVIFSVLSNKKPYYC

SEQ ID NO: 186382 - protein, 407 aa, unidentified
MLEVKVEQCAGIDVGKKFIDVCVLIGPVNRKPAEEVRRFGTHVGDLEALRAWLKEKACTEVIMESTGSYWKPVFNILEGQFKVILANPEQVKALRGKKTDRKDCRWLAGLLRHGLVQPSFIPPRDIRELRDLTRRRRTLLQNGTQERNRIQKVLEDANVKIGNVLSDVFGMSGQAMLEALLENKLSTEQVADLARGSLRRKIPQIVEALEGHRMSEHHRLLIRQAFKHMQFIEEMIEELDKQIQEKLAPYQKQVELACTIPGIGSDAAASILAEIGMDMSDNGPFASCHHLASWAGVCPGNNSSAGKRKSGKIRKGNRWLKATMTQTAWAGAAKKNSAFQFRYQRLKARRGVKRATIAVAHAQLITLYWVLRNGAPYQQQRQDLERQQRESLIRHHLHRLARLGHTS

SEQ ID NO: 186383 - protein, 322 aa, unidentified
MFYVGLDLHKRYVTACAIDAVGQLVAEERRLATDLVVLHGWLGRLTGPVTVVLEATLYWAWLEQHLTALGYTVLVAHPYQVKLIWQARTKTDPIDARKLAELARVHLLPAIWIPDAATRAQRQLLRGRAFLVRQRTVLKNRIHAYLTGENLQCPALDLYNRAGRAWLATVPLPPIVRRQVDLLLANLDLLTTQIAVLDKYIQRHVRQDPVAQRLQTIPGVGPFGALLLQAEIGPITRFGSAQELAAYAGLVPSTQSSGGKTHHGHVGRGSPWLKWIVVEIIQAHKLAPGPVASHYQSCCARRGNRKPPSPRPGSSAPISTGC

SEQ ID NO: 186384 - protein, 364 aa, unidentified
MAVSRLSPKELTKEAPNIMLHVGLDLSRRRLDFDLLCEDGSRIERGAAPPDADGLRGLVRRVDVYQEPVCAAIESMNGARFVHDRLEELGWQVELADAQKVKGLAPLACKTDRIDAWVLAELSRRDLVPAIWLPSPTVRQERERARWRLHLVRHRTALKNRVHATLIAFGKPCPVSDLFGSRGRQLLARLDLPDPWAQTVSASLSLIEDLDVQITDCERELRVLGADHEYVPLLMSAPGIAWVLGYTIAAEIGDINRFASPTKLCGYTGLCPRVNQSGEHDHRGSITKNGPKYLRWALIEAALHAVCSPVYRERYKRTATRLGRQRGKKVARVDIARKLAEAIWYMLTRSQSFAPAGATTPLAA

SEQ ID NO: 186385 - protein, 362 aa, unidentified
MNYVGVDIHKKYSVLCAVDERGRKLREARVEGNAPFGFAQFFSGLGGPSKAVVEACWNWGLIYDELEELEGIEEVVLAHPYKTRLIADAQIKTDRLDAYALSTLLRGNLVARAHVPRRETRMRKNLLRQRLYWARLRTMLRNRIHALLDRQRDLELPQCSDIFGMRGLSFLRRLELPETDAALLREQLALHDLIAQQMKAQEKRIGLEFGSEAMHQQLLSVPGIGPTLAAVIACEVDSIERFSSAEKLCAYAGVVPTTHSSGGKTSHGQLLPFCNKWLRWALIEASWVAIGCSPYFGALYKQHRARGKKANSAVLIVARRMCRIIWQLLHEKRDFEKRPLRPNFNFPGCSVVRLTAATAARP

SEQ ID NO: 186386 - protein, 353 aa, unidentified
MNNIKYVGMDVHKSITVIAVLNELGQFESRSQVKTKSENICDFFRGISGKVEVVFEEGTHSAWLYKLLKPLVASVTVCDPRHNKLIEDGNKSDDEDAETLAQLLRLGAVKAVYKGDDQQQQLKEICRAYDNLIEDSTRVQNRLKAIYRGRGISCSGHDLYRADQRSDWLAKLGEDAARFRAESLLEQLESLSQLRKQAKQRLLAQARTHADYRILVKLPGFGPVRVAQLIAAVGTPHRFRTKRQFWPYCGYAVVTRSSADYQIVEGKIVKQRKKVSTRGLNRNHNPQLKQVFKGAALAALRHKAIKAYYERLISSGARPELARVSVARKLASIALTVWQRREEFDVKKAFTQN

SEQ ID NO: 186387 - protein, 342 aa, unidentified
MNLPVRIGMDTSKSVFQLHGVDENEVVVVRRQFRRAEMIRYFERLPPVLVAIESCGSSHHWARLLQSFGHEVKLIPPQYVKAYVKRGKNDAADAEALCEAVTRPSMRFVPVKSKEQQAACMLMTVRERLVSVKSQLSNAFRSYAAEFGIVGPAGRQNVTALIKRVLEDDSLPEMARDLFRLQAEEYAAVQARLGKIEAKLMKWHREDDVSRRIATIPGVGPIGSSMLSMKAPPPETFRSGRDFAAWLGLTPKDHSTGGRQRHGGITKAGDSALRSTLIVGATALLRHIRKGRHKPTPWLASLLERKPPKLVAVALANKFARIAWRLMISGGVYNRPVAAMPI

SEQ ID NO: 186388 - protein, 359 aa, unidentified
MNATTVAVDLAKSVFEVAVADQNWKVIDRARLSRPQFERWFHNRAVGLVVMEACGSAHFWARQLQGLGIEVKLLPPKYVRAYVKRNKTDAADAAALLQAARCADILPVRVKSVEQQALQSLHRVRSAWMATRTSRINGLRGFCREFGITIAVGSRLGIEQISRVLVDSSTAVPAMLRDTLKLLIDEIRLLEARIAQLERELTDAAKASAACERLLSVPGVGLLTATAMLAATGGSVSHFKDARHFSSWFGLTPKEHSSGSTRHLGRISKRGDRYLRMLLTHGARSVLRAATVAQRCGRPLDPLRQWGLNVQSRSNHNKATCALANKLARICFATLRDQEPYEKTKMLKKLERQAYPMPA

SEQ ID NO: 186389 - protein, 352 aa, unidentified
MTRITTIGVDLAKKVFQIHGVDAEGKVVVARKLRRKEVLAFFAKLAPCLVGMEACGSAHYWGREITKLGHTVKLMPPKYVKAYVKRGKTDAGDAAAICEAVTRPSMSFVPLKGLEQQGLYMLHSARSQLIGQRTQLINGVRGHLSELGIIAERGLLGLSELAAIVRDERDRRLPVTARAALIILVRQIETISAEIVALDTALRKENKASELGPRLETIPSVGPVIASALRARVTDATLFENGRHLSAWIGLVPENDSSGGKVKQKGLSKKGDRYLRSLLVTGAMAVVRQAQIRPDRNPWVTKLLGRMTAKQAAIAIANKTARIAWALMVHGGVYEAGHRAPQYRAEACATAG

SEQ ID NO: 186390 - protein, 371 aa, unidentified
MQENVIYVGVDVDDNSFHVTALMPETGEVIETKTKPNLKGLVNKLEDFKKKFPNHALKICYEATYIGFTLQRDLASKGYDCVVVAPSSIPRVHGNQVKTDRVDAGKLAQFLSAGILTFVSVPDKETESDRDLLRSRQFMLHQLAEVRTHIQSLLRRNGIHYKSETKNISHWTKHHLSWLDTKADEAVGSFKQNLKLLVQQMKWLNHSLSEYGKAVDELATTEKYKKQVSALVCYKGIKNIFAMVMITEIGNVKRFAHPRQLVSWMGMDVREYSSGGKSHRFGITGHGNRYLRTAFVEANQRAIGGTRLSDDLKQRRKNIDPDFIHIADRCMARIRKKGMRLLHAGKHSNKVKVACAREMVGFVWESLNKVA

SEQ ID NO: 186391 - protein, 332 aa, unidentified
MFIGIDVHKRYSQIAVLDKNGEIVEEVRVENANLDDFAQQYAGSKAALEATSNYYHIHDTLSEYLDVTVANPSELKLISDSDKKTDRVDAKQFARMVRLGSIPESYVPTDEVRQARALVRGRQKLVENRTEYANKIHGLLSDHGITQEVKPLSVKGREFLMELSLPAPWDALLESYLELIQTLTEQIESLEAEIEERAGSLKETQLLMTIPGVSYFTALTIYAELGEIDRFNRDKEVVSYVGLNPIIRESGDSRFEGSISKRGSGRVRWLLVQASYSAVHTCEDEYLSRFYNRLARKKNSKTAIVATARKLLVSMYHMLDREEVYDPPGVSA

SEQ ID NO: 186392 - protein, 310 aa, unidentified
METLSYCGIDVSKDRLDVVLLPEQSFLSVSNDPIGWAELVARLRPLAISAIGLEPSGGYERGVIRALLASGLSVRRINPNKLRQFARARGVLAKNDRLDARLIADYVAIMPTRVVQRDEAVEKIAAVVTMRRQLSDEHITVLNQAAHIEDIMLRRLNKRRLTRLETDIRLLDNRLRELLADDAALTERYHILISMPGVGPVLAFTLIALLPELGRMSRKQIAALVGVAPYDFDSGKLRGHRSIYGGRMPVRNVLYMAALSACRYDPALKAFHQRLTAAKKKSKVVIVAVMRKMITTLNAMLRDHAEWKSA

SEQ ID NO: 186393 - protein, 391 aa, unidentified
MIYVGIDVAKDKHDCFITNSDGEVLFKAFTITNNLDGFNELHQKIASVMDDVTKVKVGLEATGHYSYNLLGYLIDKGLPTYVINPLHTNLYRKSLSLRQTKTDKVDARTIASMLMSDVNLKSYSDISYHNEELKSLTRYRFDKVKERAKLKTSVSRLVCILFPELEKLVPTLHITSVYALLSEFPGAKHIARAHLTRLTNLLSEASKGRYGKDTAITFRDAARASIGSNMPAKSLELKHTIKLIQELDSEIDEIEKEIKIIMDEINSPILSIPGINYRMGAMIIAEIGDFNRFDSPDKILAYAGFSPSTYQSGQLDGAYAHMEKRGSRYLRYALYNATKYVCHWDPTFAAYLAKKRAEGKHYNVAISHAVKKLVRVIYHLEKTKQQYIKAA

SEQ ID NO: 186394 - protein, 367 aa, unidentified
MMGWMAPLRHLSAKLLSDRISSEWEPSMGEVTTIGLDLAKHVFQVHGVDAEGATVLRKQLRRAQVLAFFSRLPPCLVGLEACATAHYWARELRALGHEVRLMPAQYVKAYVKRNKHDAADVEAICEAVERPTMRFVPVKTADQQAAVLLHRGRERLVRQRTGLVNALRGHLAEFGVIAPQGLRNVGKLIAIVRDEGDARLPDLARQVLQVLAAQIEQLEAAVAAIEKQLMAWHKSNPISQRLASVPGIGPIIATAIAATVVEPSGFRSGREFAAWLGLVPRQNSTGGKHRLGGISKRGNQYLRRLLINGASANLLRSKATNADPWVIGLRQRRPSLVVAVALANKTARIAWAVMHRHENYQRVAAAA

SEQ ID NO: 186395 - protein, 322 aa, unidentified
MQDEAPRPAQAAIRTDLGAVFVSMELSRSNWLVTSLSPGAGEKMSKHSVAASDVAGLLERFARLKQKALARTGQDFPIIVIQEAGLDGFWIHRVLESEGIESHVVDAASILTSRRRRRAKTDKIDGETLVRTLLAYKRGEPRVCSMVKAPTPEEEDRRRICRERKILVAERIEHVNRIKGLLFAQGIFDYQPLRRNRRERLEVLKTGDGRPVPPRLKVQISRELDRLENVLTQLEAVETERDALIEQASQDASAPAAMLTQLKGIGPELAAILWSEGLFRSFDNRRQVAAYAGLAPTPWQSGSVDREQGVSKASNPRLRSVI

SEQ ID NO: 186396 - protein, 452 aa, unidentified
MAHGSGLTRGDARRNREIAALRAVVRRDWAVLAIDLGEDKQVAVVMDHDNTVLARKVVRAKAHQLGSLLVWAGQHAGKHGFVGVTVACEPTGHRWKALMGLADGARMGFVCVQSLAVHRSREGDDYTRDKTDHRDSILIGRLVTRLECYLPERADERWARLRHLGARRFRLVAEQTAGAQQVADLLSCAWPAMLECAARPSESTTWLVCLGVVCARANGNPAKLRRLGWEGFLAAVRGQAPWWGAKRVSHMIVRRVFDALADDRGVCSQRRGALERVGLVLDDWRSTRTRLADVGERMLSVLDELGLSELVDSIPGLSAIGAAGILAETGDLTRFASARSVVKHAGLNPAENTSATLRGTSRISHRGRPRLRAVAWRAVWGALPHNPVLKARFVHLTGRDIGRLAAGQARAACAATLLRWLYAVVTTGRAWDARIATGTRPAGQARQLPAAA

SEQ ID NO: 186397 - protein, 416 aa, unidentified
MQVLYDRCAGLDVHRDTIVACARVGAGGGQKGIAYETRTFGTTTNELLALSDWLAGFGVTHVAMEATGVYWRPAWHVLEGDFELVLANAMHVKNVPGRKTDVSDAHWIADLVAHGLIRGSFVPPMPIQDLRMLTRTRKQLVRERASHVQRVDKILQDANIKLGSVITDIMGKSGRAILDAIVAGETDPDNLLVYIDRRVKSPRAKIREALRGTVSSNHRFLLKLHLDQADAVQVAIDAVDGEVGERLAPFRDAAERLTEIPGVSDIAAAAIVSEIGVDMSRFPTVGHLISWAGLCPGSDESAGKRRSNRLRKGAPWLKTLLVQSAWCAARAKGSYLQAQFVRLKARRGPRKAVMAVAASILTAVYYMLKDGTAYTDLGADHFVRGERVKTAQRLLRKLEALDFEVGEIRDRKATAA

SEQ ID NO: 186398 - protein, 315 aa, unidentified
MEQPPSSPCFIGIDVSKDRLDVHVQPIGRAFAVPRSGEGLEQLLTELRVLAPMLVVLEATGGFELTVAAALAGASLPLAVVNPRQIRDFARATGRLAKTDALDAQIIALFAERVRPEPRPVADTQALILAELVARRRQVVEMIGMESNRHRQARAPRVQLTIEATLKTLQAQLVDLDAEIDDSVRGSPVWRAADDLLTSVPGIGDITARTLIAELPELGRLDRRRIAALVGVAPVNRDSGQMRGHRAIAGGRTSVRNVLFMATLTAIRWNPVLKAHYHQLIARGCPKKVAIIACIRRLLGILNAIIRTASPWQTA

SEQ ID NO: 186399 - protein, 343 aa, unidentified
MQSIATIGLDIAKSVFQVHGVDAAGQVVLRRQLKRRYVLTFFEKLTPCLVGIEACASSHHWSRELQALGHSVRLMPPAYVKPYVKRQKNDMADAEAICEAVTRANMRFVPTKTPEQQSGLMLHRTRHLFMRQQISVINAIRGQLAEFGIVAPVGRRGVEELLRVVADPNDKRVSEVVRACLAALGSQLLSLKKQILDFDRIIMAWHRSNQTSKRLNCIPGVGPLLATALVASVADPKNFRSGRNFSAWIGLVPKQHSSGGRERLGSISKQGDRYLRSLFVAGALAVIRYAKIHGTKHRPWLTALLARRPTKVAAIALANKLARMAWAMMATGERYNYPASLKI

SEQ ID NO: 186400 - protein, 347 aa, unidentified
MDDYTHFVGIDVSKATLDVMLWHHHQGARRKTTLHLSNDTPGHHRLSQWLLEQGAPVETTVLCLEATGRYDDVLLENLTLWGWICALEKTTVLQKVKPDHHRKDDCYDADLLAEYAYRYQDKLSLYQASDPVIEQIRLLYGERRRLVRQRAAVKQLQGEQGYNRSRRPNQAEVFAQRLWQEQCTFYDRQIEALEAKMQTLVDSDSDIGHRYEQVKSIAGIGAMTALKWLCLFYGQQQLHARRIASRFGFAPHGDRSGTSRNRKSRSTGHGHSEMRKLFTMCARSAGQHHETYRQYKKRKLEEGKASQLVTNNMINKLIRVVCAVWNADTVFDPDHVSRFAQNAIHAP

SEQ ID NO: 186401 - protein, 345 aa, unidentified
MGPMYYIGLDVHKRKISYCVKDGSGRIHAEGSISATRLELDHWMRSLPQPWSAAMEATMFTGWIYDYLQPHAATLKVAHPLMLRAIAAAKKKNDRIDASKICDCLRCDFLPESHMASTAIRERRRTLRYRNLLVRQMVQMKIKISALLMEAGVSYNQQRLHKAGYFRELLATNPDIDEGLCSLLRLCRESVVRLGKTESALVRSLERDSLLVERVERLMTIPAVGPITALTWALEVGDVQRFSSIKKAISYCGLCGAEKSSGNTVQRTPLSKQRNKHLQTTLIEAAKMAPRNSPELAMLYDKEKQKGNANRATLAVARKLVAYLMAVDRGQRNFQRAETSSSIAA

SEQ ID NO: 186402 - protein, 351 aa, unidentified
MLLIGVDYHPSFQTIAFFDEETGECGEQELNHSDGHAEKFYRNLKQRGIRVRVGMEATGYSRWFERLLAELGFELWIGDPAEIKARRVKKQKTDRKDAQLLLRLMRENNFPQIWVPSPENRDLRQLLWHRHRLVQMRTRIMNQLQALAMNEGYRWKKKLFSEQGRAQLDKLALAPWASRRRQELLELLDRMTPTMEELTAAAEQEVKKRPEALRLMTHPGVGPLTALAYVLIIGTPERFHCGKQIGTYVGMIPSEDSSAHKQRLGHISKQGNSLLRFLLVEAAQAAARCNPQWRRRYIHLAMRRHKSIAKVAMGRKLGVRLYWMWRNECAYSPSFEFGSYVGQLATGHGLK

SEQ ID NO: 186403 - protein, 337 aa, unidentified
MNVTLIGLDLAKNIIQVCGVNRAGKTVFNRAIKRTELLTFLVQYPEVPIAMEACSGSNYWGRTLESRGYKVMLIPPQHVKPFVKGNKNDRNDAFAICEAARRPHLKFVRPRSLEQVDMLWVHRQRERLVGQRTQLINQLRGMLSEYGVVVAQGKERLRRELPFLIEEADNGLTYHARCYAQQMLEEWIELDRRIKMFDQDIREQCRLSEPASRLIEVKGIGKTIATAAVAFAGDAKHYSNSRQFAANLGVVPREHSSGGKQKLGGITKRGNRYLRRLLIQGAWSVIRHINSGEDRLTRWARNLVERVGKQKTAIALANKMARIIWALLTKGQRYRAI

SEQ ID NO: 186404 - protein, 374 aa, unidentified
MGIDQHRAQITAEWIDVATGEISRARVRPADRVGVRRFLERFAGEQLEVALEATTGWRFLVEELRAVGAVVHLAEPAETAALRGNKRRAKSDRADARHLRELLLAGRLPESWIPPDHILDLRAQVRLRHTLIEQHCQWQQRIQAVLYHHGCPQRRQLMVGDGRDWLDAQSLPETARQQITVAIAIVDALERELAPVTRELRFYARRQTGCKALIEAYYGIGELVAVTVVSELGDCRRFANSRDAVRYGGLGVTVYQSDRHRAPGHLSRQGPPALRWALYEAAQVARHPRSPDRAYYEQAAERLGGNRACLALARKLLKRCYHTLRELGDDALAAPVEQKARSGAGSAAVRPASSGSSSTTKPAATHERADALAA

SEQ ID NO: 186405 - protein, 387 aa, unidentified
MPQPNDLSRSPIALNQDGTVIAVVEMSRSSWLVAGIVPGIARQPLKKLAPDEAALLGLLERWRGEATQAGRLITRIVVAFEAGRDGFWLARWLRAHGIEAYVIHPTSVAVSREHRRAKTDRLDTALLKRVFLGWLRGETGHCTMAAIPTLEEEDARRPNRERESLVGERTRIVNRMKATLARLGIRGFKPTVRGASERLEALRTPEGAALPPNTRAELRRDMARLGFIVGQIKEIEDARQEGLATQPDQGPPAMVRLLARVIGIGIETADMLVHEILSRNLRDRRAVARYAGLTGASDESGSRRREKGLAKAGNARVRRGMVQLAWRFLLFQKDSALAQWYRARTADARSGTRKTMIVALARKLLIALWRFVATGEAPEGVVLRPAP

SEQ ID NO: 186406 - protein, 413 aa, unidentified
MAIDVVVQRAAGLDIAKASLVACVRVPGPRKGWTVHKRKFATTTKALLELLAWLTEHQVTRVGMESTSGYWKPVFYVLEAHVECWLLNAGHMKAVPGRKTDMADAEWIADLIAHGLVRPSFVPPPPIRRLRDLTRRRTLLLAERSREKQRMEKLLEDAGVKLSTVATDIFGASGRAMIIALIGGERDASVLADLARGAMRRKLPALQDALVGRFDDHHGFLATMILAHIDVIDAMIEEMDHRIATEIEPYQAQIELLATIHGIARRGTEVILAEIGPDMTRFATAAHLASWAGVCPGNNKTGGKAKPSRTRAGNKWLKAALGIAALSAIKMKNTYLHAQFRRIAARRGGKRAASAVAHTMLVTIWHVLTQHTPYQDPGADYFLNRDSLDRQRRRAIAQLQRLGYEVTIQPSTA

SEQ ID NO: 186407 - protein, 343 aa, unidentified
MEQVCTVGLDIAKNVFQVDGVDESGAVVLRRQVRRRQVLALFEKLPRCLVGIEACATAHYWAREIEALGHEVRLMPARYVKPYVKRNKNDAADAEAICEAVTRPTMRFVPVKTPEQQSLQMLHRSRRLLVHHRIRLINAIRAHLAEFGIVAGVGRNGVTALLELIAKGEDERVPALAGDCLTVLAAQLDLVTRQILEADQRILAWHRSNKLSQRLAAIPGVGPLIASALVAAIPDPKVFRSGPDLSAWIGLVPKQNSTGGKERLGSISKAGDRYLRQLLVIGAMAVIKRAKILGHTRHPWLVPLMQRRTVKIAAVALANKIARIVWAMMIRNEPYRAAQPASA

SEQ ID NO: 186408 - protein, 436 aa, unidentified
MRKIRRNAAGIDIGAKKVFVYVEGQKVKVFFTFTEDFELLCMYWHEHKIESVAMEATGVYWSILYEMIEEAGIDAWLVDGRQTKQVPGRKTDIKDCQWIQELHSLGLLNRCFVAKDDVKEVRAYHRLREDHIRSSSMHINHMQKALTEMNIRLKEVLSQIHGASGIKMIEAILKGERNKNLLLSMCNSQIKKNKKEEVLKALNGRYTKPGLFALQQAFEAYNFYQNQISQCDKQIERIIHKMGKGSKNENLLEKRKPIRHNKPEVKDLGANLIDIFEGKDATVISGITDYTWMQLLSEVGTDLSRWPTQKHFTNWLGLAPGQHWSGKMKRNKRKKGHPKAGQIFRKIGQSLITSKKIALGAFGRKLRARKGPAIAIKAMARKLAELYWRVMVKGIDYAEYGIKKYEEQLLAQKQKSVERLAKELNLQLSYMQPHTE

SEQ ID NO: 186409 - protein, 369 aa, unidentified
MKQLITYIGLDVHKETMAVALAEAGKRNEVREYGKIANTPAAVKALVAKLARDGYELRFCYEAGPCGYGIQRRLTVLGHDCIVVAPSLIPRRPGDRIKTDRRDAINLAKLHRAGELTPVWVPDEAHEAIRDLVRARLAAVRTLRQARQQLSGFLLRHGHHYNRPAWTLMHRRWLTGLRFEHAVHHIVLEDCIAAVEAATARRDRLEAHIAAALPDWSLAMVVHALQALRGMALVAAATLVAELGDITRFANPRQLMAYLGLVPSEHSSGGTRRQGGITKAGNSAARRMLIEAAWSYRFPARISREQLLRQEGLAKPIRDTAWKAQERLCRRYRKLARAGKPPTVVTAAIARELAGFVWAIARQAQPIGA

SEQ ID NO: 186410 - protein, 335 aa, unidentified
MRYIGLDVHYSSSTYCILEQNGQEVTCETIRGHWPKLLDRLRTVERPWTICFEATCGYGYLYRELSTMAARVAVAHPGQLRLIFRAKRKNDRIDARKLAKLLYLGEVPEAYVPGQDVQSWRELIEHRRRMVDRQTTCKNAIRSLLRSHGKIAPKGLWTKKGLKWFQEEPMPTQAACLKRDLLVEELTESKRRVRTVTQALNEIGRSHPAVILLRTIPGVGIRTGETIAAYMDNPRRFVRSSQVGAYFGLVPCQDASAGVNRLGHITRQGPATARKYLVEAAWQGVYRSPTIRAYFERVLHDRPERRKIALVATAHYLLRCMHAILISGKPWHEAA

SEQ ID NO: 186411 - protein, 366 aa, unidentified
MEVNTIAIDLAKNVFAVCGADAAGRVIWRKELRRAQLLGFMRKMAPCLIGMEACGGAHYWARQLISLGHQVRLVSPVLVTPYRKGNKTDRNDAEAILEAVTRPSMRFVAIKSLAQQDLLALHRVRSQLLKSRTALCNQLRGLLRERGVAVRAGVMALKRALPTILAEENIEISGEVRVLLSEMGEWLRTLELRIASCDEKLARQFKTDERCKRLAQVPGVGPLAATALVAAVGNAHEFRNGRELSAFLGLVPRQHSSGGKRVLLGITKRGDRYLRTLLVHGARASLRWSVSKTDPYSRWATRIRLERGPNVAAVAMANKNARILWALLNRGDRFRFDKSQHRAVSRSGSPTSIERARAAKLRLAQG

SEQ ID NO: 186412 - protein, 315 aa, unidentified
MSDMPCFVGIDVAKAQLDIALRPSGERWAVPNDTSGVTTLVERMQTLQPTLIVLEATGGLERLVTSAFATAGLPVVVVNPRQARDFARATGQLAKTDALDARALAHFADVIRPTPRPLPDAQTQELRALLGRRQQLIGMRTAEQNRLAGTNARLAKDIEVHITWLNTAIATLDNDLETTLRASPLWRENDDLLQSAKGIGPVCARTLLLELPELGTLTRQQIAALVGVAPLNCDSGTLRGRRMIWGGRAHVRTVLYMGTLVATRYNPQIKAFYERLLAAGKVKKVALTACMHKLLTILNAMLKHRTPWQPQEVQN

SEQ ID NO: 186413 - protein, 347 aa, unidentified
MTIVNTDRHAVTGGVDTHLDVHVAAALDEIGGLLGVESFEASRAGNDKLLGWLQSFGPVARVGVEGTGSYGAGLARLLRTAGVEVVEVDRPNRQARRRTGKSDPADAIEAARAALSGRAQGAGKTRDGNVEAIRVLVVAKRSARSSKIKALNQIRHLGFTASDELRERFSGISRQHLGAAAAGLRPRAGSDPVTFATKTALATLGRRVLALDGEKQRLDVLLAELVAGTAPALLNLHGVGVDTAATLLVAAGDNPSRLRGEAAWAHLCGVAPLEASSGKVTRHRLNRGGDRQANSALWGIVITRLRSDPRTQTYMERRLKEGRSKPEIIRVLKRYVAREVYRHLPRH

SEQ ID NO: 186414 - protein, 337 aa, unidentified
MNYAGIDLHKETITVCVMNQERKIVVEKKLRCCDEERILSFFISLGEYEAVVEATASYEWLVRLLEKGASRFVLAHPKKLRVIAESVKKSDKLDARILAEFLALDMIPKARRPTPRQRDHRVLVRHRAKTKGRACSVKCRIRNMLANYNADRKDLFSGEGRKYLRQFGLSSEDRFTMNLMLKELEFFEEQLEAINARLKEFAKKGPLREKEARAILKTIPGVGEVTMNVVLAEAGDLSRFNSAKKLVDYAGLSPGVRSSAGKTRQLGITKEGSPLMRWVLVEAAWVAVRTSSRWRRVFERIAKRRGKKKAIVAVARHILCVMHSTIKSGQKYNVAAA

SEQ ID NO: 186415 - protein, 349 aa, unidentified
MRFYNQTHRFYCGVDLHARTISLCVLDASGAVVREATIDAAPAAVLDALAPFRDGLVVGCECMFAWYWLADLCAAEGIAFVLGHALYLKLIHGGKAKNDTIDAHKLATLLRGGAFPQAYVYPKGMRETRDLLRRRTFLVLKRSHFLAHLVNTNSQYNLPPLSQKLCYARNRAELDLPSRFEDSSVRKNVETDLALVDAIDAQVRDLELYLTRSAKVDDPQAYQRLRSVPGVGPVLALVFLYEIHDVKRFAEVGQFLSYARLVRCQHESAGKIKGSGGRRIGNAHLRWAFGEAACLLLRESAAAKKWLARKERKSGKGRALGALAAKLGRAVYHLLRKSEAFDAKRFFAS

SEQ ID NO: 186416 - protein, 349 aa, unidentified
MTVYVAVDFHAREQTVSYCDLADGEIHRRKLRHQHDDVRAFYQQFTGAVIVAFEASGYSAWFEQMLAELGHTVWLGNPAEIRRKAPRRQKNDRRDADLMLDLLLKGDFPRVYGFSEESRTVLRQLRYRHKLVKVRTIAKNSLHAIGINAGLPLKRRLLTEPGIAQLQALSLSPVLTQQRDEWLQLIALMNERIATVEAQLQQRAKDDAAIALLRTHPGIGLLTSLALRYTLLPTARFSTTRQVTAYVGLDCMEEQSAERRRMGSISKAGSKLLRFLLNEAGHTAARHDPELKKFYRRLLHRRDKPKAKVAVARKLLVRSFIMLRDQIDYAEFVRRGVAARVAREAHSLP

SEQ ID NO: 186417 - protein, 412 aa, unidentified
MHHDASSFRYFAGIDMSKKQFDVSTMDTTDQFHGHQVFQNGPKGFTALLKWISTNNWSPVLFGMESTGYYGVALAKYLYGKGQAVTVCHAGYVYHFRKSRGWEQKTDYTDSMVIGMYLNHTGGFAYKPPSPTMEQLRHLVSCRRRVVQQAVSTGLFNQSSTSAIKSSALADYERYQRNTIKSLNKQILDLISQDELLKQQVALLCTIPGIGRLTACTFLVYSGDVSQYRKPGSLVSMFGLNPCPQESGQKIGKAHMSKRGNSHMRALLYNCAGAVIRMSNRPNPKISQAFLKFITRRSANGQHKYNYVACAVMRKLVILMRAILLSGKPYDINHGVVSVAPDNSQGDETDTSTTAPQAQSHSDTSTTVVDSTVCCADERDEHRGDAISGCLADALQGSNTPDIVIPLVNTPA

SEQ ID NO: 186418 - protein, 491 aa, unidentified
MSFFSKTTRATDGPRWFGIDLAKRESQVAVLDAGGVQIETKRFATTRECFLLIAAELREGDTAALEVTTNSTSIARLLRGNSQARVIVSNPIKTKTIAQAKIKTDKIDARVLAELARVGYLPEVWLPDEDTEALRQFITDRVSLVRRRTECKNTIHSVLHRNMVHQERSDLFGASGRKWLENIVRGEGIKTPVPELDRMRIGSLLNEIDRIDALVADLESVIASYVALRPHLKEQMDRLLSITGVNLVVASSLIGTIGDIGRFPDKKKLAAYFGVVPSTYQSGDTSRNGRITKQGRAEARWLIIEAAEILRRSPGPMRALYSRIQRKRNHNVAVVAVARKLVELVHHLLSNKEDYVYKLPRLTMEKRSRWRFLAKKKLGIEIKSAAAKRSGRSALYGTGIDVQGRKLKSQIAKQAAADAERLYTAIVDQRKRHLDDPSSPLIPSTDLLFDPTSPTETDWERILSQHTEKLLLRFQKRETKRSKSTSPPDIA

SEQ ID NO: 186419 - protein, 342 aa, unidentified
MDHSAGLDVSVKETSICVVDDTGRIVREVKVASEPEALLQVLKSPAYHFKRIGLEAGPMSQWLYSAMAEAGLPVICVETRHMRAVLKAQINKTDRNDARGIAQMMRAGLYRPVHVKTLRSQKLRMLLTHRKLLQSKAIAIDNDLRGTLRNFGLKVGIVGAVKFEARIKELVENIPDLAVLVEPLLIVRRVLREQFVIQHRRLLAIVRDDEVCRRLMTTPGVGPVVALTYRATVDVPARFQKSKAVGAVFGLTCAKYQSGEVEWSGRISRCGDEMMRVMLYEAAQSMLRSKKWSWLKAWAMQIARRRGMKKAIVALARRLAVIMHRIWVDGTEFQWTREAAAA

SEQ ID NO: 186420 - protein, 464 aa, unidentified
MAQGRQATARQTASRKKRSAAGQITEKHKDSEGTGSYRRVATSSVGDDDGGMPSETADWRKKRQSRIRKEPIVGQGNTSVELTAGNRLSGHVQVGVTFVGMDVHKSSISVAMLLPGREVSIQWQTANEPGAVKRMLRKIEREAGGEVRCCYEAGACGYTLQRQITQWSDSSCMVVAPSLIPRKPGERIKTDRRDARKLAELFRAGLLTEVQPPNEADEAARDLSRAREDAREDQMRSRQRLSKMLLRRGLIFSKNQKAWTKAHRRWLEGLRFDSPVDKAIFNDYLLAIDQVTERLKILGAMLEELSKQEPYAEAVAALRCYRGIDTVTAMTIVVELHTFGRFTSPRELMAFLGLVPSEYSSSERIRRGGITKAGNGHVRRVLIESSWHYRHRPNPNALKKRRKDQPAWVIAQADRAMQRLHYKWTRMNNAKKPGPKIAAAIARELTGFIWATLSPLAEKKASAA

SEQ ID NO: 186421 - protein, 345 aa, unidentified
MEFFAGIDLGKRKSQIKVLNQDRKVVEELKIENDPKEFFRIFKKYKGKIDVACEASSNAFWVWDTLAPIVRRFSVGHTSKIRWIAEARIKTDKIDAGILAELLRADLFPAIAIPPRRIRELRELIRGIIRMRRQGLRYRNQVHGLLGRHGIPYKRSEVKDEKLGELVRSVELAKPARLAADALLRLEAATRVEIRQLQVELQKELKGEEEINRQIALLESIPGVGFFSAALLVLELWDVTRFSDAKHLASYIGFVPGTHQTGETLWHGGMTKQGNVLVRWILVQDTWIAIHNHWFFGGLYERYKKRKGNTRAVVPVARALLKTIHRVWTEQKSYEEIYKEKALVG

SEQ ID NO: 186422 - protein, 295 aa, unidentified
MRPSGERWAVSNDADGVVTLVERLQPLHPTLIVLEATGGLERVATAALATAGLPGVVVNPRQARDFARATGQLAKTDALDARALAHFADVIRPTPRPLPDAQTQELRALLGRRQQLIGMRTAEQNRLAGTSGRLRQDIEAHIAWLNARIATLDDDLETMLRASPLWRANDDLLQSVPGIGGGCARALLLELPELGTLTRRQIAALVGVAPLNCDSGTLRGRRTIWGGRAHVRTVLYMGTLVATRFNPQIKAFYQRLLAAGKIKKVALTACMHKLLTILNAMLKHRTSWKAQDVQN

SEQ ID NO: 186423 - protein, 451 aa, unidentified
MPQPILAVGVDPAKRLHRAVAVLFPDEVVLDVELPNAFDAVANLDHRLCELANQHGADLVYGREDHRRYGRLFCQVLTERGRDVRVVNPLWTNRQRAFYGQDKDDAIDGRSIAAVVLRRHHQLPLASDFGEVAQAIREAERSLQDLSEARTQLGNRLHLQLSDTYTAAYEEYFGKLRSPLALRFFRRFPLPQELVGHNVEMLASLLLDLAGGKVGPPKGGNRLIAMRSKAQAILETSGAMRALPRTLALELKAELIRQLCDELLANHDRTLRLERMLREQLLPATKQTITTITGISTILAATIIGETGSITRFRSPAAFAVYNGTAPARNSTGGRDRHKPRRDCNHRLKRAFYLAARAAVLHDPLAKAYHQSCKSRGLSYVEALKRVARRMSDLVYALLKSGKAYDRSIIEHAIERRREQAAHATRSHAKQSLVHSRPRKSNSPLSQQQVM

SEQ ID NO: 186424 - protein, 323 aa, unidentified
MSQPNLQCMGIDVAKLSLDIATTDTIEPFTVGNDEDGFAVITDKLKHTKINLILMEATGGLEAAIACKLQSEGYDVVVINPRQARDFARSMGYLAKTDKLDAAMLAQLALVIDRHPDRSRYIRHLPDEARAVLATMVIRRRQLNHMLVAERNRLYPSHPQSRKSIDNIIDALQNELDRINEQMKQHMTAFFQEQARLIGSVKGVGDITVASLIAELPEQGKLNRREISALTGVAPLNRDSGKMRGKRTTFGGRAGVRATLNMAALVATQFNPAIKLFYQRLLAAGKPKKLALVACMRKLITILNTMLRKGEEWNASFQSQVIS

SEQ ID NO: 186425 - protein, 312 aa, unidentified
MGGREVYVGVDVSKERLDVAVRPSGEFFSEANDKRAVSRLVKRLKALNCTRVVVEATGGYETLVVAALCAAGVPVVVVNPRWVRDFAKSIGWLEKTDHIDAKLLALCAERAELKVQQLPDEATRQLRELCARRMDLLEMIDAERNRLEHASSAVRREITSHIDYLRKRLKRIERDIDGAVSGSELWRHKDQLLDSVPGVGPTLRASALAWLPELGQLNRGEAGKLVGIAPLPDDSGKTRGHRRIAGGRGPLRKVLFMATMGAMLHNPHLRAYYDHLRAKGKLHKVALVATMRKLLLILNTIIKPIRHGVSHA

SEQ ID NO: 186426 - protein, 389 aa, unidentified
MSSQSSRARAAACSIIYVGMDVHKDSITIAVLPSGAKTPTRLERLPNDLAKLKRFLDRLARDGELRACYEASGAGYVLHRAMRAWGYACEVIAPSLIPKRPGVQRKHDQRDASDLARLYRAGELTAVRIPSVAEERVRDVVRCRETFQREILKSRHYILKFLARRGFVYREGTNWCTPHLKWLQHLTTEHSPLAPADRLVFREYHALLQYKLQRRDDLDREIERLAELPTLAPMVQRLQCFRGIALQGAMVLATEIVDWRRFERPTQLAAYLGLVSREHSSGDRERKGPITKAGNSHCRHVLVQAAWSYHHRPAVSADLKRRQTGQPPAVIAHAWKAQQRLHQRYNHLSYRKQRQIAVVAVARELVGFLWAVMQDCSDGSSRTNTEAAA

SEQ ID NO: 186427 - protein, 415 aa, unidentified
MQIVYSRCCGVDVHKNSVTACVLVTDADGSRQVRVKQFDAHAAGLHRLLLWLYGCKVTHVAMESTGVYWKPVWNALEKHFQLILANPYQVKCIPTEKTDPGNAEWLADLLAHGLIRPSFVPPPEIRQWRDLTRHRVKLIQDRTRVHNRIHKVLEDASIKLDMVASDILGASGRAIIEGIIAGEERPDWLADKAQSTLRKKRNQLRLVLRGRVTEHHRWMLRRLLEELKFLENEISCLEQRLAVAMQTYEPLVSRLCTIPGVNVITAWTLLAELGPDMSVFADAQHAASWAGLCPSNRESAGKQLSHSTRPGNRWIRRAMCQSAWAVSHKKDCYLTAFFYRKARAGVRQATVATAHKILIVAFEILRQGTTYRELGGDHFDQLHPERARNRLTRRLERLGWDVALTPKPIPPAPEL

SEQ ID NO: 186428 - protein, 340 aa, unidentified
MPKYIRIGVDIAKNSFQVHALESEDCSATKRKLSRSGIVKFLAEVEPCAIGMEACGSAHYWARRFRAMGHEVKLTPPIYVKPYVKRGKNDAADAAAICEAMSRPNMRFVAVKSEDQQATLMAHKTRKLLIKQRTMSVNALRGHLAEFGVIAAKGISHVEELVERAAAADLPAMVQATLGVLLAQLRSLDAATDELERAIVANHRRDPVSRLAASVPGVGALAASAILASAPDPQAFKSGRDFAAWLGATPKQNSTGGKEKFGSITKQGNRYIRRLLVLGAISVLRAAPKRKGALCDWLAALRARKPAKVVAVALANKLARIVWAIITTGEAFRTSIYAKA

SEQ ID NO: 186429 - protein, 492 aa, unidentified
MAVKSSSKNRRKAQPHALHKPRGVIHPRVQAVGPEHFALVCVDCAKARSKMMVADFYGRVLLEPTTVEHNQSHFDTALKSVRDAMARHHIQDTIVVIERTGRYHGPVQRAFGAAGFEVCIVHPFTTKQYRLPADPGNKTDDTDLSAIHRAAVNGFGLLEHEPDPVSVQLQLLARHRRDLVRQRVALQQKMLEHLQSFMPGYSRCVEDVFGSPVVLWVARKLGSAAAIVQADLAGLSQQVRQAGIKVHRSTLEKIVAWARSAPPAEEPASLHHRIFLGLDADQLRKAQSIQAIESELAGLLAQTPYLLLLSIVGINVVSAAEFAGEMGPIARYPKARAITGRAGLFPARYQSDQVDRRDGALVRHANHDLRYAILMIADNLIKCNDHFKVLAAGWRLKGKDARGVRVQVAGRFSRIAYQMVAGRMTFQHPCARQRDSILEKLIRFALEEELARVQKPRGAGPHPLAEILPAVLARLGVNLVRSPESGEADPTG

SEQ ID NO: 186430 - protein, 338 aa, unidentified
MKLYGGIDLHSNNCVVALLDEADRVVYEKRLPNDLGSILREVEPHRAELQGLVVESTFNWYWLVDGLQGAGYPVHLANTAGIQPYSGLKYTDDHSDARWLAQLLRLGVLPEGYIYPPAGRAVRDLLRKRSQLVRQKVTQLLSLENLYSRHTGSRPSANQLRLLTVAAVEEQFGDTMIAQAIKSSLTVMHCLEKEIEQLEQIVKAQVKLQPAFKPLLTVAGIGPILGLTIMLETGAIQRFPKVGNFASYCRCVDSQHLSNGKRKGQGNTKNGNKYLAWAFVEAANFAIRYHESVQRFYQRKCAKTSPVVARKAVAHKLARACYYVLRDQAPFDMKRAFG

SEQ ID NO: 186431 - protein, 367 aa, unidentified
MKNTIVHHEGAASLKVAVNKIGLCGSIIKIGLDVHARLYVAVAQYDQLLPKPARRLAPLEFVPWVEQLLRAGHTVHVVYEACGFGFGLYRELKALGVHCYVIAPRKLDEGCTRVKTDPRDATTLCQRLSRYLEGNTRELAVIRVPTEAEEQARHVSRQREQLVRHRQKLEAQGRSLLINHSLPSPAHWWKNQTWSRLSKLLPAWICVRLKVHRPALLTLEQQISALSAELEAAAPADVPAGVGKLTTVVMTREICSWERFRNRRAISSYTGLCPGEHSSGTKRVPGSVTKHGNPRLRAALVECAWRMVRFQPQYPPVKKRLSVLAKGARATGGQRKKAIVAVARHLAVDLWRLHTGRNTAAQLGLTI

SEQ ID NO: 186432 - protein, 342 aa, unidentified
MEYYAGIDVSLEYSSRCVVDGTGKIVREAKAASEPAALIAWFGSLGLGLTRIGLEAGPLSQWLYLAMKQAGLAVELLETRHVRDAFKAMLVKSDRNDARGIAQLIRLGWFRPVHCKSMDAQEVRAVLTARKLVQTKLLDVENSLRGILRGFGLKVGKTTDRSFATRIQELVKGHPNLEAIGEALLSVRAVLLREFNAFEKRVRAMSRLNARAKLLMSTPSVGPIVALTYASAIDDPARFKSSKQAGPHFGLTPKKYQSGETDYSGRISKIGDAAVREALYQAAHVMLTRPIKGCSELKSWAMRIARRAGMSKAKVALARKLAVILHRMLANATPFNAAAAAA

SEQ ID NO: 186433 - protein, 342 aa, unidentified
MEKHTTIAVDLSKTVFEIAVSDYPGRVCERRRLTRGQMVRFFANRPPATVLLEACGSAHHWARTLQQLGHSVRLLPVHHIRRYVLRDKTDAADAFALLEANRNEQILPVPVKTVAQQSLAALHRIRSGWMQTRTARLNALRGILRELGISIPKGARHVLPALKASLSDPDNPLPLSLHPTLLAVAAEIRAFEEKIKDLERQLTAAARSCPSATRHLSIPGIGLLTATALFAFVGDLSRFRSGRRFASSLGIVPREHSSGLRQHLGAITKRGDPYLRTLLIHGARSVLLAASRAKHPDRLQTWALRLQNRRGHNRTAVALANKLARIVWAVSTHQTEYRSTAA

SEQ ID NO: 186434 - protein, 323 aa, unidentified
MATAATDGEVFVGIDVAQDELVAAIRPGDGVTRWPNDEAGHEGLARHLRDRHPALVVLEATGGLEQAASAALAEAGLPVVIANPKQVRDFARGVGKLAKTDPIDAAILARFGEVVRPAPRPAAGEAGRALRALVARRRQVRDRRVADQQRRLRADPAVRPFLDRAIAAATEELAELDAAIAARLAADPSWRATRTVLESVPGVGPVVAATLVAELPELGTLGAKQVAALAGLAPRTRESGKSRGAASIGGGRRGVRCALYLAAVTGIRWNPTIRAFYEHLLASHKPKKLALVAAARKLLGILNAMVRDGTLWDPPARESAPTP

SEQ ID NO: 186435 - protein, 366 aa, unidentified
MKKISTMQVFGNEIFKEQKLTIGLDLGDRWSFYCILDEAGKIILEQKLPTTPEAMKQTFGKIPRSLIAMETGTHSPWVSRLLTELGHEVLVAHAQKVELITKSNRKDDRHDARTLARLARIDRELLGPVRHRSAKAQIHLTVIRARAELVSARTALVNAARGLVKSYGQRLPKRGTYQVSRELATGLSAELRDVLGPLLKEVESLNERIQEYDERMEKIAKEEYPEVSLLKQVKGVGTQISLTYVLTIEDPYRFPKSRAVGCFLGLRPGRRNSGESEPQKGISKEGDRYLRTMMVQGAHYILGPFGEDSDLRRWGLKLAERGGKNAKKRAVVAVARKLAVLLHRLWVSGEVYEPLRNSQKAMRAVA

SEQ ID NO: 186436 - protein, 334 aa, unidentified
MLAAIDIHKAVFQAAVLDPGDGEIVEERFKASREALLAWARTWDGRLDAVAVEATTGWRWVARELQALGIEVLLTDPGQASALQGNRKKAKTDRLDARWLVTLLAREMLPESWLAPEEIQRLRDKTRLRKALTDDHTRWAQRLHAVLVHEGWGCSRGSLLTVSGRRWVAALRLDPGARAQIDAMLSVMGALAEQIDLIDCELRRLAKSDERLKALQRIFGIGPILAATILAEIGDAKRFRRSRQVVRAAGLDPVVRDSADTQRRGHLAKQGAPCLRWALVEAAQHACRKNSPDHELYVRTRGHAGANPATLTVARKIGKRAFHLLREIEAQATA

SEQ ID NO: 186437 - protein, 404 aa, unidentified
MLYAGIDWADQKHDGLVLDEGGRKLGSIRVSHTKEGLDKLDTWLSSLLGGQSKEQMACIIETNHGLLISFLLEHGWPVYPINPRTVDRKRPASGAKTDAIDAYLLAKTGRADFTDLHRLIPDSEKVAELKGLTRDQDSLIQMQTRLVNQLTACLKAYYPVALDLFAKLQQRSALVFLQTYPTLEAAQTASVEQIHHVLASAGHTSASKVAPNIFEQLHQPSLRADAVTTRTKSRLAVALIVQLLPLVEQIAAYDKEIEQLFLSHEDNEVFSSLPRAGKRLAPRLLAEIGDDPARYETAASLQALGGTCPVLFQSGNYSKPHRRLGCIKPLRNALHQFAWQSTLQEEWASVYYERKRAEGKSHSVAVRALSNIWARIIFAMLTSHTPYDRTTFEAARQRHACKAA

SEQ ID NO: 186438 - protein, 355 aa, unidentified
MTSAKYIGMDVHKESISIAVRNSVGKVVMECVIETKASMILQFIDGLRGDLQVTFEEGTSAAWLYDLLKPHVTKLVVCDPRKNKSMREGNQNDKIDARRLAELLRLDHLTPVYHGEHGLRTLKELVRSYLTITKDLSRVMTRVKAIYRSWAIPCTGKQVYARCHRAEWLAKISEPGVRRRAEFYYQQLDALRVLRQEARRDLLTESKKHKAWKRLCEIPAIGPIRAAVLLGILQTPHRFRTKRPLWNYGGLAIEMHSSADHHSVHGQLQRSRKNVLVRGLNRNCNHDLKNLFKGAAAVASSKPGPFQEFYTALVAKGMRPEMARLTLARKIATIVLIVWKRGVHFDAQYLKPQTA

SEQ ID NO: 186439 - protein, 456 aa, unidentified
MPSTEKQCKSRNLSHGKWIGLRSLAGRKTNAHKVRLPAGFVETKQRNGGDSIYNKRKMAFIGIDMHKDTHTAVVMDCWTNKLGEITFANRPSAYDKFMADVKKLYGDLQPIFGLEDTRGFGRNFASYLLGHKYTVKHVNPAYTDAMRSSAPMSRKDDSYDAFCVARILRDMLDTLPDEQHDDLFWTIRQLVKRRDSLIKGIIIAKNQLNAQLTYVYPSYKQYFCDVDTKTAMYFWEKYPHPKHLKDVQPEALLEELRQLHRGMTVKKVQEIISLSERNSPEEKDYQNERDLVIRSLVRELKFRKQENEDIDRELERLIQLTGYKLHTMPGINLITAAGIISEIGNIKRFPNSDKLARFSGVAPVNFSSAGKGKDQRSRQGNRVLNAIFHFLAIQLVQVNPNGKARHPVFREYFESKLKEGKTKPQALVCITRRAVRIIYGMMRTKTEYKPFEKLAD

SEQ ID NO: 186440 - protein, 331 aa, unidentified
MELHTIGIDLGKTVFHLVGVNLRGEVVVRKKFSRKQLLHFTANLQVELIGMEACGGAHFLGRALREQGHEVRLMPAQYVKPYVKTNKSDYIDAEAIAEAVGRPKMRFVPIKSDDQLDLQSLHRVRERWVMRRTAVINQIRGLLLERGITLRKGRCHVDAALPGILEDAGAKLSGALRVLLAQLKLELDHLQVRIDEADTVIKKTAGENEACRRLVAIPGIGPITATAIIAAIGNGAAFKKGREFAAWLGIVPGEYTTGGKQKLLGISKRGNSYLRRLFVHGARAVLQQSAKQSSGLSAWLAQLTTRTHSNVAAVALANKLARMAWAVLAKN

SEQ ID NO: 186441 - protein, 327 aa, unidentified
MDIEGKKSEGNAEVHFGQVVSRGCGLDVHKKVIVATIDGTGLRKETREFQATTSSLTELRDWLLGNGVTHVAMESTGVYWKPVYNVLEPSGMTVWIVNAAHIKYVPGHKTDKKDSAWICKLLLAGLLKPSYIPPKEQRNLRDLTRYRVKLVQNVASNKNRIIRILEDANIKLSSVLSDTSGVVGTKLIDKLCETHKVTMEDIESVYHGKLGASKAELYEACQGFFDGHHVYMLELIRKEIRSTQESIDELNKKIMEVLTPYGNSLELLRKVPGISTKSAEDLIAEIGLDMSVFPTEKHIASWAGMCPGNNESAGKKKADGPPRATSR

SEQ ID NO: 186442 - protein, 347 aa, unidentified
MERTTIGLDIAKRVFQAHAVDRESGEVTRTKLGRAELLQHFAQMQPSLVAMEACGAAQHWAREFRKLGHEVKLIAPQFVRPFVKTNKNDAADAQAIWTAAQQPEMRAVAVKTEEQQAVLALHAIRERLKKARAAAINQLHGLMGEFGIELPRGWRTMLAKAVAALDQADSAVPALLQPQLHRQLAEVRSLTEQMAEVERQIASWKRGQEECERIAAIPGVGLLTATAAVATMGEARTFRSGRQFAAYLGLVPRQTGTGGRVQLLGISKRGDTYLRTLLIHGARSVLAHRQAAADPNSWLGRLLQRRPKNVAAVALANKMARQIWAIVAHERTYEPNYGLPQVTATPA

SEQ ID NO: 186443 - protein, 331 aa, unidentified
MRQIYGIDLSKEKFDVNYIDQADQKQHCVIKNDLKNISEFLESLPDDSHLVAEHTGVYGDLLLFLSNQMNISISLCSGYSIKHSLGLRKGKTDKIDAARIREYGERFYDTLKPSTINSELMAELQELYSLRRQLVKEKKMLLTKQKGVTRLATRSIYAKNVYTRILDQLTREINDIELQIQKIIRSDNEFSRNFDLVTSIKGIGPITACELLIKTANFKRFSTAKKAASYAGICPFPNTSGQMVKKARVSPMSDKSLKSLLFMCAKSAVAHNKEYRLYYQKKQLEGKPHYLIMTNVANKLLRTVYKVIETKTPWDPNYICLDPREMKNKVA

SEQ ID NO: 186444 - protein, 415 aa, unidentified
MAMKKNFILFDQVVERGAGMDVHKETIVVTIQGKGIKTETKSFRTFTSSLKKLREWLKQHGITHLAMESTGVYWKPVFNVLGDDFMIILVNARHVKNVPGHKTDKQDSKWLAKLLLSGLLKGSFIPGKEIRDLRDLVRTKTQLTGEISSAKNRFIKFMESANIKLSSVLTDVFCVTGQKIIAEILDGDYKPERLLYHVHGRVKASRQDIIEALTGNLDEHYRFMMKIMLEHIANIENVIAKIDAQIMQKTEDHKEILELLETIPGVGRDGAICIVAEIGTNMEAFASHKHLASWAGMCPGNNESAGKNKSGRITYGNAFLRTFLVQMAWAAARTKNTYLSSKYKSLVGRRGKKKAVIAVGHKILIAAYFIMKNKVGYNELGEEYLNNFRRDKLINYYKNQLQKLDPNVNFDKEVA

SEQ ID NO: 186445 - protein, 397 aa, unidentified
MYIVGIDIAKRKHEAAVIDGEGTVIIKPFSFTNNCSGYNRLLAMLTKAKLPLDEVSFAMEATGHYWLALFTRLQKEGFRVQVINPVQTNSIRSFYIRQAKTDPRDALLIAEVIRFGHFSESTLHPENIYELRELCRGRHAIVSMQADVKRKVIALLDQVFPEYETAFTNMFSDTSMTILQTCPTPKELSEMPLEELCHLIEVSSHKRFRMAKARELQELARNSFGFAMAGDVFSTMIRLYAKHLDFLKQQVREMDRKIAEIMETLDTPITTITGIGPTLGAYILSEIGDISRFSSAAKLAAYAGIDPTMRQSGEYNGVRNRMSKRGSPYLRHAIWLATSSAVLHDPALKLYFQKKRDEGKPYMASVGHACRKMVSIIYAVMRDNKAYTPYIPNEISA

SEQ ID NO: 186446 - protein, 347 aa, unidentified
MIIIGCDLHTRFQQITMLDTGTGEVVEKRLEHENGEARRFYQGLEPPALVGIESTGYSLWFAEMLSELGHELAVGDAAKIRASETRKQKHDRRDAWHVLELLSEGRFPRLWLPSVEEREVRVLLEHRHQLVQMRTRAKNGLQAIALNYGLRRRRRLWTEAGLKQLEGLPVGEGTGRRRGDLLRLLHQLDGWVQELEARIKAEVERRPEAQRLMTHPGVGPLTALATVLILGEVERFAETRQVTSYVGLIPAEESSGGRQRFGHLTKQGSRLLRFLLVEASQSASREDPGLSRTYKRLTFRKGKSIAKVAVARKLIIRLYIMLRDKIDYAEFCRRGSHAGMLGDVALA

SEQ ID NO: 186447 - protein, 381 aa, unidentified
MRQVCGLDVHKDSVFVCILNENGIIFQEKFGVLTPELEQLASVLQDHDVGEVCMESTSIYWMPVWRVLEPYVAELKLVNPYFIKQLPGKKSDVKDAEWIATCLLKDLIKGSYVPADIIQQLRQYDRRIFDLNAECVRKLCKLDAALQRCNIRISNYVSTTDGKGYKEVVRLISEGVTDPEVLIKAIHGRTINRAGRDVILASLTGVISGADVDIIRQLREEIDLAQRHRDECQSRMDAICQQHFPEQLKNLQTIPGIKGRSATAIIAEVGTDVSSFQDAAHLVSWCGLKPRNEESAGKIKARSITHGNRFLRKTLIECAWAAAKTQGCFLNKFSYYQTVVRKKNKMKVQVAIARKILTAVWYVMHDNVAYRDYTPDIAPAG

SEQ ID NO: 186448 - protein, 375 aa, unidentified
MSKANTLFIGLDVHKETTDVALVSDRLTDAVQYYGTLPTNLRSFDKLIKNQSSKASKLCVVYEAGPCGFWLYRHLLRRGIDCWVIAPALIPKAPGDRVKTDKRDSMTLARLARSGDLKPIYVPDERDEAIRDLIRCREDAMLDLRQARQRLKSFLLRHGHPCSGRQNWTEAYRRHLADISFQESATKLTFQHYVNIVTERHERLQRLELELQSLAESWRWYPLVQRLTVLRGIRFLSAMTIMAELGDLRRFDSPRSLMNFVGLTPSERSSGQRERRGGITKCGNGHVRRILIESAWAYRFPAKVSRELESRQQGHSIRLQTRAWEVQQRLCRRFHALKARGKEYNKVVTAVARELTGYLWDIARGFEVDMPITAY

SEQ ID NO: 186449 - protein, 356 aa, unidentified
MSANKEPPTMSIAMIGLDTAKSMFQVHAVDKAGKVEIKRKLRRSELISFFEKQAACTVVMEACGAAHHWARMLTGLGHSVKLIAPEAVRPFVKRGKKNDAADAAAICEAASRPDVTFVPAKSLEQQGILALHSARSLLVKQQTMLANAMRGLAAEFGLTVPLGTDKLEELMALVQADEAVPKGARQAVQGLLDHRQALAESAKGFEAAIVAHARQDETARRLATVPGIGPITASLIAATVADIGVFQSARHFAAWLGLVPRQHSTGGKTRLGRITKAGNREIRRLLVLGATSMVHRAAGWNSAAGAWTRGILERRPVRLVTVALANKMARIAWALMTRKEVYHAKGRVAAAAEAVA

SEQ ID NO: 186450 - protein, 349 aa, unidentified
MDYRVYCGVDFHARQQTICSLTTESGVMSTHELKHQNKAELKAFYAQFSGPVLVGLEASGYSPWFEQLLESLGHEVWLGDATEIRRRARRRQKNDRRDAELILDLLIHNEFPRIHRPPTTSREILRMLRYRHKLIKIRTIIKNSLQSLSIQSGLSLRARLFTHAGLAQVRAAAMSPVMQYQRDQWLQSLEPLNQRILEAANWLQQQAAGDERIERLRTHPGIGLLTGLGLVHTLAPVGRFSNQRKVAAYVGFDPKERSSGEKKRYSGISKAGSRVLRFLLVEAAQTACKGDPELKRFYLRLLHRHGKPKAKVAVARKLLVRSYILLRDGIDYAEFNRRAVAARLAREAT

SEQ ID NO: 186451 - protein, 314 aa, unidentified
MEAAVVVGIDVSKRTLEVALSDGSGFSVANHEDGISELLGRLRQSGAGLVVLEASGGYERPAYLALWAAGVATALINPRDAYHFAQAQRQLAKTDQLDARGLCEFGLRMQPEPLPPPEAADEELKALAVRRRQVIKMLAAERTRLQQAPRSVQSSIKRMVRVLERALGALDHQIGQRLRNNPPLAQRCARLEQVPGLGPVTSAILVSRLPELGLLGPKQVAALVGVAPYDHQSGEWRGRSPIFGGRAEVRSALYMATLSAIRCNPVLRSFYRRLRVAGKPAKVAIIAAMRKLLVILNAMLKTNSPWRPPCAVVA

SEQ ID NO: 186452 - protein, 419 aa, unidentified
MHEERRWFVGIDWASQEHVVSLCDGQGKKIGQRKFAHGGTGLGEMVVWLLKASGGEPGEIHIAIETPPGPIVEALLERGFNVYSINPKQLDRFRDRFTVAGAKDDSLDAYVLADSLRTDMQLFRRLTISEPLIVELREWSRIDENLKKDRLRLANRLWDQLWRYYPQILELADDLAAEWILDLWEAAPTPEKAARVSKTTVARILKNHRIRRFDTAHVISELRKPALSVAQGTIEVATAHIRVMVAQLRLVNRQLTDAQRQLDRLCKKLAEPIAGEEGENVSGQQQEHRDVTILDSLPGVGRNVLVTMLAEAPDAVQRRDYHALRNLCGAAPVTRRSGKSCIVMRRRACNRRLSNAAFNWGRTAIQNDPTSRAKYDAHRARGHGHARALRSVVDRLLYVACAMLENGTLFDPSVAAKKT

SEQ ID NO: 186453 - protein, 410 aa, unidentified
MEVIILCCAGLDVHKNGVEACMRRMNRDGKLHQETRHWGTMTRELMAMADWLSEVGVTHVAMESTGVFWKPIFNILENRFQVLLVNARSLKHVPGRKTDQKDSQWIAQLLQHGLLKGSFIPPREQRELRDLTRHRSQVIGEHSRITNRIQKVLEDANIKLSSVATDITGVSGRQMLQAIIAGEDNPEKLADLAKHSLRSKIPQLQQALYGKITDHHRWLLRLLYDQLTSAEAFLSKLDERIEQLTRPQQPLVEKLDRIPGIDRRVAEVVLAEVGPDMTPFPDAPHLTSWAGICPGNNESAGKRKSGKTTKGSRWLRQALVQAAWAASHKKDSYFRTHAHNLIRRRGKKRGLVAVAHSLLIVIYHMLKEGTDYVDLGAKFLDQIRSEHLVRFHLHRLEELGLKVTAIPIAA

SEQ ID NO: 186454 - protein, 303 aa, unidentified
MNNLPYVGVDVSKAHLDAASDLTLQRHPNCPSAIAAWLKKLPPQSHLIVEATGGYERPLVRACHRAGRPISVLNPARVRHFARARGNLAKTDAIDAVVLREFGRAFQPKACPEFAPAQMALAELVSARDRLVDLSTQLINSLEHAELPLVRQCFQSQLKSLKRRIARLEKALLTTVESQPELARRFALLTAQPGIALITATTLLALLPELGHANRNPIAALAGLAPFNRDSGLKSGPRFTSNGRPRLRRALYLASLSAIRPPGHLNDFYRRLRLAGKPPKLALIASARKLLCHLNFLLKTPQN

SEQ ID NO: 186455 - protein, 392 aa, unidentified
MVISVGIDVSKDKHDCFIVSSEGEVLADVFTIPNTMDGFHCLLQRVRECTTPQDKIKVGLEATGHYSYNLLGFLLDNGLATYVLNPLRTNLYRKSLSLRKTKTDRVDARTIAAMLLSDVGLKPYTDTAYHNEELKSLTRYRFDKVKERAKLKSSVSRLVCILFPELEKLVPTLHMASVYALLEVFPGAKQIAAAHLTRLKALLESSSKGRYKRDMALEIRDAARNSIGSRMPAKSLELQHTIRLIRELNAEITEIEEQIQSIMDELHSPITTIPGLGFRMAAMILAEVGDFTRFDSPDKLLAYAGMSPSTYQSGQLKNCYPHMEKRGSRYLRYALYNATKYVCHWDPTFADYLAKKRAEGKHYNVALSHAAKKLVRLIFAMEKSGMPYRLAA

SEQ ID NO: 186456 - protein, 392 aa, unidentified
MFFVGIDIGKNNHVASMMDESGKVVFKAFSFPNTSDGGNALFSKLSSYSLNTADFEIGMEATGHYWLSVYSFLFEKKFLLHVINPIQTDGWRRGTEIRKRKNDIIDSVLIADLIRYGQFVETRLADEDLFSLRTLTRFRTYLVESISDLKRKVVCVLDQVFPEYQSIFSDIFGKTSKELLLQFSSPIDFEAVSSETLAELLAKLSRKQVGAAKAEQLKAAASGSFGVTFAKSSFTFQLRALIEQISFIEKQVKETETEIAVIMEKLESPITTITGIGNVTGAAIISEIGDISKFDSPRKLVAFAGLDATVTQSGEFEAAHNVMSKRGSPYLRKAIFQAALVAAFKDPVLSAYYQKKRAEGKHHLTCVGAVARKMCNIIYAVLKNKHPYVPKA

SEQ ID NO: 186457 - protein, 363 aa, unidentified
MNKNNNNKQTMRRPDDKLFAGIDLHSNNLMIGVINQDGTRVAHRKLECDFGAVLRFLDPFKPQLQSLAVESTFNWYWLLDGLRTQNYPIDLANPTKIEQYSGFKHVDDKDDAYYLAELQRLKILPKAHVYDPQLRPVRDLLRRRSSLVHQRTALLLSFKSLFARTTGQQLDLREVKKMEPEEAPKLYLHPANQLIAQVQAEHMQALDKSIQRLEKAVLGCAREIPMYEKLLTIPGIGRILGMTITMEVGDIGRFKSDGDFASYCRMVAAKRLSNGKQKAENNQKCGNKYLSWVFVEASNFSRRYDERCRRWYDRKAAKTSKVIATKALGCKLSKAAWHVMAGQCDYDERRMFPELAGQKLKAS

SEQ ID NO: 186458 - protein, 379 aa, unidentified
MSTTATARLGHRTASEVCLFVSFELGEKEWKIAWATSLGEKPRLRTFRARDTKRLLEELEKARNAIGARRVVTCYEAGRDGFWLHRFLHAHGIENRIVDSASIEINRRARRQKTDRLDAEKLLSMLLREALGEADLWSVVNVPGAEDEDARSLQREYRTLVKERTRSANRILGLLASQGLAPERIDACLPAWLATVRLWDGSALLPGARQRIEREFERWQFTHAQLLAIEKERRDRTQTTEEPGLEKVRRLFALKGIGLGAAWTYGLEFFSWRQFRNGKQVGALAGLTPTPYQSGDSERELGISRAGNRWVRGLSIEIAWGWLRHQPRSALSLWYQQRFARGGPRARKVGIVALARKLLVALWRYVETGALPEGAELKA

SEQ ID NO: 186459 - protein, 318 aa, unidentified
MNIIGLDISKDTIDATLHKTNGSIHYIKFKNNDDGLKQFRLWIKGNRIRKVYIGMEATGIYYEKAADMLSSYYTVYVINPLKIKDYGKSRFNRTKTDKADSNLIADYIKRHQDTLIPYQIPKNKALQKLINLKNQLQQQQKQIKNRLHSTEEDFIRNIHQDLIDTIQDKMEQVKIAISEQIKKQTDYNHYRNLQTIPSIGKDTASVLYAQLTEKHFKTANQFVSYAGLSPAIIQSGTSVRGRGRLSRYGNRRLKSTLYMPALCAYRFNAFPKLINNLKKAGKPKMVIIVAIMRKLAKLAYYIVKTGQPYDAERHRLNQ

SEQ ID NO: 186460 - protein, 402 aa, unidentified
MRYIGLDVGRDFAHAAVVEGTGSARKLGRLRMGEELAAFAATLGPDDAVALEASGNTWALVELLGRHAGRVVVSNPLRTRAIADAKRKTDDIDAATLAELLAADYLPAVWIPDEATRRLRRIVAHRAGLVRDRTATRNRVSAILGRRLVRSPLSDPFGSRGRAWLAALELPPDERLALDSALRLNAVLDAEVDLADRAIATALIDDPRVRHLLTIPGIGLVTAAGILAVVGDIGRFPRPAKLVSYLGLDPQVRQSGDRPAHPGHISRAGQAHARGLVTEAAHAAVRAPGPLATSFLRLRARRGGGIAIVAVARKLAVLVWHLLTKDEDYRDARPDLVRAKQRALGRLAGRATARTRPSHRGATGSSHDQGRARLRGGDDPHHPALRHAIDRVQLDDTPVPGA

SEQ ID NO: 186461 - protein, 406 aa, unidentified
MQVYIGIDWSENKHDVAFMNQAGAVIADLTIEHTPDGFLELDATRAKLDISSATCLVGLETAHNLIIDFLWSRQYEQVYVIPPSMIKGSRSRFGSSGARTDATDARLIADVLRTDRGRLQPWHPDSLLTRQIRAQVSLIGYLTRNVVRTSNRLRAVLLRYYPAALCVFSTLQTQVALQFIRAYPTPQAAAELTFEQFQSFAQEQDYRHTAHLRNYYVQLQGPHPQAMPETVVVYQNEAVQLATLLLSLVQDKNKALRDLSQLFAQHPDAFIFASLPGTAQLLAPALLAKFGDHRDRFPSPASVQALAGTCPVTDSSGKRKVIYFRKACDRDFRNITQQWAKASLSSSLWAVSYWKQVRPRCSSDSHAYRCLANRWLSIAWTLWQRRQAYDEAYHMQQRAQHSKPRA

SEQ ID NO: 186462 - protein, 359 aa, unidentified
MNKISMFYIGLDLGDKYSYLTILDSEGELIEESRLPTTKASFRRKFSTLQPCRVAMEVGTHSRWASHLFRDLGHDVLVANARKLRAIYHNPRKGDRADAETLARLARLDPELLSPIHHRSPEAQADLAVLRSRDAIVRSRTLLINHARSIVKSSGARLPSCSADSFAHKVPPDIPETLHPALLPILETIASLTQHIREYDRQIEQLCQDQYPETKLLRKISGVGPLTALGYILTLENPDRFHRSRDVGPAIGLVPRRDQSGDQDPQLRITKTGDAYLRRLLVGSAQYILGPFGPDCDLRRWGLKLAERGGKNAKKRAVVGVARKLAIVLHHLWKTGEVYAPFYPARKDDRLSETMSAAA

SEQ ID NO: 186463 - protein, 321 aa, unidentified
MQPVTVTVYAGVDVAKASLQLHLQGRQTEFPNQPAGLAKLRQQLQTIPHVHVVCEATGGYERPLVQALHQAQIPVSVANPAQVRAAAQAQGQRAKTDRIDAALLTDYGQRYQPKPTPPTSASQDQLVALTQWLTQLIQAQALAKTQAEHHEAAFVCKQHVKLMAHFESQIEAVEKQIRALVAQDAVLEQRVECLDQITGVGPRTAWLVLAHMPELGQINRQQVAALAGLAPWTRESGTMKGLRCIGGGRPEVRLALYMAALSAARFNPVLQPFYQRLRAKEKPGKVALTAVMRRLLVYMNHQLKALAAAQAATKIDHAKTP

SEQ ID NO: 186464 - protein, 347 aa, unidentified
MKQYAGIDVSLESSSVCVVDTEGRIVREAKVLSEPEALIAWFADHGALLERIGLEAGPLSQWLYAAMAQAGLAVELLETRHVRTAFKTMPVKTDKKDACGIAQLMRLGWFRPVHCKSLPAQEVRAVLTARKLLQGKLHDVEMSIRGILRGFGLKVGATTPRTYEGRVRTLVEGHPTLEAIAQALLNARGVIADELCGFERRVRAMARHDERARRLMTTPGVGVLVALTFVSAIDQTERFRSSRMVGAHFGLTPKKYQSGETDRSGRISKIGDVGVRTALYEAANVILTHPVRGSDLKTWALGVAKRAGPRKAKVALARKLAVVMHRMLRDQSDFVADHKIAPIMAAI

SEQ ID NO: 186465 - protein, 382 aa, unidentified
MQASRKSTPTADHCGTIFVAIELSQKTWLITVHSPDRDQFSRHRLEGGDHAGLLALIEKVRARATQQLGSTPRVVSCYEAGYDGFWLHRLLEAAGISSLVFDAASIAVEQRSRRAKTDRIDGELLLRTLMAHLRGEPRVVRIVRVPSVEEEDARRASRERDRLITEQTAHTNRIKSLLRLLGMAVGNPRRRDWLAWLKRQRDWQGHPLPPHLLAEAQREHARLMLVREQLAALEQVQAAQASPVPVPMAERRDLLQRLKALGPAFSATLVNELFYKDFRNRREVASYCGLAPSPWQSGGIDREQGISKAGNRRARHKAIELAWLWLRHQPNSALSHWFRTRTANAGRRAKRIAIVALARKLIVALWRYLTAGLVPEGATMKA

SEQ ID NO: 186466 - protein, 360 aa, unidentified
MLNSITLVDPSVKVIVGVDTHKHVHVAVAINLLGTRLGTLSVSADRVGHAELVEWACTFGTLETFGIEGTGSYGVGLASFVLRQAVRVVEVNHCDRRKRRNNGKSDTIDAETAARSVLSGIATAIPKSADGSSEMVRQIKIARDTAVKARSSAIITLKTLIVNAPGELRETLEPLTNSKLIDSCVALEPGDIVNPSASVKHALRALANRWLALSAEIVTHDKVLDTITMAAAPTLRESYGIGPDSAAEMMIVVGDNPERIRSEAAFAKLCGVCPIPASSGVTNRHRLFRGGHRQANAALYRIVIVRMRWHQPTIDYVTRRSAEGLSKKDIIRCLKRFVAREVYHALMTDHHTRNALATAA

SEQ ID NO: 186467 - protein, 373 aa, unidentified
MNNTITTYVAMDTHKKEHKVALHYPCHEEIVRFVVKNTARDIKRMVNKIKKQAPADIKFCYEAGVCGFTLKRRIEALGCQCIVIAPSLTPIKPGDHIKTDRRDALKLLMMFKAGLLTEVHAPNVEQEAARELTRCRQTAQENLKRIRHQLLKFLTRHGYVYANGNHWTQKHITWLRTLEFDQSLLADVFDNYFTQMNHCLQRLDSLDKQVKILAESNCYKEIVGFLRCFHGIDTLTAITIITEIFDFGRFSSPGQLMSYLGLTCCEDSSGQKQHKGSITKAGNKRVRRLLVETGWHYRHPCKLSNALRTRRKDQPQWVIDIADNAGQRLRKRYRHLINNGKMPCKTTVAIARELAGFIWSVFNEYHVRNTKAA

SEQ ID NO: 186468 - protein, 316 aa, unidentified
MYLGIDVSKRTIDCCLISDGIFFERRFENGQIGFKKLQDWLTEHGATDKLHCCCEATGKYYEALADCLAERYTMSVENPRKIKGFAIAVLLRSKTDKQDAKLIAQYCKAVSPEPWQKPTPEQTRLKELTQYLGRLKRQKASEQTKKQTAPDYLAAHLQSTIDHLAAQIKYVQKLIQDFFRQNPQYRQQKERLQTIDGVGDNAANSLLAVLSRNQRFKSAAQFVAYLGLDPKIRQSGTSVNGRSGISKVGNTQLRTALFIPAMHAYRSETFRSFTNRLKANGKRPKQIIVALMRKLAIIAYHLIKTGKDFERERYTG

SEQ ID NO: 186469 - protein, 331 aa, unidentified
MTHTTDHRQDSPAATGDPQAGQPIHYVAADIAKASLRVQDDLGAFEVDNNPAGFGRLLNHVRACRNPLVVFEATGGYERGLVEFLGKAEVPMAMVNPALVRAFARSEGMRAKTDPIDGRMILAFARSKALKSNLRRCEQRSRLAALLDRREHLVEQLAREKNRRQNSESAIQPSLRRMMKLLAAEIARIEADIQRLVRARPDWVAQTEVMTSVQGVGKVTAWTLLAYLGEITEVSRNQAAALAGVAPFNRDSGKLTGKRFIQGGRAKVRRCLYMAAHSAAVWNPVIAEYVARLRQRGKPYKCAIVAAMRKLLIHIQSLLKKTMEKPELSAC

SEQ ID NO: 186470 - protein, 373 aa, unidentified
MENIITYVAMDTHKKDHKIALHYPGDEQIVQFVVKNTAAEIKKMVKKIKKKASGQVEFCYEAGVCGFTLKRRIEAQDCRCMVIAPSLTPIKPGDRIKTDRRDALKLLAMFKAGLLTEVHAPETDQEAARELTRCRQTAQENLKRIRHQLLKLIVRHGYVYSDGNHWTQKHLSWLRGLEFDQTLLSNVFDSYFTEMQHCLQRLASLDREVETLAQSDRYKEVVGFLRCFHGIDTLTAITLITEIFDFGRFSSPGELMSYLGLTPSESSSGEKQKKGSITRAGNKRVRRLLVETAWHYRHRYNVSKALKQRRAGQPQWAIDIADRAHHRLGKRYWYLVNNGKMPCKATVAIARELSGFIWSVFKEYQVRSNKKVA

SEQ ID NO: 186471 - protein, 298 aa, unidentified
MSRCIPTDAAAITLGVDTHKDVHVGVALDGVGRRQGTLSVPANSAGYGRLVEWASGFGPLAHAGVEGTGSFGAGLARFLKARGIKVSEVIRPKRRDQYRSGKSDPIDAEAAARAVLAGTATGEPKDADGEVEMIRTLRIARRSAVKARAQAVSQIKTMLITAPEGLSSELCGLSTARLLEKASRLRPGANPSDVVEATKFALRSVARRYQRLSEEICELEEQLERLVAETAPELVAVEGVGTDTAASLLIAAGDNPERLESEAAFAHLCAAAPIPASSGKTVCHRLNRHANRDANRAL

SEQ ID NO: 186472 - protein, 451 aa, unidentified
MKKNVPMQIINANAAGIDVGSRSHFVAIGQRKDDVREFGVYNEDLQGIAHWLLENHITTVAMESTGTYWQSLFAVLQNAGLQVILCNGKFTKNIKGKKTDVQDCQWIQKLHTIGLLSGSFLPDEATEHLRTFCRHRANLLDQAADTTRKMQKYLRLLNLRLDVVVKDVTGLTGLAIINAICKGEINAEVLASLRHGNCKKSEEEIAKALQTNGRKDYLFALQHEYSMYQILQSSIIDCDIEIEKMLSEQINNNDEKRQHYIDKKVHKKINKNTPKNIDINLMAYQYFEGVDLLAIEGVSHSTVLSVISEVGLPGLKKFDSGNHFASWLRLAPNNKISGGKVLSHKVPKGSSRLKIALRNAANAIGNLKDTPLSNFFKRINFRKGRVSAISATARKLAVIIWNMVIRKQPYNNEHGYEFLDQKRKRKVNEMRKLIHKFDIKTDELGLQISGL

SEQ ID NO: 186473 - protein, 344 aa, unidentified
MVISVGIDVSKDKHDCFIVSSEGEVLADVFTTPNNMDGFHCLLQRIRECATPQDKIKVGLEATGHYSYNLLGFLLDNGLATYVLNPLRTNLYRKSLSLRKTKTDRVDARTIASMLLSDAGLKPYTTTAYHNEELKSLTRYRFDKVKERAKLKSSVSRLVCILFPELENLVPSLHIASVYTLLEEFPEAKQVASAHLTKPKFLLETASQGRYKQEMALAIRNAARNSIGSRVPANSLELQHIIRLIRELNSEITEIEEQIQSIMDELHSPITTIPGLGFRMAAMILAEVGGFTRFDSPDKLLAYAGMSPSTYQSRQFKNCYPHMEKRGSRYLRYALYNATQYVCH

SEQ ID NO: 186474 - protein, 398 aa, unidentified
MFYIGIDIGKRHHEVGLIDDQGNPVGKPLRFANSKAGSEKLVEFINHHHLTPDNAVVGLEATGHYWLSVFSFLHQLGFKTTVFHPLQSDALRHFYIRKTKTDVRDAYLIAQVIRIDSPEETPFLEEDLLQLRHLERLRYSFVDQISDLKRKIISLLDQVFPEYEQVFSDLFGKASSEILLHVPLPEDILKMDTEKLAAVLNRVSKGRLGKSRAYDKALQLKERAEHTFGISIGTDVFKMQIQLLLEQILLLEKHVNQMEAAMIDISNRQQHFLTTITGVSDVTASVILGEIGTIDRFERPEQLVAFAGLDASVHQSGDFHSSGTRLSKRGSPYLRRAIWQAGFVASFHDPALSLHYQQLRKRGKAHGTAVGAVARKLTHIIFAILRDNKPYVPRSPHN

SEQ ID NO: 186475 - protein, 315 aa, unidentified
MNDLLERCCGLDVHKDIIVACILNGPVGKPAKSEIREFSTLITGMRDLKAWIVSEDCHFVAMESTGIYWKPIYETLEDSFDGDISLLVVNARHMKNVPGKKTDMKDAEWIATLLRAGLLNGSFIPAKEIREFRDLTRYRKSVIRDITSQKNRIEKFLQSSGFRLSTFISDIFGASGRNIINCLIDHGQINKSQLNECLKTKTRKRIDEILIAVNGTLSVHQRNFLKMLVSHLDVLNSHLKDVEASIIAEINQFSSAIATLCSIPDIAETAAASIIAEIGVNMSCFKTAEHICSWAGLSPGNNESAGKKKDFCNQR

SEQ ID NO: 186476 - protein, 418 aa, unidentified
MTDDVSWFVGIDWASQKHRVCLLDAEGRCVGERDIAHGGSGLSELCAWLLEKTGVEPGQIAVAIEVPHGPIVETLLERGFRLYAMNPKQVDRFRDRFTVAGAKDDSRDAHVLGDALRTDRHALRRLSVEDPVVIELREWSRMADDLQQERTRLANRVREQLWRYYPQALELADDLAADWFLELWQQIPTPAKAARISEKTIARFLKAHRIRRFDAAAALRILRQQPLSVAPGTVEAASAHIRTVAARLRLVNRQIKEAHAKLDELCAKLEASAESEPGQTREQRDVAILRSSPGIGRIILATLLAEAPEPLRRRDYHALRALSGVAPVTRRSGKQCFVLRRLACNKRLENALYHWARVAMQHDPISRRRYAELRSRGHGHARALRGVADRLLYLLCTLLERQTLFDPDYKTSPLAVAA

SEQ ID NO: 186477 - protein, 337 aa, unidentified
MEYFAGLDVSMAETQICVVARNGTVIHKAKVPSTPADIAAELAQVPACRRIVFETGRMAPMLYHGLRQLGLPVVCVESRQAYQALKLLATHKTDRNDARGLAHLARTGFFKPVHVKSLPAHAVRSLIIARKKLVGQRVTLENQIRGLAVVFGVRLPRALSSGFIEQALRASDGIPGLSAAMRGLVAARAAVLAAIVAIDADIRRMVRASVACRRLMSIPGVGQLTALAFTAAVDDPTRFRRSRDIGAYLGLVPRRHQSGEFDYTGSISKCGDRRVRTLLYEAANVMLTRYKGPLKLKDWAIAIARRSTMRKARVALARRLAIIMHAMLKHGTEFKPA

SEQ ID NO: 186478 - protein, 359 aa, unidentified
MDTMSEDQPFVIIGIDTHADLHVAVVIDLLGRRLGDRSFPTTRAGYGQLIRWANTFGVIDRIGIEGTGSWGRGLTLFCLSQGLAVLEVDRPSRKTRRNKGKTDLVDAEAAARSVLAGTAKGLPKAGDGVVEMIRVLHVTRESSVKARTQAINQLRALVVTAPTKLREKLRGLTARQLTLQVSGFDDRPVTDTLSATRMAMRELARRYQHLTTEIKRLESQRDRIVNEVAPELVARQGIGPHSAAALLISAGDNPDRLHSEAAFARLCGAAPLPINSGKTQDRHRVNPGGDRQANRALHTIVLARLTCDPRTRVYINKRRPTQGKADLDTMRRLKRYVAREVFPLIQTSLARLEQVPQAA

SEQ ID NO: 186479 - protein, 351 aa, unidentified
MQKYQKYFGIDVSKNHLDIAQYLPETNTTNYLIRIKNTPEAIETWLKTMDMAESLVCMEHTGLYINFLVMVLHQQKIDTWVENGLQIKRSLGVQKGKNDKIDAQRIAKYAFRCQDECRLYLPCSEVLEKLQVLQHLQNKLKDTLEQYEVPLNESKIFSANTHKLLEKHTEKIITELKKVIKEIETEILECIANDEGLKKKYDLINSVTNVGKQTAITLLVVTRGFTKFDNVKQLASYAGVAPFDNSSGKRTNPDHTSSLCHKPLKAILYMCALGTIKTKEDLSAYYHQKRKEGKKHRVVMNAVSNKILQRIWSVVINQKTFEKRIVEFEKYQNPKKLTKKQKINKKNLQVS

SEQ ID NO: 186480 - protein, 437 aa, unidentified
MLFVGHRFRTDPDELDALWARLPGDAEQVEVVMEPTRNAWVALAAWFRRHGAKVVLVPPEQSADLRDYYNKHTKTDRLDSKVLARLPLLHPEGLHYEEALGPGDELKRAVKIRSGLVHRRTACMARLDALLEILGPAWIAAIGSDLTLTALRFLARYANPVQVKRLGKARLAVFFRRSSRQAWGDERAAAVIEAAETTLRLWGPDGGGLDFDALAADIAVEARLALTLTEEINQLDKRIAGLYDKADSTGIVRSVPGVGRVCAPQILGRLGDPTRFANLAAVRSFAGLVPAADSSGQADGRGALTKAGDACLREAAFIAADHARKIDPTLAARYHRLMLAGKHHDSAVCTLAAVLLTRIAACLRNGAPYVLRDTDGRLITEAQGRAIIAERYTVPAEVRAARRKVTRHRHPRRNERNERATSGVAKRSGAPPVPQPA

SEQ ID NO: 186481 - protein, 344 aa, unidentified
MQHFAGLDVSLQETAICIVDEDGTVVSEGKTASEPDDPVRWLTATGLPITRVGLEAGPLSPWLYTELRAAGLPAICIETRRMKGATAAMAVKTDRNDARGIAHAMRVGWFTTVHVKTAESQELRLLLSNRRTLLEKRIAIDNEIRGTLKAFGLKLGPVTVAGFEKRVLELLADRLRLLAMVKPMLAARTALRQQGEVLHRMVLKSVRANAVCRRLLSVPGVGPIVALTYATGVDDPARFARARDLGPHFGLTPRKYASGEIDRNGSITKAGDGAVREALVLAALTLLTRVHRWSVLKAWGMAIAKRRGLRRAIVAVARKLAIVMHRIWVDGTTFTWSRETAVSA

SEQ ID NO: 186482 - protein, 302 aa, unidentified
MVGNAEYSAKFDNDSKGLNQFSDRLKSLGCQNLHICMEATGSYYEEVADYFAQYYSVYVVNPLKISKYAESRFKRTKTDKQDAKLIAQYCRSAKESELVKRQKPTDEQYRLSRMTAAYAQIKSECAAMKNRHHAAKDEEAAKAYAEIIKAMNEQLEVLKEKIKEQTEKPNCKEGVKRLETIPAIGRMTAAVLFHHLTSSKFETSNKFAAFSGLSPQQKESGTSVRGKGKLTKFGNRKLRAVLFMPAMVAYRIRAFPDFIKRLEEKKKPKKVIIAALMRKLAVIAYHVHKKGGDYDPSRYKSA

SEQ ID NO: 186483 - protein, 413 aa, unidentified
MEVVHSRCAGIDISKRDAKVCVRIAGGRRASIEVRTYGAMTKDVLLLRDWLTDQQVTCCVMEATGDYWKQFYFLLEDAGFELMLVNARQFRNMPGRKSDVSDAQWLADLGAHGLVHGSMVPPEPIRQLRDLTRLRTHLRREQARDKQRLEKVLEDAGVKLAAVATDITGVSARAMIDGLTKGLPPDALANLAVKTLRSKIPALTDALNGRFNEHHKFMVTMLLERIDRTEQDIVAIEKQIDALMDPHQQAKALLATIPGVSTDAAEVIIAETGGDMSVFPDAKHLVSWAGCAPGMHESAGKKKSTTTRPGDPYLKGALGIAAISAANSKNTYLSALYRRVAARRGPMKALVAVENSILTSIWWMLTNDQPYQDLGSDYYLRRKPRQAIDTAIQRIKDLGYNVTLTPLSPAVAQ

SEQ ID NO: 186484 - protein, 316 aa, unidentified
MSTEPVCVGIDVAKASLEVAVHPPADRWAVDYTDPAVATLVTRLTALAPALIVLEATGGLEVPLVGALAAAGLPVVVVNPRQVRDFAKATGQLAKTDTLDAAVLAHFAAAVRPPLRPLPDPATQALAALVTRRRQLIGMLTAERNRLGCAPQVLHKELQTHIRWLERRIASLDTDLDQAIRTSPVWRAQADLLRSVPGVGPVVARTLLAQLPELGTLSPKTLAALVGVAPLNRDSGLVRGRRTVWGGRATVRAVLYMGTLTAVRFNPVLRAFYLRLRAAGKLPKVALTACMHKLLTILNALLKHQRRWDPTYAQTR

SEQ ID NO: 186485 - protein, 346 aa, unidentified
MEYIALDVHKKYTWARVENGEGARLYESRLAHAHGTIKNFVHRFSEGSPVAVETVGNWYWVVDEIEAGGGKPQLVNARLAKLMMGSVNKSDKLDAKGMNRLQRTGTLPTVWIPSSSVRDARELPRTRMVLSRQRTQLKNRVHATLAKYGYGVEGASDAFGKRGRQIVMELLNKLPPHTQQALQSVLDQLDHVAQNLKAIEANMIEVFAPCPQTHWLKTLPGVGDILAVVIWTEIGTIERFSRAERFSSYCGLVPREHSSGGKIRFGAVRRDVNMYLKWAFVEAANSSILNRERCGYEHISRLYQRIKSRRGHGKAKVAVARHLAEASFWMLKKGEPYREPVSSTQR

SEQ ID NO: 186486 - protein, 407 aa, unidentified
MDLLKTVFGIDVSSRKSNVCIMVNGQKVNDYAISNDMVGFNRLLGDLKQVTKPQIIFEATGVYSRRLQAFLDMHELRYVMMNPLEAKRKTKDDLHQNKTDKLDALYLAKLQSEHPQRLAYVQNKEYQELMANNRIYEQASHDLISNKNRLHKAVQLTFPEIEHLLANPRGKNYWSIALRFPHPDIVLETKEADIIDFLKGLSGIGKKRANDITQSLIRLAKVACPAVKKNSAHIRGLKMAINNILSAEEECQTALQEMAKLAPKRDLEILTSIPGIGENTALRIISELGDIRRFNNPSQLNAFVGVDPQVYESGNLTAHLSISKRGTAIGRKVLYLAINQIQSAKKAGKPCHIADYYDKRKRSSETASHKKAAIASIHKLLRTIFALIKNDQLYSYDVAKHNQRLLS

SEQ ID NO: 186487 - protein, 354 aa, unidentified
MSGKHNSVIAAIGIDIGKNWFHVIGLDGRGAIALRQKWSRGQVETRLANMPACLIGMEACVGAHHLSRRLRLLGHDARLMPAKYVRAYSKGQKNDFRDAEAIAEAVQRPTMKFVATKTGDQLDLQALHRVRERLVSQRTGVINQIRAFLLERGVAVRQGRHFLRAALPGILATGCAVLSVRLVHLIEDLAGDWRRLDERIEGLSGEIHAVARQDVGCQRLMSVPGIGPIISSAMVAAIGAGDTFTKGRDFAAWLGLVPKQFSTGDRTVLGKISKRGNRYLRALFVQAAWVVLIRSKNWERYGLKPWIEAAKRRLHRNVLAIALANKLARIAWGVLAHGRSFEAAKLAEAATLPA

SEQ ID NO: 186488 - protein, 370 aa, unidentified
MSMYFVGIDISKYKHDCCIISAADQQIVSKFTVKNDKDGFEHLLTTLNSLSNPEDIKIGFESTAHYALNLELFLENAHHSFMEVNPVLIKEYKKSTTLRRTKTDSVDCESIARWLMTVEYKPHSKGFYHSYSLKSLTRLRDRLIRQRSFYLVKITNVLDHTFPEFKPFFNERLSKTAIYLLENYGSAEKMAHMNSASYDKLRCASRGKFSIQQFLRLKELAANTVGVNNSIFDIELNSLLTLYNSLCKEIKTLEAEITKLIEEVHPHYMSIPGIGPISAAVIYAEYGDISNFSNPGQMLAFAGIEPGINDSGTESHGGRMVKHGSSQLRYVLLNACLPLIRFDITFATYYAKKRAEASLISALHTFICPI

SEQ ID NO: 186489 - protein, 330 aa, unidentified
MKKWKFTLGVDVSKNTLDISCSELNEHIKIINGSEGFIQFLKWCKRLDIDLKESFLVLEYTGGYEYKLLQFCEAHAIIYARIPGLAIKNSMGITRGKNDQVDSARIAQYGEEKYKSLQPSKPLNPAIIRLKELLAFRKRLVRENAGYKSSVKEREHMYGKNRKDIMVKSLQQKLKANSKIIQNVESKMMQIIIEDEEMHLNFTLITSIKGIGKVNGLMTIAYTENFTSFSNPRSYAVYVGVIPFDHSSGTSIRGRKRVSHIANKELKQELNQAARSAMVWDKEMNNYGANKMKTKCYKIVLNNIKFKLILRMFAVVKKGEMYVDNYKKVA

SEQ ID NO: 186490 - protein, 362 aa, unidentified
MTQQGKGKKPKKRRIVGGVDTHGDTHHAAVVLLNGTRVADAEFPASAAGYALLLAWLRSFGRLFAVGVEGTGAYGAGLARHLTAEGVRVVEVNRPDRRQRRIKGKSDPLDAYAAADAVLSEKATVTPKLGTGIVEAIRTLHTTRAGAVKARTAAVNELRALLVTAPADLRDRMRGLTPVALVAACARLRPTGDTANPQVAVRAALRSLARRHQALTAEIADLDVQLRPLVERACPQLLAIHGVGYETAAQLLVTAGDNPDRISSEASFAALCGVAPIPASSGKTRRHRLSRGGDRQANRALHMIACTRLATDIRTRAYRDRRAREQLSPKDILRCLKRYLARQVYKALTSTNTERDEIPTAA

SEQ ID NO: 186491 - protein, 387 aa, unidentified
MARKRTLSTLDTSIAYEAVGLDLAKEDTAIAAFGPDHEGPYLIDRMPYDKLYELLADMAPTLVAMEPCSGAHQIAEQIQELGHEVMMISGRHVQAWVKDHCNGQKTDLNDAFAILNLAYDRWLTPIRGKTREECRLLALQSSYRQLKGQRTKTMVHVEATLHAWGFPIRTGSFNQKALHELIDANREAFGDEVVETLHLMIDRVRDLDHDIATVLKLLTEATKRDPRASLLRSIPGFGVLTTSRWCAVVGDIARFDTPKQTMAFIGLVPNNRITGHHTETSSGREARGQGKMSKRGDKMLRSLCILGAGALCLMVRNDRLPDCPFVASIKERLASPRPWFKVLVYVAAKLVRIATALLKYGETFSFEKAGISKAVLKQWELEQAKAA

SEQ ID NO: 186492 - protein, 474 aa, unidentified
MDYVGLDVHKDAVEAAVIDEAGKLRHRVRFPCTREELARFSKRYLGPNARVALEATSHTWSLVEVLRPFAAEIVVSNPLRTRAIADAKIKTDKIDAVVLAQLLRADYLPRVWQPDQGTQARRRLMSRRASLVADRTRVKNRIHAVLLQRLLRSPFDELFGKKGRAWLEALELDGAGRAALDSELRLLGQVESELARLDEQLAIEGYDEPRVRLLMTLPGVDVAVAQTLVAALGDIHRFRSPDHAASYLGLVPSTYQSGDPEHVYHGRITKQGKGQARWMLVQAAQHVGTHPGPLGNFFRRLTKRKNRNVAVVATARKLVTIAYHMLKNNEPYRYAVPRSTDTKLARMRVKATSERRRTGPPKGQPRPKAYGSGGRTRTVPALDTIYEREGLPPIAPLSDGELRMLRQQKVLKHVAQTSRPQRLPRRAAAARPPDAAGPAASPRRPVQPPSAQRAPVTTRRATSTQTACPGRRST

SEQ ID NO: 186493 - protein, 400 aa, unidentified
MLLFFEVITMIFVGIDVAKDTHYAAVSDDYGAVLVKPFAFQNNAEGFCLLLKKLSEFDRSKLLIGLESTGIYSENLICFLYESGFRLAVINPIQTATLRKTAIRKTKTDKVDTMLIIKSLMVNSYRLYSQRDADSLKLRTLCRFRQNLKKSKARLKIQLAGYVNLVFPEFGKFFKSGIHIAASYALLKKHSSPKEIAALRTSTLCTLLSKASHGRFGKDTAEALKSLALSSVGVKNPYISIQIAQTIAQIELLEQQIKDLNSAIEEAMESINSVLMTVPGIGAVNAACILGEIGDIKRFSKPCKLLAYAGLDPTVRQSGQFTAKSTRMSKRGSALLRFALINSAWQLTLNDTTFKAYYDLKRSQGLNHYGALGHVAHKLTRVIFKLLTSDTPFNPAKLVA

SEQ ID NO: 186494 - protein, 430 aa, unidentified
MMEEVDDAELVVERIAALDLGKAGLEACVRVPSPHRPGRRMQELRGYGTTTAQLLEMVAWLRRWGVQRAVMESTSTYWKGVYYLLEAEGFECWLVNAREVKNVPGRAKTDRADAIWLAKVAERGMCRPSLVHPAEIRRLRDLTRYRRALVQDRTREQQRIEKLLEDAQIKILSVLSELHGVTARAMMDALIAGQRDPRALAQLAKGRARKKTAQLEEALRGFFTDHHAAILRMMLDNTDRISAQIAALDARIEKEIGPFSGQAARLAEIPGVDAVAAAELIAEIGVDMTRFPSDAHLVSWAKFCPQTHESAGKSKSKGRGRGNPWLAGTLGRIAFANSRADTFLGARYRRLARRRGKQKAIVATGNSVLTVVYYLLSDPMATFCDLGPGYYESRINVHRRARDLVTQLQALTGQHIVIRDGKAVITDAAA

SEQ ID NO: 186495 - protein, 419 aa, unidentified
MHSLHVGIDVGLKDNTVVFTDETAMTRLARFTVPNDAGGAVRLVNEVADAMRRHKLSSLRIGMEATGVYAWHLAVFLSGSEVLRPFDAAVYLIQPRALKNHRKSFGSRLPKTDGGDAWLLTEYLGHPRLLPRPFRMDERTIPLQRLTRHRYHLVHQLTRTKNYAVSYVFLKASGLAQAPPLADPFGAAAAAILLEFRTVEELAAAPLTELVQVLNQSSRGHISNLEAIARAYTQAARDSYRLPGVLKEPVHQILSLTLQDIRYLQKQVKVVDNLIQREPLARQNRLLSIPGIGPVLSAGILAEIGDIANFPDDDQVAQFAGLTWPANQSAAFEGEDTPLARTGNAYLRYYFIEAANSVRRYDASFAAYYTKKSKEVTTHQHKRALVLTARKLVRLVFALLRDDRAYDPGHRSLFRTTAS

SEQ ID NO: 186496 - protein, 345 aa, unidentified
MTTMNYIGLDVHKKTISYCVKDVSGRIQQEGKIGSTRRELDCWMKTLPQPWTVAMEATIFSGWIYDHLLPHATQIKVAHPLMLRAIAAAKKKNDQIDASKLADCLRCDFLPECHMMPRAIRDRRRTLRYRHLLVRQMVQMKNRVSGLLMETGVEYNKQRLHKVSYFRELLSANGEVPPSIRPLLKLSRETIERCQKTEYALVSSLQRDPVLADRIKRLRTVPGVGPITALTWALEIGDVSRLGSIKQAISYCGLCGDERSSADKAMRMPLSKQRNKHIQRALVEAAKLAPRQNHEMAVIYDQERQKGNSNRATLAVARKMVAYLLAVDRQQRDFVPAEERRTTAA

SEQ ID NO: 186497 - protein, 359 aa, unidentified
MNEITTVGVDLAKEVIAVCGADRSGKTVFTRVFRREAFAAWAVQLPPCVFGLEACGAAHHWARWLASHGHTPQLMAAEFVRPFRKSRAAKNDRNDAEAVLTAVRQPNMRFVAVKSVEQQACLSWHRMRQGFSEERTALINRLRGLLGEFGIWRGRSAAVLTRELPELEHDEALPLMVRRLLTEARPHLARLDAVIAACEVEIKSHIKTNAAAQRITAISGVGALTAAAVLATVADARDFKNGRQFAAWQGLVPRQDSSGGHTRLGHITKRGDTYLRGLLTQGARSALQAALTKEPLRRTRLQAWIVQLHARVGYHKTLVAIANKHARMIWAILAKGEDYDPDAWRHWTRTAPATSGVTP

SEQ ID NO: 186498 - protein, 369 aa, unidentified
MKKHSKKANETGRRSASQGQPEITIGIDVGDQYSHFCFLDAAGEIVKRGRVSSTQAGLEKEFGKIPAGRIALETGTHCHWMSEVLSQLGHEVIVADARELKSISGSRRKNDPRDAEQLARLARVDVRLLHPVRMRKRKTQQDRSVLRARDLLVASRTQLICAIRGMVKADGSRLADCAAESFPEQVGAAIPEGLRRALAPLLETLDVLNEKIRYYDQLVTHMAEEEYPETCLLKQVPGVGPVTALYFRLVIEEARRFQHSRDVGSYLGLVPKQQDSGESTPELRISKAGDEGARRLLVNCAHYILGPFGPDSDLRRWGLRLAARGGKNAKKRAIVAVARKLAVLLHRLLVTGEVYEPLRNSQAAARAAA

SEQ ID NO: 186499 - protein, 311 aa, unidentified
MNIGIDVSKDHLDIAWLPAIRPATQVPNNTQGHQKLCALFANQQPQRILMEATGGYERALLAALLEARLPVIVINPRQVRDFAKATNRLAKTDTIDAAVLACFAEVVKPDIRPLPDTKALELQDLVARYRQLVELRTAEMNRHQQAVNVRVKKSIDVIITTINQQLKELDAQLDELIQSTPAWRAKVDLLKTMKGVGDQTARMLVAQLPELGRLSRQQIARLVGLAPINRDSGKKRGKRSIGGGRSCVRSMLYMPALSAVRANPKLRRFYKHLLEMGKPKKLAVIAAMRKFLITLNAMMRDQKAWQTPISA

SEQ ID NO: 186500 - protein, 299 aa, unidentified
MSSSNVHIYGIDLGKNWFHIVAMDRQGHILWRKKLNRNQLKTFVINTPPAIVAVEACPGSQYWGRLFNDAGFSVKIIPAQFVKPYLKSNKNDFNDAAAIAEAGSRGTMRCVSLKTHEQLALQATHRVRQRFIVERTATVNQMRALLLEYGITVPVGRKVFERNLPSILEDAENGLPDFIRALVFRLRERWQHLDVQIDEMSVQLQQASIAPEKCQLISSVPGIGPIVATGLIAAVGSGTQFKRGRDMSAWLGLVPRQYTTGGKSNLGGISKRGNVYLRRQVIQGAKALKIHMNPHSGGG

SEQ ID NO: 186501 - protein, 442 aa, unidentified
MDLLHTHGAGLDVHKKIVVAHARITDARGRLERHTRTFGTMTADLLALAAWLLSLEITHVAMESTGEYWKPIYNILEGSFTVLIVNAQHIKNVPGRKTDVKDAQWIADLLCHGLVRGSFIPPQGQRDLRDLTRQRTNLVRDRATVVNRLQKVLEWANIKLAAVVSDVVGVSARAMLAAIVDGQSDITLLADLARGRMREKRADLERALSGRVRDHHRFVIASHLEQIDFLDAQIAGFDAQIVACVAEQAPPSPPAAPAETPPPPVPPSAGDGDGLSWEAAIQIWDSVPGIGRRLAEQLVAEIGPQPTQFPSAEHLASWAKVAPGNRESAGKRLSGKTGKGNRWLRTSLVQAAHGAVKVKGSALAVYYRRLAKRMSGKKAMMAVAHKILTIGYTLLCKREWYREPDLSVREARRTEQLVVQMQRRIERLGYTVNIEPPAAVAA

SEQ ID NO: 186502 - protein, 343 aa, unidentified
MAVFAALDVSQDQTAICMVDQDGAMLAEAKVPTCPEAIANWLAERSDGLERVGMETGPLAVWLWNELVAREVPIICLDARHANGVLKMMPNKTDRHDARGLAQIVRTGWFKAVQIKSHDAYVNRAMLTAREAFVGMRVRLENEVRGLLKTFGVMFGKRVGGFKRRADEIIAKELLVAPELIPIFKTLIQARRDILSHIATLDKRIRAIAKRHATVRLLMTAPGVGPITAMSVVAAFDDAARFRRSSGAGAYLGLTPRRYESGEISRNGRISKRGDGFTRKCLFEAANAIVCRDLGGPRLRSWAKAIAERTGPRKAKVALARKLAVTLHAMWRTNTPFREPAMA

SEQ ID NO: 186503 - protein, 412 aa, unidentified
MSSAYRVTAAIDVHKKWLYVVVGQPDTAEREFSRCRSGSTSQELAVLAEWLHDLGVTTVVMESTAQYWKPVWAALEGEFTLLLAQARSNPAPHGRKSDYADAIRLMKRLWADDLRLSYVPEAEQRSWRLLTRTRVQHTREITRLRNRIEGLLEECRIKISGLLSDLLGASGRRMLRALIAGKTTDPQQLARLADKRLRAAPEELEQALNGQVGPVHRLLLGQLLDEIELLEEHLAQLDQCLLDRLEGQRDAIRRLCGVPGIGIEAAQLIVAELGPRAATFPTASHAASWVGVCPGRNESAGHSTSDASPKGNRQMRRILNQCAWAAVRSKDTYWQQLFRRLTPKLGVNKALWAVAHRLLRVIWLVLHEGTEYRERGPCAPDPERLRRRIERMLYELRKRGVHFQLTALAPST

SEQ ID NO: 186504 - protein, 316 aa, unidentified
MSDAQVFVGIDVSKAQLDVALRPTDDCWHVSNDELGIAGLVERLRTVQPTLVVLEATGGLEVPVTGALADAGRPVVVVNPRHARDVAKATGRLAKTDTLDARGLAHFAEAVRPTPRPLPEAQAQALSALLTRRRQLVQMLTAERRRLQTAPQPIRADIQAHITWLACRLARTDDDVAAAIRSSPLWRAKDEILQSTPGVGPILSRTLVAEVPELGVLNRQEIAALIGVAPFNRASGTLRGKRAVWGGRAHVRAVLYMSTLAAVRHNPVLKAFYERLRSVGKAPKVALTACMRKLLTILNAMLKHRTPWQENYANHS

SEQ ID NO: 186505 - protein, 446 aa, unidentified
MLPVSAWVCVLAEDLPGDAARPERPVSSGWELVGMEVMFERVAGLDVGKAAVTVCVRTPSTRAGRRRSETRTFATMSRSLGVMRDWLVAEGVSIAAIESTSTYWKPPFYCLEEVMDVWLLNAQHMKAVPGRKTDVRDAEWIAQLLEHGLLRPSFVPPPPIRRLRLLTRYRDQLLADRTREMIRLELMLEDASIKLSAVVSSLKTVSARAILAAMIDGEDDSRVLADLAKSKLRRKIPQLTEALIGHFDDNHARLARSILHRLDLVEAALTELDEVIEQACAPWAHQIELLCTIPGVGVKVAQVFIAETGGDMSRFPSAAHLAAWAGLAPAIYESAGKRTPAGARHGNKWLNHMLVESAGSVGRMHGKNYLAVQHARLTKRRGMGRAQVAVAHSILVAAYWMLKRDEPYHDLGPDWHVRRDTEAHTRRLVAQLERLGHTVALDTPAA

SEQ ID NO: 186506 - protein, 344 aa, unidentified
MLIIGCDFHSGFQQLAIFDNRTGEFQERKLLHPGQAAEFYRSQPEPVRVGMEAGAPCQWFRRLLSECGHELWVGDAARIRAAEPRKQKTDRRDAELIMKLMRQERFPRIWLPSEEERDVRQLLTDRHHRMRRRTQVKNQLQSLALNQGLQKGRKLWSQAGIEQLRELPMMEHAARRRDELLRTVVQLDAQIAELDVLVRRQAEGRAEAKRLMTHPGVGPQTALGMVLTLGDVGRFENAGKVASYLGLIPGEYSSGNKQRLGHISKQGSSLMRFLLVEAGQTAVRGDEQLRRAYARLAAKKSRAVAKVMVARRLAVRLYWMLRNRWTYAELARHAGKPGSSCGER

SEQ ID NO: 186507 - protein, 410 aa, unidentified
MVERFVGIDVGLREHRIAILDRDGEAVGPSFTIAASTDGVATLVRTLAVRDATPTQTLIGLEASGHLWENLEAALGGAGYRVIVLNPLQTRRYRDVVRRKAKTDDIDAHVIAGLLRSGVAQASYVPDEQIQSLRELARLRARLMADRQDYQRQLVAQLDVVLPEHRAVLGDLLTARARGILAQFPTAQHLAKANPRAIRRAAEDAGARGFSLDDATGVRDRARRSLDSGKAAAARAHVVRTLVSQLERLTSAIDEVDHAATTLLPPSEPGTGPSDAELLQTIPGIGPQTAATLLGELGAFTRFTDARALVAYVGFYPVIQESGARAATPRLSRVGSRIARRSLYLAAVNAVRGSGEWRTIYLRKKAQGKTAKQALVVVAVKLLHALYAMLKHRQPYNPSRLLVAPATIGS

SEQ ID NO: 186508 - protein, 326 aa, unidentified
MMNYLGIDVSKEKIDCCLFINGISGKGKSKIFSNSESGFIKLTDWLTHLNINSNDLLVTLEATGIYHENLCYFLYDLKINIAISNPMRTRRFAQGMSILNKTDKVDSEVLAKYGALAPIKYWKPDSKNFRELRDLMIRRDALSTDLVRESNRLEKSTFTKTSLHVISMIKESIDNLQTRINHIDVIINELIKNDSELTDEMSLLISIPAIGQRTALQMLTLFHGKDFDNAGAAAAYVGLVPIQKQSGTSVRGATRISKSGSSRIRAALYMAAIVAIRFNPHSKVLYDRLLKNGKSKMSALCAVMRKLVYLCYGVLKNKTPYQPDYA

SEQ ID NO: 186509 - protein, 433 aa, unidentified
MEEAQDEPLFCERAAGIDIGKQMAAVTIRVPSETRRGGRQQETREFGTTRRQLLELADWLRSWGVERAGMESTSDYWKPVFFLLEQQGLECVLYQASQVRALPGRPKTDKLDSVWLAKVTERGSLAGSFVPPEDIRRLRTHTRYRRKLTQARTAEKERCEKLLEDAHLKLSSVISDIHGVSGRDMLRALIAGERNPGVLAEMARGVMRRKLAALREALDCSFFTGEHAFVLAMMLDNIDHYSAQIAVLDEKIAVLCEPYRRQVAQLDAIPGFGITTAQDLIAEIGVDMSVFPTAGHLCSWARVAPRVKESGGKRKGKTATGRGNPYIGGALGEAAVSTGRTQTFLGAKLRRLCRHMPRKKAQGAIMRTQLCAAHALLSDPAAEYLELGPGYHEERAGSRRQARGHIRSLERLGYKVTLEPVDPDTGELTAQAS

SEQ ID NO: 186510 - protein, 344 aa, unidentified
MAHTTIIGIDVSKNFADACAISAQGEVMLETKIFYDTVGLQHFLKQLDQLAGEQRHCAVAVMESTAHYHRILETYLRRSGIDVVVINPLQSGSMKNLEIRKIKNDRTDAKRIAQLYLFKMLRGNAVDSILVGALKDLTRQRSDIISERVKFSNKLTALLDQGFPGFRKVFSSLRTKSALAVLARFPGPEEICGANRIDIAKTIAFAAGRNTESAYAVKKANHLLDIAEQAMQLQVERGSFKTLITLFAEMLIQIQRAADQIERQIFETAQCDRTFWSQVELLTSIPGIGQYAAVVILAEIGDFSRFKKAKQLVAFAGIDPAVKQSGTSAYKHNKISKKNHKLLH

SEQ ID NO: 186511 - protein, 408 aa, unidentified
MNPLFVGIDVSSRSNVAYLMNPDGSKYSSFSVQNNLGGAKLLSERIVSALSSMRLSDVVIGLEATSIYGDSLVYALREDGSLGRFQRKIHVLNPKQVRKFKEAYPDLPKNDFVDAFVIADHLRFGRIAKEVYMDDYRYQALRTLTRARFDVIQNLTREKQRFANYLFLKCSGMAQDKDIQNTSATTIALMERFETVDDLANADLDELTAFIAETGRGRFADPNAVAKVIQTAAKGSYRLPKTVNDTVNQAMSVSIASMRALKEQVKVLDKAIEQQFEIIPNTLTSIPGIGKVYSAGIIAEIGDIHRFSSQASVAKFAGLVWHKSQSGEFEAEHSQMIKSGNRYLRYYLLEAANSVRRCDSEFRRYYDLKFKEVNKYQHKRALALTARKLVRLVFRLLKDNRLYIPPEG

SEQ ID NO: 186512 - protein, 451 aa, unidentified
MKKKNEKTKIVKVSSGLPVFYAHAAGIDIGDTEHYVATPDGKGGHEVKCYDAFTCDLRNVVSDLKEKGMTTAAMETTGVYWLNLYLLLEEAGIEPWLVNAKHVKNVTGRKKDDTDAIWIQKLHACGLLQKCFQPDEQVRILRTYVRQRKNLITICSDSVRRMQKALELMNIKLHTVISDILGKTGMQMVEAILKGERNPEVLAELTDPRIKATRETIIKSLEGIWKDEYLFMLQQAHEEYLFYQKQIKCCEEKIRKQLLQQVAIVNEGDISAITWQKEVKKKVRKNQFSFQITPYLKAMTGVDLCKIPSVNEITALELISETGVDMNKWKSAKHFAAWLNLTPNTKITGGKIISSKVSKKKNKAGQFLKMAASSLSNSKSPLGDEYRRMKAKFGGKGAALAMAHKLSRIIYTMLKNKTEYNAEIITGNQKKWREQKIKRMEKQLEKLKKTA

SEQ ID NO: 186513 - protein, 348 aa, unidentified
MSEAYDGPQVVGMDLHRRRSVLVRMTADGRKLETTRITNSPAELRKVIARAGRRPRVALEATYGWYWAADTLAAAGARVHLAHPLGVRGFAYRRVKNDEKDAADLADLLRMGRLPEAWIAPCEMRELRELTRYRIKLVRLRTSCKDQVHAVLAKLGVPVTCSDIFGVWGNTWLDGLELPQPYAGKVASLRTLATELTAEITVLEAAIADLLAHHDGYHAIQALPGIGPVLAAVLVAEIGDITRFPAPARLCSWAGLTPRHRESDVKVRRGHITKQGSPLVRWALMEAIQHVPAGHPLRQRKDDILARRGKEAKNIAKVAAARQLLTWVFYAMRDGQVRALAASSPKAA

SEQ ID NO: 186514 - protein, 341 aa, unidentified
MISVGMDVSKDKINVCVSLNAKAGEEKKHTEFTIKNDSKDFPKFLQKTKGLKINNEALQVVMEPTGIYSLPLATWLYKKHIKVFMVNPYKAKHYALSEGNGSKNDIIDARMLASYGETHSLVAWAPKSEIITKLDYLLSRIGQLVDMRTQEKNHLEKADFSLEFTKRMKEDVKRIITIFDNEIKLLEAEIEKCLKSCSTLFKERERLMTMPGLGKTTSLALVLHFNEREYKSADHLVSFTGLAPKERQSGKYKGETHISKKGPSRIRGYLYMAAQTAAGHNPLFSQKYKENCAVGKSKKSQLCAIMRKILIISYSMWCNETVFDCDYEKKRRAEMQLKKIA

SEQ ID NO: 186515 - protein, 420 aa, unidentified
MCLRWLSIATKLKELIVLNAVGIDVAKGKRVVSILRPFGEVISSPFELCHTSSAIDDFIHSLSNLEGEVRIVLEYTGRYHEPIARWLSDADFYVSVVNPKLIKDFGNNSLRKVKSDKKDALKIARYALDNWNDLRQYCFMDKTRDQLKTMNRQFDFYMKHKTALKNNLIALLDQTFPGANTFFTSPVRKDGSQKWVDFVASFWHVDCVRKVSLSVFTERYRKFCVRKGYDFHPDKPAQIFEASKELIALLPKDKMTKNLIMQAIEQLNTLSRTIEQLRLQMDQTAAQLPEYPVVMAMKGVGPSLGPQIMAEIGDVRRFSRRGALTAFAGVDPGVNQSSTYNQKSVRTSKRGSAQLRKSLFQVMDVLVKTSPENDPVYAFLSKKRAEGKPYYVYMTAGANKFLRIYYGRVKEYLASLSEEE

SEQ ID NO: 186516 - protein, 373 aa, unidentified
MGDYSEVFVGMDVSKSRIAVALAEGGRKGETRFLGEIEASEGAVEKLVRRLSAKHEGVRFCYEAGPTGYGVQRLIGKLGHECSVVAPSLTPRKPGDRVKTNRRDALSLARLLRAGELTAVWVPDDRHEAMRDLTRARAAAAVDLRVKRQQTGAFLLRLGRLYPRKKTWGGAHKTWLMSQAFAHLEQRIAFAELLLAMREAEARVVRLEKAIGEAVADWSLAPLVVALMAMRGFDLVAASTLLAEVGDLSRFRSPRELMAFLGLVPSEASTGDRVHRGGITKAGNGRARKVMIESAWCYRHPAHIGPAKLRRVEAAPPAVQQIAWKAQTRLTARYRALIKRGKSKNVAIVAIARELCGFVWAIHRALCEERAAA

SEQ ID NO: 186517 - protein, 420 aa, unidentified
MRGIRSKKVGVVKESTLIATIDIGMTSNTGYCTTIDGRDIKPFRFENTREGFDKFWDMIVINKNRFVCGEVIVGYESTGPYAEPLVHYLRNKPVKIVQVNPMHTKRMKEVNDNSPLKTDDKDPRVIADIIRLGHALTVIVPEGHAAYLRRLNNARERHIRERTALLNQLQQLVFLLFPEFKTVLKNIKVKTARYILEHYTTTETIGAMVKETLGEEMRKKSRGKFGIEDANMLICLAQGTVGIKEGIAGLVLDIKHMLTQLETIEGFITEIESEMEKKLGEISYSIKLLSIKGLGIVSVAGLIGEVGDFTKFRTQSEIMKLAGLDLYEISSGRRKGERRISKRGRSLLRKILYYAAVQTIRKNGIMCEYYADLISRGMRRMMALVAITRKLLRIIYAIVRDNSEYKVDYELRRKVIKRAA

SEQ ID NO: 186518 - protein, 342 aa, unidentified
MDHFAGLDVSVKETSVCIVDDTGKIVREVRVASEPEALLPVLTNPGYHFKRIGLEAGPLSQWLFSALAEAGLPVICVETRHMRAVLKAQINKTDRNDARGIAQMMRVGLYRPVHVKTLRSQKLRMLLTHRKLLQSKAIAIDNDLRGTLRNFGLKVGMVGTVKFEARIKELVENLPDLAELVEPLLVVRRVLREQFVIQHRRLLAIVRNDEVCRRLMTVPGVGPVVSLTYRATVDVPARFRKSKSVGAVFGLTCAKYQSGEVEWSGRISRCGDEMMRVMLYEAAQSMLRSKKWSWLKAWAMQIARRRGMKKAIVALARRLAVIMHRIWVDGTEFRWTRETVAA

SEQ ID NO: 186519 - protein, 406 aa, unidentified
MAVMIGIDPHKGSHTAVAVTATEEPLGKVRVRACPAQAEQLVAWAAAWPERTWAVEGAPGLGRLLAQQLLAAGERVVDVQPKLAARVRLLHTENTGKSDPNDALSVAVAALRSKGQRPVLADDHATVLKVWAKRHRDLSRAHNQVACRLHAVLCDLVPGGVADEITAGHAAKILGQITPADPAAEARKELAAELLADIRHLDAQRREIKKKLATAVKASGTSTTQIFGVGPVIAATVIGDVVTVARFPRRDHFAAYNGTAPVEVSSGEKKIYRLSLRGNRRLNHAIHMAAITQIRYKHSDGRGYYERKIAEGKTHKEALRCLKRRISDALYARLRADARNAAAASTRDPGGQPGNDSVSSAAGSHPEHRLFGSATPGPAPSLRSATALPQAMRPSEPSAKKTRRDP

SEQ ID NO: 186520 - protein, 339 aa, unidentified
MKYTPVGVDIAKHVIQIHFINEHTGEVVDKQLRRQDFLTFFGNREPCLIGMEACGGSQHWARELTKLGHKVRLLQARFVKAFIMGNKNDVMDARAIWMAVQQPGKEIAVKTEEQQSVLVLHRTRMQLVKFRTAQINALHGTLLEFGETIHKGRAAMEREFPEALERMKERLPPYLIMVLENQYNRLNELDSLIEDIEKQLTSVARQNETCKRLLDIPGVGPLIATAAVATMGEASAFKSGREFAAYVGLVPKQTGSGGKVRLLGISKRGDTYLRTLFIHGARAVALVAKEPGPWITELKKRRPASVAIVAMANKLARTVWAITAHDRKYDRNHVSIRPY

SEQ ID NO: 186521 - protein, 428 aa, unidentified
MADPANATPACNLVAIDIDRYGNAVLIEATSGKRHRFKMANTAADFGRLLGFLHGLPGNCRVGLEPTGDYHRPLAHRLLRAGFEVVSINSVALSRYREAIFNSWDKNDPKDAGVILEMLRRGDVQRYVDPIMVGTHDLQELAKTYYQVSRARTKVQHSLINHGLTLYFPEMHRYWCTTRNDWFVRFLLQFPTPAHVRSLSCAEFVDAAWDVVGRKVNKRAKLEEIWEMAGATAALPHAPDSLAVETFRITLRRYQQLNALRAELEVRAEQALASNEDFAHLKTLPGIGSVIAMTVLAEGGDLRRFGHHRQFLKYCGFDLAKNQSGTQRGKEQLSKRGNARLRLAFWLAAVAAVHMKENSFRAKYERYIRAAPEDPDLRRKALTAVAAKMARVAHGMIKKNQPYRQFFEQSLPSGSIPLSAAVGAHATP

SEQ ID NO: 186522 - protein, 335 aa, unidentified
MLIIGCDLHTRFQQIAYMDMTTGEIVTRPLEHENCEARKFYAGLPEKARVGIEATGCTQWFERLLAELGHELWVGDAAKIRAGVVRRQKTDTRDAEHLLDLLLTNRFPRLWIPTPEERDVRQLLQHRSKLVSMRTSVKNQLHYLAMNQGVCRKRQLWTKRGRAELLALNLGPWASRRRQELLELLDRLDPRIEELDEVVKAEAERRPEVVNLMQQKGVGPVVGLAFALTLGPVERFANSRKVVSYLGLNPREYSSGGHQRLGPISKQGNEMLRWLLVEAGQSAAQYDPELRRKYQRLKFRRGANVAKVAMARQLAVRLYWRLRSAGCGTAGSHAK

SEQ ID NO: 186523 - protein, 356 aa, unidentified
MQPQVTKKNDFKGKELFIGLDVHKKSWSVTIVVDGIEHRTFTQPPDPLVLNNYLQRMFPGGDYKSAYEAGFCGYGIHRGLNSLGINNIVINAADIPTSQKDKLQKHDPIDSRKIARSLEKGSLRGIHIFDRDLEELRSLNRTRFYLMRDLRRSKNRIKSFLQYYGVAIPSEYDNNLWTLKYVSWLKQIKMQTMSGQDALNNLIRSYEYHREQLLILSRQIRQRMREYDNELYSLLKTISGIGPLTSSALITELGDINRFPHIDHLSSFVGLIPRVRESGETIHTGGITFRCNSFLRTLLIEASWQAVRMDPAMMQYYQKHVINNKGHKVIIKVARKLLNRIRYVMKNRQPYVTGVA

SEQ ID NO: 186524 - protein, 343 aa, unidentified
MESYVGLDVSLKRTSICVVDRTGKVLCEGTVNSAPEAIVEFLKSKAAGAVRIGLETGPTSTWLWTEIKALGLPVICIDARHAKAVLKMQINKSDRNDAFGIARIMQCGWYKEVRVKGLDSHAMRALLESRALLVKMKRDLENQIRGLLKNLGLIIATARGQAFHARVQELVAGKPFLAVAVLPLLETRNGIVRQIADLDREVLILARNDDQVRLFMTVPGIGPITALCYRATIDEPSRFKRSRSVGAYVGLTTRRYASGEVDWTGRISKCGDAMLRSYLFEAAGVLLTRVQKWCALKAWGMRLAKRVGLRKAKVAVARKLAVILHRMWIDGTEFQWSADKVVA

SEQ ID NO: 186525 - protein, 416 aa, unidentified
MKIVRPICCGMDVHKNIIVATIGITNKKTRITEYIQETFSTLNSDLLNLKQWLINHKCFDACMESTGKYWIPIFNILEDEINIYLTHPKYVKAIKGKKTDKKDSKWICDLFKHDLIKFSFIPPKEIRALREISRYRYKLVGMRSSERNRYQNCMTVSNIGIGSVFSDPFGKSAQAIMKEVLESDIIEDEKILKCIHRSCKNKDKILDSIKHCNIETDQRFKMNESMTHMEELQVHIDNCEIEMMKRAAPMFDQFMHITQLPGISTLSAILIISEIGVDMKQFESDKQLTCWAGLAPANNESANKKKSVRISKAGQYLKPLLVQCALGAIKDKEGYFGIKYSRIKKRRGHKKAIIAIARMMLVSIYHMILTGETFNPSDYESFRNPNPPIKQQVLTEESAIEFLKKSGFDVSKLTKP

SEQ ID NO: 186526 - protein, 404 aa, unidentified
MPTYFVGIDVSKFKHTCCIISEHGEIIKKSFDFSNSKEGFDSLIEIFKSIDQSESSFQIVMEATGHYHECLFRYLVANNYLAQIKNPVVITRFKQSEYLDKAKTDNLDALLIAQYASKHPFSPSMLKSYNIERIRRISRAKYFLYQDKERTINHLHRYLDESFPELIPFLRKREDIKRYQGRNFFDSKTTLWFLENFPSAKKFSNARSETAEKLRRMSKGAFSLVKFNELRKIAKGSIGVAYQETEEIIIQLVQELRNIQERNDKLDELLIPLIDETSPNLLTVPGIGYRLAGLLISEIGDASEFPSADKVIKFAGLDVRVYQSGTIEKHGAIRKRGSPLLRYALFQAAEKARIHCPEIAEFYSRKKSEGKHPICALTHTARKILRIVWAILKTGQNYSQSISD

SEQ ID NO: 186527 - protein, 367 aa, unidentified
MKKVSTTAAKQSKNFSEQKLTIGLDLGDRWSWYCVLDGAGEIVLEQKLGTTPTAMKEVFGGMPRSRIALETGMHSPWVSRLLSELGHEAIVAHARNVRLIGESRKKDDRLDAQTLARLARIDPQLLSPVKHRSAKAQADLTVIRARAGLVRARTALVNTARGLAKSYGERLRGCNVRNMNPEKAEGLSPELQTALQPLLAGIESLSERIREYNERIEKLAQESYPQVALLKQVKGVGTLIALTFLLTLEDAHRFGKSRDVGCYLGLQPGRRNSGQSEPQMHISKEGDPYLRTLLVQGAQHILGPFGADCDLRRWGLKLAERGGKSGKKRAIIATARKLAVLLHRLWVSGEVYEPLHNSNQRAMPAAA

SEQ ID NO: 186528 - protein, 284 aa, unidentified
MKKCNRVGIDVSAKELIVAIEASGRREAPIALANDADGHRKLIQLATKRGASAQVVLESTGTYGLDLALALHRAKRVAVMVANPRAVAHFARASLQRSKTDRLDAETILEFAKRMPFTPWSPPAPAILELRALSRRIEAMSKSVVQEKNRLHANDQSEELSAFVKEDIRELADLLESRIARLRKQALLVIERSEDLAKAFAHITSIKGIAEASGISILAELAVLPADMTTRQWVAHAGLDPRQFQSGTSIHKPARISKTGNAHIRRSLFMRKRSVDPMFHQASG

SEQ ID NO: 186529 - protein, 420 aa, unidentified
MDVVVERCAGLDVHKDVVVACVRYPGPDGEPKTETASFSAFTADLLALRDWLLTTGVTRVAMEATGVYWKPVFYVLEDAMECWLLNARHMRNVPGRKTDVGDAEWICQLTEHGLVRPSFVAPPEIRDLRELTRYRRTLAEERTREAQRLDKVLQDAGVKLSSVASDVLGVSSRAMLGALVEGTRDPAVLADLAKGRLRAKLPLLRSALEGRFGARHGILVSEILSHLDYLDEAMGRMTSAIEEAIAPFADARDRLCSIPGVDRRIAEAIIGEIGVDMGRFPTAAHLASWAGMCPGQHESAGKQKKGTARHGDSWLQRHLAVAAMAAASSKGTYLHAQYRRLSPRRGKLRARKAVGHSILIACWHILANEGVTYLDLGPDWFDRRNTPAIRARRKLSELRALGCELRINDDGTTTVVLPAA

SEQ ID NO: 186530 - protein, 375 aa, unidentified
MEGAPMLDTTTFVGLDVHARSIKAVSLDVMTGEVRAATFGYDAGAVAEWVRSVDPRARCVYESGVTGFDLQKRLSGLGVGCVVGAVSKMIKPSADRRRKNDRNDAEFLARMLSVGNVVEVWVPDDECEAARDLTRALEDARDDLSRSKQRLSKFLLRHGFVFDERTPTGRRKGNWTRAHWSWIESIRFAEGADEEVLAYYVDAVRRAAEEKARLERLVEGEARKPRWRRRVDSLRCLKGVDTASAADLVFEAGEFSRFRNARSFAAWVGLTPSEHSSGESDRRGAITKAGNKHLRKTLVEAAWHYLTCSGRPKDLAKGQAPDRGARRHAAKGVRRLVERREALLARGVHGNKANVATARELACWVWAVGLMAEEA

SEQ ID NO: 186531 - protein, 378 aa, unidentified
MNRIIKIGMDVHTTNYTLCIFEPSFEHDGTVHCITQVKPEVKNIIHVIETFKKKHENEELNIVCGYEAGCLGYSLYHELKEKGIECVILAPTTMKTEKGGRKLKNDYRDAKMIAECLAYGGYSAVHVPTELDNSVKEFIRMRDDIKENLKSIKQQIIAFLTRNGKQFDGKSFWTRKHIDWINTVSFSEPLLQDTLKEYMIEYNHLCDRVETLDKQIEEISVKEEYVEKVQQLQCLIGIKTHTALSLIVETSDFNRFKKGNMYSAYLGLIPGDDSSGGQENKLGITKAGNSHLRKLLVEAAQGYTRGKVGFKSKVLKSRQEKCSSEVVAYADRANERLRRKYYRMILRGKRYNVAKTAIARELACFVWGIMTDHIDLCS

SEQ ID NO: 186532 - protein, 351 aa, unidentified
MRKIAYLAMDVHAKHCVLGDMDFRGNFKGTQTFPTSEKNIIKALKGVKATKKYLTLEEGNLSYWVAQVAAPYVTEVIPCDPKENALIYRGSKKNDKVDTKKLCRLLRLGELKRVYHPETDDRAIFKAAAQHYIDLRDQQIALKQKIKAMYRHWGVIDVAGEALYSTAKRDDYLRQIKHLLIRNQVSRLYHVMDQTESMQDRALKAMKQLGRKYPEIKQFQEIPGIGAILAHFFDAFIQTPHRFANKRQLWRYCRLGVTDRTSDGKPLGFKRLDRSGISELKSLSYRAWMSALRSDNEVRRFYSTSLQRTFNRVHARLNTQRKIIAAMYGMWKRGETYNPKLFLDSPQSGAV

SEQ ID NO: 186533 - protein, 418 aa, unidentified
MIDDVQWFVGIDWATQNHRVCLLDVEGRHVSERDFAHGGAGLTELRDWLLEKTKAAPGQIAVAIETPHGPIVEMLLDQAFLVFAINPKQLDRFRDRFTVAGAKDDSRDARVLGGSLRTDRQAFRRLVVDDPLVIELREWSRIAEELQQERTRLANRVRQQLWRYYPQAIELTDDVADDWFLGLWQQVPTPAIAATASEEVITRILKDHRIRRLDAATVLQTLRKTPLFVAPGTTEAACAHIRSLAARLHLVNQQIKEAHRALDGLCAKLEAPTESPSGQIRGQRDVTILRSWPGIGRIVLATLLTEAAEPLRTRDYHVLRALAGTAPVTRRSGKQCFVIRRHACNGRLQTAIYHWSRVAIQRDAVARRRYDALRRRGHGHARALRSVGDRLLYALCTTHKRQTPYNPNYQTAQVTAIL

SEQ ID NO: 186534 - protein, 421 aa, unidentified
MDKCVAVDPGRSLVCVAGIDISKRDAKVAVRIQGAGSRKTQVNVTTWGSMTTDVLALRDHLIEAKVTCVVMEATGDYWKPFYYVLEDTLTVMLVNPHEARNRPGRKTDVGDAAWLAELAAHGLLRGSFVPPPPIRALRDLTRARTLIARDRGRQSQQIEKILEDAGIKLSSVATDIMGVSGRAMLEALIAGDNDPAAMADLARMALRRKIPALTEALTGRFTAHHGFLIRMHLDLIEQHTRALAQLEERIEAAMTPFSPARELLIGIPGWSKTVAEIFIAETGADMTVFPTAAHLASWAGTSPGANQSGARAKPAATRPGNRYLKGALGVAALSVARHKTGFYGAKFRRITARRGPMKALVAVEHAMLTTAWTMLSTGEVYRDPGADYYLRRQPDRGKANALRTLQDLGYQVTLQPLTRPA

SEQ ID NO: 186535 - protein, 380 aa, unidentified
MAHNQMIQTEVKDSTGKQVLYISLELSNKKWKLTFGDGQRKRERTITAADRKAFQEELIKTRKHFRQEEGCKIYSCYEAGRDGFWIHRYLESIGIQNIVVDPASIEVNRRCRRAKTDRLDGLKLLTMLMRHWGGERKVWSVVKVPTLAQEDERRPNRERNRLIKERGAHAARLKSLLVLYGIHAEVGSKFLQLLEDVRAWDGSKLPEHIVQEMKREYERIGVLDHQLKQIKEEKKRQLGAHPEQLQKVQKLARLRAVGPISSWDLVFEFFGWREFKNVKQVGGAAGLAPMPYSSGEMQIEQGVSKAGNRRIRALLIELAWGWLRLQPESKLSRWFQERFGGGGKRMRRIGIVAVARKLLIALWQYLEKDIVPEGALLKKA

SEQ ID NO: 186536 - protein, 371 aa, unidentified
MKITAIGIDLAKSVFPLSCGNARGEVVERKLLKRAQVLEYLATLEPCVVGLEACGGAHYWARAIEALGHRVKLLSPALVAPYRKGQKHDRNDADAILEALTRPTMRFVAPKSIAQQDLSELHRVRSRRLKQRIALSNQIRALLHERGLVARAGMPGLRAAVTAALADERNELSPAMRELLGELMAELREVEARLKTVDQRLGEVARHDERCRRLCEVPGVGPLISTAIVATVGNAREFKSGRELSAYLGLVPRQHSSGGKTVLLGITKHGDRYLRTLLIHGARSVLYGKQHQTHPRAAWMTRLMAARGPNLAAVALANHNARVLWALLSRGERYRPQAQRPATRSFPPRPSSAGAAVRRAVAKNCSAPQTP

SEQ ID NO: 186537 - protein, 342 aa, unidentified
MSVYVGIDVHRKRSQVAVIDQAGQVLANRNVPNGVEPILKVIGGLPPGTAAAFEACYGTSWLVELLEDYGFDPHLVHPSRCKAIASARLKNDKVDAAILAQLLRADLLPEAWIAPPPARQLRALLRHRVALVRLRTRLRNRIHAIVADYGHDRPAGGYWTGPGRAWLAALPLPAVSRELIGDDLGLIDALQERIDRLDGEICQRARSDPRVKILTQLPGVGPFTALMILAEVGDIRRFASARQLASWAGLTPTVRGSDRVAHYGHISKEGSAWLRWVLCEAAQTAKRSPQFAATFQRIAQRRGKKIATTAIARKLATRAWHLLADTGPGAAPQPAAPQTAAR

SEQ ID NO: 186538 - protein, 469 aa, unidentified
MFESPSGSGYGTDRPAALDGSLGMAARYPPITRPLIETYDIDRWVRTCRRGYRQGQQKKERSEGAEPAMSQVWAGIDSGKWTHHCVVIDQSGTVLLSKRVENDETVLLDLVETVVGIADGDNVCWATDLNSGGAALLIALLAAHSQQLLYIPGWIVRHAAATYRGNGKIDAKDARIIADQARMRTELQPVRGADQISVDLRLLTARRTDLICDRVRAINRLRGTLLEYFPSLERAFDYSKSKAALTLLSGYLTPDGLRRIGIVRLTAWLKNRGCRNSAAVAQKAVDAAGAQRTVLATQATGSVLVTKLAAEITVIDHELADLDAQITERFTRHESAEVLLSLPGFGPVLAATFLANIGGNLDGFDTVDRLAAVAGLAPVPRDSGRISGNLHRPRRFNRRLLRTCYLAALSSLKNSPASRAFYDRKRSEGKSHKQALIALARRRINVIWAMLRDHTTYQEPGPAARSLVA

SEQ ID NO: 186539 - protein, 361 aa, unidentified
MDKITRVGVDLAKRVYQIHAVATAERTVLARPMSPERFLAWSAGLPAGTVVAMESCSGAHHLARRLRLMGLDARLIAAHFIAPFRVQGASGKNDANDAAAICEAASRVRTRCVPVKTAQQQGWQGIHRLREGYKEERTACINRIRGLLAEFGLVFPQSPDALRRVLSVVLEDASNEVPGMMRLALQRAQAHWRGLDDEIAWCDQQVKQHVRDEAAATRAAQLHGVGELTASALVAAVGDMRQFKSARQFSAWVGLVPSQNSSGGKSRLGRITKRGDDYLRTLLIQGAKSALLAASKRSDRISQWLLQLRERVGWQKALVAMANKNARILWAVLTREIDYNPEHVPPAPLSKQPAAKVPLPT

SEQ ID NO: 186540 - protein, 335 aa, unidentified
MQIYGIDLAKEKFDVSFFDLTSKKVSNQPSHKVVTNNLKGIGKFFKGLPSDAVLVAEHTGVYGDTLLKCCMDSNVKIAFVGGYVIHRYRATPDRAKTDVLDCALLRDFGERYPDKLKYKTFPEEALYELRQLARHREMLVEQRKQLITADRSEDCRPIRSLAVKRSMDRIKEMLDTEIAETEKEMLKVINGHESIHHNYELVKSVDGVGLITAVELLVKTENFTKITTARQYAAYAGTAPYEKSSGKMDKGAHISKIGNRRSKTLLYICAESSRLHNKEIKLYYERRTLIDKKPRHYVLNAIANKLLRIIFTLVEKGEYYDANFIRQDPRVVKYN

SEQ ID NO: 186541 - protein, 350 aa, unidentified
MKKHSNRNKSIPVETIGIDLGDKMSHYCMVNQDGEVVEEGSFRNQVSSIETHFRGERRRIALEAGAQSAWISRELERLGHEVIVANVRQLKWITASDTKNDPADAHKLALLARADVGLLAPVEHRTAEQQGELAVIRARDAILRARTLLINSARGIAKGFGLRLPKSITSTFGKRALADLPATLQTALGGLLEQIDALSQRIASYDRETAELAERHPELERLTSISGVGKLTALTFVLTLGRAERFAHSRDVAGFLGLRPKQRQSGGRDPQLGISKSGDPYLRKLLVQCSHYILGHWGKDSALRRWGLAKSGSGHKATMRAIVGVARKLSVLLHRLWISGQFYQPFPQMA

SEQ ID NO: 186542 - protein, 346 aa, unidentified
MRFYQQQHEFYCGVDLHARSMHVCIVDHEGQTKVHKNIDAHPDRFLPLIRPYREGLVVAAECMFAWYWLADLCAAEEIPFVLGHALYMKAIHGGKAKNDRIDSQKIALLVKGGMLPVAYAYPKAMRATRDLLRRRNKLVHTRAEALAHIQNTVSQYNLPSLAKKLTFAANREGVAERFADASVRRMVESDLALIGHVDEQLQSLELYLVRHAKVDDPQAYHLLQTIPGVGKVLALILLYEMHDAGRFGDQRHFVSYCRLVRPAHESAGKKSAGKGHKIGNAHLRWAFGEAACLMLREVPAAQTYVARLEKQHGKAKAISILAARIARTAWLMLKRKEAFDATQFLN

SEQ ID NO: 186543 - protein, 347 aa, unidentified
MGYFAGLDVSLEETTICVVDDAGKIVREVRVASEPEALVAFFGACAMKMERVGLEACSLTAWLHAGLTEAGIPAICIEARQAKAAMGAMPNKTDRNDARGIAQIMRTGWYRAVHVKSPPCRSWRALLTARRMVLNKRRDVENGIRALLREVGLKVGTPSRKDFPARVRELAAGEPVLMSLAESLLSVIEVMTREVERLTKRALDEVRVEPTCRQLMTVPGVGPLTALAFRATIDQPGRFRKSRDVGAHLGLTPRRYQSGETDVQGRISRCGDELARTALYEAAHSLLIRSTKWSALRAWGMNIAKRRGMARARVAVARKLAVILHRMWVDGSEFRWGKQAVAPAVAA

SEQ ID NO: 186544 - protein, 390 aa, unidentified
MQALCPRPDEHIAVRTDLNAIFVSLELSRSTWIITSLAPGGGEKMSKHSVPSGDVAALLARLSQLQEKARARTGRIFPIIVIQEAGLDGFWIHRVLQQEGIESHVVDPASIATSRRRRRAKTDRIDGEAQVRALLAYKRGEPRVCAMVQAPTPQEEDRRRISRERETLTAERVRHVNRIKGLLFAQGIGDYEPLHRNRRERLEALITGDGRPLPECLKAQIRRELDRLELVIEQVKAVEAERDAVLARAQASPGVPAPAALLLALKGIGPEAAATLWSEGLFRTFSNRKQVAAYAGLAPTPWQSGSVHRDQGVSKAGNPRLRTIMIQIAWLWLRHQPQSALAVWFRARIKRTGGRLGKTMIVALARKLLVALWKYATAGVLIEGAILKPA

SEQ ID NO: 186545 - protein, 339 aa, unidentified
MKRYVGVDLHKNSFQVCYMSKGKSRQEVFKVSPSGIKEFQRSLKKTDEVGVEATGNARYLVGEIEKTVKRVAIINPWQFKVISQSVKKTDEEDAKIIAKYMSKDLVPEVRMRSKEQQEISSLITTRDKLVKLRTSLKNKVHGILNANGYVTKKEMFSSKKAFDGIFALDISEAYKFELRVIVDQIQSLTKSIEEITGEVSKRGKGLKGYKNLKSITGIGDMSATIMLNTIGDVKDFDHEDKLSAYFGIVPRVSNSNETIRQGRITKRGNKIARTALVQSTLIAIRYNAYLRTFYDRLKAKKGSGKAIIATSRKLLGIIYRALKYDLVYEDFNRYQLAVT

SEQ ID NO: 186546 - protein, 370 aa, unidentified
MEETITFVGLDVHKKSISVAIAEDGLREEARFLGLVPNTAGALTKLAGKLEKKGRRLRFCYEAGPCGYGVHRHLAALGHECVVVAPSLIPRRPGERVKTDRRDALGLAKLDRAGELTPVWVPDADHEAMRDLVRARRAAVRALRRARQQLCGFLLRHQRIHCAKNWTLTHRRWLATVRFEHPAQQIVLQDHIHAVEDAEARRDALTAQIEALLPQWSMAPVVGALQAMRGVAMIVAVTLAAEVGDLTRFQNPRQLMAYLGLVPSEHSSGESVRRGGITKAGNGEARRVMIEAAWTYRLPARVAKLHLNRLHGLPKEVREIAWKAQVRLCARYRRLIAAGKPTPVVSAAIAREMLGFAWAIAQYVTPRQTG

SEQ ID NO: 186547 - protein, 457 aa, unidentified
MRKKMKRTAGIEEAHPFSGMSRIHPHAAGVDIGAIEIVACVPGDENTQIVKAFGNYTVDLQALAQWMKGHHIQTVAMESTGVYWIPLFEELERQGFECLLISSRSLRRVAGRKSDITDAQWIQTLHTYGLLEGSFRPQGDLVALRTLLRHRSQLVEHRSPHIQHMQKALLQMNVQLSQAVTDITGMTGQKIIRAILAGVRDPQTLAALREPGCKKSEEEIGKALTGTWREEHLFVLKQSVLLYDFYTQQIQSCEEEIERLYGLTRPDWEEGEVEPFTRRKKNSHSKNLPQHPEEIRKHLKRISGVDLSVVDGFGVSLAQTVIMEVGTDMSKFPDEKHFCSWLGLAPKHEISGGKVLKNNTLKTRNRAGQAFRMAAQSVKKAENVFGIFYRRLRARLGPSQATVATAHAIARVVYRMLKYKVEYEPLSVNEYQRQYEAQQIKYMKKRAAKFGFQLVPT

SEQ ID NO: 186548 - protein, 417 aa, unidentified
MHMFEYFAGIDWGSETHQVCIVDSAGEVSAERAFSHGGAGLAEMAAWILARAGVEPHAVGVAIEIPHGPVVETMMERGFTVHSVNPKQLDRFRDRFSPAGAKDDRRDARVLADALRTDGHAFRRLDPAAPEIVELREWSRIASDLTGDRTRLVNRARQQLWRYYPQLLKVESDLTKAWVRELWCLAPTPAKAQRVRAATVAKLLKRHRVRRIDGETALRTLREPAVSVAPGTTEAAVAHVEVVFSQLAVIAQQLARAYGELDRLSATLSRSAASPEDEPGIDAQRDVEILRSLPGVGRIVLATLLAEAHDPLRRRDYQALRCLSGVAPVTKRSGKSLIVIRRLASHNRLQDAVYHWAGVAIQHDPVSKAKYAALRARGHGHARALRGVADRLLGVACAMLENQTVFNPAFARQAHAA

SEQ ID NO: 186549 - protein, 394 aa, unidentified
MNEIFVGIDVAKDLSNGQGLNAKGETLFSFSFPMNSEGFSKLLDALKSNSRDLSDVLVAMESTACYHINLFSFLTANGVNAIVVNPLLIANFARLSLRKTKTDKKDAGTIAQFAMIHKDSISQLSVPSDLQDLRDLARESESLCQLISINKTEIKRLLQTLFPELETISDPLTKVMLDFLQEFSSARMVAAAKPKTIVKALNRKGVGTRLTYTAADLIQAAKNSVATVSPAKELILRVKIATLKHLYDQRHELNRALTAACKSMMIEDLEIITSINGIADNTATAFLAEIGKISNFPSVKNLVAFAGIDPSVYQSGKYEGSSRLSKRGNRDLRRVIWLMTVCVIQHNPTFRGYFMKRKEAGQPFKKAAFATAHKLVRVIFAMLTQRTHFREVCI

SEQ ID NO: 186550 - protein, 396 aa, unidentified
MNAVGIDVSKGKSMVTILRPFGEIVSSPFEIKHTSSDIHSIEGESRVVMEHTGRYYEALAHQLSAADLFVSAVNPKLVKDFNNDSLRKIKSDKADSVKIARYALDKWQSLEPYSITDELRAQLKVMNRQFHFYVKQKTAMKNNLIGLIDQTYPNANTYFNSPTRSDGSQKWVDFVSTYWHVDCIRKMSLNAFVEHYQNWCKRKKYAFNKSKAEEIYTKTKELVPVFPKNEITKHIIRQAIDQLNSTSVTVETIRTLMNETASKLPEYSIVMQFKGIGPSLGPQLMAEIGDVTRFTHKGALTTFAGVDPGVNESGSYAQKSVPTSKRGSSNLRKTLFQVMDVLIKTMPQDDPVYQFMDRKRTQGKPYYVYMTAGANKFLRIYYGRVKEYLSVLPDPS

SEQ ID NO: 186551 - protein, 456 aa, unidentified
MPDMKKDKQKEQKVVEMDAFEQINHNAAGVDVGAEEFYVAVPKGRDTESVRKFPTFTADIHRLADWLARCSVKTVAIESTGVYWIPLYEILEKRGFEVYLVNARHLKNVSGRKTDVLDCQWLQQLHTYGLLRASFRPSEQICAIRSLVRHRDMLVSYRSAHIQHMQKALNLMNVRLTNVLSDITGVTGMKIIRAILNGERNRKTLASYRDAKCAKSEEEIEKSLEGNYKLEHLFVLKQALELFDFYDQQMKQCDQELEILYNEFEPPDQPGTPAPEKRQRKRRKNQPHFDLSESLYRMTGGIDLTKIDGLEALTVQEILSETGTDMSKWPTVKHFASWLCLAPNNKITGGKVKSSHTPHTKNRASNAFRIAAQSLMKSKSALGAYCRRMAALHDAPTAITATAHKLAKIFYFMLKRREAYRPLATDYYEKEHRDKLVRSLQRRAATLGFRLETVTS

SEQ ID NO: 186552 - protein, 409 aa, unidentified
MFFYIGIDLSDKFLDSCITNSFGDVISRNRFDFDDRGFSAFLCELQEHEVSSENCAIGLENPRSRLVDFLIQREFAVLLTNPKSIARYRESRIASKAKSDQADAQLIADYIREHHKSLRRISIPDQTIRELSILLEDRDRLVQQKVRFSNQLTSTLKEYFPQTLDMFSCIANKSALEFLRKVDTFAQLKSLSTADIEQLLRDCQINRKDSKENFHNVMKKPVSQVSQAVIRAKVRLKNAILTHLILLTEQIDDYEKQIQQVMDETPHGDLFRSLPGSDYILAGKLLVLYSSRNFRSANEVQSLCGTVPYTVRSGQSKAVRFRKGCSKFGRKTFHQLAFSSLRGCQWAKKRLSQKRKEGKGLHHSLRCLANSWVKVTFAMWRDKTPYDESKYLVSVASHIINQPASVLGG

SEQ ID NO: 186553 - protein, 343 aa, unidentified
MQTATTIGLDLAKSVLQVHGVDREGVVVIRRALRRSKVLDFFRLLPPCLVGLEACSSSHYWAREIIACGHQVRMIPPIYVKAYIKRGKTDAADAEAICEAVTRPTMRFVPIKDAEQQAAGMLLRTRDLLVRQRSQLANAFRAQMSELGVISAAGMASIAKLADKVRDPDVLLPPVARLALLEMAEQIDVLSDRIERLGQEIQAAVKADETARRLTSIPGVGPLIAATIRASVNDVEGFKTGRDFAAWLGLTPRLLSSGGKEKLGSISKQGNRQLRTLLVVGASSIIKQAKRGVPLPAWLTGLLARKPYKLVAVALANKTARIIWALLAKGGVYKKPEATEPAA

SEQ ID NO: 186554 - protein, 447 aa, unidentified
MDVVFTHCAGLDVHKKTVMACRVTPDPMGQQVDGIMEVREFGTLTRDLLALSDWLTEAGITHVAMESTGEYWKPVYNLLEGTCTVFLVNAAHVKNVPGRKTDRADARWLAKLMRYGLLQASFIPPMEQRDLRDLTRYRTKLVQERTREINRVQGVLERANIKLASVATDIMGVSGRAILAALIDGRADPATMAELAKGRLRSKIPVLEQALTGLVRDHHRRLLAMQVAHIDFLDEQLEALSTDITHLLTDLSAAPTPPSPAAPGGAGAAGSASELTGSDIPLTYAQAVTVLDTIPGVDQRGGELLVAEWGIDMARFGTAARLAAWSGVAPGNDESAGKQRSGKTRKGNRALRTGLTQLAHAAALTKGTYVSALYHRLAARRGKKRAIMAVAHSIVVSAFHMLSRNEPYHELGATYFDEHQREHLVDRLTRRLEHLGYRVSLEPVPAA

SEQ ID NO: 186555 - protein, 328 aa, unidentified
MRAASELARQVMVGIDVAKLKLDVALKLPNGKWRTKVVANTAPGCEELRAWLLKHGVSCAHVCMEATGVYWEPVATDLADHGFAVSVVNPAQIKAYAGACGVRTKTDAVDAKVIAEFCAAQNPAVWQPLSRSVRRLRALVDRRDALMDLRLQESNRLEVAQTDAVRTSIEQVIAHLDEQIKQIERQIAQDIEDDPTLRQQRDLLDTIPALGDKTIPAILSHYGGELRFEKTRQAIAFAGLDTRRNESGTSVKGKPRLSKKGNSAIRGRLYMPAVVAMTRTPWGKAFSERLSAAGKPKMLILGALMRKLLAIAYGVLKSGKPFNPALHA

SEQ ID NO: 186556 - protein, 323 aa, unidentified
MYKVIGIDISKASFDVSYENSAGDFYHEKISNDVRGFKSFRKLLSEDDHCVMEASGPYYLKLAHYLFKEQIRVSVVNPLQIKHFVRMRMIKAKTDKKDAQMISIYGQREQPDLWAPDDTLITRLQQINTAIEGLHKQASILNNQLEAFKQIPETDNEVIKMLKALFKSVKAKTSKLEARMTEITLEHYKDTFLALKSIPGIGDKTAMMLIAITNNFSKFNSSKKLSAYVGLSPRIFESGTSIKGKGHITKMGNRHLRKLLYMCAWSAKHHNQQCIQMYGRLREKGKPEKVIKVAIANKLLRQAYAIGSSKSHYQNNYEKVFVF

SEQ ID NO: 186557 - protein, 330 aa, unidentified
MSLFCVGVDVGARELVVSIDRNGIRESGIVFSNDAGGHRKLIRWATKKGATARVVLESTGVYGLDLAFALHRAKRVTVMVANPRAIAAFAKASLQRSKTDALDAETILEFSIRMPFVNWNPPAPSILELRALSRRIEALSKTVTQEKNRLHANQQSEKLSNFVREDIRELVELLRSRINRLRKQALLVIEQNPGLAKAFRHLTSIKGIADAAGIQLLAELGTLPKDMTTRQWVAHAGLDPRQYQSGTSVHKPARISKTGNAHLRRALFLPAMVAVRWEPNVKAFYEKLLAKGKTKMQALVAVMRKLLHSIHGMLEHGQDFDGEKFFVMKA

SEQ ID NO: 186558 - protein, 330 aa, unidentified
MKIWNVILGVDVSKLTLDICWAEQNQHIKIDNCSKGFGVFKKWCKTHGIDLKETLIVMEFTGGYEYRLLQFCESLSIPYVRVPGLEIKNSMGMTRGKSDKADAFRIGRYGEKNSDKLAPSKPLNRKILELKQLLTFRKRLVREKAGLESTVKEREHMYGINKTDTVTRIAKAKIKADEKYITEIEQQIAGIIKSDPQMLQNFRIITSIKGIGKINTWMTIAYTENFTSFPDGRTYAVYVGVIPFEHTSGTSIKKRKRVSYLAHKELKQELNQAAKTAMVHDKEIAAYAERKLKNKDYALVLNNVKFKLILRMFSLVKRGEKFVENYKKAA

SEQ ID NO: 186559 - protein, 367 aa, unidentified
MTIMPTDTRNGRVIIGVDTHKQFHAAAVLDERGALLGTATFSADSAGYRLLIDWAGQFGMLARFGIEDTGSYGRGLAAAVRCSGHDVVEVMRPNRQDRHRRGKSDLLDAENAARAVLAGTADAIPKSDEGTVEMMRHIKIAKDAAVKARTAAMQSIKSVLVNAPAELRQALEPLPNMALLRRCVGLRPGELTSVSAAVKHTLRAVAQRWFTLDEEISVHERLLSGLVDQLAPQLTAAVGIGPDNASESLLALGDNAERLHTEAAFAKLCGTCPIPASSGKTHRYRLNRGGNRRANRALHRIVVVRMKYHEPTRGASNRRRAAAVAMRRAGRRPTPVECCCRRAGKIDKTRLARLTKPRRVARACQSR

SEQ ID NO: 186560 - protein, 334 aa, unidentified
MLRIADAGPLVTGGVDTHAEVHVAGVAGQAGRVLGTGEFPATTEGYHAALAWMRGHGDLVKVGVEGTGSYGAGLARYLAGQDVEVAEVIRPNRQARRRRGKSDAADAVAAALAALNGEASGTPKSGDGAAESIRALRVARRGAVKARTQAGNQLRDLIVTAPEQVRDTLAGLTTAQRVALAARFRPGDLTGPAEGAKAAMAAVARRHQVLTAEITQLDASLGALAGMPPRPGSWQRRASAPRSPPHLLATAGDNPGRLRTEASFAALCGASPAGASSGKQRRHRLNHGGDRQANSALWRIVFTRMTCDPRTQAYVARRTAEAKTCGQTVTSTGS

SEQ ID NO: 186561 - protein, 455 aa, unidentified
MEGRAVILLDETFAALDVAMRLAMQDLAAGLLALGAGTGCLLALSMASCRRLAAALRPLLLVSQMIPIFALTLWLGYGMAPKIVVSALICFFPVASAQPSPSPQPSCSGYEQERDAVTGPASRPARYRCKIEGKLAPFPYRNPKEDCGMKLFVGLDVSLAKTAICVISEHGKIVKEAQVASEPEALASWVGQLDGTIAAIGIEAGPLSQWLHRGLSDAGLDVVLMETRQVKGALKAMPIKTDRRDAEGIARLLHLGWFRPVHCKSVSAQEVRAVLGARKAVQQSMIALELSLRGLLRNFGLKVGTISRGRFELRIRELTVGNPMLEAATEPMLRARSSLRHELAGLERRVRHLAQDDAVCRRLMSMPGIGAVVALTYRSAVDDPARFTSSKKVGPWAGLTPSRNQSGERDVSGGITKAGDVTLRRALCQAATVMMHRGRSTWLRTWAAQVARRRG

SEQ ID NO: 186562 - protein, 345 aa, unidentified
MNDYTQSKDIEIMAIDLAKSSFQLHGVNHSGHKVVAKKLTRKRLKAFMIKLSSCLVIMEACGSAHYWGRLFQSYGHQVKLIAPQFVKPFVKSNKNDAADAEAIAEAGQRPSMRFVSIKSVAQQEALALHRVRSQAVKNRTALVNQVRGFLLERGIEIPRGREHVRKHLAEIVGDQDNDIGIRFRHLLQDLYDDLVALDARIERYNKEFSISAQECESIQRLMSIPGVGPQTASAIVASIGDITLFKNARELAAFLGLVPRQSSTGGRPTLLGISKRGDVYLRTLLIHGARSVLQRVEKKSDAVSQWANNLVQRRGKNIAAVALANKMARVVYALLSKEENYHAPA

SEQ ID NO: 186563 - protein, 384 aa, unidentified
MKTNSDAPKTLYLGLDVHKEKTVIAILESHRDAQPRHYGEINTSQHALERAMRRIAKAQSRALSDLHVCYEASGCGFWIARRLLQMGVRCEVIAPSLIPTKSGDRLKTDKRDAAKLAKSLRANDLVPVNIPDSVDEAIRDLCRGRTDAVDDLRRARARLLAMLRRLGYRYDGKTNWTQAHMNYLRGLKLPDSAHNIVLEDNLAIIDFHHKRIDKLEAEMLHLLEDWQRKPLVDAMMAFKGFQIVAAMVTVSEIGTFSRFEHPKKLMAFLGLIPSENSSGSKRRQGSISKAGNPHARWLLIEQATHYSKPPKVSAQLSRRQAGTDRWIRELSWSTQLRLNTRFKTLGKRGMHRNKIKVAVARELCAFLWELGTRIESNATCAAAK

SEQ ID NO: 186564 - protein, 411 aa, unidentified
MGRCIGMDIHRDFAQVAVVENGLLRDEGRVDCRPRQLREWAQTLRPDDQIALEATANSAAIAVLLEQHVARVVISNPVKTRAIAEAKVKTDKVDARILAQLLAADFLPGTWLPDEHTRMLRRVTMRRAHLVRQCTRAKNQIHSVLHRNLLPRPPVSDLFGRAGRAWLGVQTLPADEQSTVQALLRQLDFQQNELAAVERELAADALGDPTVRRLMTIPGVDAITGITLLAAVGDFGRFPSAGQLVSYFGLNPKVRQSGGLPAQHGHITKAGRTQARAVLVEAAFAAARGPGPLRAFYRRIAARRGTQIALVATARKLAVLSWHLVTKQQDYAFARPSLVAFKQRKLELTAGLPTAHGNHRGAGYAYNKKELRAQERAIAEQAERAYQVLISRWQPVPTGKSTQLPAIPGQP

SEQ ID NO: 186565 - protein, 376 aa, unidentified
MSVYVGIDVHRKRSQVAVVTEEGTVQVNRNVPNGVAPILKVIGDLPTGTSVAFEAAYGWGWLVELLEDYGFDPHLVHPLRCKAIASARLKNDKVDAAILAQLLRADLLPEAWIAPKEVRELRALLRHRVALVRLGTRLRNRIHAVCADHGYHRPDRTWTGAYWTGPGRQWLDALDLPEVSRQITWDSLGIIDAIAPTIDRLDREIHARANADPRVKVLTALPGVGEFTALVLLAEIGDITRFGNARKLASWAGLTPTVRGSDLTVRHGHISKQGSPYVRWVLGQAAHIAKRHPEFAASYQSIATRRGKKIASVAIARKLLTRAYHLLAEPPGQTTTDDSTCVARDPRVRPQTGRVTKPGRARPSGMSRPRQTRASD

SEQ ID NO: 186566 - protein, 428 aa, unidentified
MIKANSIKLAAINPATLIVGVDIAKKLQWASFTDYRGLELGKAIEFANTKDGFKNILASINTTCKLKSLRNVIVGMEPTGHYWKPLANHLSANGVTVVMINPYHTKRAKELDDNSPTKSDRKDSLTIARLVRDGRYYEVYLPRDVYAELRVLSNTRIGLIKRQNALKNNITAVMDEYFPEIKTVFKNPLKGKASLQILKSCPFPELIIALGEERVLAEIKKAVKRAVGRKKACELVEAAQNSIGVNYGLTAAHLKLRLLIEELELLTIQLEQVKEAMSLALSETGYKDLLLSIPGVGIVSAASFLGEIGDPLRFEHPNQISRMAGYNLIENSSGQNQSRTVISKRGRKNLRSILYQMALVMVARNNEMQELYQYLKKRPDNPLKKKQALVVISKKIVTIIYHMVKKQAHYEAELVFNQFRKNQIKQVA

SEQ ID NO: 186567 - protein, 324 aa, unidentified
MLPTLGIDINKDSFHLELSINDKLRHRKFVNRKEGFGELCVWLAKHKATQVHACLEATGPYSEALALYLHQQGHTVSIVNPVQIKAFGQSELRRNKDDRPDAGLIRRFCEKQRPAPWTPPPPHLRELQALTRHLENLIETRQQQINRLEATNTKQVAKSLRKLVAHLDAEIKRTEEQIDNHVGRHPDLKQQSELLESIPGLGKRTAAKLLAEIPDITQYKSARQVAAHAGLTPRNNRSGTIRGKTRLSKTGNARVRKALFFPAIVAKRHNPIVRAFCERLARNGKNKMQVVGAAMRKLIHIAFGVLKSGRMFDPNHELFIKPVC

SEQ ID NO: 186568 - protein, 322 aa, unidentified
MLYVGIDVAKNKHDVTALNVPGKTVLKPLTFSNNKAGFELLDLSLRQLNQDCLIALENTGHYSFNLLNFLHEQGYKVYTYNPLLIKEFAKSLSLRKTKTDKKDAHGIALKLLSDPNREQFQHDNRQVELKILARHIHRLKRKQSDWKVQYTRCLDIIRCLDIIFPELDKIVGKHSEYTYQLLTCYPNPQKRLEAGFDKLIEIKRLTASKIQDILSVAPHSIGTTSPAREFEIIENIKHYKRLIDKAEKCVNDLMAEFNSVITTVTGIGNRLGAVILAEIQNIHAFDNPAQLQAFAGLDSSIYQSDQIDLAGRMVKRSSPHLR

SEQ ID NO: 186569 - protein, 341 aa, unidentified
MQITTIGLDIAKNVFQVHGVDAAEQVVVRKQLRRTQVTKFFAAVPPCLIGMEACATAHYWARELTRLGHQVRLMPAKDVKAYVKRNKNAAADAEAICEAVRRPTMRFVGVKSAEQQGRLMQHRTRDLLLRQRTQVINALRAHLAEFGIVAAQGREGLKELLEIIADKADERLPIDAHASLIVLAAQLQALQTMIGAIERRIMAQHRANEASKRIATIPGIGVLGASAITATVSDPSAFRSGRDFAAWIGLVPRQDSTGGKQKLGPISKQGDRYLRRILVVGAHSVLRLAKKNPQKHPWLTQLLARRPFKVVAIALANKMARVAWALLARGGTYRVPALAAA

SEQ ID NO: 186570 - protein, 324 aa, unidentified
MMTPALGIDVSKDRLDVEIAACGKPRSKYFANSPDGWRHLIAWLKELKIKRVHACLEATGRYSLGIALALWEAGHIVSIVNPAQIRDLARTKLGRNKTDAVDAGHIREYAEIFKPQPWTPPSPAMQRLGELQTIRAGIVSSLTEWKNRCGSGLADDTALALVKATITHFAAQLAEVDKTIAGTIDNDPDLSAKRDLLLSISGVGEVLAGLVLSELPGTDVLRSSAQAVAYVGLNPRSHRSGSSIDRPTRISKIGNATLRSALFMPALSAMQHNPVVAALAKRLKAQGRLKGKQIAVAAMRKLLVLCFGVLKSGKPFDPALAMPN

SEQ ID NO: 186571 - protein, 341 aa, unidentified
MSLFAGLDISVKTTAICVLDAHGRILLETMVDSAPEAIADRLRELDQPFERIGLEAGPLSQWIYAGLVDVGLAAICVETRHMHAALSARINKTDRNDARGIAQMMRVGLFKAVHVKTPASQHRRLLLTSRKLLQRKIYDIENDLRGSLRNFGLKVGVVGKIKFEDRIRELVVDHTLVAAIVGPLLEARAALRTQFAKLHRMLLDLVRVDPVCRRLMSAPGVGPIVALTFRTCVDNPARFSRSKCVGAHYGLTPRLYQSGEVSRTGRTSRCGDVMLRSSLYEAALVVLTGPGRWNPLKAWGIAVARRRGIQKAMVAVARKLAIILHRMWRDEADFRWTVTAA

SEQ ID NO: 186572 - protein, 341 aa, unidentified
MGQASTIGLDIAKWVFQAHGADATGRVVFRKRLVRAKVLEFFAGQPRCLVALEACGGAHYWARELGKLGHTVRLIPPAYVKPFVKRQKNDVADAEAICEAAQRPGMRFVPVKEEAQQANTVVFRARDLLVRQRTQCINALRGHLAEYGHVVPQGPAHVDSLVALVEDPKSSVPESARGILQVLIRTLNALEEQLKELDGEIARRAKADPVARRLMTIPGIGPIAATAITALVPAPEGFRAGRDFAAWLGLTPLQRSTGGKHKLGAISKMGERTIRRLLILGASAVVRWASRRGAAAGSWLARMLARKPRMLVTTALANKMARIVWALLVKGGTYRAPAVAA

SEQ ID NO: 186573 - protein, 355 aa, unidentified
MTSTQYIGMDVHKESISIAVRNAVGKIVMECVIETKASTILQFMDGLRGDVQVTFEEGTWAAWLYDLLKPHVTKVVVCDPRRNALLQEGNQNDRVDARKLAELLHNNQLRSVYHGDHGLRTLKELVRSYLTITQDLSRVMTRVKAVYRSWAIPCTGKQVYAPHHRAEWLAKINEPGVHRRAEFYYQQLDALRCVRQQVRRELLAESKKHPAWKRLCGIPSIGPIRAAVLLGILQTPHRFRSKRQLWTYSGVGIETSSSADHQVVKGQLERKKKPVEIRGLNRNFNHDLKNLFKGAAIVAATKPGPFAEFYAELVAKGMRPEMARLTLARKIATIVLIVWKRGVCFDAQHLKPQTA

SEQ ID NO: 186574 - protein, 316 aa, unidentified
MKSSQSFVGIDVSATRLDVAVLPAGTHFTVPYTDDGIAALVHTLRDLAPQTVVLEATGGYEIPVVYAMSGASLPVVIMNPKTLRHFAKSTGKLAKTDKLDARVLAHYAQSIQPPVRPLKDPEQLELGTLMSRRRQLRDMIVMEGNRRRTSTPKIRHNIDQHLTYLRQLLKDLDREIHDFIRRTPLWHEKSAILQGVVGIGPKVSASLIADLPELGTVPRPQISALAGLAPMNRDSGKWRGKRTIQGGRPMVRQALYMAALVASRHNPVIRVFYQRLLAAGKPKKLALTACMRKLLVILNAMLKNRLHWNQQLPLAA

SEQ ID NO: 186575 - protein, 417 aa, unidentified
MNYCLSIDVGKNKSCYGLFRVNDVTLGIKDGMECIIKQTYFNHTAEEAKKIEDRITSYSKNEIAVIMESTAVYHRPLQKYFEDRGYKVSVINPFLTGHDNSSLRKTKYDKGDVSKIAFVYFKGNCNIQFVETILEKNRRILSRLSEEITDTLSKRKTELLMKLAETAPEYEKTFKKSGIYTNSVLSLIDKYPHSDLIREANEKAVAKAMHYAKKNYHVKDYAVWAEKLKRENGRWLPGTDRDSAELESIHYLIAKIQEETIESDEKIAELVSVCEDEEIYKVLLTFRGIGPDIAAHLTAELGNMARFKKPQSIIAYAGFDPSKEQSSQSLDVNGKITKRGNKHLRRWLFVAVQSMIMHAKEGDREFADYYASKRGDKRKGGQTHYHFYAMTACCNKLIRKIYFRYLDACKAETEKTK

SEQ ID NO: 186576 - protein, 425 aa, unidentified
MNAPVMSKTEAPPEFAAYIGLDWGDASHAVALRPADALLESFTLVNSPEALHAWLRSLGKRFAGRSVAVAVETSRGALIHIFTAYPWLSVYPIHPATSARYRAAFTPSGAKDDQPDAIVLEELVRCHRDKLRVLEPQEAATRKLAAMVELRRDQVDRRTQSVLQLISLLKTYYPQALELAGENLSAPLAIDFLRRWPDALSLKMARPSTLSRFYYQHSVRSEKLVQERLERVRQMVAITTDEAVVDPCVLHLGALLDQIEIHGKHIVEMEKQIEILFKNHSEAYLFEDLPGAGDALKPRLLVAFGENRTLYPDVESFQKYAGLAPVVVKSGKQCWIHWRWFASRFLRQTMVEWAGKTVGQSPWAKAYYDAMSAKGKGRQEILRALAFKWARIIWKCWRTRVPYNEARYLKQLAQRKSPYAAITTQ

SEQ ID NO: 186577 - protein, 415 aa, unidentified
MADQKTIPPKRFIGLDVHKYYLIALGVDAELNVVLPAHRVELSRLEAWAKKTLTPQDAVVLEMTTNTWELYDELLAHAHSVTVVHPPHVALITRSQVMNDKIAASILARLLAKGLLVSIWVPPQEVRERRALVAQRRKIARLATQAKNRLHALLQRHHLAPPEGNPFRTDQTAWWLALPLGKLEKSNLQSDLDTLHFAESQLARLTSMMKEIGAQDDQVTHLVHLPGFGVVTAVTVLAAIGDIHRFEDAKHLVGYAGLGATIHDSGLTTRTGRITKAGRRDLRTAMVEAAQVAANSHPHWKAELARLEPRLGRNKSIVAIARKLLVAVWFVLSRQATDRFAESEIVARKLMQIAQQIGKNNRPAGQTVAQFVRQQLDALHLGTELSQISWSSSKKPLPLPPSALQENQVSDVPNT

SEQ ID NO: 186578 - protein, 363 aa, unidentified
MYYNTIYVGMDVHKNSFTLCAYTIESEMASHFQKTEADYKKVLKYLEFLRTIYGNDTKFLCGYEAGCLGYTLYHQLSARNVDCVILAPTTMLEQRSRKRIKTDRRDAEIIAKCLAQHNYSPVHIPTATDEETKEFIRMRDDHKLALKKVKQQILAFCLRRGYRYDGNSHWTASHMKWLKALNPEALYKEILEEYLLTYTILSDKLERLDQRIEELASREEYRASVKKLCCFIGVKTHTALSVLVETGDFNRFASAQTFASYLGLVAGEDSSGDDKTQLGITKAGNRHVRMLLTEAAQCYARGQIGYKSKALKSRQSGNSLQVIAYADKANERLRRRYYKMVLAKGKKHNVAKTAIARELACFM

SEQ ID NO: 186579 - protein, 312 aa, unidentified
MAFYLGIDVSSKTLDVAFLESNTIRCEQHSNSAAGVQALLRAIATLDVAHVVLEATGGYEMQVLDALAVHYPTTRLASHRGTSFARGLGLYAKTDRIDATVLARMAQAMPAQPYVPLTPAQRALRGLVKARDQMVRQRDDNRRRIKQSESPVAQAALERINRLLNEEIKALEAQLRDAAAAADASRAEQLFEVPGVGKIAVATLLAFLPELGQRGNRQISALVGVAPYTRQSGRKDGPRQIIAGRTFVRRILYMAALAAIRSAKSPLQAQYRALVARGKPNKVAIVACMRKLLITLNAMVRDRSPWRALAPA

SEQ ID NO: 186580 - protein, 356 aa, unidentified
MVMVLGVDVHKDTHTVVAVDEVGRADGERTVRATDTGHRQLLDWARRQVPQDRMWAVEDCRHVSTRLERALLAAGETVVRVPPKLMAGARSSARTRGKSDPIDALAIARAALREPDLPLARHDDTSRTLKLLVDHRDDLVIERTKMANRLRWHLHELDPELDVPARGLNRLNLLDRLITWLAEQSRPDRLGQVLARLAAELLTDIRAATVRINALEREINTLARQAAPRLMTLPGAGGLTTAKIVGETANITRFRSEACFAMHAGVAPIPASSGRTQRHRLARGGNRQLNAALHRIAITQVRITASPGQLYYQRRRAQGDTAMEALRALKRRLARVVFNLLQADTTVAIDDLSAAA

SEQ ID NO: 186581 - protein, 338 aa, unidentified
MKLYCGIDLHANNSVISIQDEQDNVRYEKRLPNDLGVIVTALQPFQEDLQGCVVESTYNWYWLVDGLAEAGFQVHLANTAAIPQYAGIKYTNDESDARHLAHLLRLGILPEGYIYPKQDRGLRDQLRRRLLLVRQRTMQNLSLQGMITRYTGRRLSGNQIRQLTDDKLIELLPDKSAALAGRVSLALIQTLDQAVDLLEREVQKKAGKRPGYQILITIPGIGQVLGLTILLETGTIERFPDAGHYASYARCVKSEKLSNGKYKGQGNRKNGNRYLAWAFMEAAHFATIWDPGIKRFYQRKLAKSHLMVAKKAVANKLARACYHMLKEHTKFDVTRAFG

SEQ ID NO: 186582 - protein, 360 aa, unidentified
MQTQKTGLDFKGQNIFVGIDVHLKSWAVTILTENLVHKTFTQPACADTLSNYLNRNFPCGDYYSVYEAGFSGFWTHHKLKEMGINNIVIKPADVPTTQKEHLQKDDPTDSSKLARSLRAGDLKAIYVPEPSTLEDRSLIRLRATLVKDMVRFKQRIKSFLHFYGISIPAEFEKSGTHWSKRFMKWLNQGVSLQQESGTQTLKILVQEAEQQRKLLLEVLRTIRVLSRNEKYANNMELLRTIPGVGFITAITFLTEIENIERFENTDHFAGFVGLIPNRHSTGAKENNGDMTFRGQTALRKSLIESSWFAARLDPALAMSFNGYVRRMEPNKAIIRIARKVLNRMYYVLKNKREYVSGVVK

SEQ ID NO: 186583 - protein, 418 aa, unidentified
MRAVALDIHRDFCEVAIVAEGRLRSAGRIKTRPEELELFAQSLDAGDWVALEVTGNAWAIAAILEAHVARVIVVSPNDTGIRQARAKTDRLDARALAKLLWAGELDGVWTPDERVRVMRRRLARRGQLVRARSRVKNEIHAVLMRGLKDRPPAADLFGVKGRRWLAEQQLAVCERETVDAGLRQVDFLDAEIAAVDQLIAADALGWPEIKRLMTVPGVNVIVAATFMAAVGDIRRFGDRRKLTAYLGLDPRVRQSGAGPANHGHISKQGSNSARHALVEACWSTVRQPGPIAAFYARVKAKRGHSIAIVASARKLACLFWCLLTRGEDYAYAQPSLTTKKMRRLEITAGAPRRQGGPDVWSTNTAMRQAERELALQAQRAYERTVADWQTNKAGASATPGRASQRPAKATAARQTTSP

SEQ ID NO: 186584 - protein, 430 aa, unidentified
MKSNTQNAKIEAITEKTLVLGIDVGSETHYARAFDYRGVEYSKKPFKFSNTEAGFVTFKAWVLDIKEKHGKDKVIPGMEPTGHYWFNLGKFLQDNEMKPVLVNPHHVKKSKELDDNHPTKNDRKDPKVIAGLVREGRYMIPYLPDGVYADLRTASNIRFQLQAELTRIQNRINRWFNIYFPEYKTVYGKPDAKSGMLILKEAPLPEDILTLGIDGVDQIWRDAKMRAVGKARAKTLIEAAEHSVGSKEGAVSARMEIRMLLEDYESRNIRLQEVMGLIEGLVNQIPMAEKLLEIKGVGIKTVSGFLAEVGDIRRFNDPKELQKLAGLALVENSSGKHKGKTTISRRGRKRLRYLLFEVAMSLVAKNPEFRELHNYYTTRRLNPLKKMQSLMAIAAKLLRVFYAILTKGVGYDPKKMVNDIRRPAAYAQAA

SEQ ID NO: 186585 - protein, 334 aa, unidentified
MYYIGMDIHKKDTQACVLNEKGKFVHGERIRTDVVDIGHFFEKIERMNDDDLSVVIEATGFYFWIYDVIAGRGHQVKVVHPNRAKALMKARSKTDRNDAFMLAQLLQLGGLEGIYVPSKDVRELRDLTRHRESLVGKKGDLKREIIGSLDQHDIKVPAEFKTNFSNKFNEHVRKLDVFIINEKLDLLVTTIEKLKNVEAVIEERYGKDDEVELMMTMPGIGIVTASVLKGEIGDIGRFQSFGNLATYAGLTPSRSQSGEKEWFGPTGHGNDRIKHVLIEATLSHVHHKNDTKIKDFYERKKGPLGENKVMVATARKMLEAVYFMLYRKETYHAH

SEQ ID NO: 186586 - protein, 351 aa, unidentified
MGQSVANKQRKGETMYRLYVGIDIAAEKAAVAWQVADTGEWGALDIAQRRSDYARLVRQLGLQAAPADTVVVMEATGIYWLALADYLHEQGFVVSVINPLQARRFAQLHLQRAKTDAIDAHLLALYARQMQPAAWTPPPAIYYRLQQRLSYRQDLVEMRAQERNRLHALTHNPHADQAVVQRLRHHLSYLEGEIEALEAELQALLAQDHPWADAARRLSTIKGCGLITIAWLLVATQCFAFCHAPQQAAAFAGLVPHPRHSGSSLHTRRSVGRGGHAQLRATLFMAALSAARYNPPVKALYDRLLARHKPNKVARVAAARKLIHIAWAVVVNERDFDPQCALSHHTVPLPT

SEQ ID NO: 186587 - protein, 328 aa, unidentified
MCTLGIDVSKNKIDLCLLTAGPGGKKKHKVLTNEPAVARKVVDWLNAQKCVPESVTVVLEATGIYHENLAYGLHEAGVSVCMANPCRVREFAHGMDILNKNDAVDAFVLACYGELKSPAVWVPPSPEVRKLRALLRQRDALREDVQRTVNRLEKANSTSTPQEVIRSLERMKSWLNEELARIEKLITDHTDNDPGLKADLDLLKSIKGVKDQVGREMLALLKDGTFKSASQVAACLGLTPVEKTSGSSVRGRPHMSKTGPSGVRAKLYVAALTASRWNKQAKAIYERLVAKGKAKKAALGAVMRKLVHLCFGVLKTRLPWNENYVATA

SEQ ID NO: 186588 - protein, 444 aa, unidentified
MGKPQVFDDQEQGRVFERVAAVDVAKASGVVCLRLPHPAQPAGRRSQVWEVPATMHAVTELARRLTAEGVQKVTLESTSDYWRIWFYVLEAAGLAVQLVNASQARNLPGRPKTDKLDAMWLARLTEMGLLRPSFVPPAEIRVLRGYARARTRLTHDRTRCFQRLEKLLEDALIKVSAVASKLTTRSVQDMIRAMIAGQRDPQVLAGLARTRMKAKHDALAEALAGLFTDHHAELAQLLLDQIAFLDTQIARLAMLIGEQLASLRAAGGTGADGATGPGPGAIALPVIARLDEVPGVGAELAASIISETGLDMTRFPSPGHLASWAGLCGRTIQSGARTRTGKGQGNAWLRGYLGRAAIAAARTSTFLGERYRRLARRRGAARAQVAVARSILIIIWHLLNDPAARYHDLGPGHYQARTDKNRKARNHIRQLQALGYTVTITQAA

SEQ ID NO: 186589 - protein, 404 aa, unidentified
MNAVGIDVSKGKSTVAVLRPFGEVVASPFDVAHTGSELKALSDFIKKLPGETKIVMEATGNYYEPIARYLHEQNIFVSVVNPVLISDFGGNTLRKPKTDKKDSLKIASYALSYWVDLKEYVPQEDLRKSLKLLNRQYQQASKLKTMMNNNLISLLDLTFPGINKLFTSPSRESDGHEKWVDFVLAFPHCDMISKLTIKAFSRKYKKWCNSNSYYFTEAACKKIYDFSKERISGVPSEESTVFAVIQAAKMLNSATENRHAIQLEMNRAASQLPEYDTVMSMYGVGKAVGPQLIAEIGDPRRFHSRKAITAYFGYDSENDDSGQKVSFSNPMTKKGAGALRRTLFIIMQVLLQNKPVDNPVYDFLIKKQSEGKHYYSYMNAAANKFLRIYYAKVKEVLTAAEASA

SEQ ID NO: 186590 - protein, 361 aa, unidentified
MRSIVYVGMDVHQDFMVLTGVGEKGEDILFETRVRNDAEVFGRRILKLKESYELRCCYEASSCGYVVYRWLKAIGVDCMVIAPSLLPRFTGDRIKTDRRDALKLALSYRAGILTGVYVPEESGEKVRCLLRCRDALRSDVVRLRHRVLKFLQGKGLVYRDGRNWTIKHWQYLRRLEFEGADEIVYREYLELLDYYLLRLREMDQKIKELADSPAYRRKVERLCCLRGISTLTAMILLSEVIDFRRFTGAPALMGYLGLVPSQHSSGHSTRMGSITRTGNGRCRRVLIESAWHYRHKPALGVRLKKAWAEQSAELTALAWRAQQRLYKKFWRIVNRTGNSNKAVVATARELSGFIWAIMTEA

SEQ ID NO: 186591 - protein, 377 aa, unidentified
MKKISIGIDISMDDFYACIKIRTQTGSIKIKGTHSFKNTENGFKEFLIWALKAKEDDSSVIFVMEATGVYYENLAHFLYSNKQSVAVILANKVKNYIKSLNIKTKTDKTDSKSIAGFGIERELDKWQPMSPVYKNLRDLCRELLSIKKDLQRSKCQLHAMNKSHEKLESILALKIEQIRFYEKAIGIIKKEIKNAVNKDDALKEKIRKAQTIPGLGFETVVILACETNGFALFDNIRQLVSYAGLDVTFNESGNYKGKTRISKRGNSRIRQALFMPSMSATRANEPIKKLYERICDRNPDIKRKGIVAGMRKLLILTYTLWKKDEEYDIKYQWNKEPSSNDTAKPFFGPVTIKKKAEQNCSALDRPRFNELTKAFFS

SEQ ID NO: 186592 - protein, 478 aa, unidentified
MSQSKAHESPSRKKHRRLSKAQARVTKVQLEATAAKAVPAPEVKNPHAAAIDVHSDNHVVCVGPDQVLTFGAYTVDLHAIVTHLRQHGVTTVVLESTGVYWVPLFELLESEGFEVFLIEPSQAGHCGARPKTDVVDCQWLQRLHTYGLLRPSFRPPEAVLALRGYWRQRQMQVRYAASHVQHMQKALEQMNVKLTEVAADIMGMTGTRIIEAILQGEREPNRLAQLRDPSCKKSEAEYAKALEGTWRPEHLFALKQAYALYRFHHQQITECDQRMAEELARLPNRATGKPFQPRRRRGGRKSNAIRFPATQPLFKALGVDLTLIDGIEVNTALVILAEIGVDVSRFPTEKHFASWLRLCPQLQQSNQTCKKRSPRRGKHRLAQALRMAAQAVSRTQTPLAVFYHRIKARLGGKGAITATAHKLAVLVYRLIKFGAEYVRQSLADYAAQVQAQLERSLRRKAAQLGYDLVPKTPASQPS

SEQ ID NO: 186593 - protein, 322 aa, unidentified
METLGIDISKRDFHAALIHQERTAKKSFPNNSKGFEQLAAWLRNREVTMVFACMEATGPYWRALATFLFEAGHTVAVVNPKRIKAFAESELLRVKTDAVDAALIARFAASQRPQPWKPLAPEIIELQGLSRHLEFLKRSRAQHVTRAQTPELPDWVVNSSEELIAQLDAQIADLQRAIREHIDRHPGLKSKRDLLTTIPGIAHTTAAAIISEMPAIEEFASVEAVAAYAGLSPQIRQSGSSVRGKPRLCKTGNARLRKALFFPAIVGKRHNPTLQALAQRLQTAGKAPMVVVGAMMRKLLAIAYGVLKSGKPYHPPLTPQIA

SEQ ID NO: 186594 - protein, 366 aa, unidentified
MKKTSTVRVNGNMIFKGHKLTIGLDLGDHWSCHCVLDEAGRIILEQKVATTPEALKQAFAKIPRSLIALETGTHSPWVSRLLTELGYKVIVAHAQKVQLITKSNRKDDRHDARTLARLARIDPELLGPVRHRSAQAQIHLTVIRARAELVRARTALVNAARGLVKSYGQRLPKCGTRQVSRELGAGLHAELREVLEPLLKEIESLNERIKEYEVRVEKIARESYPQVELLKQVKGVGTQIALTYVLTLEDPQRFPKSREVGCFLGLRPGRRDSGESQPQMRISKEGDRYLRTMLVQGAHYILGPFGEDSDLRRWGLKLAGRGGKNAKKRAVVAVARKLAVLLHRLWVSGEVYEPLRNSQKAMRAAA

SEQ ID NO: 186595 - protein, 428 aa, unidentified
MKNRNNQKLEAITQKTLIVGVDIAKETQWARFVDYRGLELGKALKFRNDKKGFENILASIEAICKNKRLDDVILGMEPTGHYWKPLANYLMMHEVTVVMVNPSHTKRAKELDDNSQTKNDKKDALTIARLVRDGRYYEVYMPQDIFAELRVLTNARISLMKRHNALKNTITAVMDEYFPEIVTVFKKPLKGKASMQILKSCPFPSLILELGVDGVLAEIKKAVKKTVGRKKAEQLVETAKTSIGVTYGIASAKLKLELMIEELELLTKQLAQIETSMELVLADTGFGEIILGIPGMGVVTAASFLGEIGDPMRFDNPRQISRMAGYNLVEDSSGKNKSGTAISKRGRKNLRSVLYQIAITMVAVNDEMKELYRYLKTRPNSPLKKKQALVVISKKIVTVIYNLVKKQTEYKAELVLGEFRKNQMKQVA

SEQ ID NO: 186596 - protein, 317 aa, unidentified
MENLKYSVGIDIAKLDFKACISVINSSQKVIVRSTKTFNNTQKGFEEFEQWVSKNKKEDLPLYFLMEATGIYHEQLAWFLHYKGYNVTIILPNKAKKYLQSLGLKSKNDKIDAKGLAQMCAEQSLPLWSPISKNIYKLRSLTRLHEDLTLQKTASISRFKGLEYTMYELKEVKKITEKMLKVLEKELDNIEKLIKQTIDEDTVLKSKYEKISIIKGVGLMTFAVVVAETNGFELFSSIAQLTSYAGYDVTERQSGTIKGKTRISKKGNTHLRRVLHMPAFNVVKYEPIFKKFFDNVYTNTSYSDFTICHIDNINLQG

SEQ ID NO: 186597 - protein, 345 aa, unidentified
MNCYCGIDLGAKRSQVCIIDDDQKVLVNRKVANDLDTIHKLIRPHGRVPTVIESTFNWYWIVDGLQIRDVPVTLAHSLKLAAISTAKVKTDKRDALTLAKLLRAKMIPESYIYPSEDRPLRDLMRQRWNMAAMRADEYRRMRGLLYRNGIFDVGSNDIRILGEEEFNELVDHPLIRTQARYDIERVELLTKQIRSLEKDILSRVKKRKDFQDLQTIPGIGTVLALTILLEIGDIKRFAKSRQFASYCRVAPGCADSGDSHRRGRGNKQGNPYLKWALTQAAACARRSDPTFREYFAVVQRKHPGASGIIITHCIVAHRLSFAVWHVLKDGQPYNQEKLFRSNPES

SEQ ID NO: 186598 - protein, 343 aa, unidentified
MEKISTIGLDIAKNVFQVHGIDEAGNIVVQRQLRRRQVLPFFERQSPCLVGMEACATAHHWARELVKLGHEVRLMPPRYVKPYVKRNKNDAADAEAICEAVTRPTMRFVAIKTLEQQSVLMLHRTRQLFVRQRVTLTNAIRAHLAEFGIVAGTGRNGLEALLELIGKEGDERIPAAAHECLMALVVQLQLAKRQILEADRRILACHKASPVSRQLEAIPGVGPLIATALVASIPDPQAFRSGRDLSAWIGLVPKQNSTGGKEKLGSISKAGNRYLRQLLVVGAMSLILRARQLGYTRHPWLARLMERRSTKVVAVALANKIARTAWAMMARGEIYRTPGQQAA

SEQ ID NO: 186599 - protein, 302 aa, unidentified
MVVIAPKNSLTPLKGHDELVSWLKGHKIDHAHICIEATGTYMEPVAECLYDAGYIVSVINPALGKAFAQSEGLRNKTDTVDARMLAEFCRQKRPAAWEAPHPLERALRALVVRHQALTDMHTQELNRTETAREVQRPSIDAHLLWLEAELKRLEKQIKDLTDDDPDMKHRRKLLESIPGIGEKTSAVLLAYIGLKDRFAHARQFAAFAGLTPRRYESGSSVRGASRMSKAGHVSLRRALYMPAMVATSKTEWGRAFRDRLAANGKKGKVILGAMMRKLAQVAYGVLKSGVPFNASRHNPVAA

SEQ ID NO: 186600 - protein, 411 aa, unidentified
MKQQTATSMDILPQLDKACGLDIHKDKIVGFIACKDGSGQELKEFGTFTCELQKVKEWLQVNQVEHCLMESTGIYWMSLYTILTDSGISVIVANPTHIKQIPKRKTDRKDARWLCMLLMHGLVRPSFMPTAEQRVLRDYCRSRLFYSRQQNKIQNRLWKILESNNIKLRSVISSINTKTAMSIIRLLSQGVTDKEQLAECSLGRARKNKENMLLALEGTLAAHHLTQLQMLLQDFDHIQQQVKTLNSLIDESITKHYSIAFGCLDTITGIAQRSAEIILSEAGNDMSRFPTADHFTAWCGLAPGNNESAGRQSNTSIKKGNTYLKTAIVSAAWAAVRVKNSYWHALFDRMRKRMKAQKAIVAIARRMMKVVYNTIETLSPYKEKGIAYYQEMQEKAAAFRQAGKLWPSPNA

SEQ ID NO: 186601 - protein, 346 aa, unidentified
MRIIGCDLHARQQTISMVDIETGEVTEKVLLHEGEAVREFYAALPKPVLVGLEATGSMYWFLRLLEELGIEYRVGHPAAIRKAETRKQKHDRRDAELIRRLLEEKRFPQIWLPTSEQRDLRTLLQHRHQLVRMRVMTQNGLQGLALSQGLRRGAKLWSQAGQQELKGLELAGFAATRREQLQELRQELNRRRQQLDQAVSEQAEQRAGARLLLSHPGVGPVTALATDVFLGDARRFPNAKAVASYVGMIPSEHSSGGKQRNGRLSKQGNPLLRLLWVEAARAAARKDTRLKQFYRRKLVQKGLGKAVVATARKLGIRLWIMMRDQIDYTEFCRRAEQRCPRAGMPE

SEQ ID NO: 186602 - protein, 431 aa, unidentified
MNKVPKLQETNHNSRLPVFVDIAKDHLDYSIGWESGQAPTPAHRIEYRVDAVQQWIRELIEEYQLSGGDQLEFICEPTGGLQHKLMLVAQHNAARVRYVDSERMYNARMITYGNSEKTDEKDPGAMRNLYLIGRHRPAVPRDVLHQTVRSISQEYEELSQQAVRARNKIHGLLGYVFVDYNKSASFTFSRSGQALAKEFSFCPQFIIQAGYQEFTRRLKAHVSRIRRSTLQQIWTMAESSVAITDTDFPDPRLDYMVTLYEQWVRLEARKSDLKERLHDYALIYQEQGLMPGHLPPKVSPWMLVRVIAETGSLEGFSHIRQLWAYLGLKLARRQSGKYKGHIKITKKGSSLARKLLFQICLPLVKKDTWLHSAYKRQNPKGKRGGKGIRAMTSMMRKFVKIILAMHQSGDPFQMNRLSCCESQHNRKLAHQ

SEQ ID NO: 186603 - protein, 365 aa, unidentified
MNATAALPVVGIDVAKSVFQLAVADGAWRVIEEHRLTRTQMERWFANRAVGLVVMEACGSAHHWGRWLNALGIEVKLLPALYVRAYVKRNKTDAADACALIEAARCADIVPVKIKSIEQQALQGLHRARSLWMGTRTSRINALRGFCREFGIDIAQGARLGLERIERVLADPHSAVPELIRGTMKLLVEEIRLLEARTAQLERELTILARQSPACTTLLSIPGVGLLTATAMVAATSGSVQHFKDARHFASWFGLTPKERSSGTTRMLGRISKRGDRYLRMLLTHGARSVLHAAHRATLAGKQLDPLRQWALGVQGRTNHNKAACALANKLARICYATLRDAQPYGEPVRRPNKKIQRTSFALAA

SEQ ID NO: 186604 - protein, 358 aa, unidentified
MQTPRLFIGIDVHKKSWAVSIRTDLFEHKTFNMPSEPDTLIGYVNQHFNNYPVVCCYEASCCGFMPYRQLTLAGWDVKVLNPSDIPTSAKNKDQKNDRMDCRNLAKQLQSGHLTGIYVPDEQQEQLRSLFRQKNNMAKVMRKLKSQIKGELLYYGIKLPLKFDNATWTREMTTWLNNLEWKYPTGKFSLQSKLRHLSFVRQEWLDINRELRQYVTMHFKNDFQLLMTIPGIGPIIAIGILAELGDIKRFRKFDQLASFVGLIPSIYSTGETVQVRGLTHRSKTLIRSYLIESAWVSVRRDPTMQTYYRIHVGKQPNKIIVKVAHKLLRRIWHVIKSGDGYKTGHSESNKEPDNTAPTC

SEQ ID NO: 186605 - protein, 349 aa, unidentified
MVIVGIDAHKRTHTAVAIDEAGRKLGEKTTRMTTTEANLELLRWADGFGSERRFAVEDCRHLSRRLEADLLAAGEELVRVPPKMMAHARDAARTYGKSDPIDALAVARAAWREPDLPLARLDGPTRDLRLLVDHREDLVRDRVGQINRLRWHLHELDPAWDPTPRALVRFKHLEAVAARLETLEGTVAWVARDLVRRIRELTVDVNDLERRITAIVSELAPALLALPGVGALTAAKIVAETADVRRFRSKDCFARHNGTAPLPVWSSNKVRHRLSRAGNRQLNAAIHRIAITQMRIHDDAKVYLERRLAMGNTKTEALRALKRKLSDVVFRALLVDAETAAEAPFSAAA

SEQ ID NO: 186606 - protein, 409 aa, unidentified
MRQQYRFFVGVDWAKNEHTICLLNAEGKLLEHRIIQHSGAGMSELREMLAKWAGDDPGCVAIAIETPRGAVVEYLVERGFAVYSLNPKQMDRFRDRHTVAGAKDDQRDAFVMGDALRTDLHLFHWVQLDDPLIVRIRELSRAEDDIQREQVRAGHQLRELLNRYYPEMLGLCPSVDEAWFWDLLEIAPLPGARLSKAKLEKLLRSHRIRRLDVNEIQQALSVPALQLAPGAAAAASEHVLLILPMLQLLLRQRKELERRIEALLEEMSTEGRFKEHRDVTILRSLPGVGRVITATMLAEASQPLAKRDYHALRSYGGTAPVTRQSGTRKTILMRKGCNQRLRNAIYHWSRVSAQHDPRSKDHYAELRAKGHSHGRALRGVADRLLGMLIAMLASGTTYDPSRRAVSAAA

SEQ ID NO: 186607 - protein, 371 aa, unidentified
MDKGIKLFVGLDVHKDTIAVGVAEATGGEARFVCTLAHDLAKLVKLLGRYGEPARVQVVYEAGPTGYGLYRELRRRGYACQVIAPSLIPKRAGVRIKTDRRDGVKLAGLSRAGELTAVWVPDECDEAMRDLVRAREDAVQARHAARMQLKAFLLRQGVRYRGKSSWGLAHARWLATLSFAQPGQQLAFAEYWQAVRSAHERVQRLTAVLGEALCGWRFEPVVRALMSLRGLDLVSAFTLVAEIGDISRFASAAELMGYLGLVPSERSSGATVRKGAITKTGNAHARRVLTEAAWNYRFPARIARALALRQEGLAEPIRAISWKAQLRLCGRFRALRGRGVHQNKVCVAVARELAGFVWAVARAVHPQPSAA

SEQ ID NO: 186608 - protein, 356 aa, unidentified
MSMVAHTHPFVIGVDAHARNHALAILACPTGEILDEGQFPATGAGLQRAVDWVARRTGGDLDTLWVVEGVGTYGARLARAAADAGYSVAEAARMNARANRGVGKSDPLDACRIAQAVLPLEVAQLRRPRTDDGVRAAVRVLIASRDHISVERTAAINALTALLRVAELGVDARRALTGGQIALVAAWRTREEALATRVARAEAVRLAKRVLAADQEIASNAKQMTALLNSSPARKLLDQPGIGPVTAAVTLAAWSHPGRVRSEAAFASLAGVNPIPASSGNTVRHRINRGGDRRLNRALHMAVVTRMRMDPATRAYVEKRTAEGRTLREIRRCLKRYLARQIYRHLNAASDTLLAA

SEQ ID NO: 186609 - protein, 347 aa, unidentified
MVTLGGDCHKRTHTLVAVDENGRELGTKTVAAVEAGHLEALRWASQWGQRRWALENCRHLSRRFEADLLLAGETVLQVSPKLMAGARRSAREWGKSDPIDALAVARAALREGDLPMARLEGESREVKLLLDHRDDLVGERTRVQNRLRWHLHELEPTFDVGARSLDRKVVLSQVAKVLARHHGVGAEIAVELLERVRELSRRINELEGQIRTLVSRLAPNLLQLEGCAALGAAKLIGETAGVSRFKTSAQFAMHNGSAPIPVWSGSQARHRLNRGGNRQLNAALHRIAITQIRFGGRGHAYVERRRASGDTKREALRALRRRISDEVFRRMWQDLLAMETVVHEAAA

SEQ ID NO: 186610 - protein, 422 aa, unidentified
MMKWLDAKRQIYDEELHAMNNVAGVDVSKGKSMVSVLRPFGEVVAKPFSVGHTGSELKELADYLKSLDGETRVVMEHTGRYYEPVACFLHEEGIFVSAVNPKLIKDYGNNTLRKVKTDKADARKIARYGLDNWAELRQHTLMDTIRTQLKTLNRQQGLYTKTKTMMKNNLIALLDQTYPGVNDLFDSPVREDGSQKWVDFATAFWHVDCVRNMSFAAFTERYRKWCKRNGYNFSQSRAIKIHTEAQDLIAMLPKDALTKTMVRQAADALNAVSKSLERLKAEMRSLASQLPEYPVVMAMRGVGDSLGPQLMAEIGDVTRFAHRGSITAFAGVDPGADQSGTHEAKSPRTSKSGPPELRKALFLVMDCLLKTMPADDPVYRFMDKKRSEGKPYLVYMTAGANKFLRIYYGRVKEYLASLENAD

SEQ ID NO: 186611 - protein, 441 aa, unidentified
MQILFSRCCGIDVHKDSVTACVLIYTEGQEPEIRKKEFPAHFKSLGNLRFWLMAQKVTHVAMESTGVYWKPVWQALEGHFELILANPFQIKTVPGRKTDARDSQWIAELLAHGLIRPSFVPPRATRDLRDLTRYRVKLVQERNRVHNRIHKVLEDACIKLDTVASDILGATGRAIIQAIIAGQEHPDWLADKARGKLRGKRAELRLALRGRITDHHRLMLRELLEDLEFVERKISRLETEIATQVDHGKLDRLCSIPGVDLITGCTLLAELGSDMSVFNSPHHAASWAGLCPGNQESGGKRLSTRTRKGNQWLRRALCQAAWAATRKKNSYIAAFFYRKAGKHGMRKAIVATAHKLLIISFCILRDGTEYQELGDNFFDRLHPERTRNRLVRRLQRLGLEVVLQPRSDTPLALEPPDRSSARKRGRPCKCIERGIPCKHVP

SEQ ID NO: 186612 - protein, 322 aa, unidentified
MSKHSIVCAGIDTGKYKLDLALNGSRQQLQIDNTTDGHAALSSWLKRHKVERVGIEASGGYERNVVTRLRGDKFVVVVFQPAQVRAYAGFLLQRAKNDKIDAALIAACTAAAKKIHAPPDPRLAPLAERMTLIDQLTDQIARFKNYREGSRDLRMRQLWKEQIAHFNKLLRAELKELVAAIRQHRDLAERLDLIESVDGVGLKTAVAILVRMPEIGSVTREQAASLVGLAPFDDDSGMHAGIRHIAGGRERLRGSLYKASLSAAFHWNPQLVALYQRLIAAGKLHKVALIACARKLLIFVNTVVERGTPWVSSRSPAVRAAA

SEQ ID NO: 186613 - protein, 342 aa, unidentified
MKKISVAGVDLGQSCMHVHLADERGRGLGAKRLSRSRFVAFFAQLAPCLVGMEACRGAHHWARELEALGHTVRIMPAQFIKPYVKTNKNDWRDAEAIGEAVTRPTMRFVAVKTLEQQSVQMLHGARAAAVASRTATVNQLRGYLHEAGVVIPRGINRLRRELASVLEAGEQRWPALMVRVLRTLHEELRALDARIEAYERELESLARHDPLCQLLMTIPGIGPLSATGLVAKVGRGEDFTSARHFAAWLGLVPRHSGTGGRTQLYGISKRGDRYLRTNLIHGARSALRSVERRDDARGHWARDIAQRRGFNVATVALANKMARIAWAMLQSGQSYRPLVCAK

SEQ ID NO: 186614 - protein, 285 aa, unidentified
MEGVAVIGLDLAKSVFQVHGIDGAGGVVLRRRLSRTKLVPFFAGLPRCLVGMESCASANYWARELGALGHEVRLMPPRYVKPYVKRSKNDASDAEAICEAVTRPTMRFVGAKSREQQAVLVLHRARRMLIRQRTQVGNAIRGHLAEFGIIAPVGRQGLDRLIAVIADETDHRVPPCARTCLAMLVGQYRLVLANLLETDRVIRADSRSSELGRRLQEIPGIGPLVASALIASVPDPHVFKTGRCLSAWLGPSRGNTRRAARSASAASPKLATPTCARCFSSAQWP

SEQ ID NO: 186615 - protein, 317 aa, unidentified
MTLPTASFVGIDVSKQQLDVAVRPRDETWTVAHDEAGLSALVVRLRALAPTLIVLEATGGLEVALAGALATAGLPVAVVNPRQVRDFARSTGTLAKTDRLDAQLLAQFADAVRPDPRPLPDAQAQELTALLQRRRQLVEMLTAEKNRLTFAARRIRPQLQAHIEWLHKQLAQFDDDLRQLVRASPLWREKDDLLRSAPGVGPVLSTTLLAALPELGRLTRQQIAALVGVAPLNRDSGTLRGRRTVWGGRAHVRAVLYMSTLVATRHNPVVAAFYRRLRAAGKAPKLALTACMRKLLTILNAMLKHHTRWAPALAQHA

SEQ ID NO: 186616 - protein, 308 aa, unidentified
MTIIGCDYHPGFQQIVFVDTKTGEWKEQRLEHREPAEKFYRELASRREKMRVGMEASGHARWFERLLAELDIELWIGDAAAIRAKRGRRKPKTDRQDAQHILHLMLKDDFPQIWVPSWENRDQRQLLWHRHRMVQARTRLMNQLQAVALNEGLRCKRRLWREKGRKQLEAIRLGPWASRRRKDLLQLLDGLNPTITELTQAIQQEVEKSVEARRLMTHPGVGPITALAFVLIIGRAERFQCGKQIAAYLGLVPLEDSSGERRRLGHITKQGSSMLRFLLVESAQMAARSIPQCTGLDIEPLWLANRCV

SEQ ID NO: 186617 - protein, 344 aa, unidentified
MKDVVTIGLDLAKSVFQVHGADRAGNAVLTRALRRAQVLDFFSRLPACLVGIEACGSAHHWAREIAAIGHDVRMIPPVYVKAYVKRGKTDAADAAAICEAVARPTMRFVPIKTQQQQAAGMVLKTRELLVRQRTQIANALRGHMSELGIVTSAGMANIAKLAGLLRNPDTAMPDLARRALLEMAEQLDGLNERVESLDEEIRSGVKGDETTGRLTSIPGVGPLIAATVRATVHDPHGFRSGRDFAAWLGLTPRLLSSGGKEKLGSISKQGNRRLRTLLVIGATSIIKQAKRGTVLPAWLSGLIARKPYKLVAVALANKIARVIWALLTKGGAYRTATLIAVLPA

SEQ ID NO: 186618 - protein, 396 aa, unidentified
MNATHESHSIPAKAVLYMALELGERKWKLGFTVAPAQPPRLREIAARDLIALAVEIRLAKQRFGLPEDATVASCYEAGRDGFWVHRALLARGIDNRVVDSSSIEVNRRKRRAKTDRLDAEQLLKLLVRSQNGERRAWSEVRVPSEDEENARQLHRELQQLKEEQTAHTNRIKGLLTSYGISMAVDRRFPQRLEAARTWNGQRLPEDLSQRLLREFARMQQLNGQIRHLERERVRRLRDEEQDQGIQQMRQLLRLRAIGPNMAWLAVREVFGWRQINNRRQLASLAGLTPTPYASGGESRDQGISKAGNRRLRALLIEIAWRWLLYQPGSALSQWFWQRFGHGSKRLRRIGIVALARKLLVALWKYLRSGLPPEGAELVDWRGKLRCDTLSLTERAA

SEQ ID NO: 186619 - protein, 348 aa, unidentified
MLHAGLDLSRRKIDVCLLSAGGEIVEEFASPPDADGLRGLTRRVGCHGVAVRGVIESMTGARFVHDRLEELGWDVLIADAAKVKGLAPLACKTDRIDARVLAVLSERDLVPEIWLPDPRVRREREQARFRMHLVKHRSMLKHRIHATLITFGHPCPVSDLFGVAGRELLERLAIPQPWRGTVDASLELIGDLDRQIDAINKDLRSSGADHPYVPLLLTVPGIGWVLAFTIAAEIGDIRRFPSAKKLCGYTGLCPRVNQSGDRDRRGPLTKQGPKYLRWAMLEATMHALRHPAYAERYQRNKRRLGRQRGAKVAQIDIARKLTEAIWHMLTTNQPFTPAPGGSTFRLAA

SEQ ID NO: 186620 - protein, 406 aa, unidentified
MIFVGVDWAEAHHDVYVEDGDGKRLGGGRLPEGVEGIARFHELVGDHVDEPGEVVIGIETDRGLFVTALVAAGYQVFAVNPMSTSRYRDRHSTSGAKSDPGDAKVLADMVRTDRHNHRPVAADSETVQVVKVLARAHQTMVWSRQRQTNLLRSTLREFYPAALVAFDDLASGDALEVLRLAPTPELGRTLSLQKIAAALRRGGRQRHIEGRAAEIQGVLRAEQLAAPAAVSSAMGASVAASVAVIATMVTQIAGLAEELEAGFEQHPDAEVVRSLPGLGTILGARVLGEFGDEPNRYHTPKCRKNYAGTSPITRASGTKRVVLARYARNHRLADAIYMWAFAALSASPGARALYDTRRAAGDTHHAALRALGNRLVGILHGCLESHTAYDETIAWGHRTAPLADVA

SEQ ID NO: 186621 - protein, 350 aa, unidentified
MFIIGCDYHPGFQQIACVDTDTGELSEHRLAHREEAEAFYRVLKQRNLSARVGMESSGHSRWFERLLQELGFELWIGDPAEIRSKRVRKQKTDRQDAQLLLRLMLENRFPRIWVPDAENRDLRQLLWHRHRLVQMRTRVMNQLHVVPLNEGLRRKKALWRPAGRKELESIALAPWASRRRQDLLDLLDQLTPKIQDLTHALEEEVEKRPVTRLLMTHPGVGPLTALAYELVIGTPERFHCGKQLASYIGLVPTEESSGDRRRLGHISKQGNVLLRFLLVEAAQVTVRSQPEWRSKFFHLAMRRGRKIAKVAMARKLAVHLYWMWRQGLDYGQTQKLGSHAGEPGNRDGEQ

SEQ ID NO: 186622 - protein, 411 aa, unidentified
MQVMFERCAGLDVHKKQVTACVLISEGKEIKSELKSFGTTTPELLELNDWLKAFAVTQVALESTGVYWKPIYNLLEGNFELWLVNAQHIKAVPGRKTDVKDAQWLAQLLCHGLVRKSFVPPLAQRQVRELSRHRSNLVGRRGQCINELHKILESTNIKLGSVATDITGVSARLMLEQIVQGETDAEVLAELAKGRLRHKRESLKKALQGKVQPHHKLILTQLLADLDWLEEQIQEVSSEIAQRMSAEEELIERLDEIPGVNERVAQVLIAELGTDMSRFGSAPHLVSWAGMCPGHNESAGKRRSGRTRPGNPYVKSISVEAAQAAARKKDSYMGARYRRLAARRGRKKAIVAVGRTILEAYYYMVSRGTRYQDLGENYFDKRNPERIVKRLSQRIENLGYQVKVEPLKKAA

SEQ ID NO: 186623 - protein, 402 aa, unidentified
MKASKQHLRFCGIDMAKQKHVACIIDQDGHYLLKPKSIRNDADGFGQILNCLKQTGRTKSILVGMEATGHYWYSLHDFLTRQGYTVVVLNPIQTALQAKQAIRKCKTDKHDAFHIANLLRTDQYKAAVIPGELAMTCRQITRLRYRIIKQGAMIKQLVNSRLHPAWPEYEELFSNKFGTTSMKLLQTASTPKELMELDSDNLSELIHKASRGRFGPAQTQKILQSAKNSVGMQRGHYGISTGIKFLLEQIEALAPVRKKMDAEIVKLTAKVPEYLFTLPGATELTIVSLYGEISPIEAFKKPSQLVAFAGLDPKVFQSGQYDAPRRRISKRGSPYLRRSLWQMAYRALCTEGDLRDFWRRKHRQNKHHLVATTAVANKLCHIVWRIMTDRRDYVRKGYNPKS

SEQ ID NO: 186624 - protein, 482 aa, unidentified
MVVPNEEPKKPTKPKKPAKPKKPAKPRKSRESSLPVPVPASAAGLHVINPDAAGIDIHSDMHMVCVPADRDANPVRQFGANTADLQEIVAWLKKCRIKTVALESTGVYWIPLFELLESEGFEVYLVEPGQLSRCGARPKTDVLDAQWIQRLHSYGLLRASFRPPDSVLALRAYWRQRQMQVRYAASHVQHMQKAVEQMNVKLPEVVSHITGVTGMSIIGAILGGERDPVKLAQLRDERCQHSEEQIALALQGTWRPEHLFELRQAYELYQFHHRQISECDQQVEAELANFPNRAGEKTRTVRPRKHGRKSNDVRFEAAGPLFKALGVDLTLIEGIDVATALVILGEIGVDVSRFPTEKHFASWLRLCPPQNESNKTNRRHGHRKATNRVTIALRMCARSVGQTMAPLGLFYRRIRSRIGGLGAVKATAHKLACLVYRMLTYGQEYVTQSMEEYEAKVKANMLKALKRKAAAMGFELSPLPTQ

SEQ ID NO: 186625 - protein, 412 aa, unidentified
MRIVNKVCCGLDVHKRTVTACLLNWGARGQAVKEMRTFQTTTPQLLELADWLTSHGCQLVAMESTGVYWKPVYNILEGVCREVLLVNAQHVKNVPGRKTDVKDAEWIAELLSYGLLRGSFIPPQEIRELRDLTRYRTTLIRQRADQCNRIQKLLEDCNIKLASVATDILGISGREMLASLAAGETDPRRLAELARGRMRNKIPELTEALQGVVRPTQRWLLSQQLEHVAHLDRMIAELNEQIEKLATPFFPLIEKLSRIPGVSRHLAEVIIAEIGVDMKQFPSAEHLASWASICPGNRESGGKRRSGRTRPGNPWLKAALAEAGWAASHTRNTYLSARYRNLARRRGRKRAILAVGHTILKISYHLLATPDAQYTDLGADFYETRSKDQLAASLVRRLQKLGYQVQIDSTAA

SEQ ID NO: 186626 - protein, 342 aa, unidentified
MNHYVGIDVSLEASNVCVVDANGKIVREGKVASEPEALIAWLKGLRLELTRIGLEAGPLSQWLFAAMRQAGLAVELLETRHVRNALKTMPVKTDRNDARGIAQLMRLGWLRPVHCKSIPAQETRALLTARKLLQTKLHDVEMSLRGILRGFGLKVGPTTPVRFEGRIRELVAGHPNLEAIAAGLLAVRVALRREFDRFEKLVRATARSDTRARLLMSVPGVGAIVSLTFAAAIDDPARFKSSKQVGAYFGLTPTKYQSGETDIDGRISKVGDAWVRAALYEGAHIILTKPLKGCTALKSWAMKIARRGGMKKAKVALARKLAVIMHRMLADGMSFRNAAAVK

SEQ ID NO: 186627 - protein, 339 aa, unidentified
MKLYSAIDLHSNNSVLVILDENDKVVYERRHPNELPVILAQLAPYKKRIQAVVVESTYNWYWLVDGLMEAGYKVKLVNTAAVKVYDGLKYTGDEHDARHLAHLLRLGVLPTGHIHPKEDRAVRDLLRKRGQLVRCRTAQILSIQSLVSRNTGKGITTDGVRNLDEAAISRACGGDAVKALAIKSNLAILRCLDEQIAAVEDVVLKQAKLKPEFKKLLTVDGIWNILGMTIMYEAGSMERFEKMGHFASYARCVSSSRWSNGKKKGEGNRKNGNKYLAWAFVEAAHYAVRYNERIRSFYQRKQAKTNKIVATKAVAHKLARACYHVLKEQTPFDEARAFA

SEQ ID NO: 186628 - protein, 357 aa, unidentified
MSSNMKKYIGLDVHKDATSIAVLNGVGKLVMESIIETKAATVLEFLHGLRGELHVTLEEGTWAAWLYDVLKPHVAEIVVCNPRRNALLKEGSKSDKVDARKLAELLRAGLLRAVYHGENGLRTLRELARSYLTISKDQGRVMSRLKALYRSWGIPCSGTQVYTPRHRDQWLSKIAQPGVRRRAELFYQQLDGLLVVRHTVRGELLAESRKHQAVKILRQIPLIGPLRAALLLALMQTPHRFRSKRQLWTYSGLGVETHDSAQHRYVDGQLQRSKKPQQIRGLNQNHNHEMKSIFKSTAMSASRCAGPLQDVYAGLLAKGMKPDMARLTLARKIAAITLTLWKKGERFDAEHLKSQAA

SEQ ID NO: 186629 - protein, 412 aa, unidentified
MKDLLEISCGLDVHKEKIVACILTGPLGKPTRSEIREFSTLIPDMIALRNWIVSKNCHHVAMESTGIYWMPIYEILEDAFSGDITLLVVNARHMKNVPGKKTDMRDSEWISTLLRAGLLNGSFIPEKRIREFRDLNRYRKSVIRDITSQKNRIEKFLQSSGFRLSSFISDIFGASGRNIILHLIEHGQIDKTTLDSCLKTKTRKHIDEILMSVNGTLSEHQKAFLRILMTHYNSLKKHLTEIETSLEEDMPPFALQVEQLNSIYGISTTASCAIIAEIGIDMNPFKTAEHICSWAGLCSGNNESAGKRKSTSVTKGNPYIKSMLCEIAWVIAGKRNTYLSAWYWRIKQKKGAKKAIVALARKLLVIIYTMLKQGTLFDESCFETRRKHCEQKQLSRYIRELEKHGYHVKAQS

SEQ ID NO: 186630 - protein, 337 aa, unidentified
MTRYVGVDLHRRRSVIVVLDSDGTELWTRRIDNDPLTLGLEIEEAGPDPEVVLEATWGWYWAADVITQAGGSVHLAHPLGIAAFENRRVKNDRIDARLLADLLRMGRLPESWIAPEGVRHQRELVRYRRKLSQLRAGLKAQVHAVLGKEGLRSPITHLWGPGGSAWLDETDMADAYETRVRSLRRLIKIYDTEITKLDARIADVFEGDEGYEVIQQLNGVGPVLAAIFTAELGDVTRFGSAKQVTSWAGLTPRHRESDTTVHRGSITKQGSGLVRWAAVEAISKNHGDDPIKTHYRRVSQRRGRNKGRVAAARKLLTLVYYGLRDGEIRSLVPPEAT

SEQ ID NO: 186631 - protein, 385 aa, unidentified
MNHIGIDISKYKHDCFIATETDHFSFSFENNQEGFLKLLFELKKLSGEIKIGFEITGHYAENLKAFLISHNFPFMEIHAYLVKKFVESQTLRKTKTDKKDARMISNYLQSVDYKTYLQQSYHIGALKELTRLRAKLISERTKYFNLLTKTLDIIFPEYKGFWPNNHFSQTSLYILEKFTTPFKIAKMTDHHYETLRKLSMGKFSYPKFSKLKELAKSTVGIYQEFHIVSLSIYLHNIRLLNTQVGSIENQIKHLMASYPTKIETITGIGTISAAVILAEYGSISNFDNPSQMLSYAGLEPSVNQSGTQTFNGRLVKRGSRILRSTLVQASFYMLKVNPKFYAYYLKKKSEGKHHQVALIHLTRKLIRIIFHLETTQQDFNPKLIK

SEQ ID NO: 186632 - protein, 298 aa, unidentified
MEQKIVTVGLDLAKNVFQVHAIAADGAVLFRRRLRRTEIIRFFTELPPCLVGMEACTSAHHWARELTANGHEVRLMPPAHVKPYVKRGKTDAADAEAICEAVTRPTMRFVAVKSVEQQAVLMLHKSRDLMVRQRTMLINALRGHLAEYGIVTGLGAGGVVASLKALHEEQDRFPAHTRSALHAIAAQLRALTSEIDRLEAQILDWHRNNETSRRLATIPGIGPITASAIAAAVPDASPFRSGRQFAAWLGLTPRANSSGGKERLGGITKQGDGYLRRLLVVGSTAVMRITRKNPARQP

SEQ ID NO: 186633 - protein, 356 aa, unidentified
MEPIKTDCVGCDAHRRYSVFVVMDERGHTGKETRVEHSRELYRHFLSTLPPGSPIALESIGNWYWMIEEMERAGHQPLLAHAKKAKLMMGLTNKTDKLDARGLALLLRNGTLPSVWIPPGELRDQRELPRMRMVFARIRTMLKNRIQSTLAKYGIQIDQVSDLFGVTGRGLLQNRLNELPPETQRSIQEHLKLLDGVLEQIEGTEKRIKELIKETPQMQLLMSLPGVGPILAIVIILEIGDIERFPGAPQLASYAGTVPQVRSSGGKTYYGKVRPDVNRYLKWAFIEAANSIVVNQSRMPNRHVVQLYHRIMKRKGHPKAIVAVARHLAEATYWMLTKNEAYREPTSSRWISPTQK

SEQ ID NO: 186634 - protein, 341 aa, unidentified
MQWTVAIGVDTHKETHVAVALGRLGQRLGQCEVATTKAGYLELVRFAQAFGRPAFALEGAGSYGAGLARVLVAAGFTVYEVERPRRRKRGRAKNDLIDAARAASRLVSGEGLGLLRGGGQAREDLRALLLERRSAVRAQSAARNQLHALLVTAPEPLRLRLRALAGERLVSACLRLQAGGEETDVLVPVLRRLARRVRWLEDELAELERELAAIVSALVPEIVAECGAGPLTTAQLVVSSGQPGRMKSEASFAALAGTSPVECSSGPQRRHRLNRGGDRQLNWALHVIARTRIRCDAETRAYYERLRARGKSKREAIRCVKRQLARHFYQLLLANPALTST

SEQ ID NO: 186635 - protein, 422 aa, unidentified
MAKARSLVGLDVHATKIVAAVLDVETGELQWFRMSGESAGAAGFCGRLPGPVRAAYEAGPTGYGLARELTRRGVECVVAAPSKIPRASGDRVKTDRRDAEHLARLLLAGELHPVRVPGPGEEALRDLVRAREAVRVDLMRCRHRLSKLLLRHGIRYEGGQGWTERHRRWLATIALPWPAAQTTLQDAIGAVDALEHRRGQLEHEIIALLPDSPWAVQVGRLRCLRGVDTLTAVGLCAEIGDFARFAKPPQLMHYLGLTPSEDTTGESRRLGAITKTGSGHARRLLVEAAWHYRARPTIGRALKDRQDGQPPEAIAIAGPRNAGCTASGPGSSSAPNAARSSPWPPPANSPASAGRSPKPNNPHPPTPASTPSAGPVAAWDAQGTREGALSNQPPGRPRSFIRQRHPTTKLWSCGHPDPRISA

SEQ ID NO: 186636 - protein, 446 aa, unidentified
MKKSSRMSIVHPHAAGVDIGAEFHVVAVPPDADTEPVRTFQSFTGDLQRMSDWLKTCHITTVAMESTGVYWLPAFEILEAAGFKVILVNARDAKNVPGRKTDVNDAQWLQKLHSFGLLRASFRPEHDISVLRSYLRQRERLTEYRAAHIQHMQKALMQMNVQLHHAVSDITGVTGLSIVRAIVSGERDPSMLIQYRDVRCKKTPEVLRQALTGNWQPEHLFALEQSVAFFDFYQEKIRECDDQIETSLLQLSTGTEEPEGVLPSARHRTKQPNQLSFDVRPLLWKITGADLTQIHGFGPYLALKFIAECGTDMNRWPDASHFTSWLCLSPGNKISGGKVLSSKTRRSSSRIAAALRLAATTIGRSDTALGAFYRRLSSRIGKAKAVTATARKLAILFYNALKYGQKYVDPGADYYEERYRSRVLDGLKRRAKSLGYSLQQDPELCV

SEQ ID NO: 186637 - protein, 421 aa, unidentified
MKESARIVGFDCAEDEHAAVLLDVSGEFERRVDVINERGQIQESLAELMLSVGPNAQLVVVVESKRSHGRIVADVASELGCEVWQVNTVALNHYRDLEGQPRKDDEWDAYLGARMVFLRMGGCREAVETTEEERALSRLTRTHSRLVEDRKRHVARLRAVLLELAPQMLHASWEGPQPGSKAMLYLLERWPGFEGLERAQMRSIEKILHRCRYGSKTPHVAKLIRKMARGISVAIEERSALTLELGLLVQQIRFCNESADQVYTKITHRVEHHPLGKKLLEMHGNGPVITGVLVSELLPVARTSTEPKSATYAGVTPLSRKSGKSLDKDRLTQGVNKRVLHALYTASVVAIKNSAVDRAYYQKKLRDYAGHPKPHVAAFIALSRQRHKLVYKLMTTDARYNKEILIATHLARLEQERTAAA

SEQ ID NO: 186638 - protein, 476 aa, unidentified
MRSKSKQGPEPEEIPDAEYELVAERVAAIDVAKTSGKVCVRTPGARRRVSRVWDVSAMTGPITDLADQLIELGIEKVTVESTSDYWRIWYYLLEAAGLDVQLVNARDVKNVPGRPKTDKLDAVWLAKLTEKGLLRPSFVPPKPIRQLRDYTRLRVDLIGERTRYWQRLEKLLEDALIKVSSVASTMDTQSVRDMIEALIAGERDPRRLAGLARGKMRPKYAALVEALDGQFNDHHAELARMLLDQIDALTVQIGTLTTRIEQFLAAMPDTPKPGGSTGGRTDTDARGSGQDPAARTGSAFSIEASAETVAECARLTTIERLDEIPGIGPQTAQAILAEIGFDMTRFPTAAHLVSWAKLCPRTIQSGAKQRFGKSGKGNPYLKGALGEAANAAAKTDTFLGERYRRIVKRRGKLKALVAVARSILVIIWNLLADPTARFHDLGPDYHTTRINTERKVRSHIAQLAALGYHVTVQPAA

SEQ ID NO: 186639 - protein, 457 aa, unidentified
MRKKSKRTKGIEEAHPFSGMSRIHPYAAGVDIGAIEIVACVPGDENTQIVKAFGNYTVDLQALAQWMKGYHIKTVAMESTGVYWIPLFEELERQGFECLLISSRSLRRVAGRKSDISDAQWIQTLHTYGLLEGSFRPQGELVALRTLLRHRSQLVEHRSPHVQHMQKALLQMNVQLSQAVTDVTGMTGQKIIRSILAGERDPQTLAAMREPGCKKSAEEIGRALTGTWREEHLFVLKQSMMLYDFYTEQIQACDLEIERLYELTHPEWDSGEVQPLTKRKKNSHSKNLPHHPEEIRKHLKRISGVDLSLVDGFGVSLAQTVIMEVGTDMTKFPDEKHFCSWLGLAPKHEISGGKVLKKNTLKTKNRAGQAFRMAAQSVKQAECMFGAFYRRLRARLGPSQATVATAHAIARVVYRMLKYKVEYEPLSLNEYQKHYEEQQIKYMRKKAAKFGFQLVPT

SEQ ID NO: 186640 - protein, 391 aa, unidentified
MSQDFRFDPSRSLTTLEQDSTIIAVIEMSQTKWLVAAVVPGVERQPLKKLDADQEALLKLLQRWRNEANRVGREIKRIVVAYEAGRDGFWLARWLLGRDVETYVIHPTSIAVSREHRRAKTDRLDTELLMRAFLGWLRGEIRHCSMAAIPTIEEEDARRPNRERKNLVTEQTRIVNQVKAIFARFGIRTLRPTERKLEERLEAVRTAEGAPLPENTRAELRRHLARLRVVREQVHAIEQERLRKLAAAPAADKGSHAMVRLIARVLGVGVETADMLVNEIFSRHWRDRRAVARYAGLTGSPDESGSRRRERGLARAGNARVRCGMIQLAWRFLRFQKTSGLAQWFAARTADGRGGTRKTMIVALARKLLIALWRLVTGGEVPQGVVLRPAS

SEQ ID NO: 186641 - protein, 370 aa, unidentified
MKEFSKYVGLDVHKETIAVAVAEAGGGEARYVGEIAHTPEAITKLMRQLKKGTGRIAWCYEAGPCGYGVYRQLSAAGEDCQVVAPSLIPKKAGDRVKNDRRDALSLARLHRARELTAVWVPDQAQEALRDLTRCREDMKHLQRQARQRLSAFLLRHGRCFGGKSKWTQAHWRWFETVSFEQPTQQIVFQEYVDTVLACSKRVQGLDEQLERVARESVFWPVIEALMALRGVNLLTATTIMAEIGDLHRFESAPQLMAYLGLVPSEHSSGPKQTRGGITKTGNGHVRRLLVEAAWTYRHPPRKSALLQRRAERTCEAVQDIAWKAQKRLCQRYRHLLSRGKQSVQVCTAVARELAGFVWAIAQASPRPGKA

SEQ ID NO: 186642 - protein, 345 aa, unidentified
MEQIIRIGMDTSKHVFQLHGVNAAEVPILRKKLRRKEMVAFFEKLAPTVIAIEACGASHHWARLLQSFGHTVKLIPAQLVKPYVKRGKNDAADAEALCEAMSRPTMRFVPVKTSDQQAALMLVGVRDRLIRNRTQLANTIRGHAAEFGLTAAKGMAHLVPLLDRIQADESLPALARELFALQAKEYLQMQAQIKEIDGKLTAWHRADECSQRLAKIPGVGPIGAVLLRMKTPDPELFRSGRQFAAWIGLTPQDHSTAGKTRLGVITRAGDEGLRSVLVVGATAVIKQAQRSGKASPWLAALLKRKSPKLVAVALANKMARIAWKMMVTGETYMANSAPAVVANVA

SEQ ID NO: 186643 - protein, 394 aa, unidentified
MSTFAGIDWGATHHQVAAVDDTGVELFNKRHAHTVEGLDTLIERLDDLSGLVGVAIERSDGIIVDRLHAAGFAVFPVSPRVSARARERHQAAARKNDRFDAFVLADTLRTDGHRWRPLRSSSDLHAELRQVVRHRRQAVESQIMIEAQLRETLLAYHPAVVGLFSTVDRDATLAFLRDYPTPRAASHVGEARMARFCSRIGYSGRVPAAVLVERVRTNLLSASDGNVAGHRYAALHLADQLELFNNQLRGYNRRIDELLVQHPDHEIYLSFPATGRVIAAELCAEIGEDRDRYPTPQVLLAEAGAAPVTLASGKVQRVHIRWACNRRLRSTTTTWAHVLKRIDEPSRSRYLAKMERGATYHGALRAVSASWLRVLWRCWQDGATYDPARHRPSR

SEQ ID NO: 186644 - protein, 438 aa, unidentified
MWRNSQWLLSIFQKGALPVKVVYQTCCGIDVHKSFLVATIIKTTSGVQPSYQKKRFSTFNNSILEFKQWLLDNSCRDVCMESTGKYWIPVFNLLEDELNVTIANPKWVKAVKGNKDDTKDSKWIGDLFRLGLVPGSYIPCKPIRILREFTRYRYKLTSCKSSEKNRFQNALTICNVALDSVVSDIFGKSATSVIDYLLKQSDNSINHEEISSRLLRSLKKKSESVIESIEGYQMTDAQKYRMRLVHAHMDYITSTISDIDSMIDSLVEPYENAVQLLCTIPGVDRSSAITILSEIGTDMTQFSNSKRLCCWAGLTPGNNESAGKKKSVRITRAGVYLKPALVQVAHAAVKSNKSPYYKAKYERIMKRRGKKRAIIAVARMILTAVYHMLSTGEAWNPTDLYKIDMPKPLKNKQKEKAVKQAMKLLIAEGIIKEPLLAS

SEQ ID NO: 186645 - protein, 325 aa, unidentified
MQGKDRSEQETKTQSTVGIDVCKLWLDIHILPSEEAFRVPNTKAGSKEIVRRMGRYDVQLIAIEATGKWHRDLHRNLVDHGYPVRVVNPLRARLFAEAMGLLAKTDRLDARMLAVFAASLTEARPPAPEIIEALKELVQARRSAVEEQTSLTNQFKSAATVFLRRQLKRRLTQIAKHIKALETEALKRIHADPGLARRYDILVSIPGFGDVVAMTLLAWLSELGSCNDKQIATLCGLAPWPDDSSDRIGARHIRGGRQLIRNILYLAAITAKSFNQPMKAFFQRLTANGKAKKQALVAVARKLIVLANTLVRADRLWQAEAPKCA

SEQ ID NO: 186646 - protein, 360 aa, unidentified
MTVDKYVALDVDSANIVIGVYDRKGQQIMRGCIRTNGNDIRQFFKGLNGTVHVVFEEGTQAAWLYDLIRPFVAAVTVCDPRENKLLKSGNKSDDIDVDKLARLLRLGDLQAVYHGEETIQGLKHLVGAYENLVSDTIRAMNRLKAMFRGRGVRSRGTKVYSNEGRDEWLTKLNIEGLRVRAGYLYKQIDCLMKLRMEARKAMCGEAIRHSAYKLISGVPGIGPVRTAQIIATVGTPHRFRTKRQLWPYCGLAVVTRSSADYEWVGEQIRKRKRPPQTRGLNKNYNRRLKQVFKGAALNAIRTNEQFKQYYQRLIGKGIRPEMAQLTVARKLSAITLAVWKRGEKFDPEKLNQAAQSTGNQ

SEQ ID NO: 186647 - protein, 426 aa, unidentified
MKNREILSTLFVGIDVSSKNNAVCAIDFDETRYLEISVTNNHPGAISLAEKLASVMISHPELNRLVIAMESTSCYSTHVAIYLSSTEILMPFKPFVYVLNPKTVANYKKSYVSTGSTDPIDAFMIADFARVGRIKTEPWRGPQFLALQRLTRHRLHLAEAITREKTYMLTNVFLKFSELTVLPKEEAPFSNNYGATAAAVLTEFLSPDEIASMPSSELVEFICSKSKNSFADPHKVAKLLKQAASNSYKLDKCLYEPLTVSIASSFNCINALEGEAKKLNKAIERAIKGFNTNEYQSLNSIPGIGPVFSSGILAEIGSIKAFRSHDAVAKYAGLVWNPNQSGNFTAEETNMSKAGNRYLRYYLFEAANSVKNHCPVFSEFYLKKFSEVKKHQHKRALALTSRKLIRLIFGLLDNNQLYSKSVEQLI

SEQ ID NO: 186648 - protein, 345 aa, unidentified
MPIVGGLDIHRKQITFDYLDTATGEVRRGQIAPADRKHVRAWLARFAGRGGVAFAFEGCTGWRYLAEELAAAGLRAHLGEPADTAALRGRKRHAKTDKTDARHLRALLAEGRLPECWIPPPHILEYRALLETYHDLRAAHTAWVQRIHAVFFHQGAPPLSDDALRTEQGLARLQAAAATHLSPAGQLQVATALDMLAATEARLGPLRQQLRETARHLTGARVLAERLYGVGPIAALALTCWLGGAGRFSSSAKAVRFTGLDITVWSSDRKGPPGRLSRQGPPVLRWAVYEAGKTHGRAAAPGHGYYATVKDRKNGKRAALSEARKIVRQACHILAELGDDALTAA

SEQ ID NO: 186649 - protein, 346 aa, unidentified
MEHYAGIDVSLELSSVCVVDAQGKIVKEAKVSSEPEALVSFFKGLGFPMKRVGLEAGPLSQWLHAGLVQARFETVLLETRHVKAALSAMTVKTDRKDARGIAQLLRMGWFRAVHAKSIGSQEVRALLVARKQLLGRLVDVELSIRGILRGFGLKVGPVTRNGFEARIRELVTGQATLERIATALLSARAALKAEYEELHKAVLAIVREDVVCRRLMTVPSVGPLVAITYKSAMDDPSRIAKSKAAGALFGLTPKKYQSGEKDVTGGITRTGDEMVRTALYEAANVLLSRITRFSKLKRWGMDVAKRRGSKRAKVALARKIAVILHRMWVDGTTYRWATAEPIAAQA

SEQ ID NO: 186650 - protein, 386 aa, unidentified
MQTLNNLSRSLIALEPASTLIAVIEMSLSSWLVAGIVPGIERQPLKKLAVDESALLRLLHRWREEAEKAGCRIERIVVAFEAGRDGFWLARWLKARSIEAHVIHAASVAVSREHRRAKTDRLDAELLKRAFLGWLRGERNHCKVVAIPTLKDEDAKRPSRERESLVGEQSRIVNRMKAALIRLGIRGFNPKLKRAVGRLDSLRTPEGEPIPPNTLAELRRDMERRRLISNQIRQIEEARLKHFEQAPNDGPHAMVRLLARVIGVGIETADMLVHEVLSRNMHDRRAIARYAGLTGSPDESGRKRREKGLARSGNGRVRRGMVQLAWRFLTYQKESALAQWYRARTENARGARKPMIVALARKLLIALWRFVWQGVVPDGVVLRPAQ

SEQ ID NO: 186651 - protein, 420 aa, unidentified
MRQNDKVVCGIDIHKKFLVVALLTAMGEYVIERFTNNPPGLLKLKDWLIFHDCELVAAESTGVYWFPLFLTLEGYVNIIIANARQIKAIPGRKTDIIDAQWIATLALNGLIKPSRIFCRSDRELRKLTRARQKLTQERTDHKNRIHQILESVGIKLSSVLTDIFGKAGQYIVRKLLEGTTVDEIIEHIPVAQIRKKKAALLEALNNNLSSVDKLLLEQHLDMIKIIDGQIAEIDSELMYGFKDRKEDLDILTSIPGIGQTSAVTILAEIGNFNDFPSAEKLAAWTGIVPSVYQSAEKYRTGRITKQGSRQLRWILIEVAHSAARTKHSHFHQYFTRMKRKVGYQKAVVALAHKILRVIWHLLHYREHYVDPISSTTPKKEFPNPENLQRRERSAIQLLTRLNYVVTKPTNELVVHEECRK

SEQ ID NO: 186652 - protein, 333 aa, unidentified
MNNYAVYVGVDVSKHSFTTTLLFNEIRKTFKVPSKPEQFESRLRPFLEELGVDKSNVLIIMESTSNYHLPLAEYLAERQYNVGLANPFSMKRFMDAKMSRAKTDKVDSYFIAEYGRQIFKGPLFKPKTEAQKEIEARVKTLERFNKQLTMLKNQREALSLIPMKGLKKILAHYDRIIESIEKEIEVLEKEIRELCKKHFPEEYRLLKSIPGIGDRAIAIVVSILRKFEGFKRAKDVGSFVGLCPSPVESGSSVRGKGSIKKRGNPYVRQVFYMCALSAVRSNPYCKDLYERLLERGKSKTEALVAVAHKLLRQCYGVLKSRTPFRVKEKEVTP

SEQ ID NO: 186653 - protein, 410 aa, unidentified
MAERFVGIDVALREHRVAVLDRDGEAAGPSFTIAASKDGMATLLRTLAARDATAAQTLIGLEASGHLWENLEAALVGAGYRVLVLNPLQTRRYRDVLRRKAKTDDIDAHVIAGLIRSGAAQASYVPDEHIQSLRELARLRARLMDDWQDYLRQLIAQLDVVLPEHRTALGDLRSARARGILAQFPTAQHLAQASPRAIRRAAEDAGTRGFTLDDAIAVRDAARQSLYSGKAAAARAQVVRTLVNQLDRLSTAIDEVDRAATVLLPPSEPGTGPSDADLLQTIPGIGPHTAATLLGELGAPMRFTDAPALVAYVGFYPVITESGQRVGTPRLSAVGSRIARRALYLAAVNAVRRSAEWRTIYLRKRAQGKPAKQALIVVAVKLLHTLYAMLKHRRPYNPSRLLVATATIGT

SEQ ID NO: 186654 - protein, 345 aa, unidentified
MQAEYDGRQIVGIDLHRRRSVIVRMTEAGDKLDTVRIDNDPVALGLEIAKAGPDPEVVLEATYGWYWAADVLTAAGARVHLAHPLGVKGFAYRRVKNDARDAADLADLLRMGRLPEAYVAPPAVRELRELVRYRAKLVAWRSGLKASVHAVLAKQGVHISVSDLFGVGGRELLSCAPLDGAYRGRVDSLCRLIDAVDFEIDAVGGPIRARLAGHRGYTAIQAIPGVGPVLAAVFVAEIGEVDRFPGPAQLASWAGLTPRHRESDLVVHRGRITKQGSTLVRWAAVEAAHGVPHAAGWLTSTRARVAERRGRNIATVAVARKLLTLVYYGLRDGHIRALAPARAAA

SEQ ID NO: 186655 - protein, 378 aa, unidentified
MKNDKRYVGLDVHAETIAVAVVETDGEVRFLGAIPNRAETVRRLVKRLGPANRLRFCYEAGPTGYVLYWQLTGLGAHCDVVAPTLVPQKPGDRVKTDRRDAEKLAVLYRGGHLTPVWVPDQAHEALRDLVRAREAAKNDQLRARHRLQKFLLRHGRRPPQGVKAWTQKHLDWVRREVHFEALAQEAVLVDHLAEVEHARERIRRLEGAIDTAVKAAPASLRAVIEALQGLRGIAMVSAATIVSEVGSLSRFRKPRQLMGYSGGVPREDSSGERVRRGGITKTGNAHLRRIVGEAAWSYRHRPTVRGELLKRQAGLSEEVKAISWKAQHRLYSRYRRLIGKGKAKQQVVTAVARELLGFIWAIGVHVEQQHGTAARRAA

SEQ ID NO: 186656 - protein, 366 aa, unidentified
MNTIYIGVDFHARQQTICYLKTETGELVIAELKHQDKEQVRAFYQQFQGPVIVGLEASGYSPWFEALLEQLGGEVWLGHATEIRRRARWRQKNDRRDAELIWDLMVHDEFPRLHRPAVQSREVLRMLRYRQKLIKLRTMTKNSLQAIALQAGLAKGKQLFTRAGQEEFQLVALSPVLHWQREHWLALLQPFNQQLLETMVWFKAQSKDDVGIQRLRTHPGIGLLTSLCLLHTLQPVSRFRNARKVAAYAGFDPVERSSAERQRFLGISKAGSRLLRYLLVEAVHTAVRYDEDLKRFYQRLAARRGRPKAKVAAARKLLIRAYIMMRDEIDYAEFRRRAVAVRLARQGHGPTNVPAVLIGQPASPGA

SEQ ID NO: 186657 - protein, 343 aa, unidentified
MDFIGFDLGKVSSQVCIITQDGELIERRIKTDREHLAKLLGSRAPARILIESSTESEWVARYLEALGHEVIVADPNFASMYATRSRKVKTDKRDARTLAEACRLGAYRLAHRTSDEQRHVRAQLAVREAMVRTRSRYLSLISTLLRRDGLRIKSGYTPTFLKRLGQLELSDSLREEVAPLMLLLQSLNEQIKRADEQLAQLVREVEVVARLCTVPGVGPVTATSFVSTLDDASRFAGPKQARAYLGLVPTERSSGERQQRGHISKAGPGRARHMLVEAAWTILRRRSAANAALHEWARGIATRRGSRVAVVALARKLAGILYAMWRDGTRFAAQALETERAAA

SEQ ID NO: 186658 - protein, 345 aa, unidentified
MEHYVGLDVSLKLTAICIVDRTGKIEREGVVSSDPEAIAIFIKSHAPHVARVGLETGATATWLWTELNKLGLPVICIDARHAKAALKMQINKSDRNDAVGIARIMQCGWYKEVHVKDLDSHAVKALLASRALLVKIKRDLENQIRGLLKNLGLVIGRAKMNVFAVRAAEMTEDRPEPAAAVVPLLSARAAIEQQIADLDRKVMRLARNNAQARRFMTAPGVGPITALCFLATIDDPTRFKRSRSVGAYLGLTTRRYASGEIDWTGRISKWGDKMLRSYLYEAANVMLTRVARWSALKAWGIRVAKRTGLRKAKVAVARKLAVVLHRMWIDGTEFKWSKEAANQPA

SEQ ID NO: 186659 - protein, 360 aa, unidentified
MAKARSLVGLDVHATKIVAAVLDAETGELQFFAMTADIGPTAGFCAALPRPVRVAYEAGPTGYGLARELAKRGVECVVAAPSKIPRASGDRVKTDRRDAELIVRLLLAGKLHAVRIPGAQEEALRDLVRAREQIRVDLMRCRHRLSKLLLRHGIRFDDGAAWTQRHRDWLAQVALEWPAAQATLTDARGAIDALDHRREQLEREIVALLPSAPWAAQVGRLRCLRGIDTLSAVGLCAEVGDFERFARPGQLMSYVGLVPSENTTGQQRRLGSITKTGSAHARRLLVEAAWHYRSRPRIGKALTERQDGQPPEAVAIAWSAQQRLHRTWTRLEARAKRRTIIAVAAARELAGYVWAITQIE

SEQ ID NO: 186660 - protein, 313 aa, unidentified
MNHIGIDMSKDDFHAAFDEEHVLRFRNTDDGLESFMTFLEDHGYSVSDTKIGVEATGVYHLLLAMTLSAHEWDIFVINPLESHRMITQGLRTVKTDRRDAQKIRTMVSISRGYLFTDTKETLALKALVVERQSLVEMRTALKQRITAHILKEKASGIPFHDGMSEVRESLDTAIKGLEKHMGRYESETQELLRSIPGIGKTTAATLVAFIGNIHRFDTPEKLTAYIGLDCRVFQSGTSVNGKGYISKRGNTYLRHILFTAAFIARQHNPDLQAYFLKKTGEGKHYFSALCAVERKLVHLVYAVWRRGTPYEKR

SEQ ID NO: 186661 - protein, 386 aa, unidentified
MQKLNDLSRSLIPLELDCTLITVIEMSQSSWLVASIVPGVERQPLKKLTVDESALLKLLHRWRQEAEKAGHRIKRITVAFEAGRDGFWLARWLRARDIEVHVIHASSVAVSREHRRAKTDRLDTELLKRSFLGWLRGERDHCKMVAIPTIKDEDAKRPNRERESLVAEKSRIVNRMKATLIRLGIRGFNPKLKKAGERLEGLRTPEGEPIPPNTLAELLRDMERRRLVSAQIRRIEDARLERLEQASGDGSHAMLRLLARVIGVGIETADMLVQEVLSRNMRDRRAVARYAGLTGSPDESGRKRREKGLARSGNARVRRGMIQLAWRFLMFQKDSTLAQWFRARTENARGARKLMIVALARKLLIALWRLVREGVVPDGVVLRPAH

SEQ ID NO: 186662 - protein, 431 aa, unidentified
MTERKSTPPEAALVAIDIAKHRNEVLIDPGHGRRRRMTVLNSRDDHDRFIATLHALSRPIVVGIEPTGNYHRVLAHRLIMAGFEVRLISSMALARTREALHNGWDKNDPKDAQVILHMLRIGATMVYQDPLAAGINDLQELSKTHEVVSKAKTEIWHRLLTHYLPLYFPEIERFAGNSRSDWFLAFLERFPTPASITVLAKDAFIAAAWDVVGRKVSKTRLLGDIYETACSSTALPVPLDAPAIAMFRLVLAEARGLIRQRDAIEAQADELLGTNPDYLRLRQLPGIGPIHALTILAEAGDLRRFRHHRQFLKFCGFDLATHQSGQFRGQTRLSKFGNARLRRTFWLAAQVAIRQRENSFRDHFGRHIAKDRDNRDLRRKALSAVAAKMARVAHALVKTGTDYRPFLEGPVPSGRTRSVGAVRARSETATL

SEQ ID NO: 186663 - protein, 343 aa, unidentified
MQAITTIGLDIAKSVFQVHGVDADGQVVLRRKLKRRYVVAFFEKLAPCLVGIEACASSHHWARQLQALGHNVRLMPPAYVKPYVKRQKNDATDAEAICEAVSRANMRFVPTKTPEQQSGLVLHRTRHLFIRQQTSVINAIRAHCAEFGIVAPVGRRGIEELLNVIANAKDEQIPAIARACLSALGDQLHRIKAQILAFDRMIGAWHRSCAASKRLDEIPGVGPALATALVASIADPRTFRSGRDFAAWIGLVPKQSSSGGKPRLGSISKQGDRYLRGLFTAGALAVIRYAKIHRIGHRPWLTALLARRPTKVAAIALANKIARMAWAMMARGERYREPAALAA

SEQ ID NO: 186664 - protein, 346 aa, unidentified
MLTDEIDFVLGVDTHADQHALVVVDAATQRTSRRLAIAASRLGYRQALRVARRHAPGRRTWALEGSGCYGAGLARFLNEQGEQVLEVERPAHTSASGRAKSDALDAERAARAVLAGAAGALPRLNGQTQALRVLLVTREGAVNARAAALNQLRALILTAPPELRERLQGLTAAALLSTCIRLRPTLDAERTAYVVALRSLAQRIRTLRLEAVTLEHEIAERVRALAPQLLARRGVGPITAAALLVSWSSPKRLRSEAAFARLTGTAPIPASSGKTVRYRLDRGGDRRANRALHTIILCLRRIDPDTKAYIARRVSEGKTEREAVRCLKRYLARSLYRLLETTPMPT

SEQ ID NO: 186665 - protein, 354 aa, unidentified
MRLYQTQTEFNCGVDLHARQMYVCVVDREGTVLVHRNIKDNDFEFFLSLVGPYRHSLTVCSECCFCWYWLADACAEAGIAFVLAHALYLRSIQADKKKNDRVDSEKIAQLLRANMIPYAYVYPRGMRPLRTLLRRRMAYVWQRSELQAWQTCGLIAEGKPAAEVQAGSRERWEQELLQRHDNEYLKLTVQTDLALIREYDRQIDRLESVILAAAKQDRWRDLHVLLSVPGVGKVLAMTLLYEIGEIARFDRHQDFASYCRLVKGSVESAGVIKGMRGGKMGNGYLKWAMREAVLVAKRAHPQIRAMAQRLERRHDRPTVNAILAHRLARAIYHMLKSGMTFSMELFGRRLERAA

SEQ ID NO: 186666 - protein, 363 aa, unidentified
MIFVGIDVAKDKHDCFILNSEGTVLADVFTIANNRIGFETLLSRIQSCSQGESKIKVGLEATGHYSYNLLGFLLDSGLATYVINPLHTNLYRKSLSLRRTKTDRIDARTIAMMLMSDVDLKSYSNTAYHNEELKSLTRYRFDKVKERAKLKSSVARLVNILFPELEKLVSSLHIAVVYALLSNYPGASYIANANTEELAEILCTASKGRYTKSKTAEIQVAAGVSIGSKMPAKSMELKHTIALIRELDKEISEVESAIDKITSQMDSPIFTIPGIGRHMSAMILAEVGDFSNFASADKLLAYAGLSPSTYQSGQLQNCYAHMEKRGSRYLRYALFNAAKYVVCYTNFHHLKISLENFVLGLDF

SEQ ID NO: 186667 - protein, 408 aa, unidentified
MQVTFGIDVSKSTSTVCELIGESKNELTITNNRPGFIQLLHELTAFSKHPQIIFEATGVYSRRLQSFLEDYGYDYVVLNPLKAKKEMDMGLRYNKTDKTDAYHLALIQRLYRHPVNQLESQTYKQLNALSRFYDQLTGDLVMAKNRLHQALQSTFPEIENLFSSAKGKNYWQIVVRYPHCDLVRREDKKQLINWLMSLKGIAFKHALRTADKLIELAYQAYPVVSCSSIEVEQVQYYAHRLLNLSDQRENLIARMVKLAKSLPNHDLENLESIPGFAQTTAVRVLAELGDLRRFSNPNKINAFIGIDPGRYQSGEMDSNLSITKHGNAVARKLLYRAIGQIDNAAKTNPCHIADYYESKKLSSQTKGFKKIAIASIHKLIRTIYALIINDQLYDYNVATHNQKDFSCN

SEQ ID NO: 186668 - protein, 315 aa, unidentified
MTSTQVFVGVDISKAQLDLALRPEGQFSVPNNEAGFAQVLEHLNAVHPTLVVLEATGGLELPLTGVLAAAGVPVVVVNPRQVRDFAKATGRLAKTDALDAQMLAHFAEVMRPEPRPLPDEQTQALAAILARRRQLVEMLTAEKNRLGTAGKPVRKSLRTHIAWLERELSHTDRGLAQTIRESPVWREKEALVRSTPGVGPVVTTTRLATLPELGTLTGKQIAALVGGAPLNRDSGTWRGKRTVWGGRAQIRAVLYMAALVAARCNPVIRACYQRLRAAGKAKKVVLTACMRKLLIVLNAMLKHRTPWRAELVQCA

SEQ ID NO: 186669 - protein, 429 aa, unidentified
MRTESTPGARGPVFCGVDAHADSHWLCVLDWRGRRVLSRRFPADAAGYEALAGAIAAAGEPACVAMEGTSSYGAGLTRHLASLGMPVREALSPARTQRRRPGQGKCDEADAERAARAAMSGSKLGTPKSQDGWVDGVRCMLAARSGAVKARTSAINTARSLLTTAPEGLRSRFRGMAGPRLMEELPSVRAEGALGAALGALADLWAAARDAALDMERAIEASLEENCPALLAMYGRGPVSAAKLAVAAGDNPGRLRSEASFAAICGACPIPASSGKTVRHRLNRGGDRQANSALHEIVRQRVMRDPETAEYAERARGRGKSDREVMRCLKRYVAREAYRALMRPHEIRRPEDASELVAARRAAKVSQVRAASILGTSEKYISMLERGQRELKPIRRAYEAWVEAGLPLDWDRQAFEAERKMDSKKHLAK

SEQ ID NO: 186670 - protein, 342 aa, unidentified
MEYYAGIDVSLECSSVCVMDGSGKFVREAKVASEPEALIGWFGSLGLSLERIGLEAGPLSQWLYAAMREAGLAVELLETRHVRDAFRAMPVKSDRNDARGIAQLMRLGWFRPVHCKSMDAQEVRAVLTARKLVQTKLLDVENSLRGILRGFGLKVGKTTPRSFAGRIQELVDGQPNLEAIGEALLSVRAVLQREFNAFERRVRAMARSNARTRLLMSTPAVGPIVALTYAAAIDDPARFKSSKQAGSHFGLTPKKYQSGETDRSGRISKIGDASVREALYQAAHVMLTKPVKDCSELKGWAMRIARRAGMNKAKVALARKLAVILHRMLANGTPFNPAAAAA

SEQ ID NO: 186671 - protein, 392 aa, unidentified
MFFLGIDIGKNTHVASLIDDNGKTVFKAFSFPNSTIGATSLLDKLTPFSNEIEIGMEATGHYWLALYSFLVEHGFVIHVINPIQTDGWRNATEIRKHKTDIIDSLIIADFIRYGEFLETSLANEDILSLRNLTRFRNYLVSSIGDLKRKTICILDQIFPEYESVFSNIFGKTSKEILLHFSSPAEFESITSEQLETALEQVSFKKFASKKISYISNIAKTSFGITFAVQSLTLQLKLLIQQINFIEQQVHDVEIQIKQLLHKINTPITTIPGIGDIIGATILGEIGDIERFSNPSKLVAYAGIDASVHQSGDYISTNNKMSKRGSPYLRTALFRAALIASVHDPVFKAYYQKKRSEGKHHLTCLGAVARKLCYTIHAILKNNCEYKVQLPTE

SEQ ID NO: 186672 - protein, 401 aa, unidentified
MKTCGLDVHKDTIFCAIYENETKSFSPVKEFLTLTGEIESMGVYLQQEGVESIAMESTGIYWIPVWNILESMGFKLMLVNPYLIKALPGKKSDVKDAQRISEFLAKWLLSSSLVPDPRIRALRSYGRKYKKIIQRQNNCIQEMEKILAMCSIRITSFVSNIKNKSVLKIIERIISGEGNAEKLAELVHGRTLNRHPNKIVESLRGFITEHHRDLLSMSMTEYKMWLIQEEECVSKMKRICNQHYKEDIELLKTIPGVSDLSAMLIFAETGGDMKAFENSGRLTGWAGLRPRNDESAGKYKSKSITKGNKYLRVILVQCAWAAVRRKGSYFKEKYHRLVIRKSYYKSLIAISRKIAVVIWHVLNKHTVYNPELPPVYDPVKLKSRLQYYKRESEKLENLLNQ

SEQ ID NO: 186673 - protein, 331 aa, unidentified
MKKPVLVAIDVSARTFVVAEEVPGRVVYEAEYPNTAPGHRKLCRRLTKTGRLVRVCLEATGIYHLDLALALDGTRNVEVMVANPRATKDFARAQMQRTKTDKTDARSLLEFVRRMPFVAWLAPSPEILALRAISRRITALTVTSSQDRNRRHAVAHCRELPEVLDQEIEAHLAFLEDSIERLAGEAVKIINRDRWLRKAFGHLVSVRGIAQASAIAILGELAPLPPDMSPRQWVAHAGIDPRHFESGTSVNKPTRISRTGNRRLRAALYMPALVAIRHEPAVKAFYEKLIAKGKKPMQAIVAVMRKLLHAIWGMLHHDRDFQGEKFYNFSS

SEQ ID NO: 186674 - protein, 369 aa, unidentified
MADRITYVGLDVHKESIVVAVAPGGLRGEVREYGRIANTATALDRLLRKLGDAGMALRFCYEAGPCGYGIQRHVSARGHECVVVAPSLIPKRAGDRVKTDRRDAASLVKLHRAGELTAVWVPDPQHEAMRDLVRARLDAVHSLRRARQQLSGFLLRQGCHYGRPAWTKLHRRWLAGLIFEQAIHHIVLEDYIAAVEAAEARRDRLTAQIETMLPDWTLAPVVAALQTMRGMAMVNAATLIAELGDLSRFADPRQLMAYLGLTPSEYSSGSSVRRGGITKAGNGAARRLLIEAAWSYRFPARLSRELLLRQESQPKPIRDIAWKGQVRLCARYRRLARTAKPANVVTTAIARELTGFVWAIARQVTVTPG

SEQ ID NO: 186675 - protein, 409 aa, unidentified
MQVVHEVCCGLDVHKKSVTACVLWASGRRKQIRAFGTFTRELLELGDWLRACGVTHVAMESTGVYWKPVWNLLEGQFEVLLVNAQHIKAVPGRKTDQKDSEWIADLLQHGLLRASFVPPTPIRELRDLTRYRASLAQEINRIANRIQKVLEDANIKLASVATDTLGASGRAMLEAIIHGEQDSQRLAEMSRGLLRNKIPELRQALEGRVTAHHRFLLRELLDHLYFVESKMQRIEQEVAERLGPFQSEVARLCTIPGVDRVTAWGLLAEIGLNMKQFPDAQHLASWAGLCPGSHESAGKRKSGKIRKGSLWLRRCLCQGAWAVSTKKNNYLSALYRRLAARRGTKRATIAVAHNLLVIAYYILRDGTCYRDLGPDYFDRLNPEGLRRRLTKRLEGLGFKVTLEPLAQVA

SEQ ID NO: 186676 - protein, 384 aa, unidentified
MTKHNILFIGLDTHKEFIEVAYIEDNRGAQPIHFGRISSAKVTIKKLIRQFESKYPNTTLHFVYEAGPCGYWIYRLITSLGHCCYVVAPSLIPKKPGERIKTDKRDALKLAKLLKSEDLTPIYVPEPEDEAIRDLSRAREVAMKDLKDAKYQLKALLLRNNINYAGTANWSLKHLRWLTELVLPHPAQQIVLQEFIQTINERTARLERLDNELSHHVYQWRYYPVVKAIQAMRGVRLLVAAGIVAELGDLTRFDHPRKLMSYLGLIPSEHSSGGKRHIGAITKCGNGRARRLLVEGAHSYRHAANISTELQKRQEGLPKQLIDIAWKAQIRLCKRYKKLINKGKHYNLVVTAIAREMIAYIWAIAKQVVLSSVNPKLRLSRVPA

SEQ ID NO: 186677 - protein, 345 aa, unidentified
MSKVPCLVGLDYHDDGVQVCVLDERGGQLLNRACPNDWRKVAEAAGSVGVVKRAAIEACCGAADLAEELAAHAGWQVDLAHPGYVAKMRRSPDKTDYSDGRMLADLTRVGYLPKVWLASAHERDLRQLVNHRQALVDQRRAAKLRVGAVLREHRAKPPSKGAAKGAAKVSRWTRAWVEWAKSAPELSEHARWVVGDLLEEMAHLDKKVAAADARLREATKGDAVAGRLMAEPGVGEVTAWVLRAFVGRFDRFATAKQFARYCGLSPCNASTGARQADAGLVRGCNKLLRATLVQAAHRLAVREKRWRELSASLRARGKPACVAVAAVANRWARGLWHRMLEGVKS

SEQ ID NO: 186678 - protein, 339 aa, unidentified
MKLYSGMDLHSNTTQVGIMDETRKPVIDRKLRNDPELILKFLEPYRADLEGIVVESTYNWYWLVDALQEGGYRVHLAHPVANQQYRGLKHLDDRHDAFWLAELLSLGILKEGYIYPRQLRSVRDLLRKRLQLVRYRTALLLSVKNMIHRNRGVIVEASQIKRLTQDVVSPFLEGDEALGLAGQASKEAMDCLSRQIQQIERWVLKQLRLEQQFSNLLTLPGVGKILAMTILLETGPIGRFAKVGHYASYCRLVPSQYTSNDKVKGQGNVRNGNRYLAWAFSEAADRARRYSALCRDFYNRKLNQRGAKVAHKALAHKLARVAYFILRDHDVYREEKMFS

SEQ ID NO: 186679 - protein, 405 aa, unidentified
MSDGRFAGVDWASEEHAVCVVDERGRILEGKRYRHSEPGIRALCSRLVRLGVALVALERPDGLLIERLLDAGLAVVAVHPNQVKAMRPRFSVAGGKSDSFDSFVLAELARTDSHRFRVLVPDSDRTKALRAMTRARDSLVRTRVGLANQLRDQLQTFWPGASHVFWSVDSKIALAFLKRYPTPLDARRLGEQRLDAFLKRNGYPGRKPASELLAKLRAGADGRAGELEMAGRRQIVLALVSALEPVVQRISELTIEIRHALEAHPDCATFRSLFIAHDSWLCAATMIAEIGDCRERYPTYRALAADAGQCPVAVESGKARHAQFRWACDHRLRGAFCTLADASRRHNPWAADIYNRARARGASHTHATRILGRAWSQIIWRLWQDHDTYNPLQHTALQRLIAARG

SEQ ID NO: 186680 - protein, 380 aa, unidentified
MTQTTKAKNSDDDRMVHVALELSEKKWVLAFSDGRRATKARLVTIESRDLARLREELAAARERFRMPQSAAVVSCYEAGRDGFWIHRYLESIGVNSVVVDAASIEVNRRRRRRKTDRIDARKLLATLLRYHAGETDVWSVVRVPEDEDEDARQLHRELEELRNEVKRHRMRLQSLLVTQGISMEITADFQRELPKLRRWDGSKLLPGLAARLRREHQRLTKARGQIRQLEKQRRAQLRKRDGTNPRLEKVRELAKLKGIGENGSWVFVMEFFGWRQFNNRKEVAGAAGLVPTPFDSGESTHEQGISKAGNGRVRYMAVELAWCWLRWQPQSALSQWFTAKFASGGSRRRRIGIVAVARKLLIALWRFIEHGEVPEGAVCA

SEQ ID NO: 186681 - protein, 407 aa, unidentified
MNKKKVVEFEQVVECGCGMDVHKDVIVATIQGKVIKMQTKSFKTFTSSLIKLKEWLLKNKVTHVAMESTGVYWKPVFNVLGDDFQILLVNARHVKNVPGHKTDKKDSCWLAKLLLSGLLKGSFIPERPIRELRDLTRYRTKLVNQISAERNRFQKILEDANIKLSSVLNDVFGATGTKIINHILERESYRPEELLYYVHGKVKASRADIKEALTGYITPHHRFMLKTILLNIARIETTVLEVEAQIELCIEPYMVERELLQSIPGVGKDGATCIIAEVGVNMEKFPDQNHLSSWSGVSPGSNETAGKNKSGRITYGNKYLRSLLVECGWAASRTKNTYMSAKYKSLVGRRGKKKAVIALGHKILIATYFIIKDKIEFKELGQEHLNNFRKDRLIAYYKLQLEKLTAA

SEQ ID NO: 186682 - protein, 438 aa, unidentified
MSNKVIFNLDDLFISVGIDVGADFSWMSIALPNQQFVGKPYKILHNSIDSLTTAVSKIKEAEELYSLESRIFLESTGIYHYPLFCYLRDKGFNCSVINPIITKNSTNINIRKVHNDRFDSKKAALVGLKPDLKVSLMPSDLALNCRNLCREYYDLMDNRSAYVNKLQGELRMAFPQYLGIFSKVTINTSLTLLETYASPSAFLEADKQEIIDIIRSTARFGLTYAQNKYNAIIQAATDANQFGYIINSNIKRIRLYISFIRKYDEEINSILESLHELVDANEDADFVKQIHLIETIKGAGFLSAVSIMGEIGDFSAFSKPKQLFAYFGLDPAVKQSGKFEGTKVQMSKRGSAIARRVIHTLTLQSISISRNGEAKNPVLREYYLKKCDSKPKLVAMGAVSHKVCNMIFAILRDNKPFEIITPQEHIKQYNASKCDMAA

SEQ ID NO: 186683 - protein, 408 aa, unidentified
MKTLLRRCAGLDVHKVEIVACLRLVEKGKVARRVRRFPTTTQGLLELVEWLEGAGCSHVAMEATGVYWKPVWHILDGHFALILANAMHVKAVPGRKSDVNDATWLADLLAHGLIRASFVPSTPIQELRDLTRTRKQLTREIVQHVQRIQAVLEEANVKLSSVISDIMGPSGRRILTAIIAGETDAEKLAALGSERLGCGRAALSEALKGRIREHHRFLFAQHLRTIEQLEESVAAFDARIAGALAPFREVVERLNEVPGLGRIAIETIIAEIGTDMSRFPTAGHLVSWAGLAPRLDESAGKRRSTRIRNGAPWLKPALVQAGWAATRKKNTYLQAQFLRLRSRRGPKKALIAVAASILTIVYHMLRDGTFYRDLGPEYFARRSPAKLAANLANRIRNLGYHVEISATT

SEQ ID NO: 186684 - protein, 352 aa, unidentified
MIVLGADMHKRSHTIAAIAAGSGELADEQTVEVGARGFAAALEWARGMGGERVWALEDCRHVSGAFERFLLVHGERVVRVAARLTARERRGGRDRGKSDRIDAMAVARAALREGVERLPVAELAGVELDIRLLVDHRERLVRMRVALYNDLLWHLHDLWPELAIPGCSLLYKKWTARISRRLARTEQTARVRIARDELSHLRELSHTIDALEADIAKLVAQVAPQLLSEPGFGPLTAGKLIGEIAGAHRFSTDAKLARASGIAPIPVSSGNTNRHRLDRGGNRQINTAIHRVAVTRARCHPETKAYLDRKRAEGKSTKEAIRCLKRHLARRVWHLLQPPQPDRGTPPSPSIS

SEQ ID NO: 186685 - protein, 341 aa, unidentified
MQITTIGLDIAKNVFQVHGIDAAEKVVVRKRLRRSQVLKFFASLPPCLIGMEACATAHYWARELTKLGHEVRLMPAKDVKAYVKRNKNDAADAEASCEAVRRPTMRFVGAKSAEQQGRLMQHRTRDLLMRQRTQVINALRAHLAELGIVAAQGREGLKELLKVIADEKDARLPIDARASLIVLAAQLQALQTMIGSIERRLLLQHRANEASKRLESVPGIGTIGASAIAATVTDPKAFRSGRDFAAWIGLVPRQDSTGGKQKLGPISKQGDRYLRRILVVGAHSVLRRAKQNPEKYPWLTQLLARRPFKVVAIALANKMARVAWALLAKGGTYRVPALAAA

SEQ ID NO: 186686 - protein, 424 aa, unidentified
MSCLPVLAGVCPTHHQVRRDIVILTESTLIVAGADTHADTIHVAAISMTGAAVKDREFPTTRSGYAAAIKFLTSLGQVERIGVEGTASYGAGFTRALIAAGIEVVEVTRAVKSTRRLKGKSDPLDAYSAARTALAGGGLAAPKDDATAGLRALHIARRSAVKHRTAAINQLKAMLVSAPDEVREKYCRLTIFRLIEAIARCRPDTQNEPWAQSVLTAAKMLAQRVQFLEAQAETLEAQIDALVTDANPGLRAAYGVGADTAAQLLITAGANPHRLHSEAAFAALCGVAPVPASSGKTTRHRLSRSGDRAANNALHRIALVRLSHHQPTKDYAQRQLVNGHSRSKMEVLRKLKRAIAREIFKLLTRQIAVPEYTDLRPARQAKNITLTAVANHFGVWPAVISRIERGRQRDDTFADTYRNWLKAA

SEQ ID NO: 186687 - protein, 479 aa, unidentified
MRLPSLTINPEAKMTQSRRTRSSSSRRRSLPPELQHVNLNAAGIDVGAEAHFVAVPAGRDPQGQNVRQFGAFTADLYTLADWLAACGVETVAMESTGVYWIPLFEVLEERGFEVKLVNPRHVKNVPGRKTDVLDCQWLQQLHTYGLLQAAFRPEDQICVLRSYLRQREMLVRYASHHIQHMQKALEQMNLKLHHVISDLTGVTGMRILRAIFEGERDPHKLAGLRDHRCKNDEATIALALEGHWRPEHLFALRQAVELFDFYRQQITACDAQIEDCLHTFQDRSAGRPLDKPTRRRNRQKNQPAFDARSHLFRITGVDLTAIEGIDAQTALKLIGEIGLDMSRWPTEKHFASWLALSPGSKISGGKTLSARTKPYPNRAAAAFRLAAHGLHNSHSALGAFLRRKKAHLGAPKAITATAHKLARLVYAMLKNGSQYVETGEAEYERRYRERVVHNLKRKARALGYDLFQRNVPVLPLAPP

SEQ ID NO: 186688 - protein, 369 aa, unidentified
MLYLAIDQHAKQITVCVRNEDGDTVLRRQVSTRPEKIEAFFQQLAEMDSEFMAILEVCGFNDWLIDVLHEWNCRDIVLIHPEKPSKKKTDRRDAHKLADLLWVNRERLAAGQTVHGLRRVYMVTQKEREDRQLTSLRRNLGQRRTRTLNKIHRIINKHNLIWNYPTKSFQTQAGRKWLDELRLPEIDRLEMDMLLAEWKTWDEQIARVDVKIAGRASQVEPGKTHSPTQILMTAPGVSHYSGLTLASRIGPIGRFPRPRSLANYFGLTPGCRNSGNTQDRLGSITKEGSKIARFVLGQLVLHFLKHDPKIKAWYRRIKLRRGSKIARVAVMRRITTVFWHMLTHEEAYSMGGPPPRLRGEQQNTRSEAA

SEQ ID NO: 186689 - protein, 385 aa, unidentified
MAPPTRPRIVIGLDVGKSAHWACVVTREGELLASGPIPNREDAIDGLYAQYPGALVVVDQVRNIGSLALSRAKLAGMPRAYLPGLAAHGASKLFAGDAKTDERDAMVIAKTALGIPGALLAVADRPPEIEAARSLAAQRDFLACENTRSKNRLRSILLESCPEFEAQADLSDPATLKLMAAVGGPWSISEASPQAVGALTRGCRRAKVAALVESVESSSRPHPAAVACEDRAVRLLARRISENAAEIESLTSEISALLAADETYRCLLTVPGIGPRTASELVISIDIADFAGHDRLASYCGLAPRNRRSGTSISSVSASRQGNKRLKNLLIFSCNCLARSRNRWGEYYARCRDRGMPHGKALKAVARKRLKVIYAIMRDKVPYAA

SEQ ID NO: 186690 - protein, 394 aa, unidentified
MKSNTQNAKIEAITEKTLVLGIDVGSETHYARAFDYRGIEYSKKPFKFSNTEVGFATFKEWILDLKERHEKDKVVPGMEPTGHYWFNLGKFLQDNEMKPVLVNPHHVKKSKELDDNNPTKNDRKDPKVIAGLVREGRYMIPYLPDGVYADLRTASNIRFQLQAELTRIQNRISRWFNIYFPEYKTVYGKPDAKSGMLILKAAPLPEDILTLGIDGVNQIWRDAKLRAVGKARAKTLIEAAEHSIGSKEGTMSARMEIRMLLEDYESKNMRLQEVMVLIEELVKEIPMAEKLLEIKGVGIRTVSGFLAEVGDISRFNNPKELQKLAGLALVENSSGKHKGKTTISRRGRKRLRYLLFEVAMSLVAKNPEFSEYSYAAEPPVQFRLSHLSRRSEPL

SEQ ID NO: 186691 - protein, 341 aa, unidentified
MNPRELYIGVDVHEKESQIAVYEPDGGLMEEKRLPTEKLPAFIASLPGEKHVGLEAIGFIYPVYDALAEAGCDVAVANPHNIQLIARTRIKHDKVDARVLGELLRTNFFPRSHIPDAETREKRLLVKDRVKYGVRRADLKNSVKWLLKRRGLTVKSPFGGEGRERLRSLGLKEVEYRLRELELVDSIIEALDRRIHFAASRDRGARLLDTIPGVGPYTALYLSTALDAVERFPGSKHACAHTGLVPGLHQSGDKAYMGHITRQGDRWLRRNLVECARWAVRKDPHLREFYLRVRHRKGGKRALVAVARKLVSYAYWMLKRDQTYEELSPWKTDWGPSPKLE

SEQ ID NO: 186692 - protein, 438 aa, unidentified
MSNKVIFNLDELFISVGIDVGADFSWMSIALPNQQFVGKPYKILHNSIDSLTTAVSKIKEAEELYSLESRIFLESTGIYHYPLFCYLRDKGFNCSVINPIITKNSTNINIRKVHNDRFDSKKAALVGLKPDLKVSLMPSDLALNCRNLCREYYDLMDNRSAYVNKLQGELRMAFPQYLGIFSKVTINTSLTLLETYTSPSAFLEADKQEIIDIIKSTARFGLTYAQNKYNAIIQAATDANQFGYIIESNIKRIRLYISFIRKYDEEINSILESLHELVDANEDADFVKQIHLIETFKGAGFLSAVSIMGEIGDFSAFSKPKQLFAYFGLDPAVKQSGKFEGTKVQMSKRGSAIARRVIHTLTLQSISISRNREAKNPVLREYYLKKCDSKPKLVAMGAVSHKVCNMIFAILRDNKPFKIIAPQEHIKQYNSAKCDIAA

SEQ ID NO: 186693 - protein, 399 aa, unidentified
MDRPDYAVYLGLDVGKEEHHATGLDPSGIRMHDKPLPQAEDKIRDLLQALTERGRVLVVVDQPASIGALAVAVARDLGIDVAYLPGLAMRRIADLHPGNTKTDARDAYIIAEAARSMPHALRRVDTDDEALADLEVIVGYDDDLAGEVTRISNRIRGLLTQVNPGLERVLGPKVQRRAVLELLTRFGGPTGLAAATRRQLIAATKTRAPRTYEQLVDDVQQALTEQRVTVPGTRAAEMVLPQLATQLASLLTQREAAATQIEEMLDAHPLAKVLTSMPGVGVRTGARILLEVGDGSSFPTSGHLAAYAGLAPVTRRSGLSIRGEHPSRTGNKQLKRAFFLAAFAALQDPTSRAYYDRKRAQGKKHNAALACLARRRVDVLHAMLKHGTLYEDRSAPAAA

SEQ ID NO: 186694 - protein, 345 aa, unidentified
MNITTIGLDLAKNVFQVHAIDEAGEVVVGKALRRHQMMPFFSKLDPCLVGMEACATSHYWARQLSQLGHQVKLMPPIYVKPYVKRGKTDAGDAAAISEAVTRPTMRFVAVKSLDQQSMLALHRTRDLLIRQRTQLVNMIRGQLAEFGIVLAKGIQHVFKFTGQLLGGEAPDIPPLAVSVIVTLAEQLRDLHARIGGLDKDIRTWSKDNEVVKRLQTIPGIGIVTASALAATVTDPHQFTSGRQFAAWLGLTPRANSSGGKERMGRISKMGDQYLRRLLVNGMTSQSQSVRRNPDAYPWATSLMRRKPDKLVAVAMANKTARIVWAVMTRGEVYRAPLPATVKEAA

SEQ ID NO: 186695 - protein, 338 aa, unidentified
MSLLYAGLDVSDKKTNICIVDEKGDLHWQGICVTDPDALKRTLNRHGPDLEKVIFETGPLSCFLYHGLLKRGLPVVCICARHAKGVLSTRLNKSDVNDAEGLAQLARTGWYKQVHIKDKETHLDRTLLRVRHQLVKSHTDMLNQLRGLLKLFGLKLGQATTPGKRNERLFHLFEQEPALKPILAPLIKALFALEQETAKLNQRLKERTAADPVCRRLMSVPGVGPVVALTFKASIEDPARFRQSRDVGAYAGLTPRRFQSGERDVSGHISKFGDRMLRRALYESANSILGRLKKDCALKSWGLKLAEHKGAKRARVAVARKLAILMHKLWVSEQEFIW

SEQ ID NO: 186696 - protein, 363 aa, unidentified
MKEDKPRMLYLGLDVHSKWTTMVGFDPQTGEVLRLERVSNEQQSLQAALGNLTGPLHGAMEAGTNSWAMYRTLRPLFERLVVADPAKLWNRHADRGAKTDRRDALRMAQMLYRGEIQGIYIPDERTQDLRVLVRGKVRASRWVTRLTNEIASLLRAWGYVGPRSLLSKRGTARLDEAHLPPQSARVLALWRQMLNTARAIESELQAAIEREATLEPQCALLRTMPAVGEFTALLVRAEIGDIGRFHSAKALACYAGLTPRVYQSAERCFYGRLGPWGNRWLRYGLGLLAQRIAHSHKDSPLHRLYWRTCMRQHRNSAKVAVARKTAHLIWHLLHRGEAYRKAPQEERVEIAASAAARREHSPE

SEQ ID NO: 186697 - protein, 443 aa, unidentified
MHGCETPIVFPAGSGAARAALRGERLDGMDVVHTRCAGIDISKYDAKVAVRIAKAGRVGAEVKVETYGSSTPQVLRLRDDLIAAHVTCVIMEATGDYWRTFYYLLEDAEFDILLANPREVRNRPGRKTDVSDAQWLAELGAFGLVNGSFVPPAPIRDLRALTRLRTHITRDRGVEAQRLEKVLEDAGIKLSSVATDITGVSGRAMLQALCDGVIVEDIVEMARGALRNKKAELTQALQGRFTTHHGFMVAMLLGRIDACNDDIAALTSRIDVLMEPYRRAHDLLVTIPGISDRVADVIIAETGADMSVFPDAKHLASWAGVAPGSNQSSRTVKSAHTRPGDPYLKAALGIVALAAARNKKTYFCAQYRRIATRRGPIKALVAVESSIITACWYVLTRDTPHVDLGYDYFTRRRPDTAKTKAVQQLQALGYDVTLSPAQESMAE

SEQ ID NO: 186698 - protein, 343 aa, unidentified
MMTTIGLDLAKNVFQVHGVDERGFAVLRKQLKRDQVAPFFARLEPCLIGIEACGGAHHWAAKLTALGHRVKMMAPQFVKPYVKTNKNDSLDAEAICEAVARPSMRFVPAKSPEQQSVVSLHTARESFVHARTAQANQIRGLLIEFGLIIPQGMRHLYERVPGLIEDAIDYLPGRFRLLIERLFQHLKELDRQVQELECEIQQWHRSSEVSRRLETIPGIGPLTASALAASAGDPSNFKNARQFAAWIGLVPHQNSSGGKTQLLGISKRGNVYLRTLLIHGGRTLVQLARTRPDRAGTWLGRLVGRRHHNVAAVAMANKNARLAWALLSSRKAYEPLHIADAMA

SEQ ID NO: 186699 - protein, 371 aa, unidentified
MPHVTSVGLDVHARSVSAAAFNLYTGEVVERRFGPEAGPIAEWVLSFESPKAVYESGPTGFALCRALRALGVDCVVGAVSKMQRPAADRRVKNDRRDAAFLARLLATNNVVVVPVPDAEVEAARDLSRALDDARDNVQRARQRLSKFLLRRGHVFDETDALGRRRGAWTAAWWSWVAKVKMPEPAAKAALDHYVEDVRHEESSKLKLERLVAEEAARPRWAPVVGALRRIKGVDTVTAFCLAAEAGSFSRFRSAPAYAAWVGLVPSEHSSGEKVARGGITKTGNAASRRALVEAAWHFASCSPSPKPPKAGRDAVPADIERRCAKCTARLAARHRALREAGKRPCVANVAVARELACWVWEVGCRAEGTLR

SEQ ID NO: 186700 - protein, 326 aa, unidentified
MDVLGIDLAKLTFDVTLLTSAGCSHHHQFPNTATGFTQLQHWLGKLGVSQLHACMEATNVYWEALAQFLYDQGYTVSVVNPARIKGYAMSQMQRNKTDKQDSATIAAFCATHTLQAWTPPTAAQRKLRALVRHRDDLIATRIQQTNRLQDTTDPDVRASLEAVLVTIKAQLKTTQRQITAHLKANAELRDLHCLMDSVPGIGAVTAQKLLAEFYDLAAYPSAKAAGADAGLTPANYESGSSVRKRPHLSKMGKASIRAALYWPAISVMTHSMEFKQFAQRLAARGKSYGVILGAVMRKLIHIIYGVVKHKTAYDPAKVLGPAAPLT

SEQ ID NO: 186701 - protein, 349 aa, unidentified
MRFYTNQHRHYCGIDLHTKTMYVCILDRDGQVLVHKNLPSNPEAFLEVIAPYRDDLVVAAECIFTWYWLADLCAAEGIAFVLGHALYMKAIHGGKAKNDRIDALKIAMLLRSGMLPQAYVYPAGMRATRDLLRRRLHLVRKRGQLLAHIQMTNQQYNLPAFAKRIAYPSNREGLADHFEDRVVRKSVAVDLAMLDRYDTLLVDLESYLVRQAKQHDAQAFQRLRSIPGVGKVLALTILYEIHTVQRFDRVQEFASYARLVKCAKESAGKKHGTSGAKMGNVHLKWAFSEAAVLFVRHSAEGKKLLAQLEKRHGKGKALSILAHKLGRAAYYMLLRGKAFESERFVATVN

SEQ ID NO: 186702 - protein, 463 aa, unidentified
MQTRPLEAVAGFASVSGSSAHLWVERRDEVPTRPAMPQGSGMQGATLAHVTTSTIDPTLTEAAATEVFAGIDWGGSFHQICLIDEDGKVLRQQRVPHDAAGFDELDRLLTCHRARLRVAIERAEGLLVEHLHLLGVEIFCVSPKISARARERYRMAAAKSDAFDAFVLADTLRHEHRHWRALTPPSPVLAELRAISRDRDRIVIAQQATENRLRAVLEAYHPAPLHLFSTLDRDITLDFITDYPTPEQAGRVGTARMDGFCRRHGYSGRTQPEVLVERLRPHLLSAGEGTVAGKAFSASLFTEQLRMLNTHLRAYDKRLDELLERHPDTPIFTSFPGVGPVVAATLISEMGEDRHRFPAPGALLAEAGLSPVTRASGRTRQVRFRYASNRRMRHMIDWWMFTAIREDDWTRQAYDHARARGQGKYRALRGLGSRWTRILWRCWTDHTRYDPAIHHRNPEPTTA

SEQ ID NO: 186703 - protein, 329 aa, unidentified
MSQNNISKNNLNTIWVGVDVAKATLEMDLGGVIHKLGNETKDHTRIVKLLGRAEKALAGSKVHVILEATGGYEVALVRALHEAGRLVSVIQPSRVRHFAYAKNQRAKSDPIDARILSQFGEAIRPAPTPPPSTAQIHLSVLVTRRAQLIQTRIAELNRSAHYNDKMLCRQSRGLLALLDRQIAACDKAIATQIAADETMKARAQRVQQVAGVGPVVAAVLQAGLPELGTLTPSEAAALAGLAPYDCDSGPRKGIRRIWGGRAPVRCALYMAAMTAIRHDPILKAFYLKLCAAGKKPMVALTAVMRKLIVLLNHLIKNPDFTLITSPHTN

SEQ ID NO: 186704 - protein, 417 aa, unidentified
MDVMAERCAGLDVHRSTVVACVLLSEAGGRTKKAKAEFTTTTAGLGKLVAWLREHGVRVVGMESTGVYWMPVYAALESAGGFELIVANAQHIKAVPGRKTDMNDAEWVACLVRHGLMRPSFVPPKAIRDLRDLTRYRRTLVEAQASERRRLIKLLEAADIKLAGVLSDVFGVCGRLILRAVIAGDQSAAEMAKLARGKLRQKRPQLFDALSAQVDPHRRGLLAMQLTRVEAAEADIAALDAQIAIHLAPYARQLGLLMAIPGIDRVVGATMIAEIGVDMTVFATAGHLAACAGICPGDTESAGKRKPTGARKGNPHLKTALCNAAIGASRKRDSFFKAKYHKLKSRRGGGRAALAIAHKLLVVAYHVLSTGAEYRDLGETYLDKRNAQRSAQRYVRRLENLGYTVTLNPVAQTANAF

SEQ ID NO: 186705 - protein, 353 aa, unidentified
MQIYGIDLSMEKFDVNYIDKNGKEKKREVKNKLNDISNFLATVPAKAILCAENTGTYSDMLVFLSNQKGISIALVPGYTIKHSLGMIKGKSDPIDARRIREYSERFYYKLVFKEYDREKIIELKYKLVFKEYDREKIIELKSLYSLRSQLVKARKILRTGEHSRSNIPMKSISVKKYTNNALAHLDEEIKEVEREIEAIIRSDQELNENYELALSVKGIGPVIATDLIIKTGNFKTINTARKAASYAGVCPFPNESGKMVGKKKTSPFADRKLKSLLYMGAKSAVKHNKEYRLYYQKKKIEGKPHYLIMNNISNKMLRTVYSVVKNKTPYSQDYICLDPRELENNNSSTKKVA

SEQ ID NO: 186706 - protein, 370 aa, unidentified
MLDTTTFVGLDVHARSIKAVSLDVMTGEVRCATFGYDAGAVAEWVRSVDPKARCVYESGVTGFDLQKRLSGLGVDCAVGAVSKMIKPSADRRRKNDRNDAEFLARMLSVGNVVEVWVPDDECEAARDLTRALEDARDDLSRAKQRLSKFLLRHGLAFDERTPTGRRKGNWTRAHWSWIESIGFAERADNDVLAYYVDAVRRAAEEKARLEGLVEAEARKPRWRRRVDSLRCLKGVDTASAADLVFEAGEFSRFRNARSFAAWVGLTPSEHSSGESDRRGAITKAGNKHLRKALVEAAWHYLTCSGRPKDLAKGQAPDRGARRHAAKGVRRLVERREALLARGVHNNKANVATARELACWVWAVGLMAEEA

SEQ ID NO: 186707 - protein, 339 aa, unidentified
MNNSVIGLDIAKNIFHLFTVLADGKTLKKKLKRHELLAFFANYPASIIGVEACGSSHHWARELTKLGHEVILLNARFVKNYVVGNKTDFNDAEAIYEAVHRPNKRVVAIKTVAQQDIQLVHNIRKDLVDQRTALVNQTRGLLSERGIVINQGIEQLREQLPLIIEDAENSLTDLSRELFAEQYEKIKTLDAEIKAQDQRINRLCNTNDLSKRFLDVPGVGPLTATIVAADIGDGGKGYKSSRDYAASLGVVPKQHSSADKPHYLGISKRGNRYIRTLLIHGARAVLKNCAKKTDKLSLWLQALVARRGFNKAAVALANKNARILWAMASNGKDYKALAA

SEQ ID NO: 186708 - protein, 389 aa, unidentified
MIYVGIDIAAAKHACCILSEEKKVIKQFTFANSASGYEKLRSALLSPAETKIGLESTGVYGNNLVEFLRRNGYTTHIFNPLLVKKSIQATTLRKTKTDKSDAKQIARYTMEHSQPDQVPSYHISELKSLSRGRFSLVRERSKAKTQAKTLLIQLFPEFSEAFSDMFGVTASAVLRSFPSARALSLCPANVLAEILSQTSRGRFGKAKAEYLIGLAKDSIGTQSIALELELQMLLQQIDLFTAQIAGYEAAIKSVMEEIDSPITTIPGIGYVLGAVILSEIGDISRFSTPAKLQAYAGVDPSISDSGSSVSAPGRMVKHGSRYLRWALCQAARCVSLYDPVFAAYMQSKRNEGKHYCVACSHVAKKLTRVIYSLLKNNSVYSPTYSLLSA

SEQ ID NO: 186709 - protein, 337 aa, unidentified
MIVIGVDVHKHSLTAVAVDELGRTLAERTGQVEEELVDWARSLSEERMWALEDCRHVTRALERTLQDQGERLVRVPPRLTAPQRRRGRTRGKSDAIDALAIARAALQEPELDGPRAGEQTLRELKLLVDHRDDLVDERRRCQQRLRWHLHELDPGLHVPLGALDRAVWLERLSRRLSRGEQTTQVRIARELIARCRSLNRSIGELERELQERTTTIAPRLLALPGCGALSAAKLLCEIGPIDRFRTDAQLARHAGVAPLDASSGKHQRHRLDRGGNRQLNCALHRIAVTQGRVHAPARAYLERKQKEGKSRREAIRCLKRQLARTVFSTLKVEPALT

SEQ ID NO: 186710 - protein, 312 aa, unidentified
MTKDTIGVDISKGALDAYRFSTGEHRQFLNDLAGCSTFIDWVREDKVDRVVFEPTGPYHRSFERALGKAGVPISKINPRHARRFAEATGSLAKTDRVDAAMLARMGMLLEPATRPIISETLDELRDLSLARQALIKDRTAAKNRQKVLRIGLLRRQNIQRLKQIEGQLTAIHSAIETLVQGNEDLKLRANILISIPGISTLTAHTLLIDMPELGTLDARQVASLAGLAPVTRESGTWKGRSFIRGGRARLRQALYMPALAACRFNPDYKIKYAQMKAAGKPSKVAITAVMRKLIVLANALIRDCRYWTPKRA

SEQ ID NO: 186711 - protein, 428 aa, unidentified
MNCNTQNAKIASITEKTLIVGIDVGSETHFARAFDWRNYEYTKKPLEFSNTEAGFLTFKAWVEDIAEKQGKTAVIPGMEPTGHYWFALGKFLQDNGMKPVHVNPHHVKKSKELDDNNPNKNDRKAPKTIAALVNEGRFSYPYIPTGIYAEIRSLSNLRFQTQEELTRIKNRIARWFAIYFPEYKDVYGDLKTVSGRMVLKVAPLPEDIGKLGVEGVNQIWRNAKLRGAGIKRAKTLVSAAEHSVGSKEAPEAARMELKNLLDDMDVYVSRLDELLVNIEEKLKEIPYVDKLMEIKGIGLVTVSGFIAEVGDIGRFDNPKQLQKLAGYAIVANDSGKHNGESRISYRGRKRLRYVLYEAAISLIGKNAEFKSIHEYYRTRKENPLKKMQSVVAVACKILRVFYTILTKGVDYDPVKLLGDIKRPQLQAA

SEQ ID NO: 186712 - protein, 346 aa, unidentified
MEHYAGIDVSLELSSVCVVDGQGKIMKEAKVASEPETLVCFFKELGFPVKRIGLEAGPLSQWLHAGLAQAGFETVLLETRHVKAALSAMTVKTDRKDARGLAQLLRMGWFQQVHAKSIGSQEIRALLVARKQLLGRLLDVELSLRGILRGFGLKVGQVTRKTFGARIRELVTGQATLERIAEAMLSARATLKAEYAKLHKAVLAIVREDAVCRRLMTVPGVGPVVAVTFKSAVDDPSRIAKSKAVGALFGLTPKKYQSGEKDITGGITRAGDEMVRTALYEAANVLLSRITRFSKLKRWGMDVAKRRGSKRAKVALARKIAVILHRMWIDGTTYRWAEAKPIAAQA

SEQ ID NO: 186713 - protein, 314 aa, unidentified
MCPLVFVGIDVSLTRLDIALRPGASSSHTHDESAIARVVEQLRALSPTLIVLEATGGMEVPLTSALATAGLPVVVVNPRQVRDFAKASGRLAKTDALDAQVLAQFAEVMRPQPRPLPDADTRALAAVLTRRRQLVEMLTAEKNRLLSASSPIRKRVRVHIAWLERELEHTNTELSEAIRQSPVWREKDDLLQSVPGVGPVLTSTLLASLPELGTLTNKQIAALVGVAPLNRDSGTLRGRRTVWGGRAQVRAVLYMGAIVAARFNPVIRVFYQRLQRAGKAKKVALTACMRKLLTILNAMMKHRTPWREVEAHHA

SEQ ID NO: 186714 - protein, 412 aa, unidentified
MLKIVYPICCGLDVHKDFVYACIATSVNGVTTYKSHRFSTFTKGIRELLSWLLEHNCKDVCMESTGKYWIPVYNILETDCKIVLAHPKYVKAIRGKKTDKKDAKWIADIFKHDLVSGSFIPPADIRQLRDLVRYHTKLTNFTTGEKNRAQNCLTVSNLKLDSVFSDVFGKASSNIIGHILANPSEKLSDVSAFRTKHMKATDDAILEAIDGEFCPEQAEKLRIIREHMSNLDLCKLNLQSLILTTAEKYISEIELVCTVPGISTFFAISVIGEIGVDMSVFPTSKQLCSWAGLTPQNDQSAGKKKTTRISRAGAYIKPLLVQCALAAIKAKNKHPEIFNRYSALKKRRGHKKAIIAIARMLLTAIYNILKKREPYNPELYRKSDVPPEHRNVSVDEAIFILQRQGYLVSSPT

SEQ ID NO: 186715 - protein, 360 aa, unidentified
MTDAERPDTKAEVILGVDTHLDVHVAVAVDDLGRRLGESSVPTTANGYERLLRWAEAFGPVRCAGVEGTSSYGAGLARHLKARGIEVLEVERPKRQRRSSRRKVKSDFSDAESAARAVLASETSGVPKSGDGCVEMIRALRAARRSAMKARTQAANQLQGMRVTAPEQLRCRLRGLSTKELVSVAARFRLADDPRDVPTATKFALRSVARRYEALSREIDELEVHLDRLVGQVAPELVSLPGIGTDNAATLLIVAGDNPQRLTSEASFASLCGVAPIEASSGKVVRHRLNRGGNREANRALYMICLARMRRDRRTQDYVARRTTEGKSKREIIRCLKRYVAREVYRVLISCLARSSPIGP

SEQ ID NO: 186716 - protein, 358 aa, unidentified
MADKVTVAAVVGGVDTHKDLHVAAVVDQNNKVLGTQYFATTRQGYRLMLAWMTSFGALKRIGVECTGTYGSGLLRYLQNAGLEVLEVTAPDRMERRKRGKSDTIDAECAAHAAFSGIRTVTPKTRNGMIESLRVLKTCRKTAISARRVALQIIHSNIISAPDELREQLRNMTRMQLIRTLGSWRPDASEYRNVTNVYRISLKSLARRCLELHDEIADLDVMIAAIVDELAPELIKRNAIGYESASQLLITAGDNPQRLRSESGFAALCGVSPVPVSSGKMNRYRLNRGGDRAANSALHIIAIGRLRTDDKTKEYVARRVAEGHTKMEAIRCLKRYISREVYTLLRNQNRQVNSIPIMA

SEQ ID NO: 186717 - protein, 340 aa, unidentified
MNTMTLLGIDIGKHSFHLHGQDARGHQVLRKKTNRSQLLSTLAQLPACTVVMESCGGAHWLARQIGALGHEVKLIAPQYVKPFVKGNKNDFIDAEAICEAASRPAMRFCSIKTEEQQTLSALHRVRDSLIGHRTEATNQIHGFLLEFGISLPIGVTALHRVPALLDDPQHPVPLRLKGLVMRLYYQIQQLNDEIKDIESDLKQQLEEDDAARRLQSIPGIGPITASALLADIGDASNYRSGRDFAASLGLVPKQHSTGGKTVLLGITKRGDKHIRRLLVQGARAIMQHIDKREDALGPWVRELLTRRHSNVVACALANKLARIVWAVLAKGGQYDPHPNA

SEQ ID NO: 186718 - protein, 422 aa, unidentified
MRPAVSGTSQLNSSELCAFQNPLSSTLTAENRTEHLLWALVSVLEQQFSETVVWGACVPVPRGRTAPVSSPVIFDRSLVQGPLPKSRTTEQSQDPSIALTRKVTVTRIICGVDVSSTSLEAAIGRTGAVGQFANNPEGIGALAAFCLQHHVELVAMEATGGYQRQAFALLAAEGHAVAILNPRSVRQFAQGMGRLEKTDPIDAAMIAWFAEVRQVVPTPVPSAGQTRLRGLVTRLRQLTELRSSQRQQQRLVIDPQLRSGFDQLLALLKGQIEVLAQEIAALIEADPLWAELDRAFRSIKGVADRTVARLMAEMPEIGALSNKAVSKLAGLAPIARDSGAYRGKRSIRGGRSAVRDILFVVASVVVRYESDFIAFAQRLRAAGKPPKVVRIALAHKLLIRLNAKAREVRARFSHAQTTALAC

SEQ ID NO: 186719 - protein, 428 aa, unidentified
MNTTVSERWAAVDWGDSSHAVCIVDADGKQVASFSVEHTAEQLEQMVLSLKQHGPIAGVAVETDHGLLIHKLLECDLAVYPINPKLSDQWRAGRSVAGAKSDAADSFTLADGLRTHHGQLRPLLPDDPLTRELRGFCHHEVALIRERTAEIEKLKAALKEYYPEALSWFDAWSCPAAWDFIVTFPTPRELREAKTGKFLTLLKHHHMKYAPRWQQMVADRRTRAAWPADPVVTHVQSHVALDAIAKLRTIECSIKQCRRHIDELFARHPDAGIFTSLPGAGKKLAPRLLADMGSQRDRYESALAVQQISGVAPVTRASGKVRVVKIRWACRKAFRHDLYWLASCSRKKAAWAQAFYGQARARGDSHALALRKLGYKLLKIIFRLWQDRQVYDDHRYVLSLQRHGSPLAAAISSSLIVNERCTTNAKNT

SEQ ID NO: 186720 - protein, 362 aa, unidentified
MEGRAIDLYVGLDVSLKQTAICVVDRNGKILTEAMVGSDLEAITAFIEAKAPGVVRIGLETGPTATWLWSELKQRGLPVICIDARHAKAALRMQINKSDRNDAFGIARIMQTGWFKAVHVKTPGSHAIKALLVSRALLVKIKRDLENQIRGLLKNLGLVIGRAKMGVFSTRAEALIADRPDLAIAVQPLIEARKSIARQIAELDRKVMKIARGDSQVRAFMTTPGVGPITALLFKATIDDPTRFRRSRDVGAYIGLTPRRHASGEIDWTGRISKCGDALLRSYLFEAASVLLTRVAKWSALKAWGMRLARRNGLGKAKVAVARKLAIRGHRPPSSPRLYASGPFAAPPWLAAARRFGEQRPG

SEQ ID NO: 186721 - protein, 449 aa, unidentified
MRFIGLDVHRDFCEVAICLAGERARSAGRVPTEPEKLKLFAESLDRQDRVVMESTGNALAIARILEGNVAEVVLANPMQVRAISHAKVKSDRFDARMLAELFQAGLLPTVWIGDEQTRQLRRLTSRRSQLVRQRTRVKNEVTAVLVRNLAGRPPASDLFGKRGRAWLGALELPGDERQTVDACLRQVDFLSEEIGAVDRSIATSALDSPEIRRLMTIPGIVVTSAATLMAAIGEIRRFPSDRRLVGYLGLDARVRQSGIAPARHGRISKQGSSAARHVLVEAAWAAIKTPGPLRAFYQRVRARRGPQIAIVAVARKIAALSWQLLTKQEDYAFKRQSLVDKKLRSVELRAGAPRRQATRRDGITTRDRVRQERQLTEQAEQAYLQLVSDWKASRPAKDGAGAAPGRASQRPSKGKAARQAQAPTPTLSLAVHPHHREESHPDESRANDS

SEQ ID NO: 186722 - protein, 444 aa, unidentified
MAFSGMILIREVADAPVIMGISKPAGLKSPCGEVKIVNPLFVGIDVSSRNNVAYLMNPDGSKYSSFSVQNNLGGAKLLSERIVSALNSKQLSDVVIGLEATSIYGDSLVYALREDGSLGRFQRKIHVLNPKQVRKFKEAYPDLPKNDFVDAFVIADHLRFGRIAREVYMDDYRYQALRTLTRARFDVIQNLTREKQRFANYLFLKCSGMAQDKDIQNTSATTIALMERFETVDDLANADLDELTAFIAETGRGRFADPDATARVVQAAAKGSYRLPKTVNDTVNQAMSVSIASMRALKEQVKVLDKAIEQQFEIIPNTLTSIPGIGKVYSAGIIAEIGDIHRFNSQASVAKFAGLVWHKSQSGEFEAEHSQMIKSGNRYLRYYLLEAANSVRRCDSEFRRYYDLKFKEVNKYQHKRALALTARKLVRLVFRLLKDNRLYIPPES

SEQ ID NO: 186723 - protein, 340 aa, unidentified
MTVTTIGLDLAKSVFQVHGVDESGATVLVKRLHRKQMLPFFSKLPPCLIGVEACGTAHYWARTLATMGHEVRLIPPSYVKPYVKRGKSDALDAEAICEAVQRPTMRFVPVKTVDQQAILMAHRARSLLVRQRTMAANALRAHLAEFGYVTNPGIAHLAKLIDQVLADKNALPSYACTALEILIRQIMSLTNDVVALDQQIATWHAENEASRRLAAIPGIGVITATAIAATVSDPEQFSSGRQFAAWLGLTPQQHSTGGKTKLGGISKQGDRYLRRLLVIGATAVMRHTKDRTTPMANWIRKLLEKKPFRVVSVALANKLARIAWVVLTRKEAYRPYALTA

SEQ ID NO: 186724 - protein, 349 aa, unidentified
MNHYAGLDVSLEETTICVVDEAGRIVREARAASEPQALVAALQGFGLPLQRIGLEACSLTAWLHDELRSAGLPAICIETRQANAAMKTMPNKTDRNDARALAQIMRTGWYRQVHVKSRQCRLWRSLLVARRTVLNEMRSIENVVRAILREAGLKLGTPSRAAFAVRVRDLAEGDPLVMSLVEPLLAILATMLDQLAHLTQQVLGIARKEAVCRRLMSVPGVGPITALAFRATIDRPDRFRRSRDVGAHLGLTPSRYQSGETDIQGKISRCGDELARTALYEAAHTLLVRSRKWSALRAWGLKIAKHRGMARARVAVARKLSVILHRMWSDATEFRFGKQPHSNEAAAAA

SEQ ID NO: 186725 - protein, 402 aa, unidentified
MNCVGIDVSKGKSMIAVMRPFGEVVVSPFEVRHTANELSELAGLLKSLDGETRVVMESTGNYHAPVAWLLHDAGLYVSVVNAMLVHDYGNNSLRRAKTDKKDAVKLANYGLDHWLTLPRYIPEEDTRLMLKICYRQYQQYSKVQTMLKNNLISLLDTTFPDANRLFTSPPRADGSEKWVDFVATFWHCECVCGRSEKAFTTQYQKWCRKHGYNFSEDKALDIYASACRHFGVIPKTDTAKLLVEQAISQLRATSAALAALKQEMQSLAASLPEYPVVMEMFGVGPTLGPQLIAEIGDVRRFHSKKALVAFAGIDAPPYQSGQIDVRSRSISKRGSASLRRTLFLVMGVLLQCAPMDEPVYQFMNKKRSEGKPYRVYMMASANKFLRIYYASVKAYLDSLEHD

SEQ ID NO: 186726 - protein, 381 aa, unidentified
MHGPLSTNVPLSNQPQSSPQALPRSSHIVAVDLGKFNSVLCRFDPATAAHSFVTLTTDCESITRELEKVPAADRASTLVVFETCEISGWVHDLVKPMGFKIAVANPATEAWRWTKVKRKTDKDDALKLAKLASMNQLPTVHMPSPQQRQKRRLVHHRRSLVQRRTASKNQTRSIFNQQGIALPRGTKCWTRAGIEQMRLEAKKITECEVDDLWKGRLDSELLVMAMVDQQIKQIDKALEGLVDEKVRLLMGVPGVGIGLATTVVVHLDDPARFSSAGKVGAYAGLTPRQSQSGESNRFGHITRRGPSLLRGMLIEVAWVVYRHNQWAKDFVNRVSRGNKARRKIAIVALARKLLVKLWAMLRDNKPWRDPGPPAPAGVAIV

SEQ ID NO: 186727 - protein, 394 aa, unidentified
MKLIGIDIGKNKHFFCVIDQQTGEIISQPVSFSNDKEGFDFLVQKIKSYPKDSILIGMEDTGHYHFALLKYLLDLQYTVALINPKTTDFNRKMQGGITKNDKLDTINICDVLDTPERKKQYRITKVNSFDLYEQKQLTRHHHNLKEEENVYKNRLQKCIDIVFPEFNKLFNSKYGIVYMNILKMFGSAENIANTDIRTIRKCFEIEGRGNRISLTPERLKECARSSIGISSSAEVIQIKHLTAQIELIEEQLTEIDKKIEEFSIQNNSPILSIPGISHFSGTSILAELGDISNYSKPSQIIKFAGVAPLHYESSQFNAQHTAITKKGSKYLRKTLYQIILPVIRHNPVFNKYYQLKISQGKGHRCAQGHCVRKLLRIIYHLLKINQQFDPQLLR

SEQ ID NO: 186728 - protein, 395 aa, unidentified
MTSVMDNNSPIGKADVGEVSVASRADINRQREFDRARVEKTVMKREPRCRLGISPNSRLNRRRPARSTSSHLQVREITMSEKIYVGIDVAKDSFCTASCPSIIKAHLPNTPDGHRKLLQLLQKETIALIVLEATGGYERPLVAELISNSLPVVVVNPRQVRDFAKGMGQKAKTDPIDAQVLAQFAQIVKPAPKVHSKPQIEELSELVRRRRQLNDLRTQESNRLATVCHPKIRKSIQKMIKTLNCQIDEIERLIRNYIDTDDDLKNKDHILQSVPGVGPQTSAMLIANLPELGTLNRQEIASLAGLAPWDRSSGKSNGQMHIWGGRKDVRSVLYMAAFTACRFNPVIRSFAENLRDNGKAYKVIITACMRKLLVILNTMVRNQTPWAPRILLKNS

SEQ ID NO: 186729 - protein, 409 aa, unidentified
MDVVIERCAGLDVHQATVVATVRVPAATGARTVVTETFGTMTPDLLALREWLRAHGVTHVALESTGVYWKPVYYVLEEGFTLLLINMHDLKRVPGRKTDVKDSEWLAQLLECGLLRPSFVPPPPIRELRDLTRYRVQQLQDRTQEVNRLCKVLEDAGVKLTSVVSDVMGVSGRAMIAALVEGTTDPVVLADLARGRLRKKLPELQRALQGRFRTHHAFLIQQIFAKIDFLDETLDRFAGEIDRRLLPFEPTIALLDTIPGVDRTGAMMLIAETGGDMRRFPSDAHLCSWAALCPGQNESAGKRRSGATRHGNRYLRGTLIQCALAATRKQGSALQARYHRVKRHRGHKKAIVAVAHQILRIAYFIMRDGVPYHELGADYFDRRHTDRAVRRHVHQLEALGFHVTIEKAA

SEQ ID NO: 186730 - protein, 326 aa, unidentified
MEHELHYIGIDTAKEKLDVDVLRPDGRHRTKKFANTTKGHDELVSWLKGHKIDHAHICIEATGTYMEPVAECLYDAGYIVSVINPALGKAFAQSEGLRNKTDTVDARMLAEFCRQKRHAAWEAPHPLERALRALVVRHQALTDMHTQELNRTETAREVQRPSIDAHLLWLEAELKRLEKQIKDLTDDDPDMKHRRKLLESIPGIGEKTSAVLLAYIGLKDRFAHARQFAAFAGLTPRRYESGSSVRGASRMSKAGHVSLRRALYMPAMVATSKTEWGRAFRDRLAANGKKGKVILGAMMRKLAQVAYGVLKSGVAFDASRHNPVAA

SEQ ID NO: 186731 - protein, 399 aa, unidentified
MSERRARVWAGVDAGKGHHWAAVVDESGATLWSKKIENDETAVLTALGEILDLANEVHWAVDISGTSSALLLALLAAHGQQAVYVPGRTVNRMSGAYRGEAKTDARDAYVIAETVRHRRDFTTIAVPAQLAADLALLTAHRTDLVADRVRMINRLRDVLTGIFPALERAFDYSAHKGALVLLTGYQTPAALRRRGRARLTAWLANRGVRGADAVAATALEAADAQRTVLPGEDVAAEIVADLAAQILALDDRLKRIDKQIRDTFHAHPQAEIIESMPGIGPILGAELVVAAGDLTAYADAGHLASAAGLVPVPRDSGRRTGNLHRPKRYSRRLRRVFYLSAQTSIIKDGPNRDFYLKKRAEGCKHVQAIIALARRRVSVLWALLRDNRIFAPDPAAQTA

SEQ ID NO: 186732 - protein, 338 aa, unidentified
MSEIVTIGLDLAKNVFQVHGVAADGRVVVRRQLRRSDVLTFFRKVPACLVGMEACGSAHYWAREIAALGHSVKMMPPAYVKPYIKRGKTDAADAEAICEAVTRPTMRFVPVKSAEQQSVLMLHKTRELLVRQRVMLTNALRAHLGEFGIIAAQGLVGMKQLLELFHGCGTTLPALARDALNGVIAQIESSERQIEAIEAKIMAWHRDNERSRRLAAIPGIGPITASAIAASVPDATVFRSGRQFSAWLGLTPRSHSSGGKERNMGITKQGDGYLRRLLVVGATAVLRHARQSNPSRAWASRLIDSKRPKVVAVALANKTARIAWVLMAKGQEYVAPAI

SEQ ID NO: 186733 - protein, 401 aa, unidentified
MKRLSGGIDIGSAFHHITILDEEDHILYNQKVSHQLNEFTESIKLFKKIEKKEKGEISFALEGKNGYSAPLDRMLLNKGFTLYNVDNFKLKRFREAFAGEWRDDQRDALMLSKMLKLKDYINSQREKVFIKIEKSSPVTESLKLLSRHQQTLIDEKVRLTNRLRKKLLEVCPEILKLAKLKNKKLIVILVKYPDFSKYKRITLKSLLKIKGIGEIQAPFLLKRLNHIAYMPGLTDIYKMIISSFAKRISELQKEIKDIDKKLDEIGEKDKAVIHLKTVPGVATKLASRFIGEIGNIHRFPSEKQLAVYCGIACVNNDSGKVIKAKAVYKANKICKQTLITLAGGSIRLSSQCKAYYLKKRTEGKSHNHTLRCLARQMIKVIYKMLTEDRDYIVRKELKKVA

SEQ ID NO: 186734 - protein, 441 aa, unidentified
MSELSVLDPRAAFVDVGSEQMHVSIAGGPPKVFGTFTTQLHALRDWLIGQEVSSVAMEATGVYWLPLYGVLEQAGLQVHMVNGRQTRNLPGRKTDMNDCQWGATLHAHGLLRAGFVPPAHIRRLQDYLRLRSDHISLAASHVQHMQKALERMNIKLHDVISSLTGVSGLAMVRAVLAGERDPSKLLALCDPQIQRKKAERIKESLNGTWAEEHLFALAQALQSWEHYQSQIVQCDQKIEVLLRQGGGSGGGSRAPVTIRGRRKGASENAPKIDGLRELVAGLCEGKDLAVLPAHTEYGVLRLIAEVGTDLSAWPTGKHFTSWAGLAPGSRQSGKRRGSTKRQRNRAGRMFCVMARSLARSKDIALGGFYRRMAARRGTLVANIALARKLATQFWNVMVKGVDYVEHGLADYEAKVMQTKQRSLQRLAKQLGQQVVPMTKPA

SEQ ID NO: 186735 - protein, 353 aa, unidentified
MRKPQVIEDQEHERAFDRVAAVDVAKASGMVCTRTPNPSRPGARRSTVWEVPATMNAVLALAARLAQDGIEMVTLESTSDYWRIWYYVLEAAGLAVQLVTSSQAKNLPGRPKTDKLDAMWLARLTEMGMLRPSFVPPAPVRVLRDYARARTHLVQDRTRCWQRLEKLLEGALIKVSAVASKLTTVSAQDMIKAMIAGERDPRVLAGLARGRMKAKHDALVEALTGMFDDHHGELAQMLLEQIAFCDTRVAVLAGRIEEQLNQIPDAWGVDADGTTGPGAGTGTDAAVPPAAQRLAQIPGVSPELARSIIAETGLDMSRFPTAAHLVSWAGLCPSARQSGPRTRAGKKGQGVVR

SEQ ID NO: 186736 - protein, 388 aa, unidentified
MGHSLLFAVRAGPPHDVGVDGPRTASMCQNEVVTDLKQRETVRGTIIRIGIDTSKHIFQLHGVNAAEAPALRKKLQRKEMVAFFEKLPPTVVAIEACGGSHHWARLLQSFGHEVKLIPPQYVKPYVKRGKNDAADAEALCEAMSRPTMRFVPVKTAEQQAALMLIGLHDRLIRNRTQLANAIRGYAAEFGLTAARGMCKIEPLLERIAADETLPDLARELFALHAKEYAQLQEQLKTVEAKLMAWHRAEECSRRLAQIPGVGPIGASLLVMKTPAPGTFRSARHFAAWLGLTPKDHSTAGKVRLGVITRAGDEALRSVLVAGATAVIRHVRRGRGAASPWLVDLLKRKPPKLAAVALANKIVRIAWKLMVSGEVYRAKPMPPALARVA

SEQ ID NO: 186737 - protein, 338 aa, unidentified
MALYCGIDLHSTNCWITIIDEDRNLIQESKFGNDLAAILRFFEPHRAELEGIAVESTFNWYWLVDGLMDAGYRLHLTNTCAIKQYKGLKYSDDRHDARWLAHLLSLGILPEGYIYPKKDRAVRDLLRRRAFLVHKRTSFLLSMRGAFECRTGMRTTSNDIKKWTPADVEQHIADPLEALGITCLLEPMAALDGQIKILEKEALKQAKLRDEFNGLKTVWGIGKILGLTITYEVGDIGRFAKVGNFASYCRLVKSARLSNGKPKGSGNTKNGNPYLSWAFSEAAHFAVRHHEPAKKFVQRKRAKTNGIVAIRALAHKLARASYYVMKDHVDFDPDKIFH

SEQ ID NO: 186738 - protein, 421 aa, unidentified
MQVLYERCAAVDVGKDVIAVAVRVPGDGPDGRQTVKRTFKAFYGVLGEAARWLTSLGVTHVVMEATGIYSMPVYHALIEHGHFTQVLVCNAGHVKNVPGRKTDLADADWLVHLLECGLLRGSFIPPAQIKAARDVIRYRTKIVQSRASEAQRLGNVLQDAGIKIDSVASSITTKSGRAMIEALIDGERRPRVLADLALGKMRAKIGDLELALEGRFGDHHALMCRLHLDHIGHLDEMICRLDAQIEAMMKPFRAERDLLTTAPGIGPLAAAAVISEIGASPAEFFPDAAHLASWTGICPGNHESAGKRRSGRRRHGNAHLQAVLVEAAWAAVRHDGYLKALYHRHVMKWGGYRSPTAKKKAIIVVAHALLVIIWHMLAGGASYHELGTDFFTRRLDPERETRRLIARLEALGHQVTLQPAA

SEQ ID NO: 186739 - protein, 347 aa, unidentified
MGEVSVIGLDLAKNVFQLHGVDAHGKVVLRRRLRRAQVEEFFATLPPCLVGMESCPGAHHWARVLQRLGHRARIMPADYVRPYRKGGKNDASDAEAICEAVQRPGMRFVAVKTAEQQGVLALHRARALLVRQEVALVNAMRAVLAEHGVVLGRGRREAVRVVAHLLEEGEGAEALPESVRVALAALLEAHRQLEARVRALDAALRTWHRGCEASRRLATIPGIGVLTATALVATVGEGGAHFRSGRHLAAWLGLVPRQHSSGERQRLGRISKRGNGYLRRLLVLGAQALLRHVRRHMAAGRPSALPWAERLLRRRPPNVVAVALANKLARQAWAVLHHGEPWRAQTA

SEQ ID NO: 186740 - protein, 414 aa, unidentified
MVEETIAWFAGVDWGSAKHQACLLGAQGGIVGEREFPHSGKGLSELADWILSMTGIASAVAVAVEVPHGPVVDVLLDRGFIVHAINPKQLDRLRDRFSIAGAKDDRRDAYVSADGLRTDRHLFRRLQIADPRLIELRAWSRLAEELQEERVRLSNRLHQQLWRYYPQMLKLSDDLTATWFLELWLRAPSPAKAARLRVSAVERLLKQHRIRRVNAEGILRTLREPAIKVPDGVAAAAGVHIRSLIVRLQVVNRELNDAEHKLDELCTAIGETATASEERAEHRDVAILRSLPGIGRINLATLLSEASGPLSRRDYQALRTLSGVAPVTKRSGKSHVVVMRYASHVRLRNTVYHWARVATQHDHESRTRYAALRRRGHSHGRAIRGVADRLLAVACVLLQRQTLFDPHFRQTTAS

SEQ ID NO: 186741 - protein, 413 aa, unidentified
MAGIHFDQVVSRGCGMDIHKKVVVATVQGEGICKETKSFDTFTSSLTQLREWLVSLGITHVAMESTGVYWKPIYNVFEDYIRNIWIVNARHIKNVPGHKTDKNDSEWICQLLMAGLLKPSFIPPRKQRELRDLTRYRRKLIETVSANKNRIIRTLEDGNVKLSSVLSDTSGSTATKLIEMLCDGRTLTLADIETVRHKRCHHSAEEMLEACTGYMNSHKIYMLQKIRSCNRRLTEEIAEMDRHIKEILSPYEDVIARLSEIPGVQNRTCEELIAEIGLDMGNFPTAAHLCSWAGMCPGNNESAGKKKSGRTSHGDKHVRATLVEAAWAASRTKGTFFMERFNRLAPRKGNKKALIAVGHSLLKCIHYVLSTGGRYKELGDSYVPEKKEKQRKEYLKGELRKLGYDVALTKKKD

SEQ ID NO: 186742 - protein, 338 aa, unidentified
MAILYVGIDLAKNVFAVHGVDESGKPALLRPSVSRARLRELIAGLPPCTVAMEACTGAHHWARLFAVHGHTVRLIAPKFVTPYRMSGARGKTDAADAAAICEAVQRPNMRFVPGKSEQQQSQLMVHRARQGYVQARTACINRIRGLLAEFGHVLPLKADTVRRQAAGLLEELPGWGNTVIGDLLSELHRLDERITQYDRHIAQIAREDERARHLMQLPGIGTTTATAIVAMIGNGHEFKCGRQFAAWLGLTPGQYSSGGKTRLGRITKAGDGYLRSLLILGGRSVLARALGRSDAISSWALALQQRRGYWRAVVAIAAKNARMAWAALSRGENFKMPA

SEQ ID NO: 186743 - protein, 392 aa, unidentified
MPTCIGGPVFTERTGVGLDVHARSAAAAAIDTVTGEVIERRLGGDYGSVVDLARRLEAGHGPLRITYEAGPTGFGLARDLAAAGLTVQVAAPSRLLRPAGQRVKTDRTDAMLLARLTINDDIVAVRVPTMSQESARDLVRARDDARADLMRARHRLSKMMLRRGWVYPGRTTWGPAHDAWLRRIRANDVPALGSGAAAAFDDAYDAVAHALARRDRLDEAITALAADCEFTATTTRLSCLRPISTLTGFALAVEIGDWNRFTGATIASYLGLVPCEHSSGQTRSQGGHHQDRQHPRPPPADRVRLAAQARLPARPGPARGLGQGPRRRRRAGRQGQPAPAQALDDPGRPPQAPRRGQHRHRPRAGRLVLVTGDHGRAAPMSRARHAPQRDAA

SEQ ID NO: 186744 - protein, 384 aa, unidentified
MAQASASLSHPIAVDYDKTLVLAIELSNASWVLAAQVPGLPRVKAKQSIEPTAEALLAAIDRYRDRARAAGKTVQRVVATYEASWLARWLARRGVETHVVQPSSVPVDRRARRAKSDGIDAELLLRTLLAWLRGEPRVCSMVPIPDEADEDERRRVREREDLVAERVSLVNRIGAVLATLGVRDYNPLRRDRRERLDAMRTALGDPVPPHARARILRMLDRLELVCAQIAELERERDAVLDEEAPGKAEEMIQQLAGLRGIGVQSATVLVREAFVREFANGKALGSYAGLTATPFSSGGTEREQGIDKAGNRRLRTVMIELAWLWQRYQPGSAQVIWFRERVGGTGKRMRKVMVVAMARRLLIALWRFATQGVVPEGAVMKSVS

SEQ ID NO: 186745 - protein, 342 aa, unidentified
MGEVTTIGLDIAKSVFQVHGVDAAGGTVLKRQLTRARVVPVFEKLGRCLIGIEACATSHYWARELRKLGHDVRLMPPSYVKPYVKRQKNDSADAEAICEAVTRPTMRYVEVKTPEQQSVMVLHRTRVMLMRQRIQLSNAIRAHMAEFGLIAAVGRDGLQRLITIVEDEHDNRVPAEARICLQMMAVQLRLANEQVLENDRRIRTSARATDTGRRLMAIPGVGPLLASAFVATIPDPTTFKSGRNLAAWIGLVPRQNSSGGKERLAGITKQGNRYLRQLLVVGAMAVIRYAERHGTRRPWLVQLMARRTTKIAAVALANKTARMVWAIMTSGEPYREPALRVA

SEQ ID NO: 186746 - protein, 335 aa, unidentified
MKHYAGLDLSMETTQVCIVDENGRKLMSEKVESSPKALALMLERHGPIERAVIETGRMSPAICLGLRELGVPVVCIDARQAHQSLKAMKANKTDPHDAAGLAQLARTGFYKEVHVKSPAAHGVRSVITARSHLVEARVRLDNMIRGLCATFGYRPGVGQGKAFLERIMQAAHIPGLGDAITSLLSVRAALVEQIKEMDRRLRVIASQSQACEILMSIPGVGVQTSAAFAAAIDEAGRFRQSRNAGAYFGLVPRRHQSGELDWTGRITKQGDGTVRKLLYEAANSILTRSRETFALKTWAMKIAKRRGLKKARVALARRLAVIMHAMLRDGTLFQA

SEQ ID NO: 186747 - protein, 320 aa, unidentified
MMAQSDLIVVGIDVAKDKVDAYIRPLSAGRTFQNSSVGQRQLTAWLRRHKVSKAVMEASGGYERNWAKVLCQVGMEVRIVDPKRVRSFARSAGRLAKNDTIDAAMIAWFAETFDQAPSQAHDAAREELVQMVNARQGLLDLQTALQNRDEHSEVGVVQRMHARLLKKIAGEVIRLEAAIAALIRTTRCFAELAEIIESVPGLGEITSAGLIAAMPELGQVNNKVAAALLGVAPYDDDSGKRRGERQIKGGRRRVRNLFYMACLGAATRHNPVLKAFYRRLIAKGKEPKVALVACMRKLIVILNTMIARGQKWDSSLYLAS

SEQ ID NO: 186748 - protein, 339 aa, unidentified
MPTYNLGLDVHKVRTQYCLMDPAGKILDEGNVPTEEVAGLVPAADCAVVLEATGSWHAAYDALCATGAQVKLAHPSHVKAIASARVKTDRIDARILAHLLRTDLVPEAWAPPARTRELRDLVRLRWRFVAQRTTAKNRISNLLARRCLRYEGTDLFGRGGRAWLAAAELDPHARTLTELLLTAIDEADAHVCALTDRLHELLDGDPELALLETIPGVGFLTAATLLAELGDARRFRSAGQVSAYFGLVPRVRASADVAHYGRITRSGSPHARRALVEAAHVAVRLPGPVRDRYASLARRRGKKVALVAAARALLELSWTLLMRGEVFRADGMGEPAEMR

SEQ ID NO: 186749 - protein, 413 aa, unidentified
MDVLHPRCCGLDVHKNSISACILVQEAGRVQKHQRRFGAMTQDLQELAKWLRQFEVTQVAMESSGVYWKPVWNILEGQFTVVLVNAQHIKNVPGRKTDQKDAEWIAQLLQHGLLRPSYVPCEVIRDLRDLTRMRASLSQEASRISSRVQKVLEDANVKLASVATNTLGKSGRAMLEEIIAGQNDPEYLASLALGHLRAKAPQLRLALEGKIRPHHRFLLRRLLDQLRFVEHEIVLLDERLEDIGRERPELSQAVARWDTIPGIDRVAGWALLAEVGNTMAQFPTAEQLASWAALCPGNHESAGKRLGGTTRKGSPWLRRMACQCAWAAARTKNTYLSAQFRRVAARRGSKRAIIAVAHSLIIIGYYLQKSQRNYEDLGGDYFDRIDSAGLKRYFVRRLEKLGHKVTLVPIKVA

SEQ ID NO: 186750 - protein, 342 aa, unidentified
MIQSFTPASEPCSREANIFCGIDVGAQTLVVAVQPDQHREFPNSSSGHRQLIGWLGKFGFTRVTLEATGIYWLDLGLALDAAAEIECAVLNPKCAHNFAKTLGQRSKTDKLDAKSLAEYSRRMSFIVWRRPSLEALQLRSLSRHIESLTIERVRDSNRLHAAEATASTPRCVLQDLRRSLKAMEKRIRDLRRSAVTLVRKDEVLSQQFQLLIAMPGIADISAIHLLGELAALPVGLSVREWVAYSGLDPAHQVSGSSVNKPSRISRSGSRHLRRALYMPALVASRHDPHLRAFYQTLLSRHKAKLQALIAVARKMLHAIYGIFKHQTPYNGALLFPNLTPTD

SEQ ID NO: 186751 - protein, 427 aa, unidentified
MAYRIAGVDVHKKRLAVVVSDVEVEGEYEFERRKVGTSPDQLRALAVWLAEREVEEVVMESTAQYWRPVWEALERHWQPLQQQRAAAAPTSGRLHLAQAQSNRGARGRKKDFPDAERLVKRLVAQELTLSFVPDVEQRLWRTVMRRKSQVTRNRVRLQNRLESLLEEAHIKLSSFVSDLLGPSALRMLQALAEGETDPQALAALGSCRLHATPEQLCDALGACTALHPVYRRLIKLTLEELRVIDEHLAQLDHEMAQLLSAHQPAVQRLAAVPGLGVDSAQQIIAEVGPTAATFPSPKHLASWVGTCPGEEESDEVNYSHRSPNGNRQMRRVLNQAANAAVKTKGSIFELVYRRLVPRLGHAQAIGAIAHRLCRLIWRILHQGLTYEERGPAVTLLRAQRRTAKMIRDLRRLGYRVERSPALSGSPA

SEQ ID NO: 186752 - protein, 428 aa, unidentified
MNQPSNNDDTQNDYAAFIAIDWADRQHVFSLQVAGQTTKETGTLEQKPEVIGPWVAKLRERFGGRPVAIAVEQSRGALIHALLTYDFIVIYPLHPTTVAKFREAFKSSGAKSDPLDTDQILQILTKHRELLKALNPDTEQTRLLARLVEDRRKAVDLRTGQIQALTAALKEYFPQALELVNGNLSSRLACDFLIKWPSFEAFQQAKPSTIKRFYYGHNIRSPEVMEKVLGLVRTAQPLTTDSAIVQSGSRLSQMYAQLIRTLNPVIVDYEERIEKVFHVHPEANLFNKLPGAGPALAPRLLSFFGTDRSRYEAAGNAQSFSGIAPVTKSSGKTRVVYFRHACPKFDRQTFHEFARLSVAKCQWARNYVDYYTAKGKKFHTIIRALAFKWIRILFRCWKNRTPYDESKYMETLKKRGSIFATLHLEQKP

SEQ ID NO: 186753 - protein, 418 aa, unidentified
MASVVNIVYNVCCGIDVHKNFLVACIATTNEQGFTTHQIRRFSTYQGELRRLADWLSANNCKDVCMESTGKYWIPVFNTLEKTCNICLTHPKYVKAIKGKKTDKRDAKWIAELFKCDLVRSSFIPPEDIRQLRDLCRYHTKLTYINTSEKNRGQNCLTMCNFKLDDVFSDVFGTSATRVLDQLLELRHSDFDIAPLLHKLCKATVEEVKAALDGELSFAQAEKLKLVRQHMKNLANLQSKLESLIFKLAKKFGPHTDLLMTVPGISSPLTAIRILAEIGIDMSVFETSKQLCSWAGLTPQNNESANKKKTTRISRAGAYLKPLLVQIALAVSKSNKYPELRDKYQTLTKRRGHKKAVIAVSRKLLTAIWHILSKNVPYNAELYHKSNMPPVKRVLTPDQAFALLRSKGYQIMEPEPAA

SEQ ID NO: 186754 - protein, 353 aa, unidentified
MNDTASVAWLGLDAHSKNCVLAQLDDQGRERHWWKFPTEPQKLIAQIHAIPATDKRLMLEESNLARWLGQLLKSHVQQLVVCDARRNHLISQDHHKHDRRDAFALARLLRLNEFKPVWQPVADQRVLFKRSAQSYENAVQRQTRLKLQLKALFQHWGLFPTGSTVFSNTGRALWLKQLPYDSLRAQAGILYELLDQALASQTQCRRLLVQTGRPFPEVQRLRTVPGIGLVGAHLFVAYVQDPTRFRKFSQLTRYCRLGIRDRTSDDKPLGYQQLDRQGVGTLKAITYRAYLQAAKRRTGTVWDFYQRSLRHTGATTHARLNTQRKILLTLWTLWRTGREFEPATFSRSQPNDV

SEQ ID NO: 186755 - protein, 323 aa, unidentified
MNTNTLQNINVGVDTGKSQLDIYIRPLDIYFTVPNNEKGIKEAVKRINKHQPQRVVIEATGRLEMPFILACDNAKLPYVIANPLRIKKFAGAIGQRAKNDRLDAALIAHYAEKVQPELTKLKSQNIRLMSDLVTRRNQLLTMQTMERNRLQILPKNLSSTITPILTALKHQIEKVEAKIAKLIDSCPEYQTKNTILQSMPGVGKVLAASLISNVPELGFITNKQASSLIGVAPITRESGRFKGKRMIQGGRAQVRTVMYMAMMSAIQCNPVFKSTYERLLAAGKPKKVAIVACMRKMVVALNSMLRDGVMWDNNSAKNLLLTP

SEQ ID NO: 186756 - protein, 417 aa, unidentified
MKLKYSICCGLDVHKTWIFACIGITDSRSRTEYKQARFSSFSKGLQELCDWLAKYNCTDVCMESTGKYWIPVFNILEKNNVWVTLSHPKYTKPQKGNKTDRKDARWICDLYMCGMVKPSFIPPADIRELRDLVRYRYKLTCMITGEKNRAQNCLTVSNLKLDEVFSDVFGKSSRSITEQILQHPGEIFDVTPFVDGRCKTPIEEIQAAVDGAVSTEQAVKLKQCLNHIDELEMHKAEIDREIFRLSDKYEEALILIRTVPGFDKNPMTAIQVLSEIGGDMSVFPTAKNLVSWAGCCPRNDQSNQKIKSTRISRAGSYFKPVLVQVANALIKSKKNPEFTTRYRRIKARRGHKKAIIAICRMLLTAIWHILTDLKPYTPEGFLESRPVNESKVLTTSQALNLLKQRGYIIKDDVVPVS

SEQ ID NO: 186757 - protein, 370 aa, unidentified
MRIIGCDLHARQQTLAMLDTETGEVVNLTLMHEGNNVREFYSKLPPPVLVGIEATGSMQWFLNLMEELGIECRVGHPAQIRAAEPRKQKHDRRDADLILKLLAQNRFPAIWLPSKELLDLRALLLHRHQWVCMRVRMQNALQAIALANGLRRGPALWSYDGQAKIAFLPLLPHAAYRRSALQAMYKNMQSEIENLTQQVAEQAGNRCGARRLMTHPGVGPVTALATEVFLGDPQRFTDSKTLASYVGIIPREYSSGEHQRLGGVTKQGSPLLRFLWGEAGAHAARRDPELKRFYRCKLVHKGLGKARVAVARKLGIRLWIMLRDEIDYQEFCRRGQIQQKTVRPVVGMPETGNGAKSHRPSDEATRLPGS

SEQ ID NO: 186758 - protein, 362 aa, unidentified
MAESTTIIAFDQHAQSVVAAVLEPGASEPAIQALAADLPSIGRFVSRIAKHATVRCCYEAGPCGFSLQRFLTTAGIACDVIAPSLIPRRSGDRIKTDRRDAKQLAVLYRADALTAIHIPTEQEEAIRDLLRCREDIRVDLLRARHRLSKFLLRHNRRYTQTKTAWTRRHTVWLHTLTWPLPALAHTFRSYVQAVNDAEGRLTLIEDDLRTYFTAGPFAESVRRLRCFRGIRELTALTIAAELGDARRFPSAPRVMGFAGLVPSEHSSGSRRGRGAITKTGNAHLRRVLLEAAWHYRHHPHLGLSLRSRQEGAPPDVVARAWQAQHRLFRTYRRLTGRGRPPQIATTAVARELAGFVWATLAS

SEQ ID NO: 186759 - protein, 398 aa, unidentified
MAIVAHTHPFVIGVDAHARNHAVAILACPTGEVVDDAQFPATVAGLQRAVSWVARRTGGDLDVLWVIEGVGTYGARLARVAAEAGYPVAEAGRMNARANRGVGKSDPLDARRIAQAVMAVDVAMLRRPRADDGVRAAVRVLVASRDHISAERTAAVNALTALVRVADLGIDARRPLTAGQITAMAAWRARDEDLATAVARKEAVRLAKRVIAADRELAANTKQMTDLLNRSPARVLLDQPGIGPVTAAVALAAWSHPGRVRSEAGFASLAGVNPIPASSGNTVRHRINRGGDRRLNRALHMAAVTRIRMDPRTRSYVERRTTEGRTPREIRRCLKRYLARQIYRQLNAAQPRIQLDKHRRFNGIIELHRRIARGFKNRANYRLRMILAAGKLIHPNLR

SEQ ID NO: 186760 - protein, 339 aa, unidentified
MELYAGLDLHSRNTYIGIMDDTLNRVFKKRVANDLDQILHILKPFKKRLKGFVVESTYNWYWLVDGLMDAGYGTAHLANPSAIKQYEGLKYSDDQHDAFFLAKLLILGILPEGYIYPKEHRPVRDLARKRMFLVRHKTAYILSLQSFIQRCCGIKISAGDIRNLSVEALEKWLKEEYLVLTAQANLDTINFLKEKIKRLEKAIIQRVKLNKGFRKLLTIPGIGNILAMTIMLEVGDIKRFPKVGNFASYCRCVPSKRLSDGKSKGYGNRKNGNRYLSWALTEAAQLGRRHNQQFRRYYNRKVAQANTSLATKALGNKLARICYYIMRDQVPFRPELIAR

SEQ ID NO: 186761 - protein, 430 aa, unidentified
MDVVEYVLQLRISHKAVTLIGQEENSLLNLLKQGDFMFYLGIDIGKNTHVASMIGDDGKPIFRAFSFSNTTDGGQSLLAKLSDVAASDIVIGLEATGHYWLAVYSFLHDKGYKLHVINPIQTDGWRKGVEIRRRKTDVIDSVLIAELVRYGNFIEAQLPEEAILSLKNLTRFRSYLVDSIGDLKRKVICVLDQVFPEYQSVFSNVFGKTSKEILLQFSSPSDLEDVSADTLAELLAQLSRKKLGVKAAEKLTATASNSFGITFCRDSFTFQLRMLIEQIKYIESQVKDTETEIGAYMSELNSPIMTIPGIGKTTGAVILGEIGGIERFDAPQKLVAFSGIDATVLQSGEFEGTRNRMSKRGSPYLRRALYQAALVACTGRNPDPVLREFYLKKMSEGKHHSTSIGAVARKLCYIIFAVLKENRPFEVRLT

SEQ ID NO: 186762 - protein, 334 aa, unidentified
MACAKDQLGRRLATTLVATTTAGYAELLGWADALGQVEAFGIEGTGCYGAELARFLRGHGQRVVEVNRPDRAARRRHGKSDPVDAEAAARAVQAGEATGLPKAGDGVVEMLRVLRVARQTAVRARTQTINALKALVVTAPDSLRQQLRDLPTRQLVATAAAFQPDTPATPTMATMVALGALARRYQVLDGEITMLSKQLHRLVRLAAPALLAVFGVGPETASALLVAAGDNPQRLHSDAAFAALCGASPIEVSSGKTVRHRLNRGGDRQANNALWRIVLVRLRAGHPPTVAYLQRRTAQGKSKREAIRCLKRYVAREIFAVLTTMADQAVTTAA

SEQ ID NO: 186763 - protein, 358 aa, unidentified
MWYAGSDWADDHHDALVIDEKGRQVGSLRVSHTSQGLTKLNTFLEQIVGTTSKEELVCIIETTHGLLIAHLLEAGWPVYPVNPRTVDRRRSASGAKADLIDAYLLAKTGRADFADLHRLTPDSEKIALLFLQTYPTPQAAMAASVEQIQQTLRQAKHPHPTAVAASIFERLHQPHLQAEAVTTRAKSRLMLVGSRQLLPLIEQIAQYDKEIHTLFLTHEDHAIFESLPRAGQRLAPRLLAEIGDDRSRSQDESLLQALGGTSPVLFQSGTYSKAHRRLGCIKPLRNALHQFAWQTTQSEAWARDYYQRKRAEGKSHTVAVRALANVWVRIIFAMWVHHQCYETAIFEQAQRQHARRAA

SEQ ID NO: 186764 - protein, 337 aa, unidentified
MEYFAGLDVSMTQTHVCVMSRDGAVVHEVKVPSTPDDITAALEQAPACRRIVFETGRMAPMLYHGLSQLGLPVVCIESRQAYQALKSLATHKTDRNDARGLAHLARTGFFKPVHVKSLPAHALRSLIIARKKLVGQRVTLENQIRGLAVVFGVRLPRALTAAFMSQALRASEGITGLSAAMRGLTAARTAVLAAVAAIDADIRRMVRASGACRRLMTIPGVGQLTALAFTAAVDDPGRFRRSRDIGAYLGLVPRRYQSGEVDYTGSISKCGDRRVRTLLYEAANVMLTRFKGSLKLKDWALAIAKRSTMRKARIALARRLAVIMHAMLRHGTEFRPA

SEQ ID NO: 186765 - protein, 396 aa, unidentified
MLYYVGVDIGKKNHSACVINESGKSVLAPFKFAVNASGYGRFLAAIRKVCTHKKSITIAFEATGPYWLSLLERLKSSRFSNVVVFNPIQVAAFRNKSIRGTKTDAVDCSLIADILRFGDYVNYQVPGKDMLNLKRLSRFRWDMSHRVNRLKVKVLSILDQVFPEYEDLFSNVFGTTSKALLASASTPKEIVNLDLDKLKALLKKASWNHLADERAVLVKKTAACSVGTKLSLDSLSLQLKFMIENIQFLQDQLKAVEDKMAALFNKQKTQLTSIPGIAEVTGATILSEIGNIRNFTEDGAKKLVAFAGLDAKVKESGAFKGKRKMSKRGSRYLRRAIMQSSLVAATRDPFFKSIYEKHISKGKPRVVALSHVANKMTHVIYSVLKNNEPFFRPEVA

SEQ ID NO: 186766 - protein, 374 aa, unidentified
MSKVRFLGLDVHADTIAAAIAEPDGEVRQLGIIPNRLESVRKLVKKVQPLSNLRACYEAGPTGYVLYWQLTALGVKCEVIAPSLVPTKAGDRVKTDRRDAAKLARSYRSGDLTAVWVPDAAHEALRDLVRAREDAKQDQTRARHRLGKFLLRHGKRPEGTMKLWTAKYMDWLKRQVQFDQPALEATFLDYVHEVKQQAERIVELEKAIDRAIAAAPPQIRAVVEALQALRGVAKITAVSIVAEGGSFSRFENPRLLMGYSGMVASEYSSGSKIQRGGITKTGNAHLRRVIGEAAWAYQRRPWVGGFLRKRQQGLDQDVKDIAWKAQQRLHSRYTKLSARGKNKLQVVTAVGRELLGFVWAIAVRTEAQFQQKAA

SEQ ID NO: 186767 - protein, 518 aa, unidentified
MARTSRKRRRSTPRPDVLHRPRGVFSPRVQKVGPEHFGIVCVDCAKARSKWMLADYYGKVLVPPAVVAHTQAELDAAVRQVRQAQAQHDLRDVLVSIERTGRYHHPVRRAFLSAGYDTRIVHHFTVKQFRLPADPGTKTDDTDLAANHRAAVNGFALSEPASDRLSQQLQLLTRHRRDQVQKASTLCCQIKEHLQTAMPGYGAMFSSLWDCPVPLRLAMHFGSSQAILQAGLAGLAQLLRQQNLPFQRRTLQRALDWASGAAPADSMAAEHVQIAMALEQDRTGKQQEILQRERQIAQCLTATPYVLLLVLPGINVVCAGDFAGEAGPIANYASPRCITGRSGLYPSRYQSDQVDHADGPLVKCANRRLRFAILQAADCLVTNNHHFGDLATAWRKQGANARLIRVRVGCRFARIAFQIVAGRRGFHHPAMREHHYVLDKLLRFHVEHATPWDQIQADLQAARRWLAPRDYQGQAVPLRRQLDELTPRRRGAQQLGQILSVVLAELGARTVQSEPSGT

SEQ ID NO: 186768 - protein, 343 aa, unidentified
MKISTIGFDLAKGVFQVHGVDAVGQVAIRRQLRRAEVLKFFRRLPECLVGMEACASAHYWAREISALGHEVRLIPPRRVKAYVKWGKKNDATDAEAICEAVTRPSMQFVPVKSVEQQSALMLHRVRKLLVEQRTKLENALRAHLAELGHVAAKGDAGRSALLALVGKEEMLPDLARTALIGLVEQIRSFNDQITGLDRSIRLWHQNDAASQLLATIPQFGPVTASAVSATIGDASRFKNGRQFAAWIGLVPIQNSSGGKERLGGITKSGDRYLRQLLLIAATGMIRRVRKDRTLAPWFADLLDRKPAKLAAIALANKLARIAWAMLVTGEIFRAPARQETVAA

SEQ ID NO: 186769 - protein, 355 aa, unidentified
MDSKKYIGMDVHQASISIAVCDAAGKLQMESVIETKASTILEFMQGLRGSLWVTFEEGTSASWLYDLLKPHVAQVIVCNPRKNALLKAGNKNDRVDARKLSDLLRAGLLTPVYHGESGVRTLRELTRSYLTITTDLTRVMNRIKAVYRSWAIPCGGQEVYSPRHRTTWLNKIQEVGVRWRAEQLYQQLDALVRIRRETRRELLAESRKHPAHHLLLQIPRLGAIRVSLLIALIQTPHRFRTKRQLWAYSGLALQTRSSGEYRYKGGQLKHSGKPPALRGLNVNHNHDLKSVFKSTATRAGKSKDPFVIFYQNLLARGIEPQMARLTLARKIAAIVLNIWKKGEHFDPAQLNQHAA

SEQ ID NO: 186770 - protein, 340 aa, unidentified
MTITTIGIDLAKNVFAVHGVDQNGKTVLVKSRVTRAALPGLIASLPPCVIGMEACSGAYYWARLFLQYGHEPRLMAAKFVSPYRMAGKSGKNDAADAQAICEAVRRPHMRFVPVKDKSQQAMQCLHRNRQGFIEEKTATYNRLRGLISEFGVIAPQSTDALRHMVSAQKSSLPLQVQQCVDDLLEHVDRIEANITEYDRILSRIAKTDHRSQRLMKLKGVGPTTACALVACIGNAHDFKNGRQLAAWLGLTPSQYSSGGKSKLGRITKAGDSYLRTLLVQGARSVLIGAEKRTDLFSRWVCSLVERRGYWRAVVAIAAKNARLCWASLHYGDDFRLYSAS

SEQ ID NO: 186771 - protein, 360 aa, unidentified
MAKAKTLVGLDVHATKVVAAVLDAETGQLQVFAMSGETAKVAAFCAGLPRPVRVAYEAGPTGYGLARELAKRGIECVVAAPSKIPRASGDRVKTDRRDAEHLVRLLLAGKLHAVRVPGDEEEALRDLVRARDAVRMDLMRCRHRLSKLLLRHGIRFDDGAAWTARHRQWLATVTLEWPAAQTTLLDAQGAIDALAHRRDSLEREIIAMLPTSPWALQVGRLRCLRGVDTLTAVGLCAEIGDFERFARAEQLMSYVGLVPSENTTGQQRRLGAITKTGSGHARRLLVEAAWHYRARPSIGRGLTDRQENQPGEAIAIAWSAQRRLHRTWTRLEARAKRRTIIAVAAARELAGFAWAITRIE

SEQ ID NO: 186772 - protein, 350 aa, unidentified
MMIIGCDLHTRYQQIAMLDTDTGELVERRLEHESGEARAFYATLSGAVRVGIEATGHTHWFEAMLAELGHELWMGDAAKIRASVVRKQKTDARDAAHLLELLRQDRFPKIWRPSPGERDLRQLVWHRQKLVWMRGAVKNQLHALAMGEGVCRKKKLFTAKGRKELEGLVLGPWASYRRQELLRMFDELAARTAQLDAAVEQAAKSQPLAVQLMTHPGVGPVTSLAFVLIIGPVARFECSKQVVSYLGLNPQEHSSGGKQRLGAISKQGNPMMRSLLVEAGHTAARFDPALKRMYQRLKFRRGASVAKVAVARKLAVRMYWMLRSTADYAQLVRMQGSPWATLVENSPSLG

SEQ ID NO: 186773 - protein, 346 aa, unidentified
MKKIFIGIDFSKEKFDATLIKAEGLKECAPSMHEVFDNKTSGFRRLVRWVKTQSEGLPIDTWLFCGENTGAYSIGLSNYLYASGYDMCLECAYKIKHSAGILRVKNDKADSKAIAEYAMRNYDKVRLHKPQSSSLTCLREVFLYRHSLVRQKVALTVRRDEKRLTQEKSDARAFMSFTSKHLITEINKAIYKCDQKIKETIAADDELREIFDIITSMPGIGVQNATCLMVYTDNFQKFDMDSRKIACYYGIAPFGRQSGTSVNSRPKVSPFANRMIKALLSQAALAAIKSDINIHNYYQRLIERGKHPLLIHNNIKNKMLHALVAMVRDRIKYNPDYVYQTNKSAA

SEQ ID NO: 186774 - protein, 354 aa, unidentified
MENYTIGCDAHKRYSQFTVMDGRARVRERKRIEHTVGAIQEYLSKYPAGTPVAVECVGNWYWIVDEIEAAGCVAQLTQAGKAKVMMGHVNKTDKLDADGLALLLHMGTLPTVWIPSRELRDQRELPRTRMALTKQRTAVKNRIHATLSKHAIHLEEDSDVFSGKGLLALRQALSGLPVETRHCVEEELTLLGEIQSHIEVLEARIRERMQCTPTLRLLKTLPGVGDILAMVIEREIGSVERFPTAEHLASYAGTTPKVNSSGGKTYYGPMRKDSNQYLKWAFVEAANVIVRCRHFPSWQNKHGVRLYERTARRKGHAIAVGAVARHLAEAAYWVLSKGETYHEPHSKKDLPKQG

SEQ ID NO: 186775 - protein, 409 aa, unidentified
MVHARCAGLDISKRDAKVCVRIAGAGRRKTVETVTTWGSMTSQILALRDHLIAERITCAVMEATSDYWKPFYYLLEDAGFDVLLVNARHVKNLPGRKTDVADATWLAQLGAHGLVRGSLVPPEPIRQLRDLTRARTAITRERSREVQRLEKLLEDAGIKLSAVASDILGVSGRAMLESLIGGNRDPAALADLAKRRLRSKIPALTEALTGRFTEHHAFLARVHLDLVDQHTAAINHITTRIEATIKPFHWFRDLICTIPGISILTADVIIAETGADMTRFPTAAHLASWAGTTPGHNESAGKVKSSQTRPGNPYLQGALGAAAMSCAQNPGTYLGARYRRIASRRGPQKANVAIQHSMLIAIWHMGTNGCIYDDPGADYFNRLHPERAKKRAISQLEAMGYNVTLTHAS

SEQ ID NO: 186776 - protein, 390 aa, unidentified
MHVVAHQPEAPGAIRSDLGAIFVSLELSRSTWLITSLSPCAGEKMSKHGVAAGDIGALLARFSEFKQKAFARTGRSFPIIVIQEAGLDGFWIHRVLQSEGIESHVVDPASIATSRRRRRAKTDRIDGEALLRALLAYKRGEPRVCAMVKAPTPEEEDRRRLSRERKTLIGERVEHVNRIKGLLFCQGVSDYEPLRRNRRQRLDELKTGDGRALPDHLKAQISRELDRLELLLEQIKAVEAGQNTLFAAAKAEAPTPAPVTMLLDIKGIGPEFAAILWMEAFFRSFANRKQIAAYVGLAPTPWQSGAVNREQGVSKSGNPRLRTTLIQLAWLWLRHQPQSALALWFKERVTRNGGRFKKTAIVALARKLLVALWKYVTAGIVIEGAVMKAA

SEQ ID NO: 186777 - protein, 355 aa, unidentified
MEAYDGRQVVGMDLHRRRSVLVRMTEDGRRLGTSRITNSPQELRREIARAGQSPKVVLEATYGWYWAADTLAAAGAEVHLAHPLGVKAFTYRRVKNDERDSADLADLLRMGRLPEAWIAPHQVRELRELTRYRIKLVRLRTSCKDQVHGVLAKLGVTVTCTDIFGTAGSAWLDGLGLPQPYAGKVTSLRHLAGELTTEITMLTEVIADLLAGDRGYQVIQQLPGIGPVLAAVITAEIGDVTRFKNAAQLCSWAGLTPRHRESDTKVARGHVTKQGSRLLRWALIEAIQRIPKDCVIGAAKHAIIARRGKEAKNIAKVAAARQLLTLVFYGIRDGQIRCLSRPPADPVTTQTAPAA

SEQ ID NO: 186778 - protein, 343 aa, unidentified
MTKISTIGLDLAKNVFQLHGVDASGAVVLKKQLRRGAIEKFFAQLPPCLVGMEACGSAHHWARVINRYGHEVRLMPPAYVKPYVKRNKNDGRDSEGICEAVGRPTMRFVPVKSVEQQATLAVHGTRALLVRQRTMVANSLRASLSELGIVAAQGYEGLRELTTKLEEPSEEIPEIMRGALLLLARHWQALDADERALEKQIAKAARADRDARRLMEVPCVGPIIASTVLAKVPDAKAFRSGRDFAAWIGLTGKDHGTGGKHRPGRISKQGDRMLRALLINGASAYLRHQKRRGVSNPWLRELLARRPYKVVMVALAAKTARILWAMLAKGEPYRDRAIASAAA

SEQ ID NO: 186779 - protein, 409 aa, unidentified
MIGLASTEPIKLCPPDLLILYKPPKRSRVKWRRGRPTLIRSKKTARERGSPRTPTTSTEPERLPEPKARIIRKKGRVEESPKRKRVTVSDERHVGVDVSKLWLDFAVLETQEAFRCENSEAGIASVLERLKTIKPTLVVLEASGGYEFEFAAVLSGHRLPVAVVNPRQVRDFAKALGVLAKTDAVDAAVIAKFAAAIKPQISAIPDEETERLDAVVARRRQLIQMLSAEKNRRAMLPSRKSRDPVRNSLDVSIRWLEQQLEEIDEQLSKLIQGSPIWKAREDLLKTAQGIGKVNARTLIADLPELGTLNRREVAALVGLAPFNRDSGALKGTRHIWGGRAAIRSALYMAVVASLRLRASRIRCFYDRLRAAGKPAKVAIVACMRKLLTILNAMARTGRPWNALPQPQND

SEQ ID NO: 186780 - protein, 372 aa, unidentified
MKNVRWVGLDVHAETLAVAVAEPAGEVRSLGVMPNRPESIRKLVKKLGPPAQLRVCYEAGPTGYVVYEQLTALGVACEVVAPTLVPVRPGDRVKTDRRDAMKLARHYRAGELTAVWVPDAAHEALRDLVRARAAAKQDELRARHRLGKFLLRHGRRPPSGVRAWTQRHRHWVQTVRFAQPAQDATLRDYLHEVEQGAARVTRLEAAIRATVETAPPRLRAVIAGLQALRGVALVTAVTVVAEVGTLSRFPTPRQLMGYSGTVAREASSGSRVRRGGITKTGNAHLRRVVGEAAWAYRFRPAVGPALRRRQVGLAPEVTALAWKAQHRLHARYRRLLGRGKAKQTVVTAVGRELLGFIWAIGVTIEGQYPQVA

SEQ ID NO: 186781 - protein, 348 aa, unidentified
MEHVGIDVHKNQSQICIITSEGELIEKRVSTERTRFGTALRSHPGARILIESSTESEWVARCLEALGHEVIVADPNYAPMYGQRTRRVKTDRRDARALAEACRSGTYRPAHRTSDERRHLRGQLSVREALVRSRARYISLIRALLRRDGLRVRSGSAELFLERLAEVDLLDHLRREIKPLLAVMVPLGKQIARVDRQVEELAREDAEVRTLCTAPGVGPVTAISFVATLDTAQRFRGAHQVSAYVGLVPREKSSGEKQSKGRITKSGNTRTRWLLVEAAWSLLVRAKSVKAKPLQAWAERIAARRGRRVAVVALARRLAGILYAMMRDGTEFDGNRLAPATDRLSATT

SEQ ID NO: 186782 - protein, 452 aa, unidentified
MKKKKKILMDIINPNCAGIDVGSRSHFVAIGQAPDQIKEFGVYADDLTSLCLHLKEYGITSVALESTGNYWQNLYVELIKHGFDVILANGKFTKNIKGRKTDIKDAQWIQKLHSIGLLTGSFLPDETTQILRTYCRQRQNLIDLAAETSNKMQKYLRLLNFRLDVVVNDICGLTGLKIIEDICNGNLEPKELAKHRHYNCRKSEEEIAKSLKGNNREDFLFGLKQEYDCYLFYQKKIEQCDIQINRFLENHINSNPDKKKLKAEEKKYKRTNKNTIKGIDLNQASYQYFGGVDLMKVEGLSHAAILTLMSEIGPNGLTKFETAKQFASWLRLAPNNKISGGKLLSSRIPKGSNRLKIALRQVANRIGNLKDTFLADFFKRISYRKGRTAAISATARKLAIIIWNMVVKKMPYFPPKEYLFLDEKRKLGIVKRIKKQIAKFDISNNDLGIATN

SEQ ID NO: 186783 - protein, 410 aa, unidentified
MEALLERCAGLDVHQASVVCCILISVPGRRPQKLLRRFGTTTRELEALRAWLAEHGVTHVGMESTGVYWKPVYAVLEGHFDLIVGNAHHIKNVPGRKTDVKDAEWIAQLVRHGLVAKSFVPPPAIRDLRELVRHRRTLIETRTATRNRVLKLLEGANIKLSGVASDVFGVSGMAMLEALAAGTAKASAMASLARGRMRRKHDALEAALEGRMREHQRFLLAMQLRTLKAIDHDIAALDAQIEAQLEPFRAQHQLLMQIPGVDWVTAASILAEIGPDMSVFATAHRLAAWAGVAPGNYESAGKPKGAATRKGNVFLKSALFAAASAAVRAKGSYYCDKYNRLRARRGPVRALMAIAHKLLIAVFHMLTTGEAFRELGESYLDQVTRKRSTTRLVQRLSSLGYDVVLVPKAA

SEQ ID NO: 186784 - protein, 288 aa, unidentified
MDHFAGLDVSVKETSICIVDDAGKIVREVKVASEPEALLAVLKNPAYHFKRIGLEAGPLSQWLFSALAEAGLPVICVETRHMQAVLKAQINKTDRNDARGIAQMMRAGLYRPVHVKTIRSQKLRMLLTHRKLLQSKAIAIENDLRGTLRNFGLKVGMVGKVKFEARIRELVENLPDLAVLVEPMLIVRRVLREQIVILHRRLLAIVRDDEVCRRLMTTPGVGPVVALTYRATVDVPARFRKSKAVGAVFGLTCAKYQSGEVDRNGRISRCGDEMMRVMLYAAAQSMLR

SEQ ID NO: 186785 - protein, 346 aa, unidentified
MMIIGCDYHPSWQQICWVETLTGETEEKKLDHASGEAEKFYRELPAPAVIGMESTGNCQWFVEMATTAGHEVWIGDAAKIRASEVRQQKHDRRDAALILKLLLEGRFPRIWTPSSEEKDLRQLLIHRHKLVRIRAQVKNELQHLAMNQGVTKKGKLWSQAGERVLRELPLKPWASRRREDLLKVREMLNGQIGLLDQSVVEAAQKNEKARLLMTQPGVGPITSMAFVLTLGDVNRFPRGKQVASYLGLIPREYSSGGKQRLGSISKQGNGFMRMLLVEAAQVAVRCDPQMRSEYLHRCHKKAKGVAKVAAARKLAIRLYWMLRTNTGYPEVVRVESSSRVALVSAS

SEQ ID NO: 186786 - protein, 449 aa, unidentified
MMEPQEIEDGEHEQVLERAAAVDVAKASGMVCTRVAHQGRPGKRRTRVWQVDATTNAILELADHLAAQGIEKVTLESTSDYWRIWFCLLEAAGLDVQLVRARDVKQAPGRPKTDKLDAVWLAKLTERGMLRPSFVPPSEIRQLRDYTRLRTDLARERTRHYSRLEKLLEDALIKVSAVASKLDTKPVRGMLEALIAGQRDPEVLADLARGRMRSKHDRLVQALTGKFDDHHGELARMLLDQIDALSTQTGKLTTRIEELIAAIPAAQGIDPDGTTGPDAGRGPDAPVLPAVDRLDEITGIGREAAQAIIAEIGLHMSAFPTPGHLVSWAKISPQTVQSGATNRSGKTGKGNPYLKGVLGEAAAAAGRTDTFLGERYRRLARRRGKLKAMVAIARSILVIVWHLLTDRSTRYHDLGASYHASRIDQNRKMRSHVRQLEALGYTVTLATAA

SEQ ID NO: 186787 - protein, 339 aa, unidentified
MFMIGIDPHKGSHTAAAVDCNETVIDTLRVDADGHQRARLLAWAARFEPRTWAVEGATGMGALVAQQLVAAGEHVVDVPAKLSSRVRLLERGRIDKTDPNDARSAAIVGWRTPTLNIVCGLDEHRVVLRLLADRHHHLTASRTRTICRLHALLCLLIEGGSERLLTVDKGEQLLVNVHIDGVVTRERVAVGHQLLDEIRVLDATRKELRRRTSETVTASATTITEIYGIGSLTAAIIIGRVGDITRFPTSGHFARHNGTAPIEASSGPKKRHRLNPRGDRQLNHAIHMAAVTQVGHDTLGRTYYLRKQAEGKTRKEAMRALKRHISDAIYQRLVTDTRR

SEQ ID NO: 186788 - protein, 422 aa, unidentified
MQVLYERCAAVDVGKDVIAVAVRLPGDGPDGRQTVKRTFKTFYGVLREAARWLTSLGVTHVAMEATGIYSMPVYHALIEHGEFTQVLVCNAGHVKNVPGRKTDLADAEWLVHLLECGLLRGSFIPPAEIKAARDVVRYRAKVVQSRTSEVQRLGNVLQDAGIKIDSVASSITTKSGRAMIEALIDGERRPAVLADLAKGTMRSKIPDLSMALEGRFGDHHALMCRLHLDHIGHLDAMIAALDAQIEAMMAPFRAQRELLRTIPGIGPLAAAAVISEIGADVGEFFPDAAHLASWAGLCPGNHESAGKRRSGKPRHGNQHLQPVLVECAWAATRHGGYLKSLYHRHVMKWGGYRSRTAKKKAIIVVAHTLLVIIWHVLATGTPYDELGENYFTTRLDPERETRRLVAKLEALGHAVTLGSAAA

SEQ ID NO: 186789 - protein, 461 aa, unidentified
MRNNRKSGDRPGSTRPIAGLPIVRAKVAGIDIGSERHWVCAPGLEGSGREVAEFGATTPELVRMAEWLKERKVESVAMESTGVYWIAPHEVLEKDCEVLLVDTRQLARVPGRNKKTDPSDCEWIQRLHSCGLLNGSFRPQEQVCMLRTLVRDKANLVAESADWVRRMQKSLDQMNVRVHRAVSDLNGVTGMAIVRAIAAGERDAQKLAQLRDRRCRQSKEEIAEQLSGHWREDHLFSLRQSLQMYDAIAERITAYEQEILRKLATMEIGEYPGGVVPPVKNLEKGKAIKKRGQEPKRQALYRMSGVDVTQIDAIGVETVEVVLSEYGPDLSRFPTEKQFVSHATLAPRVPKSGGKPLKHKKRNSASTRVAAALRMAALSLRHSETALGAYYRRLARRIGGDVAVFATARKLATLIYRLLRWGQPYVDEGAEAFEKRYQQQHIKGLAARAKELGYQLMPTTT

SEQ ID NO: 186790 - protein, 318 aa, unidentified
MPESLVVGIDIAKLTFDAAIGVTGSIKTYANEDRGHDALIAELAGNPVDLIVMEATGGLERDLACALQAAGFAVAVVNPRQARNFAKAMGYLAKTDRIDAKALAEFAQVLSCHPERERFVSALPTPEQQVLQALVARRRQLVAMRVAEHQRLSVSHAAARKSIETMLRAIHAQLDDVEAQLVQHIERHHADLAKQLASVRGIGPATTASLIAEVPELGRLSRREISALIGVAPLNRDSGQMRGKRAIFGGRPQVRRGLYMAALAAIRFNAAIKPFYQRLVAAGKPKKVAIVACMRKLLTILNAMVRTGKPWDESLHHA

SEQ ID NO: 186791 - protein, 431 aa, unidentified
MQEATQHDAVDVFVGVDVGKGQHHAVALDRNGKRLYNKALPNDEVKLRALIAELKTHRRLLFVVDQPSTIGALPVAVARAEGVLVAYLPGLAMRRIADLHAGEAKTDARDAAIIAEAARSMPHTLRSLRLADEQLAELTMLRGFDDDLAAQVTQTSNRIRGLLTQIHPALERVLGPRLDHPAVLDLLERYPSPSALAAANEKTLANRLTKLAPRLGKNWAAEIVQVLNEQAVIVPGTQAAAIVMPRLAQQLAALRKQRDEIAAEVERLVLAHPLWPVLTSMPGVGVRTAARRLTEAAPKAFATAAHLAAYVGLAPVTRRSGSSIRGEHPSRRGNKVLNAPCSSPPSLPYETQSHGPIPRARSSRASATTKHSSRSHGDAATSCLPCCATAPFTHPSQPLTLDERHRAPARAVPQHRRAAPRPCAGCDPAPM

SEQ ID NO: 186792 - protein, 393 aa, unidentified
MICVGIDVAKDKHDCFFLSSEGKVLADVFTIQNNAEGFDMLLQTIRRCARPEDRIKVGLEATGHYSYNILGFLLDKGLDTYVINPLHTNLYRKSLSLRKTKTDRVDARTIAAMLMSDVDLKPYTDTAYHNEELKSLTRYRFDKVRERAKLKQSVSRLVTILFPELEKLVPSLHLASVYALLIEFPGAKQVAGAHLTHLKATLSDASKGRYGRDMAVTLRDAARCSVGSVMPAKSLELQHTIRLIRELDAEIEDIETAIQSMMDEMQSPITTIPGIGVRMGAMILAEIGDFSRFNSPDKILAYAGMSPSTYQSGQLSLSGPYSHMEKRGSRYLRYALYNATKYVCLWDPAFAAYLAKKRGEGKHYNVALSHAAKKLVRLICALEKSQQSYRNAA

SEQ ID NO: 186793 - protein, 344 aa, unidentified
MSVYVGIDVHRKRSQVAVIDQSGEVLANRNVPNGVEPILKVIGGLPPGTPAAFEAAFGTGWLVELLKDYGFDPHLVHPLRCKAIASARLKNDKVDAAILGQLLRADLLPEAWIAPPAVRQLRALLRHRAQLVRLRTLLRNRIHAVLADYGHDRPSGCWSGPGRAWMASLQLPAVSREVVDDDLALIDALETVTGRLDWEIHQRARSDPRVKVLTQLPGVGPFTALVILAEVGDISRFGSARKLASWAGLTPTVRGSDRVAHYGHISKQGSVWLRWVLCEAAQTAKRSPQFAAGYQAIATRRGKKIATTAVARKLLTRAWHLLTDAEHAAATQPAAASAPQAGTR

SEQ ID NO: 186794 - protein, 341 aa, unidentified
MEKTVFIGIDFSKKTLDVTYFIVGAMHDYKHMQFSNSEQGCLDLITWIKEQHSITSRWLICGEYTGIYSMTAAMVFNDKDLDIWLENPNQIKLSSGMSREKNDKIDSYQIALYAARFMDRVKLYKPQSKVLLQVRELVRFKDRLTKVKTQLGVAAGELKSVRKDWKETEYICDSSKLLIDQINTQISDTEKEMLQLLNTDPELKQMYKLINSVVGVGMQTAIYLLIHTWGFKAFEDPRQLACYCGIVPFAKRSETSLKGRPHVSHMANKKLKTLLHMCALNAVKYDPYLKLYYQRKVEEGKHKMNVLNNVRNKLIHRICAVITSGLEYDKDYYMRNLDVAA

SEQ ID NO: 186795 - protein, 408 aa, unidentified
MRVEHERCAGLDVHKKTVAAWVLIGDEEHSKVVGTTTPDLLALGDWLAGLGVTHVAMESSGSYWKPVYNLLEGRFELLVVNPAHIKAIPGKKTDICDAKWIADLLRHGLLRASFIPSQQQRDLRELTRHRSSLVQKRSQAVNELQKHLESANIKLAGVATDITGVSATAMLKELLDKERVDPAEVAQLAQRRLRAKIPELEKALQGDMRAHLKLILRQLLADIELHDRQIAELDGAIVERIKDDQGHIERLDEIPGINQRVGEIVVAEIGTKLDRFPSAKHLAKWVGLCPGNNESAGKRKSGRTTKGNRALRAALVEAALGASRTKKSYFRAQYLRIAAKRGKMKALIAVAHSLIVAIYHMLKFGEHFVDLGADYFDRRNPVKVVNRLAKRIASLGYAVQITPLPAAA

SEQ ID NO: 186796 - protein, 382 aa, unidentified
MKKAITGVRRFVGLDVHAQTIAAALAEKQEAVRALGTIPNREESVRKLVKKLNEGGEWAACYEAGPTGYTLYWQLTKLGIPCVVIAPTLVPTKAGDRVKTDRRDAERLASSFRAAELTPVWVPDAAHEALRDLVRAREAAKQDQLRARHRLGKFLLRHGKRPPQQTRAWTQNYLGWIKREVRFDQRPQQMTLEDYLNEVEHSAVRIERLEKAIDEAVEQAPESMRELIQALQALRGVAKVGAVTIVAELGTLTRFEHPRQLMGYSGAVSSEHSSGGKIRRGGITKTGNAHVRRIIVEAAWSQRYKPALSLAMRKRQEGLSAEVQEIASKARHRLHSRYMRLLGKGKTKQQVVTAVAREMLGFIWAIGVSVERAQGQRAKGAA

SEQ ID NO: 186797 - protein, 347 aa, unidentified
MNTTTIGLDIAKRVFQAHGTDTRGKSTMTRRLKRAEVLRFFANLQPCLIGIEACASAHHWARKLCELGHTVKLIAPQFVKPYVKTNKNDARDAEAICEAVSRPNMRFVPMKTVEQQATLALHRARQGFVSARTAQSNQLRGLLSEFGIVMPKGVSNLKRQMPEILEDAENGLAHTSRELFARLYAHFRELDRQVAELERQIKVRHRESPASRRLEAIPGIGPLSASALAASIGDAKAFRSGRQLAAWLGLVPRQHSSGGKEQLLGISKRGDTYLRTLLIHGARSVLLTLKRPGGQTDGWLARLAARRNANIAAVALANKNARVIWALLAHERDYQAAYVAPFGRAVM

SEQ ID NO: 186798 - protein, 347 aa, unidentified
MDTIGLDLHKRESQLCVLAPDGTAREQRILTSHDRFTAVLGPLAPATVLLEASTESEWVARHLESLGLTVIVADPNFAPMYATRALRVKTDRRDARTLAEACRLGAFRRAHRLSDARRHVRAELAVREALVRTRTRYIALAKALVRRDGLRVASGESERVVARLAELELSPTLAGELAPLVALFGPLNAEIAAADNRIAQLTAADPAVTLLTTAPGVGPITASALVATIDDITRFRSAHEFEAYLGVVPGERSSGEKRRVGRITKAGNARARWLLIEAAWRIVRSRSEETAALRAWASGIATRRGKRVAVVALARRLAGILYAMWRDGARYDGGKVRAPRPRAVAVA

SEQ ID NO: 186799 - protein, 399 aa, unidentified
MSSKNNVAYLMKPDGSKHSSFSVQNNLGGAKLLSERIVSALGSMQLERVVIGLEATSIYGDSLVYALREDGRLGRFQRKIHVLNPKQVRKFKEAYSDLPKNDWVDAFVIADHLRFGRINREVYMDDYRYKALQTLTRARFDVIQNLTREKQRFANYLFLKCSGMAQDKDIQNTSATTIALMEHFETVDDLANADLEELTAFITETGRGKFADPDATAKAVRAAAKGSYRLPKTVNDTVNQAMAVSIASMRALKGQVKVLDKAIEQQFEIIPNTLTSIPGIGKVYSAGIIAEIGDIHRFDSQASVAKYAGLVWNRSQSGDFEAEHSRMIKSGNRYLRYYLLEAANSVRRCDSEFRRYYDLKFKEVNKYQHKRALALTARKLVRLVFRLLKDNRLYIPPEG

SEQ ID NO: 186800 - protein, 361 aa, unidentified
MLEQKNELNFEGRNIYVGIDVHLRQWNVSIYVEELFHKTFQQPAEPMALSHYLRQNFPGGQYHSAYEAGFCGFWAHHKLKELGIDNIVIHPADVPTTQKEKVQKTDAVDSRKIGRSLQKGELKAIRVPTKETYEDKSLLRARKSLVKALSKSKNQVKSMLYLFGIRMPERYMRTSAWTRNFSRWLKEEAIKGFSQESGRESLLLTVEKVERLRALLLRANRDLRELEKSDLYRHRMELLRGIPGIGLITGLTFLLEIEDIGSFDDTDQLAGFAGLVPKCHGSGDEEGKGEMTFRGQNNLRIELIESSRISVGRDPALGMAYLNYCKRMDANKAIIRIARKLLNRIYYVLSKDRKYETCVVK

SEQ ID NO: 186801 - protein, 366 aa, unidentified
MKKISTVQVFGNEVFKEQKLTIGVDLGDRWSFYCVLDEAGKIILEQKVATTPEAMKQTFGKIPRSLIALETGTHSPWVSRLLTELGHEVIVAHAQKVELITKSNRKDDRHDARTLARLAQIDPELLGPVRHRSAKAQIHLTVIRARAELVSARTALVNAARGLVKSFGQRLPKCGTYQVNEKLAEGLSAELRDVLGPLLREVESLNERIKEYDERMEKIAKEVYPEVALLQQVKGVGTQIALTYVLTIEDPYRFPKSRQVGCFLGLRPGRRNSGESEPQKKISKEGDRYLRTMMVHGAHYILGPFGEDSDLRRWGRKLAERGGKNAKKRAVVAVARKLAVLLHRLWVSGEVYEPLRNSQKAMRAVA

SEQ ID NO: 186802 - protein, 331 aa, unidentified
MTSQPNRANETALTVGVDVSKAMLEVAFSDGAGALTPANDAGGHAALLAHLARLREQGRTIALIVLEATGGLEMDVACALQCAGHPVVIVNPRQSRDFARSMGRLAKTDRLDARVLAQMGRTLLQREDLHKLIKPLPNEQQRQLQAFLTRRRQLQAMHIAEQQRASGPDQRMRRSLNIILKSLEREMARVEKDMQALICEHHAQLAKLLGEVKGVGQGTISTLLAEVPELGKLSGREVSALVGLAPINRDSGVMRGKRTIFGGRPQVRKVLFMAALVATRYNPVIRAFYQRLLAAGKPKKLAITACARKLLTILNAIAKSGQPFNAELHSA

SEQ ID NO: 186803 - protein, 468 aa, unidentified
MSPRAGKHFRTSEKAEDLAVTYRHAAGIDVHAKVHFVAVPAEDVPAGFVNADAKLPVGVRKFGTNTGDLEALAAWLKDCHVKTVAMESTGVFWIPLFDLLASQGFAVILVDPRQTTHAPGRPKSDVLDCQWIRRLHSYGLLTASFRPADEIVRWRGFQRQREMLIRYAAQHVQHMQKVLEEMNVKLTEVVSDIVGQTGMKIIKDIVRGERDPRQLAKHRHERCKATEAEIARALYGNWRREHLFALKQALKLYEFYQRQLRECETEIEACLRGMADKSQGQALPANPRRTRKPEKNEVRFGARALLFKIAGVDLTVLEGISETTALVILSEIGMDLSKFPHEKNFVSWLGLCPQHRGSAGKIFKRRIRRGANRAARALRMAAQGCHHAKNALGAFYRRIQARCGGAKAVVATARKLAERVYRLLRYGQEYVRQSEQAYEEAYQLRLLKSLTKKAASLGYKLVPETLTP

SEQ ID NO: 186804 - protein, 355 aa, unidentified
MSDEKYIGLDVHQATISVAVRDSQGNIIMESILETKASTILDFFAGLRGRLSVTFEEGTSAAWLYDLLKPRVAEVLVCNPRKNAALKQGNKNDKMDARKLSERLRLKDLQSVYHGENGVRMLRELARSYLTIVKDLTRVMSRVKALYRSWAIPCAGRDVYYTRHRKEWLDKIQEPGVRGRAERLYQQLDMLQHLRQQARRELLAESRKHAITAKLREIPSLGPIRCALAVALIQTPHRFRTKRQLWTYSGLGLETRDSGEYHIVQGQPRKRKKQAFVRGLNKDYNHDLKGLFKGAATRASVQPGPFQEFYQRSLAKGIKPTMVRLTLARKIAAITLTLWKKGEDFDIHKLNTQAA

SEQ ID NO: 186805 - protein, 342 aa, unidentified
MKEVSIVGLDLAKRVFQVHAARSDGSVVLRRKLSRGQVVTFFTELPKCIVAMEACATAHYWAREIGKLGHDVRLIPPAYVKPFVKRQKNDAADAEAIVEAATRPSMRFVVPKTESQQACSMLFRTRDLFVRQRTQLINALRAHLAEHGVIAPQGIASLALLAEIVEDHDTGLDLIVVETARLYLEQIGVLSSRIASLEKALRSEAKRSQSTARLMSMPGMGPITAMAVEAFAPTMVTFRRGRDFAAWLGLVPKQHSSGGKQVLGRTSKMGQRDIRRLLIIGAMTVIRWACRKAPPEHSWLARMLARKPRMLVAIALANKMARSVWAMMTKNEDYKDSALAAA

SEQ ID NO: 186806 - protein, 369 aa, unidentified
MQKTIKNIGLDVHKNSISIGIADEGRDGEVRYYGKIDNDMNQLDNVIRKLISNGAVLRFVYEAGPCGYAIYRYLTKNAMDCVVIAPSKIPQQSGNRIKNDRRDCLSLARLHRAGELTPVYVPTEEDEALRDLVRAREDATRAVRAAKQQLGAFLLRYDIVYSGRTKWTKAHFNWLADIAMPHPAQQIVFQEYIDAVTNCSNRVQRLTEQVRFQSRQGRQHKLIEALQSMRGISLIIAATIAAELSDLTRFENPEKLMAFLGLIPSEHSSGDRVSKGSITKTGNGHVRKALVTAAHAYRFPARKSKAIRKRQEELPEGVIDISWKAQCRLCTRYQYLTAKGKNVNVTKTAIAREIAGFSWAIAQELSKAA

SEQ ID NO: 186807 - protein, 447 aa, unidentified
MEILHERCAGLDVHKKNVKACFSGPGKGGHRTKETRTYLTMTQTLLEMRDWLKEQGCTHIAMEATGVYWKPIYNLLEGDFEILVVNAHHIKTVPGRKTDVKDAEWIADLLAHGLLSASFIPSAPQRELRELTRYRTSLVEERAREVNRLQKTLEDTNLKLGDVVSDVMGKASHLILAAIVEGETDAARLASLAVGRVHASQQDLERALTGKVTAHHRFMLGQHLVLIEHLDETIRHVSEELARRFTPPEPPTAEEGAHSSESGQTPESSEPASSSDAPAPLSWQEAAEILDQVTGISLRVAQGLLAEIGVNMGQFPSAKHLASWVGICPGNHESAGKRLSGKTRKGNPYARRLLIQAAYAAAHSKNTYLAAQYRRIAARRGPKRAAVAVGHSILVIVYHLLRDRGTYQDLGGNYFDEHDQQMVQKHLVRRLERLGYQVDLQPKSQAG

SEQ ID NO: 186808 - protein, 397 aa, unidentified
MIAVGIDVSKSKSTVAILDSYGTVLATPFNMAHTQPEMNALVSRLKAFDEPVTILLEYTGHYHYPVLKKLQDEGLPVCVVNPYQMKKYGDVEIHKAKTDKKDALRIATYALEKSYRLVPYSSMEQKYEDLKFLSRQYQQRISMVAGFKVQLINLLDQTMPGITKILALKSRNPEKCALLLFIKRYKSFDEIQRIGKTRFLSTYATLMKKTPDRYAPQKGLEIYELARDSITTRGEDPYIWSAQDQCVDLLATAQNAADEIITQMQNIAETIPEYKVLRAMNGVGDRLGPVILAEIGDIRRFHSGKALNSFAGNDAPPYQSGQFESRNRHISKRGSSALRKACFEVMQALKLTKPQDDPVYQFILKKEQEGKPYNVAKMAGVNKFLRIYYARAMELYR

SEQ ID NO: 186809 - protein, 360 aa, unidentified
MSIYYIGADVHSNSTELAIEKRGKILARYSVPTNIRAIANVLDSIQGKKHFAVEEGPMSGWLYRNLNKKVDKFISSDPRRNKLICSDGDSDDGIDAAKLASLLRGNYLREVYHSDDDKRSEFKHWVSLYHDRVKDAVRNINKIRSRCRMHGLRMPGSVLKNPANRLKWLSEIKNPALTKQLNMLWIGYDATAKQTRVAKQQLIELSKKYPIIHYWKELPGIGLIRATTLFAFLDTPWRFKKKNKLWKYCGVGLQRSASGTDKKGRPKPARLKLPWAVNRTLKDVVMGAALTAINQKDNVFRDYYEGMVQNGIIKKNAQRSVARKMLTVMWAMWKSNSSYDETLLCIDCEPNSSTAKALSR

SEQ ID NO: 186810 - protein, 370 aa, unidentified
MEAQTWADQKHVWCFQAADSRARESGELEHAPEAVEVWVAQLSQRFAQRPIAVAIEQSRGALVYMLSKYECLHLFPVPSTMAGNMRDALYPSGAKDDPRDADLLLDLLLQHRDKLRRLSPDTEATRRVQNLVEERRKLIDEKTEQINRLTSHLKIYFPQMLDWFDRLDREAAYALLERLPTLQEWQKVSAAKLRMFFRKHHCRDREVIERRIEGIRQAVPAILDRAVIEAKSAVVKVIAQLIRILVQGIAELDRKIDEGAAAHPGFFIFDSLPGAGPALAPRLLAAFGSQRGRYGSAQEVQAYSGIAPVIERSGKKKWVHFPVGRSEVSSPKLSRVGWAFDYAIVLGTRLLRATTSTGQGASRRGPGTGL

SEQ ID NO: 186811 - protein, 315 aa, unidentified
MAHLLWIGIDVSSAWLDVATYPTTHNQRFAYTDAGLDALLAWADAQGAAGIALEATGGIERRLARRLLDAGHHVRQLNPQRVRNFARAITPAKTDPLDARMIAHFAATVDGPPMTRNQVREEIAAMVGLRQLLSDQLTALRNNARCQTQATMRDLAARQIKALRAAIQEIEAQIDAAVAACAQMAQRRRLLQSMPAVGPVVSAGLLAQLPELGQLAPGKIAALVGVAPFDDQSGGRSGARHIRGGRTQLRNLLYMAALVASRRNPVLRAFYERLRGRGKPAKVALVAVMHKMLTQLNAMLRHGQAWNAHHICAKA

SEQ ID NO: 186812 - protein, 346 aa, unidentified
MIYVGIDLHRKRSQIAALDEQGTELLSRRVANDPEALKAILSELGNELHVALEATYGWEWLADLLEQEGHELHLSHPLRTKAIAAARVKTDAVDARTLAHLLRTDLLPEAYVAPRELRDLRDLLRHRVVLTRMRSALKNRVHALLARHGIPREHADLFGKGGRRFLDELPLREPARRRLDSLLSLIGDFDREIELAKREIDGLARHDPRVDVLCQLRGIGPYTAMLVIAEVGEIERFRTARHLCAWAGLTPTVRSSDGHARLGHISRQGSPHIRWALVEAAQKAATGGGPLRSAFERIAKRRGRKIAKVAIARRMLTLCYYGLRDGEIRCLQAPGPASARPVKAAS

SEQ ID NO: 186813 - protein, 352 aa, unidentified
MTKTYLGIDLHKRISSWVLISENREVLYKQTVKCTPDKIAKAIDKLPLSDTDSCECTLEPVCGWRWVREQLIEAGFNTHTANPLKTKLIASSRMKYDSIDAQTLAELTRADFLPESYVAPNDVMELRALIRERVYLVHTRSGLKIRLKSLVDARGYHELRDTCLQKSKQGLLKSIGDEEINRLLSLIESMDKHIAPLDSAIQKFARKSELAKLIMTIPAIGPISATTIIAEVGDFSRFKSAKQLASYAGLVPSQRSSAGIAKHGRITKQGSKYLRTTFVECAMRIRDKESDAPLYDFYQRVRKASSPMKARVALARKLATLVWYIATTNKVYNPLHSKDSMNRNDSVLFSGA

SEQ ID NO: 186814 - protein, 393 aa, unidentified
MERLMSQVFDASRSLTALEQETTIIAVIEMSQSKWLVAAVVPGIKRQPLKKLDADEESLLKLLHRWRQEAERAGYSIKRIVVAYEAGRDGFWLARWLRVRGMEAYVIHPTSIAVSREHRRAKTDRLDTELLLRALLGWLRGEKRHCSMVAIPTAEEEDAKRPNRERDNLVTEQTRIVNQVKAILIRFGIRSFRPKLRKAEEQLGHLRTAEGSALPENTRAELWRHLARLRMVREQIRAIEKERLQKLTADHGRKKGPNAMVHLIARVVGIGVETADMLVTEVLSRQFRDRKAIARYAGLTGSPDESGKRRREKGLARAGNARVRTSMIELAWRLLRFQKNSALAQWFRTRTADRRGGTRKTMIVALARKLLIALWRFATTGQLSDGIVLRPAS

SEQ ID NO: 186815 - protein, 337 aa, unidentified
MIIIGCDFHPSFQQIAILDTETGAIEDHKLVHASGEAERFYRGLASAALVGIEAVGNDQWFVQLLQKQGHEVWVGDAAQIRASYVRKQKTDRSDAKHILQLLMEGRFPRIWVPSAEMRDHRQLLVHRHKLVQIRTRVKNELQHLMLNQGMQKKQKLWSAEGRAALASLPLEPWADRRRHDLLNLLSMLDEQLQQLNDAVIQVARQYPEVGLLMSQPGVGAVTALAFVLTIGDVRRFPRGKQVASYLGLIPREYSSGGKQRMGGISKQGNRLLRFLLVEAANIAVRFDPVFRKEYLHRCHQKHFTVAKVAAARKLAIRMYWMLRTQTPYPDVLSSRVA

SEQ ID NO: 186816 - protein, 361 aa, unidentified
MSGTMTWVGLDVHARSTHAVAIDVMTGELTRVRFGAGLEGPVAWLLELPGPVRACYEAGPTGFGLYRAAAAAGIAVQVIAPGKTPRGPSDRVKTDQKDAELLARLLLAGSLHRVVVPPPEVEAAREMTRAHDACRRDLMNARHRVSKMLLRHGRVYPKPTTWTAAHRRWLAAQRFDEAVSNMVFADLLAAVDGISARKAAIALHLSQLATDDAWWPTVARLRAFRGIDTLTALSLHLELGGDWKRFERASALAAWLGLTPSLSQSGESSRQGSITKTGSMLARRLLVESAWHYGRPPRLGATLAARQAGQPDHILAISNRAQQRLHHVNRSMKARGKPHNVTVVACARQLSGFLWAAATAD

SEQ ID NO: 186817 - protein, 340 aa, unidentified
MRKYIRIGVDIAKNSFQVHALESEDGRATKRKLSRSGIVKFLAEVEPCLVGMEACGSAHYWARRFRAMGHEMRLTPPSYVKPYVKRGKNDAADAAAICEAMSRPNMHFVPVKSEDQQATLMAHKTRELLIKQRTMGVNALRAHLAEFGVVAAKGIGHVEELVEKAAAADLPAMVRATLEVLVGQLRSLEAAIDQLERAIVAAHRRDPVSRLAAGVPGVGALAASAIRASAPDPHIFKSGRDFAAWIGSTPKQNSTGGKAKLGSITKQGNRYIRRLLVLGAISLLRAAPKRKGALSDWLAALRARKPAKVAAVALANKLARIVWAVITTGEPFRGSLYAKA

SEQ ID NO: 186818 - protein, 414 aa, unidentified
MPIATCGIDWAQDHHDIAIVDTDGQLLAKRRIPESIAGFTELTAMLAEAGDNPNDPIPVAIETPRGLLVAVLRASGRPVYPINPMSVARYRERTSMSGKKSDHGDAVTLANILRTDADQHRRLPADTELAQSITVLARAHQDATWRRTRASNELRSLLREYFPGFLHTFADRPGAISSPEARAVLAIAPTPAKAARLTKPQIVATLRRAGRHRGLTSLADTIQQHLRTPQLRHPTLVEDAFGVQALAVLATLDAEYDSVDRLGEATAAAFNEHPDHQIITSFVGLADLTGARLLAEIGDDRTRFADARALKAFAGSAPVTKASGRSIRITHRHVKNNRLAAVGFVWAFVASGCQGPTRAHYLARRDHGDRHAAALRHLYNRMLGQLYYCLQTSQTYDPIKAYGPPPTPPAQAAA

SEQ ID NO: 186819 - protein, 365 aa, unidentified
MFKGNQVNFAGQTIFVGLDVHKTNWKVCVVYNGEKAASFAQDPDGKQLIKTLKDKFPGIEKINLVYEAGFSGFGAYRLFKELNVDCIVVNAADIPTSDKDRKTKTDKRDARKLAFECSKGTLQGIYVPDEKIEAIRALVRYRKSMVNDRTATINRLKHYLMCYSLPVEEKLAELTKQVVCRLREIELTVQSKEFTLGHLLDEYEHRSTVIVQITNKLEGLIRQNEELREIHDLLRSVDGVGLITALTLQTELIDMKRFKNKDLLCSYVGLVPDIYSSNDKYSRLGMTNRANKHIKPILIEASWSAIKKDPALKELYYRYKDKMPANKAIIRIAKHLLLRIRAVWVNKEVYQRGMLSPLKEPAIAA

SEQ ID NO: 186820 - protein, 356 aa, unidentified
MSRDDKYIGMDVHKEAIVIAVRNASGKRVMESIVETKASSLLQFIHGLQGELHVTWEEGTWAAWLYDLLKPHVREVLVCNPRRNALLKEGSKNDKVDAQKLSDLLRTGMLRPVYHGENGVRTLRELARTYQTVSKDLNRVMNRIKALYRGWGIACAGTQVYAPRYREEWLKQIENAGVHRRAELFYEQLDGLQALRRKVRPELLAESRKHKASKLLGQIPCIGPIRAARLIALMQTPHRFRSKRQLWTYSGLGIETHDSAQYRYVDGQLQRSKKPQQLRGLNQNHNHEMKEIFKGAASRASCGIGPLREFYVSLLDKGMRPEMARLTLARKIAAIALTLWKKEARFDAQQLKTQAA

SEQ ID NO: 186821 - protein, 315 aa, unidentified
MTTQPVYVGMDVSKATIDVCVSDGASWQASNDDRSMGDLLTRVRALQPALIVLEATGGYELRVAGALAAANLPVAVVNPRQVRSYARSVGQLAKTDRIDAQILARFAAAVRPESRPLPDADTRELEALVGRRRQLSGMITVEQNRLGQAPPNTRKAIKAHIGYMRRQLAKCDADIGGLVRHSPVWRTKDDLLQSVPGVGDATSHALIALLPELGTLNKKQIAALVGVAPFNRDSGTLRGRRTIWGGRVRVRNALYMAALVGMRHNPTLKALYARLRSAGKPGKVALVACMHKLLTIVNAMMRTGRAWDPARVVVG

SEQ ID NO: 186822 - protein, 464 aa, unidentified
MSKKKNKGLCFADRPIEQPAAAGIDIGAREIFVAVHHDPDNQPVRRFGTFTEDLQQMADWLERCGVTTVAMESTGVYWIPLFEILDRRGLQPCVVNARHMQNVPGRRTDWHECQWIQFLHAVGLLRAAFRPADQVCAVRAIMRHRQQLVEMAAQHVQHMHQALTQMNLQIQHVISDMTGTTGLAILDAIVAGQRDPAELAKLRDPRVKASRETIEKSLLGNWRDEHLFTLQQSLELYRSYLKQIVAAEEKIEKLLGEFTARVDPEQKPMPADAKQNRSGAKRRKKAGHSSNFDLRSEAYRLFGVDVTQIPGLESNVLPLFGEVGRDMTRWPTAAHFVSWLALCPDNDISGGRILWRGVRQANNRAGQIFRLAAQSLHRSQTPMGHYLGRLKAKLGPAGAITATARKIAILFYTLVRQQVEFDNSIWQASDDERQRRLQHKLRNQARRLGYQLVPIGPSTGAVNA

SEQ ID NO: 186823 - protein, 316 aa, unidentified
MNETTPIVVGIDVAKETLEIAISSGEHWQSNNDPEGHRRLIDRLLALQPQSVVLEATGGYEQPVLATLGQAGLPAVAVNPRQVRQFARAVGRLAKTDRIDAAMLVRFALHVQPEVRPLRDEQTRLLEALLSRRQQLLEMIQAERNRLDHAVGPVRTDLHETIAFLVKRLKQVDRDLDGQLRQSPLWREKEKLLRSIPGVGRQMVLRVFGQLPELGAIPRKKLAALVGVAPYNCDSGKLRGQRHCWGGRLGVRNVLYMATITAVRCNPPIRAFYERLQAAGKPKKVALVACMHKLLLVMNAMVRDGSEWNPQMLRVN

SEQ ID NO: 186824 - protein, 444 aa, unidentified
MTKPQLTPTQGILVAIDIGKTRNEVLIEIPGQARRRRLTVLNTRADYDRLIDLLSGLGQPVTCAFEATGNYHRPLAWRLLQAGFTVRLISSLALARTREALHNGWDKNDPKDAQVALHMLRIGASQHYHDPLAAGLNDIQEVSKTHEAISKAKTEVLHRILTHHLPLYFPEIGRFRHNSRSDWFFAFLDRFPTPGSITALSKEAFIAAAWGVVGRKVAKERLLGDIYETARASIGLPIPIDAPAVRLFRLVIAEARSLIEQRNALEAMAIELLHESPDYKLLCRIPGVGPITALTILAEAGDLRRFGHHRQFLKFCGLDLATHQSGAFRGQTKLSKYGNARLRRALWLAGQVAIRQKENSFRDKFERYIARDRHNADLRRKALTAITAKMARVVHAIIKSGADYRPFIEEPVPGGRTSLSMGREGATATLSRMLGSSAWICISC

SEQ ID NO: 186825 - protein, 396 aa, unidentified
MKAKKDRYGSVAGIGLDVHYQFSKVTMRSFDEKVVCRGTLEHRGRAALREALSQWPKDVPVVMEASFGWGWLSDEMLAAGLDVHLSNCYKLERLRQARGQVHTNKKDADLLSLLPLEAARWWEVWRAPRDVRDLRELTRYWITLKAMDVEAKNRLHALCHRHGIFYDFKDLFGGRGRAFLAEVARNGLFPDGQLDEGALFHWRGQVKLIEHLREQLADLTRELRKRLTRSALASRLDGIPGVGLILAHVLMAEIGDINRFAGHGRLASYSLLAPRAHDTGLADPIRTTIGRRLGKKGNHVLKWAMIVAARGAVRKGGKWRNIFDHYTAGGRNSGNRGYIKVARELVKVVDVVWRKNVAYSDTPPARSGCGRDRPRRDRASRSGTGQLSNVMAYARQ

SEQ ID NO: 186826 - protein, 483 aa, unidentified
MRKRRMSTFERLNSGRITRKQRRELARRVAAADPGLSIVNPHAAGIDVGNASHFAAVPPDRDSTPVREFGFWTADLHKMAAWLVACRIDTVAMQSTGVYWIPLYDILEQHGLRVVLVNAQHTKNVPGRKTDVQECQWLMKLHTYGLLRDSFRLAQHLEGVRTVWRVRGRHVEEAARSVQHMQKALTKMNVQLANVISDVSGLTGQAIVGAILQGQRDPYKLAELSDPHIRASKEEIARSLEGTWREDVLFELQQAVDSYHFAHRQIRQCDDKLKAYLASLESRVLEKPAVPAGTKPLQPKTRKARKQGANAPPMDLTGELVRICGADLTSIDGINIISAMTIVSEVGTDLRQFPDEDHFASWLGLTANENISGGKRVKGAKRKVKNRVADVLRMGATSLLNSASYLGARYRQLRRNAKIPAVAVKAMARHLAVLVYRLLTKGQAWVDRGAELYEQQRRERDLIVLQEKAKRHGLQLVPVAAAN

SEQ ID NO: 186827 - protein, 409 aa, unidentified
MQVMHERCAGLDVHKKTVVPCVILTLPDGRVEKHTVTFSTMTSQILAMADWLKSCGVTHVAMESTGVYWRPIYQLLEGQFTLLVANAQQIHRMPGRKTDLTDAEWLADLLRHGLIAPSFVPPQAQRQLRELTRHRSNVTGRRTQCINELHKTLEGTNIKLSSVATDITGVSAMDMLQHLLAGQTDPNFLAELARGVLRKKIPELRQALQGVVGEHQKLILNQLLGDIERFDQQIEDLNAEIAGRLAQEQSVIARLDEIPGVDRKVAEVMVAELGTDMSRFGSAQRAAAWSGMCPANRQSGGRRYAARSRFGNKHLKGTLAEAGWAAGRSKQTYLGAQFRRIAARKGSRRAALAVGHSILTISYHMMDRGTPFTELGADYFDRRNPERVKDRLVSRLEKLGYRVSLEKAA

SEQ ID NO: 186828 - protein, 487 aa, unidentified
MVPGGRLNIGEAFMALPQARIRERANPGDRFGKARRQMQKQLSGLPVVRPDVAGIDLGSERHWVCAPALSGDGREVNDFGATTAELVRMAQWLKERGVKSVAMESTGVYWIAPHEILEGQGFEVLLADTRQLSRVPGRNQKSDPTDCEWLQRLHSCGLVKGSFRPPEQVCMLRTLIRDKGNLVAERSDWIRRLQKGLDQMNVRLHRAVSDVDGATGMAILRAIAAGERDPRQLARMRDRGCRKSEEEIAEQLNGHWREDHVFSLCQSLQMYDAIEQRIADYDREILRLLNSMTPEQRRQQSAPALKNQPKMRSMRKRGQEPARQALYRMSGVDMTQIDAVGVETVQVVLSEYGPDLSRFPTEKHFISHATLAPRVPKSGNKPIRKRKRNSASTRVAAALRMAALSVRHSQTALGAYYRSISRRVGANVAVFATARKLASFIYRLLRWGQPYVDEGAEAYDRRYQERRILSLASKARELGYALTPATT

SEQ ID NO: 186829 - protein, 413 aa, unidentified
MENEFQTIYPRCAFLDVHKKTVEATTRILEGERIRQQTRRWDTMTADLEAMAEWLAAQGVTEVGMESTGVYWKPIYNILEKRFTVILVNARHLKQVPGRKTDIRDSQWGAQLLQCGLLKGSYIPPRWQRELRDLTRHQSQLVAEQTRIANRIHKELEDANIKLGSVATDILGVSGRAMIQALIEGEEDATKLANLARGKLKSKIPELERALRGRMTEHHRFMLRQLWEELAALDEVMTKLEKRVAEVTRPYESQIERMDAVPGVDRRIARVVLAEVGPEASAFPTHAHLSCWSGMSPGSDESAGKRRSSRTPKGNRWLRTALVQAAWAASHSKDTYLAAQYHRLVGRRGKKRALVAVGHSILVIVYHLLKHGVSYSELGGHYFDRLQPERQTKYHVKRLESLGYSVKIEKRAA

SEQ ID NO: 186830 - protein, 317 aa, unidentified
MAKRAEKITLGIDVAKDTCVIHVWETGETQVVPNQPDAIQASLKAFHSPVRLALEPTSHYHRDWVEQALTLGFEVYLVNPRQLAHYREAVNQRNKTDPEDAWLLARFLSHEAQQLRPYQAQDAQAQALWALLKRRAKVVEARKQLQLSFREIQLSAQVLFTQFQHLLARIDQRIQRAIQALGWGDDYQRCLSIPGIGPLNAAALVAAYHRGVFASCDAFVAFIGLDVRVRESGGYKGKRKLTKRGEPELRRLLYCATQPAACYPPFKAYYQRQIDKGLPKIAAKVILARKLARIAFTLMQNQQQFVKNLEKTLASVP

SEQ ID NO: 186831 - protein, 401 aa, unidentified
MNSVGIDVSKGKSTVVALRPMGEVVLPPKEYPHTVAGLEQMAYDIISLGENTKVTMEATGRYHEPVAAALHEYGIYVCVLNPILIHQSGGGSIRKVKSDKKDAIKIAKYGLDNWVNLREYTPVDALRQQLKLFSRQYNLYMKNVVALKNNLLALTDKVFPGVNELFSSPEKADGHRKWVDFIETFWHCDCISLVSEKAFIERYRKWCKRKGYNFSVAKAVDLYASSCGNTVTLSKNDTTKRLITTAAKQLTSFNCQLASFRNEMISIAGQLPEFDTVLNMFGVGEISAVNLIAEIGDVRRFPNRNSLVGFAGVDPCVDQSGKHFSKSNPTTKRGSAILRKTLFQVISTYMKRSPVEKPIYQFICKKRADGKPYYVCTTAAANKFLRIYYARIKECLNDNLF

SEQ ID NO: 186832 - protein, 322 aa, unidentified
MKHCGIDLHSNNSVVVISDEEDRAVCERRVPNDLAQILALLAPHREELAGVVVESTYNWYFLVDGLMDAGYRVHLAHPSAIKKYEGLKYSGDFADAAYLAHLLRLGLLAEGYIYPREERAARDLARKRMQLVRYCTAQVLSIENIVVTAQQVEALGFAPDVALAVECNRAVCQVLQEKIKVLEKRLKERVNLRPEYRLLKTAPGIGEILATTIMLETGTVARFAQVGNFSSYCRCVKRLRESNHKKKGEGNAKNGNKYLAWAFVEAANFALRFCPEAKSFYERKKRKTNRIVALKAVAHKLARACYHILREQKPFEVNRCFV

SEQ ID NO: 186833 - protein, 327 aa, unidentified
MMFIGIDISKEKIDLSWLRDQLTNKIKTKVFKNKHQDFEKIEKWLLNTTKSVASELVITLEPTGVYHEALMYFLHEQGFNIILANTGKAKKYADALNIIHKTDKSDATMLAHYGCAKHAVVDYWQPEALEVRELKALIRRLDALESNRQREANRLEASEFSNVSARVRQSIKVIIAFLDDEIKQLKSDIDDHIDNEPGLKRNRKLLESILGIGHVLSRELTYLFAAKKFNKAKEAAAYCGLIPRHNESGKLKGRTTISKLGPARIRCKLYMAAIVAGQWNKRIKRHKLTLINNGKTPMQAVCANMRKLIHICFGVIKNQEEFKLQES

SEQ ID NO: 186834 - protein, 371 aa, unidentified
MRSVINPYTKGALMSTYYIGADVHSNSTELAIEKRGQIVASYSVPTSIPAIVNVLDSIQGKKHFAVEEGPMSGWLYRNLAGKVDQFISCDPRRNKLIASDGDKDDKIDAAKLASLLRGGFLRAVYHSDDESRAELKHWVSLYHDRVRDAVRGINKIRARCRMHGVKISRSALRDPAKRMNWLLKTNHTVLANQLKMLWIGYDATVQQVKFAKRQLSTLSKKHDIIHQWSLLPGIGLIRATTVFAYLDTPYRFKKKNKLWKYCGVGLQRTTSGTDKKGKPKPSRLQLPWSVNRTLKNAVLGAALSAINQKDNVFRDYYQRMVKDGIITSNARHAVARKMLTVLWAMWKTNSRFDEKIVHNELNSQTASALSR

SEQ ID NO: 186835 - protein, 459 aa, unidentified
MGKLSKINSSLEEARPFGGMSQINSDAAGVDIGAHEIMVCVSGADHTQIVRAFGTYTPDLQAIGTWLEDHQVKTVAMESTGVYWIPLFEELERRGFHCHLISSRSLRRVPGRKTDVIDCQWIQTLHSYGLLESSFRPEADLIALRTLLRHRAQLIQHRAPHVLHMQKALLQMNIQLSQALSDVVGVTGQAILRAIIAGERDPRELAKLRNYRCKKDEEEIVKALTGTWRKEHLFVLEQSLAFYDFYTAQITTCDEEIERSYTLIRPNSGNDDFDDQSPLPTGKRTSPSKNAPQNVQVRKHLKRITGVDITAVHGISASLAQTIVIEVGTDMSKFPNEKHFCSWLGLAPKNEISGGKVLRNHIQKTRNRAGQAFRMAAGAVMRADCALGAFYRRQKARLGPAQAAVATAHLIARLVYRMLKYKVEYEPLNVSEYEKRYREQQIKYLQKKATKFGFVLSPA

SEQ ID NO: 186836 - protein, 399 aa, unidentified
MLFVGIDVSKDKLDYFLDNSIKGVVDNSIDGYEKLVSIFKDMDDIAFVLEPTGIYSKNIFVFLKSHGFDDLFFVSPSNVSSTRKILNWPKTDKLDAKVIQKTAIKFPENLTPFVLKDSFFESLREITRSRYHISHQLAAEKTYLASLIAAYFPGLAKELNLSKTLLTILSDYSAEDIYNMSINDLFSLVSSLSKRRLGIDFAKKLKSIITKVYRSTLNDFNTANFNIALAFDRIKLLQSQIDRIDKQLNLYFKRLNTTLDTIPGISVILSMSIISEIINIDNFASDSKLSSYAGLRWDLNDSGKKTDNHKNLSKKGNKYLRYYLYQAASCAIRYDPVLKSYYKKKRDQGKSHKAAVVLTARKLVRSIYYMLKNNSSYNPIELSQSSKKMVFLKDDSNNQ

SEQ ID NO: 186837 - protein, 373 aa, unidentified
MKEKLRFLGLDVHAETIAVAVAEPDGEVRSLGTIPNRAEYIRKLIKKLGPADKLRAYEAGPTGYVVYWQLAELGVECEVVAPTLVPVKAGDRVKTDRRDAEKLARCYRSGDLTAVWVPDEGSEALRDLVRAREAAKQDQTRARHRLSKFLLRSGQRPPSGVRSWTRPYLIWVAQLRFSEIAQEFTRQDYLHEVEHMRERVKRLEQSIIEAVKLASPELQQVINDLQALRGIADISAVTIAAELGQVSRFDSARQLMGYCGVVPSEDSSGKRTRRGGITKTGNAHLRRIVVEAAWSYRRPPGVWYGLRRRQESISEETKEIAWKAQHRLHKRYMKLGAAGKNQRKVVTAVARELLGFIWAIGTRAETVVSQQAA

SEQ ID NO: 186838 - protein, 319 aa, unidentified
MAQVDSVVAGIDVAKCKVDACIRKIAERPIFPSTAEGRRRLVAWLRKHKVTKAVMEASGGYEREWAKALRQAGIEVRIVDPKRVRNFALSAGRLAKNDVIDAEMIAWFAETFSDGSSRMYDAAREELQALVKARLGVVDLRQRLQCQREHAAPGLAQKANARVLKNLDKEIARFEAAICAKVKSSPELAARAKIIASVPGLGEISAANLVAGMPELGQLSGRIAAALIGAAPYDDDSGKRRGERHVKAGRRWVRNAIYMPCVGAATLNNPVLKAYYRRLIVKGKAPKVAIIACMRKLIVILNTMLARRQEWDPSRHAVS

SEQ ID NO: 186839 - protein, 349 aa, unidentified
MTRFSRIGLDTSKSVFTLHCVDAAGQPMLRVSLRRSQLLGFFKRHAPTVVAMEACGGSHHWARKLMALGHEVRLIPPQYVKPYLKRGKNDRNDAEAICEAAGRPGMRFVLAKTEDRQADTMVLKVRATLVEQRTQLINALRGHAGEFGVVSGRGTGKVTALLAEIAADTAIPPVAQEMLALLGEQIEHLDCRIKALEAKLEAMHKADAISQLLATVPGIGPIIGLSFALEVDPAAFTSGRHLAAWLGLTPQEHSTGGKQRMGGISRAGNERLRALLVSGAMAVIRASERAGSKLATEWLRKLLARRPRKVAAVALANKMARTIWAMMTTGEAYRRPAAPAAARLAAVVS

SEQ ID NO: 186840 - protein, 400 aa, unidentified
MENASVRQIGWDCHRKFSQIALRNAEGRIVERRRVEHADRGGMRKLLRSWPRGTPVTLEGTFGWAWVSDELAEAGLEPHLASSRKLAAWRKARGLAKSNRLDAELLSGLMSEPERWWEVWLAPRGVRELRELLRYRMSLVRTQTMFKNRIHALLHRHGLLHEFADLFGRDGRRFLQNLANRKDSPLRENARVTLKGQLQLLDHLRVQLARATRLFRAQVRRSPVAQRLKTLPGVSWILAYTLEAEIGHIQRFRSAKHLVSYSVLAPRADDSGEDDGAQPLGRHVGHAGRRTLKWSFIEAAHSAVIKDARLRAIFNRRTQNGKHDRNRGYITVARHLAVCAFVIWKKEQDYNPLPAPRPGTRARVPTKKKTATKERQTSTSRPGTGQPDDAMVPAAAASGG

SEQ ID NO: 186841 - protein, 346 aa, unidentified
MNITTTLGIDVAKNVFQIHGVDYRGKATIKEKISRKKLPLFLAKMNKCNIFMETCGSSNYWGREAQKYGHTVKLIPAAYVKPFVKTSKNDANDAEAIVEAGSRPSMRFAEVKTTNQQDIQCTHRIRSRIISNRTALANEVRGLLAEYGIVIPQGIHKLRAQLPGIIAESEELSGLMKDNVTDLYQEFKQLDEQVKKYDDKIKALCKNNDNCKLLESIPGIGPLTASILASILGNGGSFKNGRNFAAFLGLVPRQHSSGGKTKLYGITKHGDNYVRMLLAHGARNVIRYAGKKNDLVSCWINKIVMRRGANRATIALAAKMARMALAVIKSKKAYNAEHKLILGKAA

SEQ ID NO: 186842 - protein, 337 aa, unidentified
MKVTLIGIDLAKSIFQVCGVNQAGKRVFNRQVRRAKLMELLIQHLDATIAMEACSGSNYWGRELQSRGFQVKLIPPQHVKPFVKGNKNDRNDAFAITEAARRPNLRCVEPRTLAQTDMIQVHRVLDRMTRQRTALINQIRGLLNEYGIVVSRGKEKLLAALPDLLEDAGNGLTSSSRALYQAMVDEWRLLNEAIDRVEKVLRGQAKADEAAQRLMKMKGVAERIATATIAQVGNGHGYQNGRHFAANLGLVPKEHSSGGKQRLGGITKRGNRYLRRMLIQGAWSVIRNVDKNDDRMSRWARQLIERRGKHKAVVAVANKMARIMWSMLYHQTEFRAN

SEQ ID NO: 186843 - protein, 369 aa, unidentified
MTDLTLFIGLDVHKKTISVAIVEGSAGAAVRFYGTIANTPDSLRTLCRKLSRSGQQLHFCYEAGPCGYGVQRQLTRLGHRCDVVAPALIPRKVGDKVKTDRRDAMMLAQTLRAGQLTAVWVPDEAHEAMRDLVRLRAQAMRDLRKTRQQLLSFLLRHGLVSPYGHWTKMHRRWLGELVFAHPAQHLAHEEMLQRIERAEALCDRLKAAILELVPQWSLAPVVEAIQALRGVSLIVASVIVAEIGNFSRFDSPRQLMAYLGLNPSEHSSGATIRRGAITKTGNTLARTCLVEAAWTYRFPARVTQIIRNRLQGLPEPIRNVAWKAQVRLSARYRKFTAAGKPAPKVVVAIARELVGFIWAIARMVEPKFV

SEQ ID NO: 186844 - protein, 309 aa, unidentified
MSIQRFVGIDVSKAELAMHVLPDGLAWTQANTPEGHACLVQCLAQMGCERIVLEASGGYEQAVLQALSQAGLPVVRLPAHRPRALAQALGLKAKTDALDARLLAMAAQCIHAQPTAVLPAPLQALRELLHLRSTLVAQRDAQRRCLEHVTCEAVRDQWREVIALLQQRIREVSRQIARSGAACSSLPKLPGLGPILRATLAARLPELGTVPARKIVALVGLAPFNRDSGRWRGQRRIQGGRADVRRVLYMATWASIRTGSPLAHTYARLTAAGKPAKVAIVACMHKYLRWLNAIARDRAPYAPPTIAAA

SEQ ID NO: 186845 - protein, 417 aa, unidentified
MAEEIEWFVGIDWASQTHQVCLVDAHGECLGERAVAHGGPGIEELCDWLITRTGATPEVIGVAIEMTQGPIVEALLERGFCVYGINPKQLDRFRDRFTVAGAKDDRRDAHVLGDSLRTDRHAFRRLSNDEPVIVKLREWSRMADDLQQERNRLASRMREQLWRYYPQLLELADDLAADWFLDLWSRAPTPAMAVRLRQTTIERFVKAHRLRRWQAPEVLSTLKQKPLSVAPGVVEAASDHIRTLTVRIRLVNQQLKAAHRKLDELCAQLIPSEEDEPGQQCEQRDVVILRSMPGLGRIILAVLLAEVWQLLRRRDYHALRSLSGVAPVTRRSGKTRVVVRRYACNKRLANALYHWARLATQHDALSRRRYAALRRRGHSHGRALRTVADRLLSVACTLLEQQTLFDPTYEVRDAASG

SEQ ID NO: 186846 - protein, 388 aa, unidentified
MARESVPNTRPIALDYDSTLVLAIELSNTSWVLAAQVPGLPRVKAKQSIEPTAEALLAAIDGYRERARAAGRSVERVVATYEASWSGFWLARWLLRRGVETHVVQPSSVPVDRRARRAKSDGIDAELLLRTLLAWLRGEPRVCSMVPIPDEADEDRRRRVREREDLVTERVSLVNRISAVLATLGVGDYNPLRRDRRERLEALRTALGDPLPPHAHARILRMLDRLELVCAQIAELERERDAVLEEEAPDKAEEMIQRLAGLQGIGVQSATVLVREAFVREFANGKALGSYAGLSPTPFSTGGTEREQGINKAGNRRLRTVMIELAWLWQRYQPGSSQVIWFRERVGSTGKRMRKVMVVAMARRLLIALWRYATQGVVPEGAVLKPMP

SEQ ID NO: 186847 - protein, 349 aa, unidentified
MKYYVGLDVAMEETAICIVDDGRRIVREGKAASEPEAIAAFLSATGLTFERVGIEAGPLAPWLCDGLAAAGLPVICIDARHMKAAVSAMPVKTDRIDARNIAFAMQVGWYRPVHLKRPEARKLRLLLSSRQMLLRARIDLDNHIRGVLKAFGLKVGKVATGQFEARVWELIDEGDAQIRWIVGTLLTTRAAVVSQLALLHRAVLAVVKQDQVCRRLMTVPGVGALTALAFRTAVDEPERFASSAAVGAYFGLTPSKYASGETDYTGHITKCGDKAVRVLLCAAANALLTRVSRWSWLKRWGLEVLKRRGKMRAQVAVARRLAVIMHRMWLDGTDFRWQREPDAPAGAAA

SEQ ID NO: 186848 - protein, 406 aa, unidentified
MSMNAVGIDVSKRKSTVAILRPGGEVVASPFDVPHLSGCFQPLIQHIRALNGQTRIVMECTGRYYEPVARQLSQAGFFVCAVNPQIIHGFQGQDNPLRRVKTDKADSIKIARYTLDNWANLKQYTLMDELRTQLKTMNRQFDFYMKHKTAMKNNLSGLIDLAYPGANTYFDSPAREDGSQKWVDFLDTYWHVDCVRKMSCNAFTLHYQKWCCRKKYNFSRLKAEEIYETAKELIPVLPKDDFTKRIIKQAIQQLNAASQTVEQLRILMNETAAKLPEYPIVMAMKGVGPSLGPQLMAEIGDVARFTHKGAITAFAGVDSGVNDSGDYSQKSVHVSKHGSPALRKTLYQVMDVLIKTKPDDPVYLFMDKKRAQGKPYYVYMTADANKFLRIYYGRVKEYLASLPASE

SEQ ID NO: 186849 - protein, 360 aa, unidentified
MAILTMADLEVLVTGGVDTHKDTHVAAALDQLGRLLGTEAFPATAAGYRSLLAWLGRFGRLVAVGVEGTGAWGAGLARHLTAADVEVIEVRRQNRQHRRRHGKSDPTDAIAAARSVQSGEEHGAAKTANGSVESIRLLQVARRSALKARSQAANQIYSIVDTAPEELRSRFHRVPVSQVVAVAARFHRSPTIDTPHDAAKCALWHLARRWQNLSEEITNLDRQLDELTAATAPTLVALNGAGTQTASVLLVAAGDNPDRLNSPASFVALCGASPLDASSGRQQRHRLNRGGDRQANAALYIIVISRLRWHRSTQDYMARRIAEGKTRKEVIRCLKLYVAREVHQAIRQDLNPKRQPVITG

SEQ ID NO: 186850 - protein, 344 aa, unidentified
MDHFGGLDVSVKETSICIVDDTGRIVKEVKVASEPAALLKVLGNPTYRFKRIGLEAGPLSQWLFSALAEAELPVICVETRHMQAVLKAQINKTDRNDARGIAQMIRVGLYRPVHVKTLRSQKLRMLLTHRQLLLSKAIALEKDLRGTLRNFGLKVGMVGKVRFEARIQELVENIPDLAVLVEPLLIVRRVLREQIVILHRRLLAIVREDEVCGRLMTTPGVGPVVALTYRATVDVPARFRKSKSVGAVFGLTCSRYQSGEIDWSGKISRCGDEMMRTMLYEAAQSMMHSKKWSWLKAWAMQIARRRGMKKAIVALARRLAVIMHRIWVDGTEFCWTREQATAAA

SEQ ID NO: 186851 - protein, 386 aa, unidentified
MQVNDLSRSLVAFDQNSTLVAVVELSLKSWLVAGLVPGLTRQPLKRSPPDGEALAALLDRWRSEAVKSGRRIERVAVAFEAGRDGFWLARVLRARGIEAYVIHPTSIPVLREHRRAKTDRLDTGLLMRAFLGWLRGEAKHCSMAPIPSLAEEDAKRPNRAHEKLGAERTRILNKIKAALVRLGVRGFKPNLRNAAERLEALRTPEGLPVPPNTLAELRRDLGRLKLVREQIKEIERARERRLKQAPQEGAHPMVLMLARLKSLGVETADRLVHEAFYRSLRDRRAVARYGGMTGAPDESGAKRREKGLARAGNGRVRKAMLQLAYRWIMFQKESALTQWYQRRVAGAKGDVRKTMIIALARKLLIALWRYVTEGEVPAGAVLRPAP

SEQ ID NO: 186852 - protein, 325 aa, unidentified
MSSYEIVGIDVAARSLSAIGETVTLAAAYKNDAAGRGALVKALSRSKCRVRVVLEATGIYFLDVACALVSAGIAVMVLNPKAAHHFAEAMMQRRKDDPVDAAMLREYGRRMDFVAWTPPAPKLFALRAISREIGALVKATTAAKNREHAVNATALGTATVRRALERQIALNETLIDELLAAAMAEIKADAELKRLFDLTDSIPGFAAKSAIGVIGELVVLPPMKAKQWVAQAGLDVREEKSGSSVQRKPRISKRGNKRLRETLFFAAMTTARCCPEAAAFHDRLVTQGKTPLQATIALMRKLLHAIHAMWRNNETFHAEKLFAAA

SEQ ID NO: 186853 - protein, 291 aa, unidentified
MNIVFLGIDLAKNVFQLCGLNQAGKPVYTKRTGRKELLQTLENIPACLIGIEASTGAFYWQREFEKLGHKVKVISPQYVKPFVRGQKNDGNDAQAIAVALMQPTMQFVPPKSPEQQDIQALHRARQRIVNHRTATVCQIRGLLLDRGIPIGSAVSRARRAIPLIPEDAENGLSSRMRRTIAELYDLFNDLGRRIHFFDKEIETVFRQSEACQRIAKVKGIGPKTDTAVAAAIGKGTEFKNGRHFAAWLGLVPRQHSSGDRQVLMNMTKKRRQASADTFYSWCPRCRQGCHE

SEQ ID NO: 186854 - protein, 388 aa, unidentified
MNRIIKIGMDVHSTNYTLCAMEPTIGAEERIFGEVQVAPDYKEIIGFITSLKKKLGLNNDYSIECGYEAGCLGYTLYHQLTAAGIKCVILAPTTMLTQQGKRVKTDKRDAYLIAQCLCYGGYHPVYIPTGKDDSVKEYLRMRDDHKIALKKLKQQINAFVLRHGYQYVGTKWTIRHITWLKKLQLDPIYRETLNEYMASYDEQEAKVERFDKRIEEIASEACYKDNVKKLGCLLGMRTHTALSLIVETGDFARFAKGNIYGAFLGMAPGEHSSSTNLNRLSISKAGNSHLRRLLVEASKGLCKGVVGYKSKELRSRQKGQPTEVIAYADKANIRLRSKYYKMIRHGKKKNVAVAAVARELACFVWGMMTGNIHPASTAGSSAPAVSQG

SEQ ID NO: 186855 - protein, 386 aa, unidentified
MIIIGVDPHKRMHVASVVDPATNHQVAALQIEASLAGYRRLLRWADKFGERRWAVENAHGLGCHLAQWLLARGEVVADVPSTATARVRELSRGGRRKNDVIDAAAAASVAALQGEANPVLAEDLTTVLGLLDERRSNVSTQRTRLVNQLHAVFRNLLPGGAPKDLTATIASGLLAGIRPVGPVEAARKQLARDLVVEIRQADQRLKVLTAQIAQTVAATGSHVIEVDGIGPVVSGRLLARTRRISRFPTAAAFASYAGVAPVEVSSADRVRHRLPRGGDRQLSHALHIVAVNQIRMPGSTGRAYYDTKIAAGKTDKEARRCLKRRLADHIWRLMIRDERHGAAGPGGQQGTTMQSSAAGSTPTTSSSDKSLPEPAIPDSTTSQTAA

SEQ ID NO: 186856 - protein, 327 aa, unidentified
MFCLGIDVSKNKLDLCLFPGNGKKKTKSIKNQVGVERDICDWLQKQKCPPEQVMVVMEATSVYHENVAYGLHGNPPVTVCIGNPQRVREFARGMGILTKNDAVDAWVLARYGELKQPDAWVPPPPEVRKLKDLLRLRDAIVEDVQRATNRLEKANSTQTAGEVTDSLERTKKSHEKELKRINALIDDHMDKNDGLKDDLKLLESIKGIGGVVGTTMLSVLRTCQFRNAGQVAAWLGVVPVEKTSGSSVRGLARMSKTGPADVRAKLYMAAIVAARWNRPVRALYERLMAKGKPAKVALGAVMRKLVHLCFGVLKTREPWNENYVATA

SEQ ID NO: 186857 - protein, 364 aa, unidentified
MIVIGADTHKATHTCGAVSAATGQLAGELTVTARKQGFTRLLAWGRELDPERIWAIEDCRHVSGGLERFLIAAGERVVRVPPKLMGESRRGERAAGKSDPIDALAVARAALREGPETLPAAQLDEEALRIKLLLDHREDLVKSRSEDQQRLRWHLHDLWPELELPAGCLDRPAWLERLGRKLSRAEQGARVRIARELVVEIRRRTRRAEELEAEIAALVEEQAPALLALKGCGVLTAAKLIAETAGAGRLSSDAKFARLAGVAPVPASSGKRTRYRLDRGGNRQLNCALHRIAVCQGRVHPPAQEFLARKQAEGKSRLEALRCLKRHLARRVWKLLVESEIDLSQSNPVNPQRGSTAPQIAAVA

SEQ ID NO: 186858 - protein, 298 aa, unidentified
MAKSYLDAVIGKEKRRLANDAMGHREFIKWIKQIEGQAQVICEPSGGYERRFIQALVGAQIKVSLVQANRVRAFARAAGILAKTDTIDARVLCAFGEAMQPPMVTTSKLEQEQLRELESQRRHLSRLLVMEQNRGARLGDCSVRVLNCSLIKQIQKQIEKIDLLIKEHIEGSQELSAKAEKLTAISGVGPRTAALLLAQMPELGQLNRREVAALVGVAPFNRDSGKLRGKRTIFGGRRCVRHGLYRAALVAARHNPILRAFYRRLRAAGKPAKLTLTATMRKLLIVLNSALKSDPIYA

SEQ ID NO: 186859 - protein, 355 aa, unidentified
MMGDNSKGICFEGKHFYVGIDVHKRHWVVTIRQEGMELRTFSQDPRPEVLKKHLEKTYPGGTYHVVYEAGFSGFWACRWFREQGIDCVVVNPADVPTGQKEKDRKRDSVDSRKLARELYKGELEGIYVPDEEAQHLRSLCRLYSATVKDSTRMMNRIKGHLHFNGVFLSRSSSNWSKGFISSLRELPLDGGPGREYLHLCLDDLDRIRQRKVVILKQLREYVRDHAAGRIIGYLKTIPGIAFRTAITLFTEIISMDRFSNADQLKAYFGLVPSSGDSGEKTPEKGMTARKNGFLRHLIIEAAWVAVRKDPAMLAAYNALRSRMKTQDAIIRIAVKLLRRIRYVWQHQCPYVTSMA

SEQ ID NO: 186860 - protein, 343 aa, unidentified
MRIVGVTGGVDTHADTHVAAAIDHNGGLLGVESFDADRAGYEELFGWLVGFGPVQQIGVEGTGSWDVGLARFLADQEIMVIEVDRPNRQKRRKVGKSDPTDAVAAARAALSGEASVTPKGRNGPVEQMRVLMVARRSARQQRIQTLNQLRHLVFTAPEPIQTRFKDRYKTSLVSEAANMRPNQGSDPVAYTTNLMIRNLARRIRGLNNEMADIDGMLTGLLEQTAPGLFGLHGAGTDTAASLLVTAGDNPDRIGSEGSWAHLCGTTPLPASSGKVTRFRLNRGGDRQANAALHRIVLTRMAHDPQTRAYVTRRRAEGLNTPEIMRCLKRYVARQTFKHLPQTT

SEQ ID NO: 186861 - protein, 315 aa, unidentified
MEHLAATPSFIGIDISKDRLDVHVVPSGWTFTARRDDKGLEQLVGDLRQLAPTLVVLEATGGFEITVAAALASANLPLAVINPRQIRDFARATGRLAKTDVLDAEIIALFAERIRPKPRPLADADSQSLAELVARRRQVVEMIGMETNRLHQARNAHVQRMLRATLKTLTAQLAELDHDIDGTVKRSPIWRAADDLLTSVPGIGDITAHTLIADLPELGYLDRRRVAALVGVAPINRDSGQMRGKRTIAGGRIEVRNALYMATLSATRWNPVISGHYKDLVSRGLPKKVALVACMRRLLGILNAIMRTKTPWQCA

SEQ ID NO: 186862 - protein, 335 aa, unidentified
MQIYGIDFAKDKFDVSFLAPTLKNVSNKPAHKVVRNNESGITKFIKTLPADAVLVAEHTGVYGDRLLKHCTESHINIAYVGGYVIHTYKSAPDRSKTDMLDCAVLREFGERFTDKLIYKTFPKEELYELKQLARHRTMLVEDRKRYVTADKGEDCRPCRSMQVKESMERIMEILTEEIARTEKQMLDIIRAHEELSRNYDIITSVKGVGLITAVELIVKTENFTTIKTASQYAAYAGTAPYEKSSGKMNKGAHVSKIGNRRSKTLLYICAESARMHNKEIKLYYERRTIIDKKPHFYVLNAIVNKLLKIIFSLVTKGQMFDSDFIRKDPRAIKDN

SEQ ID NO: 186863 - protein, 358 aa, unidentified
MRIIGCDLHARQQTIAMLDTDTGELEEKTLGPEGETVREFYSALSGPILVGIEATGSMQWFVEMMEELGIECRVGDPAKIRKAETRKQKHDRRDARLLLTLLAENRFPTIWMPSTEQRDLRTLLRHRHQWVRLRSRVQHTLQSMALNHGLRRGPSLWNQAGQHALRVLPLAPHASERRAALLSLYPRLQESIDELDQQVGQQVQQHPQARRLMTHPGVGPITALATEVFLGDPLRFIDGKALASYIGMIPSEHSSGRRQRLGAMSKQGNALLRYLWCEAAMHAVERDPELKRFYRRKLVQKGLGKARVAAARKLGIRLWIMMRDQIDYQEFCRRGKARQENGSVCAGMPDITSGPAEV

SEQ ID NO: 186864 - protein, 394 aa, unidentified
MKLVGIDIGKNSHHFCVMDKETGELNVTPSSFPNNKEGFDFLINSLKPYSKKSILLGMEDTGHYHVALLKFLLSNGYTVALINPKTTDLTRKMEGGITKNDKLDTITICDVLDTPERKKQYRITKVDRFDLYEQRQLTRHHHNLKEELNVYCNRLQKSIDLVFPEFNTLFSSKYSVVYMNLLKTFGSAESIASTDIRTIRKCFEIKGRGGRISLTPEKLKECAKNSIGISSEIETIQIRHLVSQIMLIKEQIAEIDKKIEEFSIKNNSPILSIPGISHFSGTSILAELGDIGNYSKPSQIIKFAGVAPYHYESSQYNAQHTAITKKGSKYLRKTLYQIILPVINNNPVFKKYYRLKISQGKGHRCAQGHCIRKLLRIIYHILETGQSFDPALLR

SEQ ID NO: 186865 - protein, 430 aa, unidentified
MATKIEVEEAPAAPVGREHCAGLDVHRSTIVGCATFPLGGGRLKKVWNEFATTAAGLARLASWLKELAVSHVAMEATGVYWMPVYAALERAGSFDLTVVNPHHAKALRKRKTDMKDAEWLAYLVRHDQVNKSFVPAKPFRDLRDLTRYRRTLVEAQASERRRLIKLLEAADVKLAGVISDIFGVSGRAILRALIGGGQSPAEMAKLARGQLRKKRPQLTEALSAEIDEHRRQLLAMQLARVEAAEADIAILDQQIAARLAPYDDYVALLITAPGVDWLTAAIIIAELGVDLSSFPSVGHFAAWIGVCPGNNQSAGRAKPISARNGNPYLKTALCNAAIGAARTRGSFLKTTYHRLKSRRGGGRAALAVAHKLAIAIYHMLTTGAPFKDLGAAHHDARDKQRAAKRCVQRLRRLGYAAILQPLALHPAEQP

SEQ ID NO: 186866 - protein, 425 aa, unidentified
MTAQPNATPAATWVAIDIAKRHHAVLIETPDGKQQQFRMASSMEEHDRLVALLRGLPQPARIAMEPTGDCHRTLAFRLLTEGFDVCLVSSVAGARYREAMFNSWDKNDPKDARVILALLKQGMTLRYIDPLLAGHHGLQELSKTHYQISLARTRLQHSLMTHYLPLYFPEIERYFDSAHADWFARFMLRFPTAASIQQRDYETFRKEAWDLVGRKVNKAAWLRELYEIALRSIGLPVADDSLEVQSFRLQLQRFQELLQQRDRLAEQAHQTLSGRPDYESLRSIPGIGPVLALTILAEAGDLRRFAHHRQFLKYCGLDLAKCQSGQYKGQERLSKRGNARLRFAFWFAATVAIRMRENSFREKYERYIRNDPSNADRKRKALTAVAAKMARVAYGLVKQQTQYRCYFENALPRGSTPLRRAVGTS

SEQ ID NO: 186867 - protein, 350 aa, unidentified
MIIIGCDYHPGFQQIAFVDIETGELNERRLGHREEAEQFYRDLKVRGVNVRVGMEASGHARWFERLVGELQFELWIGDAAEIRTKRVRKQKTDRQDAQRLLTLLVEDRFPRIWVPSWENRDLRQLLWHRHRMVQMRTRIMNQLHVVALNEGVRRKKALWRPAGRAQLESLVLAPWASRRRQDLLELLDQLTPKIHELTRSLEQEVEKQPVARRLMTHPGVGPLTALAFELVIGTPERFRCGKQIASYVGLVPSEESSGDRRRLGHISKQGNTLLRFLLLEAAQATVRCDPDWRRQFLHLALRRERRIAKVAMARKLAVRLYWMWRKEWNYEQWKKFGSHAGEPGNRQGVQ

SEQ ID NO: 186868 - protein, 440 aa, unidentified
MSIETTLTHNFRRNPTMKFKMQNKQNKLIERISVKHLVVGVDIAQQLHVARAVNFRGIVIGDPLTFKNNEEGFASLLKWIKNLQRFNNLDEAIVGMEPTGHYWINLSKWLSNQDIEVVTVNPHLVKKNKENRDNTQSKSDKKDALVIADMVKNGYYSEVRYTSESFEKLRVLMSNRDVVVKRLVSSINQLNRWVDIVFPELRQVFKDIKAKGAIATLRLFPTPMELETMQPHDVITGWKSIMKRQPGLKKAMLLLQVARRSVGTRQALDAYKFHLEQLLEEYDLAVTQLERVEKQVTEELNKIPFAKKLLTIKGISEISLAGILGEAGDLSNFSHGNSLLRHAGLHLAEASSGKWKGQIVISKRGRSRLRRFLYLATMSLVMNNPEFKAIHSHNVKVKKVKKMKSIMKLIGKLARIFVGIAKRNESYCPEKLQPLASLAA

SEQ ID NO: 186869 - protein, 320 aa, unidentified
MQTPSVVLNIGADVAKDEIVVACSEGSFPVRRIANQRAAVTAFLKGLPQGSRIGLESTGIYHELLAEAAHKLGFVVFVLNPKDARHYAKGVGLRGKTDRVDAELIARMIAHEYTKLHVWIPPTPEQREIGRLLKRRAKLSSLRQALAMSLSGLDGFGADLKALRARFDLVIARIDQRVKTLVEANPDRRQHVTQLRTIYGVGPVVSAALVNILERVPLNNADAFVAFTGLDPRPDESGKHRGKRRLSKRGPADLRRLLYLAAMSAIKTQAWKPLYEHYRAKGLSSTATFVILARRIARTAWSMYTYKTEFDPTRLTKTLT

SEQ ID NO: 186870 - protein, 415 aa, unidentified
MEPIVERCCGLDVHQASVVACVLVGAADRKPTKEVRTFGTTTRDLMELRDWLRASGCTHVGMEATGIYWKPVHAVLEDDFDVVVGNAHHIKNVPGRKTDVKDSEWIADLVRHGLIARSFVPPKPIRDLRDLLRYRRKLVENRSAERNRLLKLLETANIKLASVASDVFGVSGMAMLKALVKGEATPAEMAQLAKRRLRSKLAELELALEGRVEEHHRFILEMQLARLEQLDDHVATLDARIDAKLTPYREQRERLARIPGVDRILSAIIIAELGVDMSVFKSAHHLAAWAGVCPGNHESAGKRKKQAARKGNVHLMTALVEAANAASRKKDSYFKDKFFRLKARRGYLRAAVAIAHKILKAVYVMLSTGADYRELGAAYLDASDARRVTANLVRRLQRLGYDVTIAPSSPQVAMG

SEQ ID NO: 186871 - protein, 358 aa, unidentified
MQPEASHEMKDMKYVGIDVGKLRCRAAVMDQEGSIIDEFSFNNNHQGIEHLASGLTMDDKIVIESTGSVWTNLYNILDERHIPVVLANPLKTKAIASARIKSDKIDARILAHLLRANLIPESYVPPKELREIRALIRHRASIVKIRTMLKNRVHALIDKHGLASDFSDIFGKGGVQWLRTLELPSLDRLMLDNHLQHFESVNQQIKRVDEEIRIKASHDEDVKLLLSMTGVDIYTALLIKSEIGTICRFPDYKKLVSWAGLAPSLHQSGNTEYRGNITKQGSKMLRWIMVEAARVAVNHDERMKQFYERVKHRRGDQKAIIAVANKMLKIIWFMLTKREPYQSRNPQLYKRKLNFLTE

SEQ ID NO: 186872 - protein, 408 aa, unidentified
MEIIYERACGIDVHKQEIVCCLMTGQRKAVTKKFGTFTHELREMVAWLKEEQCQIVAMESTGSYWKPLYNIFELESMNAIVVNAQHMKAIPGRKTDVKDAEWIADLLRHGLLRASFIPDKEQREYRELTRYRSSRIEERSRELNRLQKMLEGANIKLGDTVGEISGKSATGLIKLAVENDELTLEQIAAVRDYRCKSSVEQFQGALTGIISPLQRELFTAVLRIIDEQSKQIERIEAMIQKYTTDAYDAAAKAIDELPGIGRISAEQIIAEIGIDMSRFPTADHLCSWAGISPGNNESAGKRKSGKTRRGNKTLKKTLTQCATSAVKNKNSFFYAQYQRLVVRKGRNKAITAVAHSMLIAIYHVLSGNKYQDLGAEYYTRFNKEKKIKSYLIQLEKLGWDPSCPTAAS

SEQ ID NO: 186873 - protein, 412 aa, unidentified
MEWVARIGIDWADQKHDWVLKDGSGRRDGGVFLSKPEAVHEWVRSVRAQYPEGKILVTIEQSRGALIYALMQYDFLILVPINPRALALHRQSLHLSGAKSDPEDADLICDFGANNFEKLRVLTPDDAHTRTLGLMAEARRGLVDQRTGDIQALIAACKQYFPQVIEWFGGAGEQLTLAFVQTWPTLELARVIRRDSLRTFIRAHSRWSEEKIDALYNSIRSAVALTPDKAINESYAFQAQSLASVILALNEQVSRYDKRLDELSQSHPDYEVFASFPGAGKVMTARLIPAFGKDRDRWQDAREIQSYSGIAPVVDSSGKHRWVHARWHCPNFLRQTFHEFALASIPQSDWAKAFYRQQRDRGAGHHAAVRSLAYRWMRILFRCWKDSETYDDALFLTQLRLKKSPIIKGLAA

SEQ ID NO: 186874 - protein, 316 aa, unidentified
MNNENIYAGVDVSKSSLDVAIIPSGKSVCFANDKQGRTKLVKCFGKLKVSHVTLEATGGLERPVAMELVSAQVPVSVVNPRQVRDYAKATGRLAKTDSIDAEVIARFGEALKPAVNQLKDAQTAELSELVTRRSQLRKMVVMEKNRLYLASGLSGVLIKSHIKYLEKQIEKVDTKLAEMIDANLEWRESDSLLQSVPGVGRGTSAVLLALLPELGKINRREIAALVGVAPFNRDSGFFRGRRSVWGGRADVRNMLYMCAVVASRFNPAIKSFYQHLKEKGKPSKVALTACMRKLLIILNSIMKSRTKWSDNHESIS

SEQ ID NO: 186875 - protein, 358 aa, unidentified
MSHYRVGCDAHKRYSQFAVLDQDGQLRQQTRVDHEPGAIQAFLESLPEGTPVALETVGNWYWIADEIEAAGCLPLLTHAAKAKVMMGNVNKTDKLDAKGLAKLLHLDSLPTVWLPPGEIRDERELHRTRMALSKLRTALKNRIHATLAKYGITSTEHSDIFVGTGRAWLDTAATRLPPETGRCVAQELEALDGLQLQITQLEERIRERIALTPSIQLLKTLPGVGDILAIVIDREVGSIDRFDTAGQFTSYAGLVPTVHASGGKTHFGHMRKPSSQYLKWAFIEAANVVVRHRHHPAWKTKYVCQVYDQVGQRKGHAIAVGAVARHLAEAAFWILKRQEPYRPPANRQASPKQVRGRA

SEQ ID NO: 186876 - protein, 340 aa, unidentified
MKNITTIGLDLAKRVFQVHGMDHEGRAVLCKKLRRGQVLKFFATLSPCLVGMEACGSAHHWARELRAQGHEVRLIPPQYVRPFLKTNKHDAADAEAIAEALVRPTMRFAPIKSADQQAVLMVHRSRELLVKQRTMLINAVRGHCSELGMIASQGASKVNDLMVMIDDPDDVRLPAFAREALGVLITQLRAVKEAIRKLESKLQAWHRSQQASQRLTTIPGVGVITATALIATIGDGSQFNSGRHLSAWLGLVPRQHSSGGKSRLGRISKRGDGYLRRLLVHGSRAVLRWQRAAPKKPSPWIGELLTRRPTNVVLVAMANKTARTVWAMMRDRQDFNTGLR

SEQ ID NO: 186877 - protein, 368 aa, unidentified
MGNEAKRFVGVDLSKRTYEAVAINADPQTISRWNGKLDLRGRKCLLDKLYCGDIVALEAGTASFKIAKEIQSKPGITVVVLNAANLAIIHASLKKTDKEDALKLARLVQKYSPGELPVVPIPTDQEMERRALAAHETRFRQDRVRLINRLHAVFLRAGFPDHTKRQLGITASREKLIITELDGFNLVEAMNLHHVITEYEKILDDLDKQISDTVVSCGEDAEILLSLPGFGVKTTMAVLAYAGDMRRFENPSQLVNYIGFSPRLYASGDVERSGSITKRGNPQVRWLLIQSAWCMVKSKAANPLKDRFDSMLKRGKAKSVAIVALARKLLELVFILLTRREKYRFIDPSLYAIKLRRAGFNLVGAESC

SEQ ID NO: 186878 - protein, 345 aa, unidentified
MHIASIGIDLGKTTFHLVALGERNKILLRKKFSRPQLLAYTAKLPLSLIGLEACAGAHFLGGALREQGHQVRLIPAQFVKPYRKSNKNDFLDAEAIAEAVTKQNMRFAQLKTQEQLDWQAMHRVRDRLVQRRTALINEIRGFLLERGITFAAQPIHLRKNLPGLMEDAERNLSPRLRWLLDRMWQEWKQIEIDIEAITDEMERISNDDARCRQLRQIPGFGPLVSTATVAAIGNGAAFRRGRDFAAWVGVVPRQYSTAGKQKLYGISKRGNVYLRRMLIHGARSVLFRVKYDTGGFGQWVRRLAQRAPSNKVVVAIANKLARIAWAVLSSGRDYRHQPMRQLTAA

SEQ ID NO: 186879 - protein, 347 aa, unidentified
MLYAGLDLSRHRLDVHLMNQAGEPVQVTTAPPDVDGLRGLARQTAGFGEPVVAAIESMNGARFGHDQLELAGWEVQIADAQKVKGLAPLACKTDRIDAWVLAELSRRDLVPAIWLPTPEVRGARERARWRLHLVRHRVALKNRVHATLLAFGRPCATSDLFGVGGRQLLQRLGLPEPWAGTTAAAVALIDDLGAQVDGCERELRRLGADHQYVPLLMSAPGIAWVLGYTIAAELGDITRFASPKKLCGYTGLCPRVYQSGRRDHRGPLARNGPKYLRWALIEAAVHAARHPCYHDHYQRTKQRLGTQRGPAVARIEIARKLTEAIWHMLTTQAPFRPARPHAKALVA

SEQ ID NO: 186880 - protein, 399 aa, unidentified
MSHVIIGVDPHKLSATIEVVDEHEKKLGSGRFTTDKAGYAAMRAYVKTWPERVWAIEGANGTGRPLAQRLLEAGEHVVDVPAKLAARVRIFDTGHNRKTDALDAHSIAMVAVRTEGLRVLKIDAELEVMRMLTDRREILTRRRVATVNRLQAMLAELLPGQAKRDITTGQAKTMLASVRPRDLAGKTRRRIAAEELADLVAIEAKIKKATAELKALVLARGSTLMDIHGIGPVVAARILADVGDVARFADRNRFASWTGTAPIDASSGENNRHRLSRAGNRRMNHMLHIAAITQLRLDTEGRVYYRRKRAAGKRPLEAIRCLKRRISDNVYRRLLADAERATGADPGGHCGASQESSAADLPPHIDTSDQPLPDPQLRRYADQPAPRKTQPARPLQDAG

SEQ ID NO: 186881 - protein, 355 aa, unidentified
MLTENTTFESYDMCIGIDTDSKSYAVTYLSNQGERSLKMPAHPKALHQYFRKRFPDKRLLYVYEAGATGYDLYDYLNVENEACWIVHPPSIKKAPNDRVKNNRIDSHTLAMQGFGRQIEGIRVPEEPYRELRHLAVTRQQYVEDARRIKQRIRSLLLFEHISGEDLPPGKHWSKRFRLALKHVSVKNETIRFKLDTHLEDLEYVHNKLLHVHKQLRYFYLQHTDIQAFIRYLRSIPGFGFAVSTYLLARIGNPKYLRNVRELGAFAGVVPTEHSTGETVHKGSITHMGDATLRSLLIEAAWIAIRKDAELGAFYYRIRARHPFSKGSKLAIVAVARKLTHRAYRVLKEQRSYVIH

SEQ ID NO: 186882 - protein, 392 aa, unidentified
MIYVGIDIAKDKHDCFITNSDGEVLFKSFTISNNRDGFETLFQKIQSVSDDLTKVKVGLEATGHYSYNLLGYLLDKGLPTYVINPLHTNLYRKSLSLRKTKTDKVDARTIASMIMSDVNLKSYSDTSYHNEELKSLTRYRFDKVKERAKLKTSVSRLICILFPELEKLVPTLHMASVYALLSEFPSAHAVASAHLTRLINLLSQSSKNRYGKDTAVMFREAARNSIGSNMPTKSLELKHTIKLIQELTSEIDEIEAAIKQIMDEEIQSPILTIPGISYRMGAMIIAEIGDFCRFDSADKILAYAGMSPSTYQSGQLDNCYSHMEKRGSRYLRYALYNATKYVCHWDKSFGEYLAKKRSEGKHYNVAISHAAKKLVRLIFAMEKSGKAYLPTA

SEQ ID NO: 186883 - protein, 398 aa, unidentified
MSYCPVAGIDVSKRFSDMCILSPDNKIFAQEKIYHDETSINRANALLQKAERLFFSKPVIVMESTSHYHLILFQFFSEHGYDVIVVNPLQSNSMKDFSIRKRKTDRVDAFKLAMMYRTKTLRPSQIPQTATRALRQLCRHRAELLNDVSSYKNRLTALLDQTFPGYDKVFSDVGGVTSCAVLVRFPTPTILLVEEESELVEVIAAASKSGYSFAKKKAGLLISAAQKAQTLGIHSCADETLIVCTIQMLRTLSESVLQIETAIDNLLAQIKEMRNNVSLLQSIPGIGSHSAALLLGEIGDISLFKKPKQLAAYFGLDPTERQSGSFRGTKNKLSKRGSSYARAALHMGVVNSICKRGKDSAANPVLLSYYEKNVKTTGKGCSSSINAQTGLYSLCSLA

SEQ ID NO: 186884 - protein, 351 aa, unidentified
MDNITIGMDLGDKEHAVCVLDISGTVTLNSFIDNSSESILSFFKKYKGAKVVIEAGTHSSWISRQLSTLGCIVLVGNPRKLRAIWQSDNKTDIRDAEMLARIARFDPHLLYPIQHKGRQAQKDMTLLHAREALVKNRSNLINHVRGSVKSFGGRLPSCSTESFHKQAVVHIPEELQSTFHSILGLIEQISLEIKAFEKRIEQIGKEQYPETELLRAVKGVGPLTSLAFVLTLEEPERFRKSRQVGKFLGLTPRKDQSGETDKQLRITKAGSPFLRKLLVNASQYILGPFGEDCNLRRFGLRLASRGGKNAKRRAVVAVARKLSVLLHRLWRHGEIYNPLYKRDSLLLAKAA

SEQ ID NO: 186885 - protein, 380 aa, unidentified
MQTITLYLGLDVHKDSITIAIAEPGPKGEIRLFATITNDLHALEKALSRIRKAHPDAQLEVAYEAGPCGFGIARRLKQLKVPCLVAAPSLIPKQPGSPFKTDKRDARTIARLLRAGELTGVYIPEPTDEAIRDLCRARTDAVDDLRRCRHRLKAFLLRHGYRYQGKANWSQPHMRYLRELVLPHPAMKTILEEYLQGIDAAHARVERIEASMLSLLEAWRLKPAVQALMAFRGFQLVASMITVSELGDIHRFEHPRQLMTYLGLVPTESSSGPRQRLGSISRCGNAHQRWLLTECAEHYALPPKISKELSRRQEGQSEAIRALSWKAQNRLHLRFIKLLGRRLQRNKAKVAIARELCGFIWALLRTQPCYQQPTSSSTAG

SEQ ID NO: 186886 - protein, 403 aa, unidentified
MTLRHNQLSFRWLINQKGVPGLINIKGGMAKEGFLPVKRCCPFQKQTMQNRKETNMTEPLMAGIDLHSNNLVIGIVDQSGQRLKHQKLDCDLQQVEQFLAPFKPQLKSISVESTYNWYWLVDGLRARSYPVVLANPAQIDQYSGIKHVDDKNDVFFLAELQRLNILPIGYIYDPMLQPVRDLLRRRMGLVHQRTALMLSFKSLYARTTGQAMSLSRLKSMDVAEAKTLYQHPANCLIAKVQKEHIEKLNQSIALLEKVVLQSARELPCYHQLNTLPGIGRILAMTITMEVGQIHRFKTPGDFASYCRTVDSQRLSNGKKKGDNNQKCSNKYLAWAFVEAANFAKRFDEHCRRWFDRKAAKTSTVIATKALACKLAKAAWHLMTQATDYDPKRMFPELALKTTT

SEQ ID NO: 186887 - protein, 343 aa, unidentified
MNISRIGVDLAKNVFQVHGTDNQGHVTWKRKLSREKWIAAVCRTVPKGSEVGMEACAGAHHWARRLSEHGYQVKLIPPQFVIPYVKSNKNDANDAEAICEAMSRPNMRFVKVKTVEQQDIQAIHRVRSELMSQRTAKINQIRGLVAEYGLVAPKQAESLRKALPRWLEDAENGLTPRFRHLLHGLSQDLGYLYDRIARLDQEIKEIANGDPMVVRLQQLRGVGPLVATALIAAVGDGRQFAKGRQMAAAIGLTPRQFSSGGKDKLLGISKRGDAYLRTILIHGARAAVYKAKMRDDRLSTWVTDLAKRRHVNVAAVALANKTVRIAWAMMRNNVDYDPEYAVA

SEQ ID NO: 186888 - protein, 410 aa, unidentified
MELLYPHCAGLDVHKDSVVACARHMEDGKVRTCVKTFKTTTGELMALSDWLSDEGCTHIAMEATGVYWKPVWHILSDGEFELVLANAAHVKNVPGRKTDVNDATWLADLMAHGLIRASFVPDEPTQQMRDLLRTRKQFVRERSSHIQRIQKTLEDANIKLDSVISDVAGLSGRRMIEALIAGQTDPETLAALAHGRIRATAAELEAALRGRVTAHHRFMLGLHLDHLDAVDAAIARIDKEVDGQVEPFRAAVEMLSGIPGISSLSAEVIVSEIGIDMRRFKTEGNLISWAGLCPKNDESAGKRRSTRMKKGAPWLKTTLIQCAWAATRVKGSYLQAQYLRLRSRRGAKKAIGAVAASMLTAAYHMLSNGTLYQDLGAGHFDQRAKGKQLVRLVNRLKDLGYQVQITPLAA

SEQ ID NO: 186889 - protein, 387 aa, unidentified
MIYLGIDIAKQTHVASALSDEGEVLLEPFEFSNDYEGFSRLLSNISSFNRDNLLIGLESTAHYGHNLVNFLYLLDYKVAVLNPIQISSLRKNNIRKTKTDSVDAILIAKSLAIINPRTISKVDFDTMRLKDICRFRHKLVKSKTRLKIQLKSYMDVLFPELQYFFKSGLHINSSYTLLLEASTPNDIASMHLTHLSTLLNKASHGKFNKNSAKELRALAQKSVGSNEPHLSIQVTHTINQIRLIEKQLADVENTIESLVKSINSTIITVPGISYLNAGTILGEIGNISRFKSYKQLIAFAGLDPSVYQSGNFKARNTRMSKRGSKYLRFSLINAAHNLVKNNHTFACYYDKKIAEGRNHYSALGHCAGKLLRVLFKILNDNIEFNLD

SEQ ID NO: 186890 - protein, 391 aa, unidentified
MDKAWAGVDAGKEFHWAHVLDASGRELLSRKVENDEAQLLMLIDETLALAEEVIWALDQPGGGAALLLALLWERNQRVLYVPGLTVDRARDAYRGESKTDARDAHVIADQARMRPDLGELKPGEAEIAELQLLLARRRDLITDQSRTITRLRETLVSLFPALERELDLNSKGPLTLLTHYQTPAQLRRAGHKRIATYLRNRSVKGSNKVAHKALAAARAQSVSLPAQKVASGIVADLAAEVLSLKGRIESIDEEIGQRFFARPEARILTSLPGMGLILGAEFVVAVGDVSAFESADRLAAYAGLVPASRDSGKRVGNRRRMRGGNKILKRVFYQSAFASLRSAPESRAFYDRKRAEGKRHTQALIALARRRVNVVWAMLRDGSEFEERSAA

SEQ ID NO: 186891 - protein, 412 aa, unidentified
MLEVKVENCAGIDVGKKFLAVCILTGPVDRKPAAEVRRFGTSVKELEALRAWLVESKCTEAVMESTGEYWKPVFNVLETALKIILANPLQVKALRGKKTDPKDSRWLASLLRHGLVQGSFIPPRDIRELRDLTRRRRTLVHEGASERNRIQKVLEDANVKLGNVLSDIFGMSGQAMLEALLKNEQSIAEIAELAHWSLAPKIPKIVEVLEGHRMNDHHRFLVRQGLRHMQYIEKMIEELDQEIAVKLKPYQKQVELACTVPGIQRVSAASILAETGMDMSPEGAFPDCHHLASWAGVCPGNYESAGKRLGGKTRRGNRWLKGMLTQTGWAAASKKNSLFSSRYQRIKLRRGGQRAVIALAHTQLIAIYWALRNGTPYPEQVQRMEQDRREAQIRHHLQRLAKLGYDSTCTNN

SEQ ID NO: 186892 - protein, 459 aa, unidentified
MRKPAQKQSRVVKRTEKSGLPIITADAAGIDVGAREHYVAVPVDRDPQPVRCFGAFTQELHRLAQWLLQCGIKTVALESTGVYWIPLYQILESYGLQVKLVNARHVKHVPGRKTDVQDCQWLQQLESFGLLSGSFRPEAKICVLRSYMRQREMLIRAAGRYIQQMQKALTQMNLKLQHVISDLSGQTGLRIVRAIVAGERDGLKLAALKDRRVKSDVSTIAKALEGDYRAEHLFALKQGLELYDYYQQKIAECDAEIRQEMQRLETRGSASAVLKRKPRSRHAVGFDSQAELYRVLGVDLTNIDGVNESTAQLIVSELGLDICQKWPTEAQFTSWLGLCPNNEISGVKLLKRGTRKVVNRVANALRMCAQSLLKSKSALGAYARRMRSRKDTPVAITATAHKLARLIYRTLKYGQAYVDAGCDLYEAKYKATMLKSLQRKAKLLGYQLVSYQTLDAVVP

SEQ ID NO: 186893 - protein, 344 aa, unidentified
MQHYIGLDVSVKETSVCIVDKAGKVIREVKVATKPVAILAVLTEEALAIERIGLEAGPLSQWLYSALAEAGLPVICVETRHMKAALSAQINKSDRNDARGIAQMMRVGLYRPVHVKTLASQKRRMLLTSRQLLQAKALDIENDLRGTLRNFGLKVGMVGTVKFEARIRELVANHPDLAAIVEPLLIARRVLREQLGVLHRQLLEIVRHDEVCRRLMTTPGVGPVVALTFRATVDVPSRFTSSKAVGAAFGLTPRRQQSGEIDRMGGISKCGDAMMREMLFEAALVLMTHSRKWSWLKAWGMKIARHRGMKRAIVAVARRLAVIMHRMWVDGSEFRWTRQEAAAA

SEQ ID NO: 186894 - protein, 325 aa, unidentified
MKKVMAGIDLHSNNVVIGIMDTDGKRVASGKLPCELKEIAKFLAPFKKRLEQVAVESTYNWYWLVDGLQALKYPVVLANPAAMQQYSGIKHADDTNDAFFLAELVRLKILPTGHIYEAQLRPVRDLLRRRMTLVHQRTALMLSFKSLYTRTTGQEMTLSQLKELEIKEAQELYAHPANQMIAGMQIKHIEQLTESIEKIEKVVMASARELPSYGKLTTLPGVGIILGMTMTMEVGDIKRFASPGDFASYCRTVQAQRTSNSKKKGENNSKCGNKYLAWAFIEAANFARRFDEQCRKWYDRKAAKTSKVIATKAWPANWPRRRGFS

SEQ ID NO: 186895 - protein, 395 aa, unidentified
MFIVGIDIAKRSHEAIIIAEDGQVVRKAFSFRNNCTGYNLLLEQVRRLTLVKSQIVFAMESTAHYWLALYARLLKDGYAVMVLNPIQSHSLRELYIRKAKTDARDSLVIADLVRFGRCKASNVPQDKILALRELCRSRAYLVDMAADLKRKLIALLDRIFPEYESLFDSVFSKASIAVLSKYSTPQKVKNAHLGKLTDILMESSNGHFGEWKAHQLKEAACSSFGIDDSGGVYSTLLGMFLEQILSLTAQADSLEKQISVFFQEFNNPLTSIPGVGTVLAATILSEIGDITRFSSADKLLAYAGLDPSVKQSGEFKSNQNRMSKRGSPYLRRAIWLASTVAVHRDPMFQTYYEKKISEGLHYMNVIGHVSRKMTAVIFAVLRDGQPYQPILQSAG

SEQ ID NO: 186896 - protein, 394 aa, unidentified
MKLIGIDIGKNKHFFCVMDQQTGEIISQPVSFSNDKEGFDFLVQKIKSYPKDSILIGMEDTGHYHFALLKYLLDLQYTVALINPKTTDFNRKMQGGITKNDKLDTINICDVLDTPERKKQYRITKVNSFDLYEQKQLTRHHHNLKEEENVYKNRLQKCIDIVFPEFNKLFNSKYGIVYMNILKMFGSAENIANTDIRTIRKCFEIEGRGNRISLIPERLKECARSSIGISSSAEVIQIKHLTAQIELIEEQLTEIDKKIEEFSIQNNSPILSIPGISHFSGTSILAELGDISNYSKPSQIIKFAGVAPLHYESSQFNAQHTAITKKGSKYLRKTLYQIILPVIRHNPVFNKYYQLKISQGKGHRCAQGHCVRKLLRIIYHLLKTNQQFDPQLLR

SEQ ID NO: 186897 - protein, 369 aa, unidentified
MTSITYIGMDVHTTNYTLCAYTIAGQQPFAQTTINPDVKELLKYLDRLNKELGGDCEFICGYEAGCLGYSLYHELAAHGVSCIILAPSTMPTSRNEQIKTDKRDAVKIAKCLAYGTYSSVYVPTAEDNAIKEYIRMRDDAKQMMKQTKQQILALCTRNGKSFDGKTHWTHAHVVWLYGLDFDMPILKETLKEYLLTYEQLSERIAYMDKRIEEFAQQETYAERVRQLSCFKGIKTHTALSLIVEVGDFQRFPTAQQFSAFLGLVPCEHSSGDSQHRFGITKTGNAHLRRLLTEAANGYCRCATTRKSAVLKARQAGNRPEIIAYADRANERLRKKYIRIMMKSKANVAKIAVARELSCFIWGMMNGKIA

SEQ ID NO: 186898 - protein, 353 aa, unidentified
MKPETESKTAPFAVIGIDIGKEVFHLVGLGVDGKTAFRRRIRRLGLKDAFEKLPPCIIGMEACLSAHFVSRTLRALGHEPRIIPAIYVRPFVKGQKNDYNDAEAIAEAALRPNLRVVQEKSQDQLDLQACHRVRSRLVARRTATINQIRAFLIEQGIAVRTGPRALRNSLFAILENRKEEISPRTATLIRGLYEDWCCLDKRIETVTGEIEQLSQAEARCRRLMSVPGVGPLISTAVVAAINTGEAFERGRDFAAWLGLVPRQHSTGGRTVLGRISKRGSRYLRMLFIQAAKVLLMRPHNWVRYSFGTWLKTASERLHRNKLAVALANKLARIAWSVLRHDKAFDTHLDAAAI

SEQ ID NO: 186899 - protein, 354 aa, unidentified
MKKVIKQVVGIDVAQKELVVTLGKLYEDLSTDLLAYKVFKNTSNGFEALVLWVKKLTQEDVEVRYVMEATGVYHEKFAYFLSDLEKAISIILPNKISNYIRTLEVKTITDKSCSQAIAQFGLERKLDNWNRPNPVLKNLKQLTRERDQIVDERSAIKNQLHAEDTESEPNKSSIKRMNQRIKLLSKQEQEIKVEINQLIASDKELNRHVKQATTIPGIGILTASVIYAETNGFELIRNKKQLTSFAGLDVIEKQSGTSVKGKTHISKKGNRHLRKAMHLPALSAIKHDVRYKDLFVRLVGKHGVKMKAVTAVQRKLLELTYILHKNNTTYHALAKEQCESVENEREQLKVIAPF

SEQ ID NO: 186900 - protein, 408 aa, unidentified
MFFIGIDLSDRFFDSCISNSSGDVLSNSRFDFNDDGFASFVRKIGEYESDSKNCIVGIENPHSRLVDFLIQRGYNLITTNPQSIAKYRESRIPSKAKSDSVDARIIADYIREHHKNLRPINIPDEIIRELSILLEDRDKLVEQKVRFSNQLTNTLKDYFPQALDAFGSITNKSALEFLAKFDTHQEVKALSKDELDKILHDCACFRTDSRERFHQAMGNNPSLISPAVVKAKVRLKNVLVGHLLLLVEQLDEYDKQIQKIVDNIPNGGIFRSLPGADYILGARLLVLYSSRDFASVSEAQAFFGTCPCTKSSGQSIFIYFRKGCHEFGRTTFHQLAFCSLKSSQWAKKQNAKKRKEGKKSNHALRCIANSWVKITYAMWRSKTPYNESKHLASIANHILNQPSFILGG

SEQ ID NO: 186901 - protein, 355 aa, unidentified
MQQFKYHLGIDLHKRTSYWTLMDNDRKVLYRKNMETSEEAMDTSLAAIGLAPSDIEAAIEPVSQWGWYGDLLEKRGLTVRLVDVYKSKLIANSKLKHDKVDSRTLADMMRSDFLPEAYRAPRETRDLREFIRGRAFLVRMRTRVRNRITGILGKHGIISPWTDLFGKGGLRWLRTQSLGSPHDGEVQSLLAVFTELSLHIGELDRRCVELVSGSEDLEILTSIPGIGSVTALMIMAEVGDFSRFPTPGQLASFAGLVTSSHSSGERNRFGHITHRGSVWLRAALVESTGKVSPKWGYLHSFYRRIQEKKGNSIARVALARKVLVLAWHLLRTRQRFDPHPLGPHDSVKTGSSDIS

SEQ ID NO: 186902 - protein, 453 aa, unidentified
MSRKRKNNKKKISVPELHCLSPNAAGVDVGATEIYIAVPVDRDPQAVRCFSTFTEDLHAAAKWLKACKIETVAMESTGVYWIPFFQILEAQGFTVFLVNARHVKNVPGRKSDVSDCQWLQYLHSVGLLRGSFRPEQAVCMVRSILRHRDSLVQMASSHVQHMQKALDQMNLQLHHVISDITGVTGLTIIEALLAGERNPHTLAALRDGRVKATADTIAKSLVGDYRREHLFTLRQSLAAFRHYQELIGACDREIAQHFEAFESKLDPREGSAPKSQDEQKPSDRELRFDLRSHLHRIFGVDLTRIPGINVLTTQTLLAEIGPDLSCFACAPAFTSWLGLCPDNRVSGGKVLSVKTRKVKNRAATALRMAAQSLHRSQSYLGHFYRRMRAKLGAPKAITATAHKLARIIYHMVTTGQDYDETICVKNEIKNRQRLEARLRKHARELGFQLVAAS

SEQ ID NO: 186903 - protein, 241 aa, unidentified
MPQPVIGCDLSRAFLDLCDLPSGRMQRIPNTRDAIAEWAETLTPDVLVVFEATSGCDDILIATLTERAHPFSRVNPRQAREFARATGVLAKTDRVDARVLAQMGAALDLPVTRPVSPAPATLADFLRRRRQLVDMRKAEKLRRHSAGHDDIAEQIDAMIALLSTQISVLDQRIKAIIAADRALAEQAALMSTVPGIGPTVMAVLLGELPELDTLCRRKIASLAGLAPHARESGSWKGARRI

SEQ ID NO: 186904 - protein, 419 aa, unidentified
MFSDTALLVGVDVHQRRNVTLVMDGSGDVVDKHRTFANNRLGSDRVACYLADMAQRGSFTTIHIAAEATNNYWLPFFYHLEKAPALAAWPVTLYPFNPRLVANFKKALGEEEKSDLRDAGVVTERLRFGKKLPRPFAMDELYLPLRTLTRYRYHLVRELVRVKSYCLSLIYLKATDYTDKAKKPFSNPFGATSQAVLRQFATLDEIANTPLDELAEWLDVKGKRRFPNPEENARKLQHVAQTAYQLPDEWTAVIHDVISLNLRHIACLENLIDRVETAIAQQMDNIPHTLETIPGIGPVFAAGIIAEIGDLARFEFKEAKVASYAGLRWPRSQSDAFEADDRRMSRSGNHFLRYYFCEAAQLVRLQAPEYREYYNRKYKEVRKHQHKRAIVLTARKLVRLVVRLLTTNEPYRLRQVPKA

SEQ ID NO: 186905 - protein, 356 aa, unidentified
MTKVIAYFANQKVYVGLDVHKRSWNAAIYLNDQFIRNIHQPPQPQALHHYLVHRYPGASYSCAYECGKFGYWIQREFQQLGIECLVVNAADIPSTHKDEVYKTDSRDARGIGESLSKGQLRGVYVPDEEQEADRHLVRQRKKIWRDLVRCKNRIKGFLDYKGIEVPPQYDNANWSRNFISWLSQLEFAHSSNRVTLDYQLTEMELLRKELLSVSNAIRKLMRSKKYNRLYYLLRSVTGIGPLTAASLLTEIGDMSRFKNFYHLNSFIGLLPMEHSSGERELKGRITVRKHRQLRSDLVECAWTAKRTDPALALYYSEQIKRGKNGKAAIVKVARKLLSRIRYVWLSGEPYQPSVVK

SEQ ID NO: 186906 - protein, 374 aa, unidentified
MISSDGGVLNDVFTIQNNIDGCEDLFFKIKTASKDLGKVKVGLEATGHYSCNLLGFLKKRGLTTILLNPLYTSQCRKSISLRKTKTDKVDARTIASMIMSDVSLKPYSNILYHNEDLKSLTRYRFNKVSERSKLKQSVSRLLNILFPELDKLVSTVHLKAIYTLLSEFPGATYIASANLKHLTSLLERASKGHFSKDKAVEIREAARRSIGSHFSAKSLELKHTIKLISELSAQIREIEAEIKKIMDAINSPVLSIPGISYATGSMIVAEIGDFARFDSPDKLLAFAGCSPTTYQSGQIYSSHASMEKRGSKYLRWALINAARFVCNWEPTFAAYLEKKRSEGKHYYVALSHAAKKLVRLIYHLETTGERFIPS

SEQ ID NO: 186907 - protein, 482 aa, unidentified
MKKKTIYSNQSQELLRLFEEAGNNSKMMCVPIDYAKKDHIVMFCNGYGDILRKPFSVKNSPEGVKYLTEQVRRSCRHRGINSKHVFLGGEDVGSYAENFVNTLRVKGWIVAGVNAHDAKKQRANIQASTDRLDLMGIASMLLNRRANCSPAQSGIYRNLRTLVRHRRKLVVMSTEIRNQIHTVVDRLFPGFLDERKTGIVPFTNSSLYLMENRFSARQIHRRKRDRLIEILKRNGTSKPELTAAKLQEYARQVLIPPKEYMSTLQLSLAQHVKHFRCLKENIKQVEREIALWLSQTQGAFLTTIRGIGIVLAAGVTAEIGDPSVQKPLNNLASYAGIIPRVKQSGGVEGKTFTGKVAKRCNRILKDYVVKSGLHLGLHGPQDLMADYKRRDAAGQHADFGMARRYLRMAMCLMRTSQIYLPSRLRKKGVDVQERSSYYLMTWPYIREKWYKLGALEATFEKDRPLGQWRYRVQELYEIKLKL

SEQ ID NO: 186908 - protein, 423 aa, unidentified
MPYRIAGIDVHKKKLAVVVAELELGGETQFERRWYGSHPEQLQALAAWLIERQVEEAVMESTAQYWKPVWGALERYWQPVCQKQETAGPKSGTLHLAQALSNRGRRGRKKDFVDCERLIKRLVSGELTLSFVPSAEQRLWRTVTRTRYQLTCHRTRLQNQLEALLEEAHLKLSSLVSDLLGLSARRMLEALADGETDPAAIAALAHQRLRATKAQLSDALGACRKLNPMYRRLIKLALQGLQVIEQQIDQLDQEIASLLHGHQHAVERLAEVPGLGIDSAHQIIAEVGAKAETFESAKNLASWVGACPGEEESAGVNRSARSPKGNRHMRRVLNQCANAAVKRKGSIFEILYRRLVLRLGHKKTIGAIAHRMCQLIWIILHQGVRYEERGPAVSEQSKRTRTARMIRTLQRLGYRVELSGNPA

SEQ ID NO: 186909 - protein, 342 aa, unidentified
MNLPIRIGMDTSKSVFQLHGVDENEGVVVRRQFRRAEMIRYFERLPPVLVAIESCGSSHHWARLLQSFGHEVKLIPPQYVKAYVKRGKNDAADAEALCEAVTRPSMRFVPVKSKERQAACMLMTVRERLVSVKSQLSNAFRSYAAEFGIVGPAGRQNVTALIKRVLEDDSLPEMARDLFRLQAEEYAAVQARLAKIEAKLMKWHREDDVSRRIATIPGVGPIGSSMLSMKAPPPETFRSGRDFAAWLGLTPKDHSTGGRQRHGGITKAGDSVLRSTLIVGATALLRHIRKGRHKPTLWLASLLERKPPKLVAVALANKFARIAWRLMISGGVYNRPVAAMPN

SEQ ID NO: 186910 - protein, 487 aa, unidentified
MGQRISNAAYLLVSQSILSVAIHDLAGWEPTGESLYHALGRDALEKEGIPVLRRNIMEQKRQPYLSVGIDIGADFSLMASALPIQEIIGKPYKILHSSNRSVQGAVERILSTGRAYELPVRVYMESTGIYHLPLYHRLKDAGLDVYVLNPLVTHANQNINIRNIHNDKLDARRIALLGLRPDLKTSIVPADEVAAVKALLREYHAMKKETSMYICRLKNQLRQIFPQYLPLFSKVNGKASLEVLSRYPSPGAVLSAGADALAKLIREASGKGAAMAEKKAEAILSAARESLSFGHGNSGITFLIGHYVEMIRILDEKTAAILKQIKHSVQDQPDSLLARQTRLLESIPGAGFLTAVTIVCEIGDFRAFRRPKQLYSYFGLDPVVRQSGNSAGANLRISKRGSPYARRCVYILALQSVSLRKNGEPKNPVLRAYYLEKCKSKAKMTALGAIMHKLCNIVFAVLRNEKPFMLISPQEHRHNYLSLPKAA

SEQ ID NO: 186911 - protein, 410 aa, unidentified
MEPILISCAGMDVHEKKVVVSIAHGPLDKPPVFEIRTFSTMTSDLEDLKSWLKEYGVTTIAMESTGVYWKPIFNIMEDDFDVVLANPIHLKALSQNKTDLKDSKRIAYFLRHGLIPRSFIPPRVIRELRDLNRTRRKFVGMMTSEKNRLDKVLEDANIKLSSVVTKICGVSSLKMIHALLAKDKLSREEIAEMAKGKLKKKVPILEKALDGKITGHHRFLLRMHLQNIQYISKQIELLDAEIQRKMAPFQKESNLMQTIPGISEVSASAILAEIGADMSQFPDEAHLCSWAGVSPGNNESAGKKKSGKTRKGNSSLKATLTEVAWAASRTKGSAFNAIYHNIAKRRGKKRALIAVAHRILIEIYHVLTNGEPYQDIGFEVAHERAIERRERAMIRSLEKAGYSVAKAATA

SEQ ID NO: 186912 - protein, 342 aa, unidentified
MYYIGLDVHKKTISYCVKDASGLICQEGKVGATRWELDIWIKTLPQPWTVAMEATIFTGWIYDHLKPHAAAAKVAHPLMLRAIAAAKKKNDSIDAAKIADCLRCDFLPECYMAPTEIRERRRTLRYRHLLVRQMVQMKNRVSGLLMETGVSHNKQRLHKVGYFPELLANADAVSASIRPLLLLSRESITRLQSTEGAIIRSLQRDPLLAERVRRLQTIPAVGKVTALSWALEMGDISRFRSIRQAISYCGLCGDEKRSADKVARTPISKQRNKHIQRVLVEAAKLAPRRNSDLALVYENARQKGNANCATLAVARKLVAYLMVVDREQRDFEPVRGLAGIAA

SEQ ID NO: 186913 - protein, 350 aa, unidentified
MLIIGCDYHPGFQQIALVDTETGELEERRLAHREEAEQFYQELKQRNVAVRVGMESSGHSRWFERLLRQLEFELWIGDAAEIRTKRVRKQKTDRQDAQLLLRLMMEDRFPRIWVPDAANRDMRQLLWHRHRLVQMRTRVMNQLHVVALNEGLRRKKALWRASGRQELESIALPPWATRRRQDLLDLLDQLTPKIQELTRLLEEEVEKRPVTRRLMTHPGVGPLTALAYELVIGTPERFHCGKQIASYVGLVPEEKSSGDRRRLGHISKQGNVLLRFLLVEAAQVTVRSQAEWRSKFFHLAMRRGRKIAKVAMARKLAVHLYWMWRQGRDYGQLQKLGSRAGEPGHRDGVQ

SEQ ID NO: 186914 - protein, 381 aa, unidentified
MTTAVTHKTNVHTTEATLFVAFELSEKIWKLGFTMGHGQKPRERNVTARHQERVLDEISLAKHRLGLPETAPVVSCYEAGREGFWLHRFLLAHGITNHVVDSSAIEVSRRQRRAKSDGLDVRKLLSMLIRYEQGEHQVWQVVKVPSVEAEDQRHLHRDLETLKRERASTTTRIQGLLSSQGIQVSTLAKLPEQLDTLRLWDGTPIPPGLRRRVLRVYAHHTFLNEQIAAIEAERRAQLQTSSDASIDQIRQLMMLKGIGINGSWLLVREFFGWRAFKNRREVGGLAGLTPTPYQSGESAREQGITKSGNPHVRWMITELAWSWLRFQPESALSVWFRARFGDGGKRLRRIGIVAVSRKLLIALWRFLETGVLPEGAVLKEG

SEQ ID NO: 186915 - protein, 363 aa, unidentified
MSESTTVTVGLDVHARSIRLAVVRADELLEERTLPYDEEQVELLLRRWPAVRCCYEAGPTGFGLYRHLVERGIDCAVVAPGLVPQRPGDRVKTDPRDARKLARLHAGGLLEPIYVPSPELEAARDLVRAREDARLDRMRDRQRLSKFCLRHGRLLPTSSWTVFRRKWLGEQRFEHAGEQITFDTYLHAVDLVDRRIEALERAIRETAEQGQWRERVARLRCLRGIDTLTALALVVEIGDFGRFRSAEEFMAFVGLVPSERSSGEQRRQGSITKVGNAHVRRLLVESAWHARRRPTVGYQLARRRRGQDAAVIERSWRCQQRLYQRWQRMAGRGKPHQKIVVACARELAGFVWAIATDQPLRTI

SEQ ID NO: 186916 - protein, 367 aa, unidentified
MKKISTAAAKQNRNFSEEKLTIGLDLGDRSSWYCVLDEAGEILLEQRLATTPKAMNEVFRGMPRCRIALETGMHSPWVSRVLMELGHEVIVAHARNVRLIGESRKKDDRLDAQTLARLARIDPQLLCPVKHRSAKAQADLTVIRARAGLVRARTALVNTARGLAKSYGERLRGCNVRNMNPAKAAGLSPELQTALEPLLAGIESLSECIREYNERIEELAQESYPQVALLKQVKGVGTLIALTFLLTLEDPHRFRKSRDVGCYLGLQPGRRNSGQSEPQMHISKEGDPYLRTLLVQGAHHILGPFGVDSDLRRWGLKLAERGGRNGKKRAVIATARKLAVLLHRLWISGEAYEPLRNSDQRAMPTAA

SEQ ID NO: 186917 - protein, 347 aa, unidentified
MNYIGVDCHIASLDFAVVNEKGHTTRRAKVETSVKEFMKFVKNIPKPRRIFIEEGELASWLLETSLTFGEELIITDPKTNKWIGKSGQKDDAIDAEKLAQLARGRYIKEIYHPVNNRRRFKELVYAYHDTVKSQTRIKNKIKAKFRREGIRCSGDTVYSVKYREEWRKKLPGNKVVHLIVNELWGQLDQIQNAREGLKRNIRIHGKQYPEIKRFRNVPGIGLIHASTISAIIETPHRFANKKKLWMYAGIGLAERRSGEKVYSRRLTREYNRLLKNSVKQASEAAIYSKDNQFRRQYLRLTIEKGIPSHKAKLTVARSLLAALYGMWKKGEAYDPEIDNKRRKENKK

SEQ ID NO: 186918 - protein, 368 aa, unidentified
MSVYVGIDVHRKRSQVAVIDAEGGVLANRNVPNGAEPILKVIGGLPPGTPAAFEACYGTSWLVELLEDYGFAPHLVHPSRCKAIASARLKNDKVDAAILGQLLRADLLPEAGIAPPPVRALRALLRHRVALVRLRTRLRNRIHAIVADYGYDRPAGGYWTGPGRAWLASLQLPAVSRELVEDDLGLIGALQDRIDRLDWGIRQRARSDPRVKVLTQLPGVGPFTALVILAEVGDISRFASARKLASWAGLTPTVRGSDRVAHYGHISKQGSVWLRWVLCEAAQTAKRSPEFAGTFQRIAQRRGKKIATTAIARKLATRAWHLLADAEHAAAATRRAPGHGTVTDPGGGRMAPGELADQPEPAPPRSNN

SEQ ID NO: 186919 - protein, 338 aa, unidentified
MIVIGLDVHKQSVTAVAVDEAGRPVIETTIQVGSDELLGWASGLDGERLWAVEDCRQLTRWLERQLLAVGEDVVRVPPKLTVPERRAGRTRGKSDPIDALSIARAALREPDLSRPQPGEQVHREIKLLVDHRDDLVDQRRRTQQRLRWHLFQLDPTYLVPLRMLSRASHLERVARWLTRRQPELQVRLARELVTSCRQLNRAIAELDQELEQRVRDTAPGLLELPGCAAVTAAKLLAEIGPIDRFRSDAQLARHGGVAPLEASSGRTQRHRLDRGGNRQLNAALYRIAITQARYHAPAREYLERKRSEGKSRREALRCLKRLLVRVVFNTLKTSPALT

SEQ ID NO: 186920 - protein, 337 aa, unidentified
MERQYVGIGLHRRTSTIYRMSEDGEVLGCVRIPSQPFELAQAIAEAGEAPEVVLESTYGWYWAADLLKELGANVHLAHPLGNNWGNRRVKNDERDAKDLAAMLRLGRLAEGWIAPPEIRELRELVRYRYHLVSHRSSCKTQIHGVMAKNGILPARKEMWGEGGYAQLDSLELPYAYAARIDSLRDLIEIYDREIAVFDQYIHRQLKDDPGYRAIQKINGVGRVIGAIFVAEIGDISRFNSPKKLCSWAGLTPKHRESDEKVTRGRITKQGCPLVRWAAIEAVSKYRGGEKLRADYFRIREHAGKFKARVAVARKLLTLVYYGLRDGEIRSLEAQEAA

SEQ ID NO: 186921 - protein, 377 aa, unidentified
MKRIKFVGLDVHAETIAVAVAEQDGEVRSLGVIPNREESIRKLVKKLGPVEQLRFCYEAGPTGYVVYWQLTALGAKCEVVAPTLVPVKSGERVKTDRRDALKLARTYRAGELTPVWVPDAAHEALRDLVRAREAAKKDQLRAKHRLGKFLLRHGRRPPTGVKPWTLNYLSWVKHEVHFEQMAQEATLLDYLNEVEHAELRIARLNLAIEEAVKLTPPKMRAVIQALQALRGIAQVAAVAIVAEVGEVSRFTRARQLMGYGGITASEHSSGEGSWRGGITKTGNAHLRRVVVEAAWAYRHRPSLGVALRKRQEVVSEEISEIAWKAQHRLHTRYRKLTARGKDKGKVVTAIGRELLGFIWAIGVKVEAAQKLTDRQAA

SEQ ID NO: 186922 - protein, 449 aa, unidentified
MKRKARNKKRIQEHLEQVNLYAAGIDIGSTSHFVAVPPSLDDRPVREYSCFTGDLEHMADWLKDVGITTIAMESTGVYWIPAYELLEERGFEVCLVNPRHLKNVPGRKTDVLDCQWLQQLHSFGLLRGAFRPSGEICAFRAYMRQRSMLVESAATHIQHMQKALRQMNLLLDNVVSDITGKTGMTIIRSILSGQRDSVILARHRNSNCKNSEEVIAKSLKGHYKEEHLFSLRQAVELYDFYQHKIANCDQAIAMALDKIEGPDDLDELPPKKSKARRKNKALPFDVRQNLYNITGVDITKIDGVKETTALKIISEIGTDMSAWPTAKNFASWLGLSPGNKITGGKVISSKTKTCANRAAEAFRIAAYSLTKSKSAFGAHYRRKRSQLGPPKAITATAHKIARLVYFLIKYGAEYVDPGQDYYEEKYRDRIIKNLQKKAKSLGYEMVSQS

SEQ ID NO: 186923 - protein, 354 aa, unidentified
MAEKLNSVIAVIGIDIGKNSFHVVGLDARGAIVLRQKWSRGQVETRLANMPPCLIGMEACVGAHHLSRRLKLLGHDARLMPAKYVRPYSKGQKNDFRDAETIAEAVQRPMMKFVATKSADQLDLQALHRVRERLVSQRTGIINQIRAFLLERSVAVRQGLRFLRAELPGILATRCDVLSPRMIRIVEDLACDWRRLDERIEGLSGEIDALARQDAGCERLMSVPGIGPIISSAMVAAIGTGDAFAKGRDFAAWLGLVPKQISTGDRTILGKISKRGNRYLRVLFVQAAWVVLIKPKSWERHGLKPWIAAAKKRLHHNVLAIALANKLARIAWSVLARGRAFEARTINGAAVQPA

SEQ ID NO: 186924 - protein, 323 aa, unidentified
MLIDRHDKVRFQKRLPNDAAYILETLHPYRSQLQGLAVESTFNWYWLVDALQEAGYPVYLVNTAAVKQYEGLKFTDDSSDARWLAHLLRLGILPQGYIYPKEERAVRDLLRKRAQMLHQRTTNVLSIGNFLQRNTGSSFAGGRIKRLTEETVDEVLPETDLSLAVKCNLRVMQCADEQVAELERVVLERVKLKPAFKYLRSIPGIGRILALTIMLETGDIGRFPNVGNFASYCRCVESKKLSNSKKKGEGNRKNGNRYLAWAYVEAANFAQRYDSSIRRFYQRKQAKTHPVVAIKTVAHKLARASYYIMRDQVPFDMAKAFGG

SEQ ID NO: 186925 - protein, 405 aa, unidentified
MDAATPSRVAGLDWAPRLHAVCVLDPDGQVRARFDVPHTGTELRGLTRRLVKLGVGQVAIERPDGPVVQALLAAGLGVVVIPGRQVKALRGRYGTAGNKDDRFDAYVLADALRTDGHRLVPLVPDAPETAALRVVSRARKSLVATRVALANELRANLEIAFPGAATLFSDVDSPIALAFLRRFPSVTQAAWLTEARLAAFLRRMGYPGRKAAGELLGRLADAPAGLTGPEGEARAMVTLGLVAALDTVRAQIEELEGEVVERLGTHADAAIFTALPRSGRVRAAALLAEIGDCRARFPDAESLTCLAGAAPSTRRSGKHKKVVFRVACDKKLRAAVMDFAGDSRHDNPWAAHVYQQARARGHRHAHAVRILARAWLRVIWRCWQDHTPYDPARHGSYQRLIAQQA

SEQ ID NO: 186926 - protein, 336 aa, unidentified
MQITTIGLDLAKHVFQVHGVDANEAVVEKRRLRRGQVLGYFAKLAPCRVGLEACATAHFWARELRRLGHEVRLIPPQYVKAYLKRGKNDAADAAAICEAATRPSMRFVPIKSEEQQAVLIMHRARDLLVRQRTQLINALRGHLAEFGLIEAQGPSNVRRLLAGMRTDLTVPELARETLDLLATALEAVDAQIDAVEAKITTWHKANPTSQRLATIPGIGPLIASAITATVADPAAFRSGREFAAWLGLTPRQKSTGGKQRLGRITRKGDQYLRRLLIVGAQTVLLRSKAAKANLWIQGLLARCARLKVAVALANKTARIAWVVMIRGECYQPVAAA

SEQ ID NO: 186927 - protein, 356 aa, unidentified
MGGDGLGDDLLGADTALDTHKDLHVAVALDGLGRRLGSTAVATTAAGYAMVVGWAETFGEVEAFGVEGTGSYGAGLARHLRSAGHHVIEVVRPNRQARRRNGKSDPADAEAAARAVLSGEANGHPKSGDDLVEMIRVLRVARCSAMKARTQAVNALKSLVVTAPVELRQQLRGLSGTKLVAAAARLRPSPEATTTSANKTALRALASRYQALDAEIDALDAQLDELTTQASPKLTEVFGVGPEVAGALLVAAGDNPDRLRSEAAFAMLCGAAPVEASSGKTVRHRLNRGGDRQANAALYRIVLVRMRHHAPTRAYIERRTTQGLSKPEIIRCLKRYVAREIYAILHDTVIAAATAT

SEQ ID NO: 186928 - protein, 312 aa, unidentified
MDATIVGIDVAKDRLDVCVRPSGETFVFDRTTASVLELAQRLKAFAPRIVAVEATGGFETIVAAGLAGAGLPVLVVNPAQVRAFAQALGRRAKTDPIDAAVIAHFVEATKAEPRALPDETTRLLADLIARRRQIVEMMAAEGQRDRRLTEKRVKKSIARLRKALEKELTELDAEIDDHMRGSPAWAEKENLLASVPGVGSIVARTLIAELPELGSLDRRQIAALVGVAPWTRQSGQWRGKSFIGGGRKSVRSVLFLAAMVASRHNPPLKAFRDKLVAAGKPKRVALIAVARKLLTILNAILRDKRPWQPKTA

SEQ ID NO: 186929 - protein, 475 aa, unidentified
MPIQRGKELFVLKHNTMDKGRPKKQKTKNIVEMPIVNPYSAGIDIGDKEHVVAVPEGLSDKRVVAFGAMTPDQGMLASWLEECEIDTVAMESTGVYWKPLFQLLVSRGFEVYLVNAAHIKNVTGRKDDENDAMWIQKLHSCGLLGSSYLPGGRQDELRTPTRYRRTLTEDCSRFVNRMQKSLELMNIKFHTVINDITGKTGTAVIEAIIGGERDARNFLPFIDPRIKASPGTIVKSLEGHWRGDHLFTLKESYAMYKIYKERTAACDSEIEKHLPCWEAACNEGEISAKEEGAEEAPVKKAKKQKHKNHPKFDTRAYLEKIHGVDVLAIFGLSETSGLELLAEVGTDLGKWKDEKHFVSWLNLCPNNKISGGKLISSRLFDKHPNPASEAFRHAANALQKMDNWLGDFFRRMKAKGGNKYAIVATANKLATIYYKMVRFKEEFTPIGITDYRAKYKQAKISYLERKLAQLKAEAA

SEQ ID NO: 186930 - protein, 396 aa, unidentified
MYYVGIDVSRHHHDATAIDATGQTVIAPFRFLNTRQGVNTLLARLQTLDGRVNIAMEATGHYWLPLYEALVAKGYSVSVFNPFQIKAYRQIGLRKTKTDAVDSLWIADFLRIGRARPMVVPSPAIRQMRELARFRFSLLQRQANIRRRALTILDRVFPEYRTLFPRPFSPSSRALLRRAVAAETFAAWPPEDLAQTLRQASRGHFGPEQARQLLHLAQNSLGIRSLGAVANQEMQFLLDQLALLDDQINTLDEELDRLLQQTGTYLTTIPGLSTTLAATILGEIGDIHRFTTLKQLVAYAGLDPTVHQSGQFQATHSRLSKRGSVYLRRALWMAASVARQYDPDLKAFYQRKRLQRKHHSVVIGAVCHRLLARIYVVLKEQRPYEIRTPDTNHSTT

SEQ ID NO: 186931 - protein, 428 aa, unidentified
MSQKNYIKQVQKRQRIKRTTLVIGIDVGRSFNAAAYMDKEGNILGKFPKVYNSRQGFDFFVKVTEQIKRKHGMEDVLIALEPTGHYWRNIAYFSKEKGYDVQFIRTTSVKNQRELDDSSSAKTDIRDALTLANLTREGKYIDTVIEDGIWRQLRTVVKVREKIRKYNISAKNTLQSALDNYFPELRKIFWSVSTKGIWAILERCPFPEDVLKVEVSELREIIGKASRRKKVALEKAVKLHGAAKESIGIKEIGQSDRYRVKKCLQEVKRTEGLVKESEKKIKGLLKQIEYTEYLLSIPGVGPLSAAVVLGELGNPSHFQNARQMIKYAGYDPQENDSGQRIGRKVISKKGRWLLRKCLYFMCLRVVMKTRFFKEFYQRKLEKRNRFGQNLKKKEALCAVTIKLIKVIHALLRDKRCFYDTVSCLAKAA

SEQ ID NO: 186932 - protein, 344 aa, unidentified
MKITTIGIDLAKNIFQVHGVNEHGKVATRKKLKRAEMFPYFANLPPCLIGMEACGSAHHWARKLEGYGHTVKLMAPQFVKPYVKTNKNDMADAEAICEAVARPNMRFVPIKNVEQQAILSVHRARQGFVKARTAQANQIRGLLSEFGIVIPQGIHAVMKQIPEILEDAENDLPGTFRQLLARLAGNLKDMDRQVAELEKQINLWHRENEASRKLADIPGIGPITASAIVATVGKAQEFKNGRQLAAWMGLVPRQSSSGGKQNLLGISKRGDTYLRTLMIHGARSVIYHAENKAEPDSWLRKLMGRRNKNIAAVGLANKNARIIWALLAHDRIFHPDYTPAAAAA

SEQ ID NO: 186933 - protein, 373 aa, unidentified
MKEFSKYVGLDVHKDTIAVAVAEACGGAPRYYGEISNTPEAIVKLVNRLSLGGEVVSFCYEAGPCGYGIYRQLRALGHVCEVVAPSLIPSKPGDRVKTDRRDGESLARLHRAGELTPVWVPDREQEAIRDLTRAREDMKAMERQARQRLNAFLLRHGKVYGAGKSKWTQAYFRWLEGIKFEIPVQQIVFEEYVDTVKQVQRRVADLEQEMHKALVDWELAPLVEALMALRGVKLVTAMTVIAELGDISRFDSPRQLMAYLGLVPSEYSSGKCKRRGGITKTGNSHVRRVLTEAAWCYRFQARKTAHLQRRAEKTSAAVQAIAWKAQKRLCGRYRRLLARGKLKVQVCTAIARELVGFIWAIVCEVMGRAVVMR

SEQ ID NO: 186934 - protein, 358 aa, unidentified
MNYIGCDCHISSLDFAVVNERGRTTKKQRVDTGVKGLMEFVKSIPKPMKIIIEEGTLASWLLEICTDYGEKLIITDPKTNRWIGRAGQKNDSIDATKLAHLARGGYIKEIHHPIGDRRRFRELVMSYHDTVKSHTRIKNKLKAKFRQNGIRCSGETVYSTKHRKEWKKKLPKNKVVQVIVEGLWQQLDQIHEVQEELLSHIRRQGRNYSEIKRFKKIPGIGTVHAATISAIMENPHRFAHKKKLWMYAGFGLAEKASGGKVYSRNLTRDYNRLLKNALKQATEATIIAKDNQFRRQYLRLTIEKNIPSHRAKLTVARSMLATMFGIWKSGEDYDPDIDKRRLESDKTQVRAYHLVRSG

SEQ ID NO: 186935 - protein, 416 aa, unidentified
MKKNTNSAMKKEPKAKRAKAQRLVQRERKEVLAELVEKLQGKLAVKATSARQAEAGARGELSPNLNRLTVGLDLGDQWSHFCILGLHGETLSEGQLQTREAEVAELFQAIPPARVVMEVGTHSPWMQEVIAGEGHEVVVANPRLMEGSKRRKRKNDRIDAKKLARLGRVDPQSLYPIRHRSREVRQDLVVLRAREALVAARTELINATRGLVKSMGTRLPKCSSPSFGQKVKDAIPEKVREALLPLVQFADALSDSIQSYDQKIEELGSEKYGHTKLLRQVKGVGPITALAYVLTLENPEHFAKSRDVGPYLGLVPKQEDSGESQPQLGISKTGDTMVRKLLVGSAHYILGPFGPDTDLRRYGLRLCERGGKNAKKRAAVAVARKLAVLLHRLWVSGEVYEPLGYAASRAIVQPAA

SEQ ID NO: 186936 - protein, 457 aa, unidentified
MAASNQANTMAKRRNKNKTKHLLAQNIHTNAAGIDIGAEELVAAIPQERDDRPVRSFGTFTEDIHSLCKWLLSAGITTVAMESTGTYWISPYEILEDAGIEVCLVNAQHVKGVPGKKTDVCDAQWLQQLHTAGLLKASFRPTREVVSVRQLVRHRSNLVKDTSRHLLHMQKALTEMNLKIHHVFSDLDGASAMRIIEAILDGQRDPEVLWKLRDIRCRTSRTTFFKAIQGDWQTSQLFILKQCHQAWKQTREAITQCDDTIQELMTEVPSETQEQVPKIPRSRTKNHMCFDVYQEAYRFYGVDLSSIDGISAGVLPVIMSELGNSQDILSNFRSGKALASWLGLCPDNRISGGKVLGSKTRRVSNRIANALRMAAQSLTHANSALGEHCRRMKARLGKTEGTTAVAHKLARLIYALIKSKEPYDESKAFQTTGKVRERRLKKLKKLAESMEMKLIPA

SEQ ID NO: 186937 - protein, 423 aa, unidentified
MEMMHERVAGLDVHKATIVACVRLGTGRKVTRECRTFDTTTDGLLALLAWLVESRCSHVAMEATGVYWMPVWKILSEGDFVLIVANAAHIKNVPGRKTDLNDAMWIADLLACGLIKSSFVPEEDVQELRSLLRTRKQLGREQTRHVQRIQKTLAEANIKLDSVLSDIMGASGRRMIEAMIAGMRNPRQLAALAGAQIKATPKQLYDALHGRLTDHHRFLLRLHLRQWDGLDATIREIDLEAEARIARMDKEVSAGAAPFCDLIRLLCTIPGVSTLSARTILSEIGRDMSRFPTAGHLVAWAGLCPGQNESAGKRKPARLRKWAPWLKTMLVQCAWAAKRKKDSYYKAQFFRLQSRRGPQKAICAVAASILTAIYHILKDGTEHHDLGSHHFDRHSAEGKTRRLVAQLIKLGFEVQLQRTAEAA

SEQ ID NO: 186938 - protein, 371 aa, unidentified
MKQTIRSFVGMDVHKATISISVAEDGRSGPVRFIGVIPNTPEAVGKMAKQLAKHGELDFCYEASGCGYGIHRQLTHLGHKCTVAAPSMIPRRPGERIKTDRRDSEKLAILHRSDDLTPVWVPDTTHEALRDLVRARVDASMHLMRARQQLLAFLLRHGRSYPTGNHWTQRHRCWLAGQTFQEQAHGIVFQDYLETVWAAQERRDALVKRISAMVATWSLGPLVEALRGLRGVDLISAATFIASTGDLSRFESPRLLMGYLGLVPSEQSSGGTIRRGGITKTGNREARRMLIEAAWSYQYPARIAKEKAEILVRLPKSIRDIAWKAQTRLCSRYRSMIARGKKPTVVVTAIARELAGFIWAIGREMRIPMTT

SEQ ID NO: 186939 - protein, 326 aa, unidentified
MVSSSLLPVVGLDVSKATLAVCYQLDRQVHHLEVSNDKAGFAQILQVCGVQSLFVMEATGTYYLALAYYLHEQGGQVAVLNPLVIRRFIQMHLGKSKTDRKDAHWLLRYGQQQVVKPWQPDESVLVECRQLEQVTEQLLKQKTMISNSLEALQRQPVISPLAQQRLQQTWQLLDDQVQDLEAELLTLLETRFSQEMQLLRSIPGIGRKTAGLLLLFAGGFTRLDNYRQLIAKAGLSPRECTSGTSVRGKVRITKMGGGLIRGKLFMCSFAAIKFNKTCKALYDRLVAKGKNGKVALIAVCNKLLKQAFAIVKSGVPYQADFARIPA

SEQ ID NO: 186940 - protein, 304 aa, unidentified
MNGIGIDVSKRQLDVGTTDGKTLQVSNSRSGFAELDLWLQGHPAVQIVLEATGGYEQPVLDFLHNAGHPVVRANALRARKLAQGLGHMAKTDRLDAYALAKMAALVKLRSYQPLEPWQREMRDFVRARRQAMHALTVARQQQEMVGNRELRRLLQANITCLQRTVERLGKRISEQVSKQPQLAVLKSMKGVGPGLQAVLASYLPELGKISGKAVASLVGVAPMSHDSGTMRGKRSIHGGRAEIRQVLYMASMSAMRHEPRLRDFYQSLRARGKEGKVAIVAVMRKMLVILNARMRDAQSRPIPT

SEQ ID NO: 186941 - protein, 497 aa, unidentified
MPTKSTIYSRCNPQLLKLFEEAGHPAKVLCVAMDYAKAQHTALICNGRGDLLKPSFAVENTLQGATQLLAEVRACAKQKKIRPEHVFFGGEDYPSYAENFLRNLRQEKFLVVRVNAWEAKQQRDNFQASSDSLDLLGIARCCLNRRGESVRDLPEAYPNLRIATRDRDKLVRMRTAVSNRIHSYVDRLFPGFLSVSKSGLDPFSKASLELMEDRFSPAQLSRRPRQALAEWLGRRGVVQPQDKATQLKQLAKDVLEPAPEQTVMLQQTLAQLVGLYRGLEQSVAKLDREVAHWLARTPGAWLTSVPGFGITLAAGWTAELGPPRQWRSVRQLCSYSGVVPKSKQTGGPQKGPVVGAVQQRCNKRLKNVVLQAVEKVIRFGPEELRRTAQELEARGAHTEFAIAKRLVRLGKYLAVTGTVYRPKAMLDPDTPKTTLAAHYQTVWEKLLPKWREKADLGDVFAPEQPLGQWRKMVQELYALELRLPQQKAAQKSSAVAP

SEQ ID NO: 186942 - protein, 342 aa, unidentified
MAIAVVGLDLAKHVFQVHAVDETGRAVLRRQLRRAGVEAFFKILPPCIVGIEACASAHYWARRIAALGHEVRLIAPAKVKPYVQRGKKNDANDAAAIVEAVMRPHMVFVPIKNEEQQAVLMLHRTRDLLVRQRTMLVNAIRAHLAEFGIVAAQGRRKVKELIAGLDNTEMPELARIALWQIADQIDECDKRIDALERRILAWHKSNESSCNLATIPGIGPITASAMAATVPSPSAFRNGRQLAAWLGLVPRQNSSGGKDRLSGITKTGNTYIRRLLVIGATSVIRFARSKAPGTAEWLKKLLERKSARLASVALANKMARIAWSVLTRGEVYRDIHPVPKPT

SEQ ID NO: 186943 - protein, 347 aa, unidentified
MLHAGLDLSRRKLDVCLLSEQGEHVDQLALPPDVDSLRTLARRIDGVHGERVCAVVESMTGARLVHDTLEQEGWSVEIADAQKVKGLAPLACKTDKIDSMVLAVLSQRDLVPAIWLPDPWVREERELARFRMHLVKHKSALKNRVHSTLINFGRPCPVTDLFGAEGRRLLERLDVPEPWRGNVTASVQLIDDLERQIAEINRRLKHGHAEHPYVPLLLSVPGIGWVLAFTIAAEIGEIERFASPEKFVGYTGLCPRVNQSGEKDRRGPLTKHGPTYLRWALLEATMHALRHPAYAERYQRTKRRLGKQRGAKVAQVDLARRLAHAIWHMLTRNQEFAPRGAAFRLAA

SEQ ID NO: 186944 - protein, 391 aa, unidentified
MAMYFVGIDISKYKHDCCIISAVDQKIVSKLTVKNDKAGFEQLLTVFNSLSNPDNIKIGFESTAHYALNLELFLENAHHSFMEINPLLIKEYKKSTSLRRTKTDSVDCESIARWLMTVEYKPHSKGFYHSYSLKSLTRLRDRLIRQRSFYLVKITNVLDHTFPEFKPFFHERLSKTALYLLENYGSAEKMVKMNSAAYEKLRSLSRGKFSPQQFIRLKELAANTVGVNNSIFDVELNSLLALYKSLIKEIDTLEKEINRLIEEVHPHYMSVPGIGPISAAVIYSEYGDISNFSTPAQMLAFAGIEPGINDSGTESHGGRMVKHGSSQLRYVLINCCLPLIRFDMTFAAYYDKKRGEGKPHRVAVTHVAKKLVRVIYALERQGVDFNALKLR

SEQ ID NO: 186945 - protein, 355 aa, unidentified
MNSVKYVGLDVHQSTISVAVLNGEGKLIMQSVLATQAAAILDFLHGLSGSLQLTFEEGTQSAWLYDLLVRHVAHVVVCNPRQNVLLKAGSKNDAIDARKLAELLRGGQLSPVYHGEHGTRGLQELVRSYAALTEDTTRVMGRLKALHRGRAIGCAGKKLYGTRHRGEWLSQLREAGLQRRAERLYQELDGLQQLRRQARQEVIAECRKHGAAKLLRTVPFLGPLRAALLIGRVQTPHRFRSKRQFWAYCGLALETRSSADYRFQSGQLVRSKKPGFIRGLNLNHNHDLKNLFKSAATTASGMPGPFREFYQALLAKGMQPAMARLTLARKIAAITLSLWKKGEAFDAEHLKPQAA

SEQ ID NO: 186946 - protein, 351 aa, unidentified
MVMIGVDYHPSDQYIAFADSETGECGERRLNHGDGEAEKFYRELKLRAVEVRVGMEATGYSRWFERLLAELGIEVWIGDAAKIKTKRVRKQKTDRQDAQLLLKLLLENNFPRVWVASPENRDLRQLLWHRHRLVQMRTRIMNQLQALAMNEGQRRKKKLWSEQGRAQLEKLPLATWASRRRQDLLELLDRMNPTIEALSAAVEQKAKKRPEVLRLMTHPGVGAITGLAFVMIIGTPERFPCGKQIGSYVGLIPSEDSSAGRQRLGHISKQGNALLRYLLGEAAQAAARCDADWRRRYVHLAMRRQRNIAKVAMARRLAVRLYWMWRNDWEYSQWVKFSSHAGQLATGHGVN

SEQ ID NO: 186947 - protein, 369 aa, unidentified
MAFFIGVDLHKTQFTVHVRTEEKVESLDQIKQYPTTTAGYAEFLSRIETYKATGAAVKIGVESTGNTRFFKNQVEKAGAEVTVINTLKFKVINESTKKTDKHDASTISEFLSKDMLPESYLCGKETENIRRLLKSRERLVRSTVGQKNEIHALLVSLGLSDELRSLQSKKGRQRVLDTLESNNDYVLEAQSVKLMFEIIERIEESVKIIEKQISELTKDDEMVNRLMTIRGCGKITAWTVRAYTEDISRFATAKKYAAFCGLVPWVQDSNETIHHGKITKRGPQELRTCFVQLVMGIRRCKDTSEWRMMQRYEYMKKNKGSGKSIVAAARKMAEIVWAMLNDKQDFDSAKMIGKYKPMILADEALTAMN

SEQ ID NO: 186948 - protein, 448 aa, unidentified
MSERTIACEAPCISMTPDGTAVRATKGKHMKPWTEITHYAGFDWARNHHDVVIVDRTGHRVADLRFDHSLAGWQQFREHIKNHPALAVALETSQGAAVDQLLQLDCTVYPVNPFSAKSYRQRKVPSGNKTDQLDAWSLAEALRVDGQNWRPLHRLDPLTQQIQMLCRDEIALIEQRTALVNQLQQALCEYYPAALQAFDDWTQPFCWDFIVQFPTSAKLVAGGRRHWEKFLHTHKLWRPQTADTRLEIFQQADQFCGSAAVTAAKSWLALSLVRVLQALHRQLEGYRQQIEALFKQHPDHDLFGSLPGVAQTLAPRLLGEVGGDAQRCPDTAALQCLAGTAPVSFQSGQIHRVHVRHQCHKVLRHTVHLWAQCSLRVCPWAETYYRQKRVEGKSHACALRCLGQRLLKIPGRMLQTRKPYDADLHARNQKQHGSWVLTLMKPALKTGE

SEQ ID NO: 186949 - protein, 404 aa, unidentified
MWYAGIDWANDHHDALVIDEQGHQVGTIRVNHTPAGLATLNTFLQHIIATAPKEQMACIIETTHGLLIAHLLEAGWPVYPVNPRTVDRKRSASGAKTDRIDAYLLAKTGRADLADLHRLIPDSEKIAELKLLTRDQDALVQMQTRLINQLTACLKAYYPVALDLFGKLNQKSTLLFLQAYPTPAAAACASRSQIQQLLEQARYPQARKAASQIAEQLHQPQLQADPATIRAKSRLLQALVSQLVPLIEQIAQYDKEISTLFLTHEDHEIFESLPRAGSRLAPRLLAEIGDDRTRYQAANSLQALGGTSPVLYQSGMYSKAHRRLGCVKPLRNALYQFAWQTTQSEAWAKDYYQRKRIEGKSHTVAIRALANVWVRIIFAMWTRRECYQTATFELAQHQHARTAA

SEQ ID NO: 186950 - protein, 347 aa, unidentified
MRFYNRQHRHYCGIDLHVKTMCVCILDAAGQVLVHRNVKSTSEAFLEIVAPYRDDLVVAAECMFTWYWLADVCAAEGIAFVLGHALAMKAIHGGKAKNDKIDSHKIASLVRGGLLPQSYVYPAAMRSTRDLLRRRLHLVRKRGELLAHIQNTRAQYNLPAFERRLAYPANRDGVSAHFADPSVRKSIDVDLALIGQYDTLIVDLEITIVREAKRHDADAFHRLRSVPGIGKVLALTILYEIHDVTRFDRVQEFASYARLVKCVKTSGGKKLGTGGAKMGNVHLKWAFSEAAVLFLRHTKDGKKMLARIEKKHSKGKALSILAHKIGRAVFYMLSRGTVFSMEKFLAA

SEQ ID NO: 186951 - protein, 418 aa, unidentified
MSWTGELVRLFAGDDWAEDHHDVELMDAAGRVLAKRRLPEGVAGMARLHELIGQQLGEDAADAEVVIGIETDRGPWVAALVAAGYTIYGVNPLQASRYRERHGVSGAKSDGADAHMLADMVRTDSHQLRAVAGDSAEAEGLKVLARAHKTLIWERTRQVQRLRHQLLGYYPAALEAFDDLDAPDTLELLGKAPDPARGARLTRAQVSAALKRARRRGIPDKATAILAALRSRQLGQPAAVTAAYAATVRSLIAVITVLNEQVKTLQGQVEEHFGQHPDAEIYRSQPGMGAILGARVLAEFGDDPHRYADGKARRNYAATSPITRASGKKKVVAARFIHNDRLVDSLNAQAFASLSASPGARAFYDQQRAKGIEHNDALRRLANRLVGILHGCLKTRTLYDEVTAWGHRENLPQSSVAA

SEQ ID NO: 186952 - protein, 348 aa, unidentified
MRFYTKTHKHYCGIDLHARKMFLCILNASGEVLLHRNIVTSPETFLKAVAPFRDDLVVGVECMFAWYWLADLCAKEGIEFVLGHALFMKAVHGGKAKNDKIDSHKIAVLLRGGSFPLAYVYPPEMRATRDLLRRRNHLVHKRAELLAHIKSTAIQYNLPEIGIDLTYEGNRKEVDQLFPDPQVRKIVQVDLAMIDAYDDVLKVLEPDIEKTAKRQDWHALMLLRSVRGIGQILGLVMLYEIHDIERFQTVQDFASYCRLVKCIHESNSKKKGTGGAKIGNAHLKWAFSEVAAIFVRHNPSAKKLMDDLIRLHGKGKALTILAHKLARAVYYMLKKNVPFNLEKFLATA

SEQ ID NO: 186953 - protein, 370 aa, unidentified
MDEGITFVGFDAHKASISVAMLLPNAVTPVEWQLPNEASAVRRMVRRIEREAPGEVRTCYEAGPCGYALQRQITEAGDASCMVVAPSLIPRKPGERIKTDRRDARKLASLFRAGLLTEVQPPSERDEAVRDLCRAREDARDDRMRCRHRLSKMLLRRGLIYSGRTNWGQAHRLWLGALRFEHPVDQTVLDDYLLAIDQLGDRLKALSQKLEDLSRQAPYAEPVAALRCFRGIDTVTAMSIVAELHTFGRFTSPRGLMAFLGLVPSEHSSGASKRQGSITKAGNSHVRRVLVETAWNYRHRPATAALKKRREGQSQRVITIADRAMTRLYRRYSRMTSARMPAQKATVAVARELVGFIWAVLYPMSAAAAN

SEQ ID NO: 186954 - protein, 397 aa, unidentified
MSKEELNKKIEVVEKELRSCTWRELETNGKFSKNDKLSFITDDMLIVGCDIGSENHYIRAIDVRGRELSRGAFEFSNTSEGLENAKAWVLALAAKHDKKQIVLGLEPTGHYWFALAAWMISNGISVVQVNPYAVKQSKEIEDNSQLKDDRKDPKLIANLVKDGNYGMPYLPEKVYADMRRLSMFRDQLTEDRIRNINRLHRELKIYFPEYMDAFGKIDGALTLEVLKVSAIPSDITALGAEGIKNIWHNEKLRGRGYSRANEIVSYAEKSVGLTDGIDAGREAVKWYAEQILKLVACSSGKHKGQTKISHRGRKRLRYWLFQAAKSAVSHADEFKQLHEYYTTRTNNPLKKMQSLVVIACKILRVIYTILKTGTTYDPQKLLEDIKRPTTSQTPMAA

SEQ ID NO: 186955 - protein, 345 aa, unidentified
MKQYAGIDVSLECSSVCVVDADGRIVREAKILSEPDALIAWFGEHGVAMERIGLEAGPLSQWLHAGMVKAGLSVELIETRHVRAAFKTMPVKTDKKDARGIAQLMRLGWFRPVHCKSLPAQEVRALLTARKLIQGKLHDIEMSIRGILRGFGLKVGPTTRRTYAARIRELIEGHPTLEAIAASLLKVRDTLADEFAGFERKLRAMARQDDNALRLMTTPGVGVLVALTFVSAIDAPERFRSSRAVGPHFGLTPKKYQSGETDYSGRISKIGDVGVRTALYEAANVILTRPVKGSDLKCWALAVARRAGPRKARVALARKLAVVLHHMLRDKTNFIPHKAAPAMAA

SEQ ID NO: 186956 - protein, 411 aa, unidentified
METIVERPAALDVHKAQVTACVRVPAAEGDGREQHMAEFATTVRGLLTLRDWLAAHRVEQVTMEATGVFWKPVWAILEDDFPLLLVNARHVKQVPGRKTDVSDAAWLCQLAEAGLLRASFVPPKPIRALRNLTRYRKAQIQERSREANRLHKALEDTGIKLDCVATDILGVSGRAMLEALIAGTTDPDVLADLAKGRLRAKLPALKEALEGRFDRLHTTWVGAILAHIDFLDEQIDRLSEAIEEHISPFAPAVELLRTIPGIQRRGAECIIGEIGTDMSVFPSPKHLASFAGQCPGNDQSAGRRRSGRTRKGSKWLDWTLEEAALAAVRSNDTYLAAQYQRLRPRRGHKKALGAVKHSIICACWHMLTTGQLYSDLGGDYFQRRDPAKTTKRLIAQLEALGHHVTLQPLPA

SEQ ID NO: 186957 - protein, 370 aa, unidentified
MGKSVVYVGLDVHKDSIVIAVARQGRKPAEKWKTIPYDGVRLQKALKMLVQDGQALKVCYEAGPTGFGLCRRLRKASIDCIVVAPSLVPGKPGDRVKTDRRDAKRLAHFLRSGDLTEVHVPDEAVEAIRDLERARGDAKCAERAARHQLSKFLLRHDRHWDGTAWTRRHLDWIRVQKFAYPAQQRVLADYLKAVEDLAERIASLSSALEELVQETVLAPLVKALQAFRGISVISAITLAAEVGGDLRRFATAGQFMSYVGLTPSEDSTGKRRRQGAITRCGNTHLRRTLVESAWHYRHAPAMSKELRRRNRGVAEGVRRIAWETQKRLHKRLYHLIHTGKSSQKAVVALARELAGFVWSVGREERLLAAP

SEQ ID NO: 186958 - protein, 316 aa, unidentified
MQSRLDLGADVDSRYVMVACAAGSFKTQRIVNEAKAIRAWLRTVPRGSRLAMESTGSYHELLADLAHQADLQVFIVNARDMRRYGQGIGRRGKTDRIDAEVIARYIAREHDELHAYVPLTDEQRLLARLISRRAKLVQAKDSIRQSLGGVPALQSKARRLIGQVDQVIVSLDLLMKRTVKKMPSVGEAAGHIATIPGFGELTSAFLGHCFTRVPYSTSDAVVAAAGLDPRPDDSGLREGRRRLSKRGPAEARRLLFNCARSAAQMTLWRPYYEAQLAKGLSKTAAAMVLARKMLRVAFAVYKRRQPFNPLLIGGRA

SEQ ID NO: 186959 - protein, 394 aa, unidentified
MRFAGVDIASETHVVALVDEDGKVLVKATAFTEDAAGYEKLFAQLGASAELLVAMEATGHYWKNLFAALAARGFSVALLNPLRTHRFAEEDLQRTKTDAIDALGIARFAAQKRPPATRLPDPATEELRELVRLRERLLQDFGDRVRQLHRLVDLGFPEFTRYVKGLDSELASAILHDYPTAAAFQGVSAKRLAGLRYDGRHQVGTELAGLLIAAAQHSVGHHHGEAYRVQVRYACEDLDILRRRLRQLDRDIAGTLGAHEVGTLLTSIEGIGPTTAARLIAELGDPAHFRSPGALAAYVGVVPALSQSGKRKNTRAATTAIGNARLRAALWMPTLTAVRKNPWLRAHYQRLLARGKLPKVALVACMHKLLFAIYSVAKHRRPFVAQLPTAETTT

SEQ ID NO: 186960 - protein, 337 aa, unidentified
MDKFEACGLEISARELVVAWSGKKAAVQLLRFANDAAGHRSLLRTLTRGGKRVRVVMEATGLYGLDVALALSAAAGVAVMVANPRAVRNFAWAMMQRSKNDPLDALVLREFALRMPFRGWQRPSANRLALWAIARRLKALSELCSAEKNRLHAMKQSQATPAIVRQDIVRNLRWQERAMNKLRREARQCIAAEAELQRRYQLMLSAPGIAERSALQILGELVMLPEDRDVRQWVAFAGLDPSEHSSGQSVRKRPRLSKAGNRHLRQALYMPALVCIRWEPHLFGFYQHLLERGKAKKQALLAVARKLLHALYGMFRRNQPYDGTLVYRLPAQKVLEA

SEQ ID NO: 186961 - protein, 387 aa, unidentified
MQKPHDDSKACLTAFIQDSTLTVVIEMSLASWLVAGMIPGVNREPLKKIAPNPEVLLQLLHRWRDEAIKAGKEITRIAVAYETGRDGFWLARWLRARGIDAHVIHATSVAISREHRRAKTDRIDTAMLRRGFLGWLRGEPGHCSMAIVPTVEEEDAKHPHRERETLIKQRTSTVNRMKSILIKFGVRDFNPALRKAPAKLASVRTPEGIPLPSNAVAALQRHMQRFSIIKEQIKAIERTRLQRLQRDPTEKFNAMVFLLVRISGFGVETAQQLVHEMLSRSLRDRKAVARYAGLTGSPDESGSKRREKGLSRCGNRRVRNILIQLSWRLLKFQPKSDLVVWFKKRTANARGSRKPMIVAFARKLIIALWRYVNTGLVPEGFQLRSAA

SEQ ID NO: 186962 - protein, 338 aa, unidentified
MKLYGAIDLHSNNNVTVVIDEQDQIVYQKRLANDLPLVAQQLAGYRDCLQGIVVESTYNWYWLVDGLMDQGHRIHLANTAAIQQYEGLKYTDDKSDARWLAHLLRLGVLPVGYIYPKQDRAVRDLLRKRGQMVRQRTANLLSIQNLFSRNTAGSMSANRIKALDSKEVDELVPDADLALAIKANLAMLQCADEQIDILEPTVIERVKLKPEFRFLKTVPGIGQILGLTIMLETGDITRFPAVGDFASYCRCVGSKKISNGKKKGSGNTKNGNKYLAWAFVEAANFAIRFNAKIKGFYQRKKSKTNGIVAIKAVAHKLCRACYYIIKDQVAFDMTKAFA

SEQ ID NO: 186963 - protein, 411 aa, unidentified
MDVLHPRCAGLDVHKKTVVACALSPGPAGTTLKQIESFGTTTLELQRLASWLLDLDCSHVAMEATSAYWKPVYNILEEHPTLSTWVLNPQHIKAVPGRKTDVMDAEWIATLLRFGLANQSFIPHRQQRDTRELTRFRSALTHDKVAAVNRLQKTLEAANIKLASVLSDIRGISAQRILSALAEGEDDPVTLAALADFRVKATAESLQHALTGRLTPTLRFVVQQHLQHLADLDAAIERCDLEVADLLRPFEPDLTRLDTIPGIALRNAQNILAETGIDLSRFPSHRQLAAWAGLAPGNKRSAGKRRNAPTRKGNPWLKAALVEAAAAAIRHKDGFLNAMYQRISHRRGHMRALVAVAHQILIIIYHLLTQQDSFHDLGGVYFDQRDRVAIQKHAIKQLERLGYHVELTEAA

SEQ ID NO: 186964 - protein, 422 aa, unidentified
MFSESQDDEQIIERVAALDIGKAEVVCCVRLPSPGPGKRRVQEVTTHTTMTRSLTELANRLVGLGVERVVMEATSDYWRPPFYLFEAHGLQPWLVNAKDVKHLPGRPKTDVLDAVWLCKVAERQMLRPSFVPPHEIRRLRDLTRYRVDLVGARGAEKNRVEKLLEDACIKLSVVASDIFGVSGRAMLTAMIAGERDPKVLADMARSRMRPKIGQLEEAFTGYFDDHHRFLLARMFGRIDAIDADIDALDAEIEAYLAPFGEAATRLDEIPGIGPVAAAIIIAEIGVDMTRFPTPGHLASWAKFAPGIRASAGKNKGNGSTGHGNRYLARVLGEAAVAASRTDTFLGARYRRIARRRGKKKAIVAVGRSLLVAIWHVLSHPETRFVDLGADHFDRHVDTATKKRNHIRQLEALGYRVTVEPAA

SEQ ID NO: 186965 - protein, 386 aa, unidentified
MALKIVYKICCGIDVHKTFVVACIASTDSKGVTTYECQRFSTYTKGLKNLLHWLLGHNCKDVCMESTGKYWIPVYNILERKCSIVLAHPKYVKAIRGKKSDKKDAKWIADLFKHDLVAGSFMPPADIRQLRDLMRYRFKLTCFKSSEKNRLQNCLTVSNIQLGNVVSDTFGKSAQVILDKLLENPADTSFDLEPLVYKSLKKKLPGLHDAIDGYITPEQAGKLKVIKAHYENLESRKAELEVLILALATPYQQELAILQTAPGISSDFTAIGIISEIGTNMEAFPSAKHLCSWAGLTPTNNESAGKKKSVRVSKAGCYIKPLLVQCANAVVTSKKHPEIRNRYLRLRKRRGHKKAIIAIARMLLTALYHMLKNGENYNAELYQKSE

SEQ ID NO: 186966 - protein, 392 aa, unidentified
MYYIGIDIAKNKHEVSIIDSSGKLLSESISFSNTIKGFEKLIKYLSSYNVYSYNCIVGMEATGHYWLSIYSYLVEYEFNTFVINPIQSEAFRKMYIRKTKTDSKDSFVIAQVMRFGEFSSSPLLDERMFELKNLTRYRFSLVDESSDWKRKLITLLDQVFPEYDKLFSDIFGVTSKNLLSKYPLPEDILSISTETLAELLAKCSNGRFGFAKAEEIQNSALNTFGVKFAKRSFSFQIKQIIDQISFLEEQLKFLEKEIEYLLNDINPIITTITGIGSVLGASIIAEIGDISRFEKASQLVAYAGLDVSVKQSGEFNAINSAKLSKRGSPYLRRAIWLASTVAAFKDPALSVYYTNLRNRGKAHGTAMGAVARKLTNIIFAVLRDNKPYIPNI

SEQ ID NO: 186967 - protein, 402 aa, unidentified
MIGVDPHKASHTVTAIDETETVLGELKVRSGANQVERLLGWAAQFEERTWAVEGAGGLGYLLAQQLVAAGERVLDVQPKLAARVRLLSNAATNKNDPNDARSVAIVALRSPKPVAVHAEDHTAVMKLWAKRHRDLARHRTRMACRLHAVLCELVPGGYSGEIYASRAEKLLGELETQGAVATARRELAVELLSDLRRIDEQMRDTKKRIAQAVTASKTTVTEIFGVGPIVAAIVIGEVGDVARFTSSDRFAAYNGTAPIEVSSGPRKIYRLSLRGNRRLNHALHMAAITQIRYGHSEGRAYYDRKTAEGKSGKEAIRALKRRISDAVYRQLQLDARQAREVTAMGSGGQAGNDSVASVTGSHPESRLFGEATPEPATTLRPAAIAHRSRTSRTSPRSVKRAS

SEQ ID NO: 186968 - protein, 466 aa, unidentified
MNRMFYIGIDVSKGYADYVILNQSKKIVGDYSTVYDTGDGYDEMEQCISKLYKQYKPVQIVAAVESTGGIENNWLNFLYSLRDKYSLKVARLNPNVIYQYQKTDLKETKTDRTSSLAIAAYLATYLERVNFYEPDRYKSIRDGATLIQLMLRQRTQYINSLRLILYEVFPQILPYCKYDLSKSTLKLLLLYPSAAHMARAKFSKKSPVTYYTLKVLNDIRDSCKQRVLKDVDEIATYQVTLLAKEILRLNGEIESFYKKLTKRLPVEHLERIKSIPGIAERSAVNLLSVIGDINRFDSAEKMVSYFGLYPVLSESGDLKKRPKLCKKGNKLVRKTLFLCVLNAIKRDPYWIKLYQRLLDRGKSKMSAICALMAKMLRIIFGVLNNGTMYDPLIDMAYRDRVKPAPKEKSSDEIEQNVEEVQKVLKHAPISKKHAKLIKEQTELLTRTQGSEHPDCSLEPISYGKEK

SEQ ID NO: 186969 - protein, 337 aa, unidentified
MEQQQQYVGIDLHRRRSVIVRRSEAGETLETVRIDNDPVALAAELAKAGEHPEVILEATYGWYWAADVIKECGGSVHLAHPLGNNWGHRRVKNDERDATDLVDLLRMGRLAEAWVAPPSQRELREYIRYRAKLVNLRSNLKAQVHAVLAKEGVNVPMSDLFGVAGQRLLDEVQLANAYRIRVESLRDLIGHLDREIAMVEKQVAPIFAGDLGFHAVQAIPGVGPVLAAVFVAEIGDIERFKSARHLCSWAGLTPTHHESDEKVQRGHITKQGSRLVRWAAVEAVVRQRGDTPVRRHHHQVGERRGTRIGRVAAARKLLILVYYGLRDGEIRCLTETG

SEQ ID NO: 186970 - protein, 321 aa, unidentified
MQFIGIDAAKATFDIALPLSGGKYRTKAKLPNTPKGFDELLAWRAKHAPNAAVGMEATGIYHEALAGALVKAGVMVHVANPARVKAFGQAEGIRTKTDRSDAKLVARFFEAQRPEKLHPYVPPTPSEVKLRALVRRRDDLQEMLQMEQNRLDVADISVQQGIKDVIRTLEAQINQVQKAIEDHIDNDPDLRQRHQLLTSIPGIGNTSSAQLLAMLGDLSKYSDVRQVVAHAGLNPAQRQSGNYEGKCRISRVGDANFRKKLYMPALTGKTYNPRLKSFADRLSAKGKPFKVVMCAVMRKLIHLVWGVLKSGRPFEPDGALA

SEQ ID NO: 186971 - protein, 385 aa, unidentified
MGNQRFIPRDYDVFAGLDVDKKSISATFIDHQGFLKSLNMPYKVEHLLNYVRKHYPDKKVAFAYEAGPTGYGLYDGLEAQAYPCLIASPSMIPKAPGQRVKTNRLDSRGISENLRGGQLKSIHVPTPLYRELRHLTQLRDTLVSEMVRMKQRIKSLLLMEGLEFPPAPAGSQWSFLVKKKLRELPCSSTVRFKLDRLLDSLEFDEKQVLKATREIRRFCQANPELFGCIEYLKTLPGIGWIVASQLVARVGDWRQIKNIRQLPAFLGLVPTENSTGERTERGSITHTGDGRLRSKLIQASWSAIRQDGELREFFRTVAKKHPRHLGSRIAIVAVAHKLSVRAAVVLMKQRPYEVRQKVQSAPLTQEETVPQGTTRRLAVPGETNS

SEQ ID NO: 186972 - protein, 409 aa, unidentified
MDVVIAACCGIDVHQKSLVACIRVLGAGSHVRKELRSFATTSAALAELAGWLQSRGVTHVALESTGVFWKPVWHALETSVTLLLVNPRDVAQVPGRKTDVSDAEWIAQLLQCGLLRGSFVPPRAIRELRDLTRSRTTLEQERTAVVNRIHKVLEDANVKLGTVATDITGVSGRAILQALIAGESDPVALADLARGRLRKKLASLRDAVTGHVTDHHRFLLRRLMSELQFLEEEIAAFDNRLREVTSPFEDLLALLDTAPGINLRTAENLLAEVGPDMGVFPSAKHLASWAAICPGQYESAGRQPRGTMRKGNRWLRRALTQAALAGTRKHGSYAGAQFRRLAKRRGKQRAIIAVAHSLLVAVYYILRDRVAYQDLGADHFDRLSPAQLTRHYVRRLEQLGHSVRLDAAA

SEQ ID NO: 186973 - protein, 369 aa, unidentified
MSETNVTFQSFVGVDLHKCTVTLVAVDPDGNQIAKLTAPTKCIGKIAAWLRSLPDPVSMAVEACPFVEWFIDRFRWCVHRMDIADATELASRRGKRRKNDPNDALDIALRLARGECPLGFIADEELMQLRKLGRHWRQLSRLLSRTKHSMKSMLNAANIRGPKFDAAGAHRWFLAHGHLLKPAQQDAFADFIDILVLVERQRERLRRKIILANRSEEFVKITELLKTVPGIDEIWACIIAAEIGPFDRFPNADALQFWAGMTADMKESAGRTQSGHITKAGSRTLRWALCKAAVTLCRSDAKQEATRQRLIRQVGGIKAKANVAMGRRLLGILYAMVRDGKPYEIGEPTNHNRAANRARAARKQRKEAA

SEQ ID NO: 186974 - protein, 349 aa, unidentified
MRFYNQPHRFYCGIDLHARSMYLCILDHAGAICFHQNLPAQPDAFRHAIAPYRDGLVVAAECMFAWYWVADLCRAEGIPFVLGHALYMKAIHGGKTKNDKIDAFKIATLLRGGTLAQAYVYPQGMRETRDLLRRRCFFVRQRALLVAHIQNEASQYNLPAFGKKLTYPANREELQVADHFTDPSVKLSIETDLALIDALDTQIGTLELYLTRHAKIDDGNTFHRLRSIPGVGKILALILLYEIHDIHRFADVGKFLSYARLVRGSHESAGKKKGAPGKKIGNAHLKWAFGEAACLLVRHCTRGKAWLARKEKKHGKAKALAILAAKLGRAVYHMWHKREVFDEARVFGD

SEQ ID NO: 186975 - protein, 343 aa, unidentified
MQAITTIGFDIAKSVFQVHGVDAAGQVIVRRQLKRRQVIAFFQKLPPCLVGIEACASSHYWSRELHALGHRVRLMPPAYVKPYVKRQKNDMADAEAICEAVTRANMRFVPTKTPEQQSGLVLHRTRHLFIRQQTSVINAIRAHLAEFGVIAPVGRKGVEELLCVVADPNDKRVPEAVRACVAALGSQLLSLKKQILDFDRMIMAWHRSNQTSKRLNCIPGVGPLLATALVASVADPKTFRSGRNFSAWIGLVPKQHSSAGRDRLGSISKRGDRYLRSLFVAGALAVIRYAKIHGSKHRPWLTALLARRPTKLAAIALANKLARMAWAMMATGARYNYPASLRV

SEQ ID NO: 186976 - protein, 341 aa, unidentified
MLLIGCDYHPSMQQISWLDRETGECGERRLAHCAEAEQFYRELKQAEVSVRLGMEATGHARWFERLLAELNFELWVGDPAQIRAKRVRKQRNDRLDAEHILKLMREDNFPRIWVPTPENRDTRQLVLHRHRLVGIRTRVMNQLQAIAMNEGIRRKKGLWSEKGRTQLESLSLPPWTSRRRQELLELLDRLDPSIDQLSQAIEQEAERLPEVQRLQTHPGVGPITALAFVLVLGTPDRFGCGKQVASYLGLIPCEESSADRWRLGHISKQGNALLRYLLGQAGQTLARCDEQWRRQYVHIAMRRNKAIAKVAMARKLAVHLYWMWRRGWDYQQWKKFGSHAG

SEQ ID NO: 186977 - protein, 315 aa, unidentified
MQDILEICCGLDVHKDNVVACLLKGNVGEEPTKIIRTFSTLLAGLEELKAWLEAEDCRHVAMESTGVYWQPVYNVLEEAFDGSIALIVANARHMKNVPGKKTDMKDAEWIATLLRAGLLEGSFIPSKPIRELRNLTRYRKSIIEEIASQKNRIEKHLQSCGFKLSTFLTDIFGVSGRAIMDHLCRHGKISAREVETLVKGRAKCKLQEIKQAVNGKMDVHQREFLKLLLGWLDQHYKHLHQVEQKLEEKLGQYQRQLEQLDGIPGIDKTAAAAILAEIGIDMSRFKTAEHICSWAGLSPGNNESAGKKVHSHHPR

SEQ ID NO: 186978 - protein, 413 aa, unidentified
MTQEPIRWFAGVDWGSEWHQVCIVDGEGTIAGERRFPHSGAGLAELCDWLLSIAGEASAVAVAIEVPHGPVVDSLIDRGFVVHAINPKQLDRLRDRFSVAGAKDDRRDAYVLGDCVRTDRRLFRRLHVADPRLIELRAWSRLAEELQEERRRLSNRVHQQLWRYYPQMQTLTDDLAAPWLVALWTIAPTPAKARQIRKPTVERLLKQHRIRRIDAETVLRTLREPAIKVAAGVAEAANVHMRSLVARLRVVNRELHEAEGNLDKLCMAIGETAAEAGDCLQRQDVMILKSIPGIGRINLAVLLSEGSGPLSSRDYPALRTLCGAAPVTRRSGKSHIVVMRYAAHVRLRNTVYHWARVATQHDPKSRSRYAALRQRGHSHGRALRGVADRLLGLACVLLRRQTLFDPNFAQPAS

SEQ ID NO: 186979 - protein, 427 aa, unidentified
METDLSRVERFRQFKQEIRGNERYLIVGIDVAKDRHHAFLGTANGRTVLRRLAVENSRNGFEHLSAHVQFQMRKHGLDEVVFGVEPTSVYHKPLAECLIGKGCLVVYVTNAAIKQNRQLLDGRWDKNDTKDAANVADLVAQGKCHYFDLPNDVLRDVRALLGVRRRLKRQLHSARMRIRNNLVAQYFPELDTFWNKAEEENLAIVRWSLDPETIRRLSFKEFFHRVTSRSKGARQHERLRGIWEAASSSIGCRVGKTLEVETRILVEEVKRTREQIVEVEKSIKAHVSGLTHYELLLSIPGFGPYICAVVLAAVGNPHRFENRSQLLRLAGLDLSANRSGKRSSTAVPVISKRGKADLRYALYQAALVASSFNHHVMAYYRNLLTGREREPGIRTKMRVKLAAKLLIIAWTLMKNKEPFNPDRLKTD

SEQ ID NO: 186980 - protein, 337 aa, unidentified
MEYFAGLDVSMEETHVCVLTRNGTVVYEAKVPSTPTSIAAALARAPACRRVLFETGRMAPTLYHGLNRLGLPVVCVESRQAYQALKSLATHKTDRNDARGLAHLARTGFFKPVYVKSLPAHAVRSLIIARKKLVGQRVTLENQIRGLAVVFGVRLPRALSPAFIRQALQASEGILGLSAAMRGLVAARAAVLAAVVAIDGDIRKMARASGSCRRLMSIPGVGQLTALAFTAAVDDPGRFRRSRDIGAYLGLVPRRYQSGEVDYTGGISKCGDRRVRTLLYEAANVMLTRYKGPLKLKDWALAIAKRSTMRKARIALARRLAIIMHAMLRHGTEFNRT

SEQ ID NO: 186981 - protein, 366 aa, unidentified
MKKISTVQVFGNEIFKEQKLTIGVDLGDRWSFYCVLDEAGKIILEQKVSTTTEALKQAFAKIPRSLMALETGTHSPWVSRLLKELGHEVLVAHAQKVELISKSNRKDDRHDARTLARLARIDPELLGPVRHRSAKAQIHLTVIRARAELVRARTGLVNAARGLVKSYGERLPKCGTKQVSRELAAELSVELREVLEPLLNEIESLNERIKEYDARMEKIARESYPQVELLKQVKGVGTQIALTYVLTLDDPHRFRRSRDAGCFLGLCPGRRDSGQSQPQMHISKEGDRYLRTMLVQGAHYILGPFGEDSDLRRWGLRLAERGGKNAKKRAVVAVARKLAVLLHRLWVSGEVYEPLRNSHKAMRAVA

SEQ ID NO: 186982 - protein, 348 aa, unidentified
MEPIVNLPVIGLDIAKNVFQLHIVDAETGEIQRRQLKRAKVTEFFAKCQPSLIALEACGGAHHWARTLQAQGHQVKLLPAKHVKAFLLRDKTDALDAQAIWVAAQQPHIRAVSVKSEQQQACLALHSMRQQIMKMRIMQTNALRGLLYEFGIALPAGHNKLMQSIQGELAIAQQHSKLPDIVVVSVQEQLKRIDAMQDDIDQLSKRLSDKLKQNQQMLAVQAVPGVGILTATAIVATVGDVSTFKSGRQFASWLGLTPRQVGTGGKTQQKGISKRGDTYLRTLLISGARSIVGRSLPTGWIERLLQRRHFNVVVAAVANKMARTIWAVLAKGKAFDQVKWNPTQATSA

SEQ ID NO: 186983 - protein, 451 aa, unidentified
MAQKKMELDIINPNCAGIDVGSKSHFVAVGQSLEDVKEFGMYADDLTAVCLHLKAYGITSVAMESTGNYWQNLYVELEKNGMGVTLCNGKFTKHAKGKKTDVKDCRWIQKLHALGLLTGSFLPDETTEQLRTYCRQRTNWIDLAAEASHKMQKYLKLLNFRLDVVVKDICGLTGLAIIDDICKGNLDPEKLSQHRHGNCRKSQEEIAKALKGNNRTDFLFGLKQEYDSYLFFQKKIDACDVQINSFLKTQINTHPDKKKLRTDNKTHKRVNKNSIKGIDLNQASYQYFNGVDLMKIEGLSHSTILTIMSEVGPEGFPKFPSSKQFTSWLRLAPNNKISGGKILSNKIPKGSNRLKIALRHAANAIGNLKDTHLSDFFKRVAYRKGRAAAVSATARKLAVIIWNMISKRVQYKAPIEYFFLDQKRKFNVIQKIKKNIAKLELKPEDVGFVTA

SEQ ID NO: 186984 - protein, 350 aa, unidentified
MVTTEQEASVSEASTIGLDLAKRVFQAHGADASGKVVFRKRLRREQVLAFFAGRPACVVAMEACSSAHYWAREIGELGHRVRLIPPAYVKPFVKRQKNDATDAEAICEAAQRPTMRFVLVKSEAAQANAVVFRARDLLVRQRTQAINALRGHLGEYGVVVAKGPSHVAQLIAHVEDPAAGLPEAARTVLRVLTASLQFLSERIDLLDREIARRAREDKEVRRLTTIPGVGPVIATALAALAPPADAFRRGRDFAAWVGLTPSQHSSGGKQKLGATSKMGERTLRRLLITGASSVVQKAIKHGTPSGSWLGPMLARKPRMLVIVALANKMARTVWALQATGEIYRAPVVAA

SEQ ID NO: 186985 - protein, 532 aa, unidentified
MMASGFAGRDDRGEYGALCPSVSMVSGAGDHSTSDALRRDPVWEIACTVVAPAPAAPRDNRFSLIAEAAMTPRRDSFVRSSERRRRTHLQVTNPNAAGIDVGAEAHWVCVPADRDAEPVCRFGTCTPDLEAIANWLKKCGVTTVAMESTGVYWVPLYELLEARGFQVLLVNAHDVARAPGRPKTDVKDCQWLQRLHSYGLLSAVFRPQDQVVVLRAYLRQRDMLVTYAGQHIQHMQKAMEQMNVKLTEVVSDITGVTGTGIIKAILRGERDPVELAKLRDPRCKESEATIARALHGNWRKEHLFALEQAVALYEFYHQQITACDRAIEAHLKTFADQSQGQTLPYRPRRRRREPNEPRFDARARLFCLCGVDLTAIEGIDETTALVLISEIGTDMGRWPSLKHFASWVGLCPQHKITGGKILSRRVRRGASRVKRTLRLAARSLHHSKSALGAFFRRIRARYGTPAAITAAAHKLARLVYSLLKHGTAYVAQEMEDYEAKYRERKLQGVVRQARALGFELVPTASAASEAAG

SEQ ID NO: 186986 - protein, 340 aa, unidentified
MEKRHIGIDLHRNRFTCCIRLENERTYVTEWALENLAGFVKKLRLTDEVAVEITGNTRYFYDGIAPYVARVVVVDTNQFRVISQSVKKTDPNDARLLSLYLSKGLLPEVRMKDKERAQLASLTQTRDTLVKQRSALKNKVNNILSARGLNLAKEALSSEKKLTEVLELPFDEVVRIELRVIVEQIRSLNKSIAELEKTIGEEGSKLEGHKSLSSIKGIGKITGAILLSVIGDVNDFADEGRLASYFGIVPRVSNSNETERSGRIHKRGTKLGRTALVQSALIAANYSPYLKRFYEQVKARKGAGKAIIALAHKFLGIIYRTLKNKWVFEDFPNFVLAEAS

SEQ ID NO: 186987 - protein, 420 aa, unidentified
MQTTVEGSYVGIDWGDKEHYVYVVDAQGRRRTDFALPQSAQGLGELVSRLRPFEPIEGIAIEKEQLLLVAGLLEAGLTVYPVNPKLVDTWAKCVSVDPPKDDRRAAATLAEGLRKFRNDLRPLRVEDPLTRQLQILTRHETQLIGQRTALVNQLKDCLKLYYPEFLDWYEDLTTTTAADFLIAFPTSRALREATAHQVRRTLLAHDSRLTERRQALLAARAQIVWPQDEVAAAGHAPYAVTLARQIKALNLGLAALRQAIEALFPQHPDAALFDSLPGAGAKLAPRLLSHFGTDRSRFDGARAVQALSGSVPLTKASGGKKQVVFRWACQKHFRNTVHQFAFCSLERSPWARAFYDQAKARGFSNAKALRELGAKWLKIIYRMWETRTPYNEAIYLRSLEAHGSPLAARLRVGEQPVGEQ

SEQ ID NO: 186988 - protein, 348 aa, unidentified
MALTIVEDTRAVTGGVDTHADMHVAAALDPVGGLLGVGEFPATAAGYARLLGWLGGFGTVCLVGIEGTGSYGAGLARHVTAAGIRVVEVDRSDRQDRRRQGKSDPLDAVSAARAAQSGRARGEPKGRDGAVEAIRALMVAKRSARSERTQTINQARALIVTGPDDLRARFARHTAAGLVSELAALRPRPGATVGYATRIALRELGRRAEFLDGQLGRLDELIVPLVTARVPALLALHGVGPDTAALLLIAAGDHPHRLRSEAAWAHLCAVAPIPASSGKRTRHRLNPGGNREANHALWRIVITRMSSHAPTRAYVERRTKEGLSKKEIIRCLKRYAARQVYRHLRPAG

SEQ ID NO: 186989 - protein, 452 aa, unidentified
MSRRRKNNRTTGAPVLHCLNPHAAGVDVGATEIYIAVPVDRDPRPVRRFSTFTEDLRAAADWLKSCHIETVAMESTGVYWIPFFQILEAQGFRVFLVNARHVKNVPGRKSDVSDCQWLQYLHAVGLLRGSFRPEQAVCTVRSILRHRNDLVQMASSHVQHMQKALDQMNLQLHHVISDITGMTGVAILEAILAGERNPQTLAALRDRRIKASADTIAKSLVGDYRHEHLFTLRQSLLAFRHYQELIGECDTEIAQYLEAFESKVDPPEGPLAKSPEQRKPNSDQPHFDLRSHLHRIFGVDLARVPGINVLTAQTLLTEVGPDFSHFAQGPAFTSWLGLCPDNRISGGKVLSVKTRKVKNRAATALRMAALSLHHSQSYLGHFYRRMRAKLGAPKAITATAHKLARIIYHMVTAGQEYHETICAQNEMQHRQRLEARLRKQARELGLQLIAAS

SEQ ID NO: 186990 - protein, 345 aa, unidentified
MIYVGMDIHAKTTTYYAIDDEGHVVKRGKIRSSEEDWTELMGQWCGEEIGVALETGTLTWWIVAVLRGAGIEPVVVDARQFKLISQSKKKSDKHDARALDDGLRGGLAGRYAVHVPSERARKGRALLKTRYQVVKQTVASRNAARGLLRSVGVSIRVAEWRKSERWEMVLANPAIPDWMKPLLNTHRGIWEGLQKERERLDNMVKEELSQWSEAEIVSEIPGFGPVATLAFLSHVDDPSRFKRSGQVASFAGLVPSSRDSAESVRRGGITHQGNSVLRHLMVQAAWGALRSKKLTLVLRKWVNRLIYTRGIKKAVVALARRLLTLAHRLWKNGECYDPNYAPETI

SEQ ID NO: 186991 - protein, 388 aa, unidentified
MPKPVDLSKSLAVLDPDSTLIVVIEMSQSSWLVAARAPGLARDPLKKLPPDPEQLFKLIDRWREESRRAGRVVRRVCVAFEAGRDGFWLARLLRQHDIEVYVIHPTSIPVKRDHRRAKTDRLDTELLMRAFLGWLRGEADHCSMAAIPTLAEEDGKRPTRERESRVNARSRLVNRMKGALARLGIRGFNPKLRKAAEKLEELRTGAGEPLPPNTLAELRRDMAQLRFVADQIKQIEKAREARLEKAPREGAHPMVLMLASIKGVGLETAEMLVAEVLSRKLRDRRAVARYGGLTGSPDESGSRSREKGLARSGNARVRRGMIQLAWRFLMFQKESALAKWFEARTANGPRGVRKTMIVALARKLLIDLWRFVEDGTVPVGVELFDSRA

SEQ ID NO: 186992 - protein, 356 aa, unidentified
MGEGSWVGLDVHARSVVAGVIDQGSGEVRSLRVPSGGEATVAWLQTLPAPVRVVYEAGPTGYRLARACAEVGINCVVAAPSRVRAAADRVKTDRRDAERLARLLRLGEITPVRIPTLEEEAARDLVRAREDARGDLMRARHRLSKLLLRHGLVYDATAWTRTHDAWLRRQRFEGGPLAIVFDECYGRMLDAKSRRDTLDKAISELAATPPYVDVVERLVCLRGVSTLTAFALTVELGDWHRFRPQSLGPFLGLTPSEHSSGERRRQGAITKAGNSHVRRLLIEAAWHQRRPPRRSITLERRRDGKPLAVQAQAERSSRRLHGRWHALEARGKPRSIVVVAVARELAGHCWALATME

SEQ ID NO: 186993 - protein, 341 aa, unidentified
MTTIDAEKPDTKVEVILGVDTHLDFHVAVAVDHLGRRLGELSVPTTTKGYERLLCWAEGFGPVRCAGIEGTSSYGAGLARYLKTSGTEVLEVERPKRPQRSSRRHLKKSDPSDAERAARAVLAGEPSGAPKSGKGRVEMIRTLRAARRSAMKARTQAANQLQSLRLTAPEELLNRLRALSTKELVSVAARFRPGDDPNDVPTATKSALRSVARRYEALSAEIAELDAQLDRLVTQVAPELVCLPGIGTDHAATLLIVAGDNPQRLRSEASFASLCGVSPIEASSGKVVRHRLNRGGNREANRALYMTCLARMRRDRRTQEYVARRTQEGKSKREIIRCLKL

SEQ ID NO: 186994 - protein, 350 aa, unidentified
MKADIKYAGIDLHQSTCFIEIQDGRGDALSQSVVKTESETLRSFFRGIGGTIHVAFEVGTQSAWLYEILKPIVTSITVCDVRKHKRRGSKSDRIDAHKLATWLRMGELEQVYQGDRNTRKLRDLAHGYMATVSDSIRVMNRIKAVYRSWAISCGGRDVYYKRNREEWLSKFPMRESGTRAALYYAQLDLLKEQRKETKKAFLKEARRYPVQKILRGIPGFGPVRSAFAIAVIGTPHRFRTERQLWSYSGLSVVIHTSSDHEIIEGRIVRKQRQNTRGLTRDYNRILKMVFKGAAKEAIRKDPMKTLYRMKVAKGIRPEMAVLSIARRLAAITLVLWKRGEKFDVAKLISN

SEQ ID NO: 186995 - protein, 387 aa, unidentified
MPQPNDLSRSLVALDQDSTIITVVEMSQSSWLVAGMLPGIERQPWKKLEPSPERLLALLHRWRDEAVKAGRKITRIALAFEAGRDGFWLARWLQAREVEAHVIHPSSVAVSREHRRAKTDRLDTELLKRGFLGWLRGERGHCTMARVPTIAEEDAKRPNRERECLVGERTRIANRMKATLARLGIRNFKPTLRKAAERLATLHTAEGVPLPPNVSAQLQRDMARLGFVTSQIRDIEEARQKRLEQEPDTGQHAMVRHLARVIGIGIETADMLVSEVLSRPMRDRKAVARYAGLTGSPDESGARRREQGLAKAGNARVRRGMIQLAWRFLRFQKQSSLAQWYRSRTADSRLSTRKTMIVALARKLLIALWRFVTTGETLEGVILRPAG

SEQ ID NO: 186996 - protein, 474 aa, unidentified
MKPKSRPAECQKASPLSGDLKLIESDAAAVDVGSRSHWVAVNPQRDPNCVREFGSFTADLIRLADWLAQCRVKSVVMEATGVYWVPLYEVLESRGFKVYVVDAHTVRHLPGRSKSDVKDCQWLRRLHSYGLLQSSFRPPAQIRQLRNYLRSRTKIVEAAAQQQLRMQKALTLMNIHLHHVISDLGGLTGLAIVRAIVAGERDPKRLARLRDPRIRASKETIQKSLEGNWREELLFDLKMALESYDHFQGQIAAYDERIRQELKEVPSKVDPQSQPLPAARAKSCRKRPGMSQQDQLDLREELYRISGVDLTRIDGISLQSAQKVLFEIGTNVEAWRDEKHFSSWLGLSPNHRISGGKVLKRSSRKVVNPLSVALRLAARTLRNSHSALGANFRRLIAKIGMPKAITAMARKLAVLIYRMLKYGTQYVDKGMQHYESKYQQTKLQYLRYQAAKLGMTLVPNQLAATVIHQAQESP

SEQ ID NO: 186997 - protein, 462 aa, unidentified
MTIPKKKGNRKNETPLPTSLPAIRPLVAGLDVGSSQHWVCGPAREDGKPNVRVFGTTTDQLHELADWLSEQGVESAAMESTSVYWIPIYELLESRGIEVILVNARQLHNVPGRKTDFSDCQWLQLLHSCGLLRGSFRPVEAITRLRALHRQVANLVAERTRCVQWMQKALDQMTVQVHRAVTDLTGATGMAIVRAIVCGERDPARLAMHRDPRCRKSAEEIARYLTGNWREEHLFNLASALRLFDALETEIASYDAQLLKEIAALQPPERQEEPAPPHPNPAKEKAIKARGEQQARTTLWRFAGVDLTRVDGISAGAAQVVLTEVGPNLAAFPSEDHFVSWLRLCPRTPISGGKPLKKRRNGLGANRISAVLRMAALSLERSKTALGASFRRVARHKGGAVAVFATARQLARLIYRMLRYGHDYVDIGEKAYDQRFQIRRLAALTETAKSLGYALVPNVAAG

SEQ ID NO: 186998 - protein, 336 aa, unidentified
MNRSTGRWVGIDVSKGKLDAAVLDERDKIKSHVFANDGKGHAALKTWLELRGCGAQLAQVCLEATGCYSESIATALVDAGWQVSVVNPARVKGFAQSELVRNKTDRADAALLARFGQALQPEQWTAPPLEVRELRALVDRVQSLKEMHQQEVNRLEGATNQAGTRESIESHLQWLQQSIQQLERQINDHIDGHPGLRDDAKLIASIPGVGSATAAKVIAYLGDVRRFRNAKALAAFIGVTPRLRLSGSSVRGRSTISRSGHAEMRRSLYMPALVALKHNPIIKTFGARLRATGLAPKAVVAASMHKLVHLIYGILKSGTPFKANFLVATLDIQDGI

SEQ ID NO: 186999 - protein, 454 aa, unidentified
MTRAKSGSMDALSMVNPRAAAIDIGSTMHMAAIDPNADDPVRAFGTFTGDLHDMARWFKASGVTSVAMESTGVYWIPAYEVLEGHGFHVILVNARYAKNVPGRKTDVSDAAWLQRLHSYGLLRGSFRPEAGVATLRAYLRQRERLIEYTASHIQHMQKALMEMNVQLHHVVSDITGATGMRIIRAIVAGERSPGTLAEMRDIRCHASAETICAALSGNWREEHIFALGQSLALYDFYQTKILECDRKLEIALKALEVGREHDIQRLPKVRTKTRQVNAPDFEVRSALYRVLGVDLTQIHGIGPSLALKLVGECGTDLAAWPSSKHFTSWLCLAPGNKISGGKLLSSKTRRSSSRAAALLRLAAITIGRGDTALGAFYRRLSARAGKAKAVTATARKIAVLFYNSLRYGMAYQDPGASQYEERYRSRVVGNLQRRAKAFGFSFQALPADPEIAVS

SEQ ID NO: 187000 - protein, 365 aa, unidentified
MTNYKIGCDAHKRYSQFAILDHEGHFLQQVRVNHMPGAIRDFLEDFPQGTPVALESVGNWYWIVDEIEAAGCLPLMAHAAKAKVMMGNVNKTDKLDAKGLATLLHLGSLPTVWLPPHEIRDERELHRTRMALSKQRTALKNRVHSTLAKYALSLDTDSDIFAPKWRPELTKACRALPPETQRCMHEHLIALDHVQGQIKELEERIKQRVEIIPNIQLLKTLPGVANILAIVIEREMGIVDRFSSSAHFASYAGTVPTVKSSGGKTRYGRLRKQSNQYLKWAFIEAANVVVRQRRHPNWRTKHVTILYERIRQRKGHSVAVGAVARHLSEAAFWMLRKQEPYKDPARKVVTRGKGQREPNMVPQKP

SEQ ID NO: 187001 - protein, 355 aa, unidentified
MSQEKYIGMDVHQATISVAVMDSSGKLIMECILETKTATILEFIDGLRGTLSVTFEEGTSAAWLHDLLKPYVSHLVVCDPRRNALLKDGSKSDRIDARKLAELLHGNKLHAVYHEEHGVRTLKELGRSYLTITKDLTRVMTRIKALYRSWAIPCSGTTVYAVRHRAEWLAKIAEPGVRLRAERLYQQLDLLQPVRQGARRDLMAESHKHHAVKLLRQIPSIGPIRAALLVALLQTPHRFRTKRQLWAYSGFAVETHDSGEYRFVRGKLRRNRERITVRGLNHNHNHDLKNLFKGAALSASTRPGPLCDFYAALLEKGMRPTMARLTLARKMAAITLTIWKKGVEFDAKQLNRQAA

SEQ ID NO: 187002 - protein, 341 aa, unidentified
MSAIGIDTHKDTLAACAVDELGAVLAEATFANDPAGHAALGRWANEVAPDARPGFEGSSTFGAAAARRLERAGLTVREVPPHLSRRERVRTRRAGKSDLGDALAIARVTAREHELPPIRRPDDATELGLLLAARGDLIAEATRTRNRLHADLVVLVPGYGGRIANLVWERHLATAGRALRRLPGVHAELARERLADLRRQHARIRALANRIGRLVAGHPLLGLPGAGPLTVAALVAETGDLDRFKSVDAFAMLAGVAPVPASSGQTQRMRLNRGGNRQLNRAIHVIATVQARTYEPARAYIARKMAAGKSWRDAIRALKRRLARVVFRLLALSQAPQVAAA

SEQ ID NO: 187003 - protein, 405 aa, unidentified
MPYILALDVSMGHSYSVLYKDDTCLFEDEIEHTQRGFHALLEEIQHLPERPLIVFEATGIYSRPVEKFFQDHHFSYCLLNPLEAKKQMEESTLRSWKTDKSDAHRLAQTHLKNQRQPKEVQSNFYLEMRDLARFYQEIEKKITRLRMDLHNCLQLTFPELEQFFSNRLTPYALTLIRLFPHPDFILASTRTKIKNKLINETRKKISANRAEQKADQIIHYAQCAYPAVEKDSIHCQKTIYYAELLQDLLEQKEALATQMIKKAEGSPCFLLYQTFPGIGALTAALLLGELGDITRFKTHKQLNAFVGIDIRRYQSGKYTGQDRINKRGNPKARKIIFFTIRNMIRQQRAAPNHIVDYYYKLKKQPIPKKDKVATVACMNKLLKCMHAMVRAHTEYDYAYAVSVDH

SEQ ID NO: 187004 - protein, 341 aa, unidentified
MEEYIGLDVSMKETAVSIRQAGQRIWRGKCASDPSIVAELIRKRAPSVKRVVFETGPLSVWFYHSLRTKGLPAICIDARHAKAALDMATNKTDANDADGLAQLAEVGFFREVRVKGFDSMLTRTLVAARTRLVRITTELSNQIRGVMKTFGLLVPAGKGSTFEKNVRSLLTDQDRLASIVLPMLEAWRGIRVRAAELGRQLVRDARQSRACRILMSIPGIGAITASSFTTAIEEPDNFRKSRSVGAWVGLTTRRYQSGEVDYDGHISRRGDHHLRGLLYEAAAVVLTRSSTHSTLRTWGLQLRERIGFKRAAVAVARKLAVIMHTMLKTGELFNPNAGAAA

SEQ ID NO: 187005 - protein, 338 aa, unidentified
MGTISTIGLDLAKNVFQVHGIDSLGNILVRRRLRRGEVLRFFETLPPCLVGMEACGTSHYWARSIAAFGHTVRMMPPVYVKPYVKRGKTDAADAEAICEAVTRPTMRFVPVKSPAQQAALLQHKTRDLLVRQRTMQVNALRGHLAEFGIISAAGVAGLNQMMTLLHAEQEMLPEPARKLFQEIVAHLRALEQRIDDIEKQIVAEHRASSVSRRLAGIPGIGPITASAIVAAVPDASTFRSGRQFAAWLGLTPKSHSSGGKERQVGISKQGDSYLRRLLVLGATAVIRLARKENASRQWAAKLLEKKAARVVSVALANKTARIVWALLTTGNAYSARSA

SEQ ID NO: 187006 - protein, 458 aa, unidentified
MAQIKRSNRRRELSPVHPDAAAIDIGATMHVAAVSPERDPEPVRTFGTVTSELHRLADWFESRGIKTIAMESTGVYWIPAYEILEQRGFEVVLVNARDAKHVPGRKSDVSDAQWLQRLHEYGLLRGSFHPQGEIAALRAYLRQRERLLDYAASHIQHMQKALTQMNLQIHHVVSDITGATGMRIIRAFVAGERDPDTLASYRDRRCHASVETVRQALIGNDREEHVFALAQALDLYDFYQKKVAECDARIEAVLKRLKEAGDKPAGKLPAPRYRITQQPNALGFDIRAALHAILGIDLTQINGLGPYLALKLVSECGTDLSAWPSAKHFTSWLCLAPSNKISGGKVLSARTRRSGNRAAALLRLAATTVGRTDTALGAFYRRLSARVGKAKAVTATARKIAVLFYNALRHGMNYTDPGASDYEERYRQRVLTNLQRRAKSMGYVLQQADAAPAATGVS

SEQ ID NO: 187007 - protein, 350 aa, unidentified
MLIIGCDYHPGFQQIAFLNTDGGELGERRLAHREEAEQFYGKLKEQNLCVRVGMEASGHARWFERLLHNLGFELWIGDAAEIRTKRVRKQKTDRQDAQLLLRLMMEDRFPRIWVADAQNRDLRQLLWHRHRLVQMRTRVMNQLHVVALNEGLRRKKALWRPAGRHELESLTLAPWASRRRQDLLDLLDQLTPKIQELTLALETEVGKRPVTRRLMTHPGVGPLTALAFELVIGTAQRFHCGKQIASYVGLVPSEESSGDRRRLGHISKQGNALLRFLLVEAAQVTVRSQPQWRSKFFHLAIRRGRKIAKIAMARKLAVHLYWMWRQGLDYGQFEKLGSHAGEPGNRHGVQ

SEQ ID NO: 187008 - protein, 344 aa, unidentified
MKNLSARRSGQTMSAVVCGLDVHKETSYATVLDRDGQVLVQRKMMNEDIPAFLEMTHPDKLAMEASTYIIPLYRKLTESGYDVTVSHPRKTRLIAEARIKSDRVDSRALAELLRLDSLPTSYIPPRDIAAIREKVRRRAFMVRQVTKLKVKIRDVLAAEGVKPPTGHGLFTAKGVEWLRSLNLEPVDCYLRLIEPLKEEVKLVSGDLKRSAGKDDEVQLLMTIPGVGYYVALLVKSEIGDVRRFSSGDHLASYAGLVPSTRSSGGVERHGGITREGSRWLRWAMVEAAMVHVRYDTPVTRFYHGVAERRGKRAALVAAARKLTEVCFSVLVHGRPYFNPLDAQA

SEQ ID NO: 187009 - protein, 336 aa, unidentified
MRYIGVDLHTTQITVCYLKAEADFEIRKYQLVEMEKFVNSLELSDEIAVEATGNTRWFSEQVASIVRRVVVVNPRQFEVVKNSCKKTDKRDALNLARFLRADLLPEVRAKREEATTVQSLVNTRTKLVRLKTSLINKIHALYVANGRKLKKASLASDKGLEKVLLQEWSAIERIELEIIIEQIRSLKVSIKKLDTAIAAESEKLQGYESLVSMSGIGSLSAGILLAVIGEIKDFATADKLASYFGIVPRVSNSNETVNHGRITKRGNKTGRTTLVQCSLAAIKKNEYLKKYYDGVKARRGHGKAKIALARKYLGIIYNTLSNNWVFADFNNFELAE

SEQ ID NO: 187010 - protein, 390 aa, unidentified
MDVLYQSCAGIDVHQANIVVCILHGPLTSTRPKREMATFDTTTKGLRACHDFLSQFHVEAVGMESTGVYWRPVWHALCDDFKLILAQPAHMKAIPGQKTDKKDAHWIAKLTRIGLLPRSFIPDETIQELRELTRQRKHYVESRNRETNRIHKILQSGGIKLTTYIEDIMGLSGRNLLQLLVDGTPITPRIVHQSVYTSLKKKVPQLLEALDGYFSDHHRFMLKQSLEIYDFYQKQIELLEERMNVYLSQYENHVEILDSIPGIDVITASVIISEVGVDMSQFPTAGHLASWAGLCPGNNESAGKKRSTKIRHGNSYLKKCLCQAAFAIKKQKGSPLADRFYQIQSRRGSQKATIALAHQLLKIAYILLKEQITYPEFLAQKKTTRDELVA

SEQ ID NO: 187011 - protein, 346 aa, unidentified
MRILYCGIDAGSSHCHFVVMDKDGEYVVDTEISTSELHLSAFLDSLQKDDEKVKVHMEAAELSGWIRGIIMERTDIKDVVVSDPKRMSWIAKDPHKKDPIDAYKLAELLRLGRTHPVYYSDDKKMRFFKSQVQYQESLSGEKARIKKKIKAALRRIGIIFKSNEAYSKRRRPEILRSIEETTYRASVEDLYELLDKTQALCRKAEKRLAKAAENWPIIEYFMEVPGVGLILSCRFVAYVQTPCRFATKQKLWTFSRLGLSHRSSDGKQLSAPRLDHNGNGTLKDLSRKVFEGAKKRDDDNAFKRAYYRYLKTTNNEMHARLTVQRKVLTTLWTMWRNNERYDDRRG

SEQ ID NO: 187012 - protein, 413 aa, unidentified
MDVFCGIDWAEDHHDIALIGQDGQLLARRRISDDAAGLAALLGLLAEHGDSPDDPVPVAIETPRGLLTACLRATGPKVYPINPMAVARYRDRHSIAGRKSDHGDAVVLAGILRTDAHAHRPLPADTELAQAIAVLARAQQDAVWARTGAHNKLRSHLREYYPAFLAAFADARGGITRPDARLILAAAPDPAAAARLTLAQLRALLRKTGRARGIDTEAARLRDAFRAPQMRQLPLAGEAMGRQALALLRQLDAACTAAEDLEQAAVASFNQHPDAGIITSFPGLGPLTGARVLAETGDDRSRFTDAKGLKAYAGAAPITRASGKTLAVLHRRVKNQRLAAAGYIWAFSALTASPGARAHYDRRKAAGDRHTAAQRNLFARLLGCLHHCLATGQHYNKHTAFPPPTEQKRSEAA

SEQ ID NO: 187013 - protein, 329 aa, unidentified
MQNFIFIGTDVSKLTLDHGVHTSMVHQKLPNNSEGFKSWLKWALQFGSKEQLWVVMEHTGYYSYQFEVFLQGHQIRYTKVAAIEIKRSVGLVRGKSDKIDALLISRYGWMNQDRLKPQQLSAAVITELKDLVSLRDKLVRDRSGYKARMKEQAATRKYAKSHIQTKIQAQMIKELTANIKEVEAAIKKLIKEDEALLSNCNLLVSIKAVGFVTAIYMLAYTENFRKFLNSRKFSCYAGLAPFEHTSGTSLRGKKRVSHYANKKAKCLLNLAASVAIQHNPEMKAYYIKRVNEGKSKMGTLNIIRHKLIDRMFAVVKRGTPYTEIISIAA

SEQ ID NO: 187014 - protein, 341 aa, unidentified
MNDTKTISGVDIAKRVFQVHEVDARTGELRRVQLKRAKFLEYFANRAPCLIGMEACGGAQHWARRLTAMGHTVKLLPARQVRPFAGSNKSDQADAQAIWTAVQQPGIKAVAIKTEAQQAVLALHRMRQQLVKFRTAQINALRGLLTEYGEVMPRGRAALRKGVVDAFTRIAERLPQVLVDTLREQFARIGHLDDEIAEIERRLTDWFKEDAACRRIAAVPGVGMLTATAVVATMGDPRAFRSGREFAAWLGLVPRQRGTGGRLQLLGISKRGDTYVRTLLVQGARAVLLRSKAPSAWLVDLARRRPTNVAVVAQANKTARALWALLAHQRVWDANYGSQPA

SEQ ID NO: 187015 - protein, 343 aa, unidentified
MQITTIGLDLAKHWFQVHGVDANGAAAVRRKLRRSEVLSFFQSLPPCLVGIEACATAHYWARELTKLGHTVKLMPPAYVKAYVKRNKNDAADAEAICEAVARPSMRFVSVKDTEQQSVLMLHRTRNLLVRQRTMLVNALRAHMAEFGIIAPQGLRHVELLTKEVAHEQERLPELARQILQLIVDQLHDTMARVRAIELRLTRWHRQSQISQSLATVPGVGIMGASAIAATVVDPSLFRSGREFAAWLGMTPRQNSSGGKERLGRTSKRGDKYIRSLLIAGAVAVLRHARNRPTRDGAWVRALMERKPTKVAAVALANKTARIVWAVMMRGDGYRARQVLGQPA

SEQ ID NO: 187016 - protein, 347 aa, unidentified
MNHYVGLDVSVKETSLCIVDETGKICREVKVVSHPDDLIEILKDSAWHLVRIGLEAGPLSQWLFEGLASAGLPVVCIETRHTKAFLKATVNKTDRNDARGIAHMMRVNLFRPVHVKTISSQQRRALLTARKLVSNKARDIENDIRGLLRNFGLKVGIIGSAGFAARIRELLEGMADLKAVIEPLLAAREQLRETFTTLHRRVLSIVRNDMTCRRLMTIPGVGPVVALGFVSTIDIPGRFKNSKAVGPALGLTPVLNQSGESSRVGRVSLCGDQMMRTLLYEAAQVMLTVVRKWSWLKAWAMNIAKRRGHQKAIVALARRLAVIMHRMWSDGTVFHWSKEKEGGQVKV

SEQ ID NO: 187017 - protein, 318 aa, unidentified
MSDSVFVGIDVSSQTLEVASSDQAKTWQIGNDAAGLEALVAQLSTLAPALTVLEATGGYEFEAACALQAAGLAVAVVNPRTARDFARAMGALAKTDALDAKMLAAFARVLHQHPERERFVKPLADAELQRLQALVLRRRQLVQMITSERQRMRIAHSAARPSIERVIEFLKTELGDSDADVAAHVQRHHAELAQALASVPGIGAASVAVLLAELPELGKLDRRRVAALVGVAPLNRDSGQMRGQRTIWGGRADVRRTLYMATLTAVRHNPTLKIHYDHLLAAGKRKKVALVACMRKLLTMLNAIAKHATRWDPTLHHA

SEQ ID NO: 187018 - protein, 416 aa, unidentified
MSDENKVASIDVHKKVLMVVVGSREGDAIGPKGELERRRFGTTTIDLHGLSLWLREGGVKEAVMESTAEYWKPVWAELEPYMRLHLAQAFSNRAPKGRKHDFRDAERLLRRHVAGELILSFVPEPEQRAWRTLTRMKTRLARHRVRLHSQVECLLEEMRIKLSCVLSDLFGASGLRILRAMAEGETDPKKLAALGDDRLKCTKEQLLDALTGNVQAMHLELLTLYLQQLRLVDEQMEKLHRLIAQALKPHQEAVARLAEVPGFGPDSAQQVIAEVGVQASTFPSAGHLASWVGTCPGQEESAEENYSSRSAKGNKYMRRVLTEAAQAAVKAKGSHFQVVFRRLLPRLGYKQALWAIAHRLCRMVWKILHEAVHYVEQGAYRDPRARKQRARALAQALRRLGYDVQITPKEPATVQA

SEQ ID NO: 187019 - protein, 355 aa, unidentified
MMIIGVDFHPAFQQIALLDTDTGEFQEKRLVHREEAEKFYRALAAGSQGVRIGMEASGQARWFERLLAELNFELWIGDAAAIRAKQVRKRKTDREDAQLILKLMLKDDFPRIWVPSWENRDLRQLLWHRHRMVQARTRIMNQLQAVALNEGLRCKKRLWREPGRQQLESFRLAPWASRRRKDLLDLLDRLNPTITELTQAIEQEADKSPEAKRLMTHPGVGPLTALAFVLIIGEAERFPCGKRIGSYLGLVPSEDSSGNRRRLGHITKQGSTMLRFLLVEAAQVTARSIPQWRSKYFHLMMRRGRKIAKVAMARRLAVALYWMWRKGCNYEQSTSSVRTRASSEIAMVCSKTSSN

SEQ ID NO: 187020 - protein, 391 aa, unidentified
MRFAGIDVGSEHHTIAIVDEHGDPIQRSLSITEDADGYRRLRDVLGDPTDCLVAMEATGHYWRNLFASLTTDGFTIALLNPIRTRRFAEEELQRTKTDNVDALGIARFAAQKRPKATQLPHPATQELRQLVHLRRQAIQHLGDRVRNLHRAIDLTFPEFTRYVRGLDTELANAILSRYPSALSLAAVTVTKLAKLCFDGRRRVGPTLARALIAAAKQSVGSLQTAPFELEVRYACQDICEMRERCRQLEDDIQRRIDWHDLGKLFTTIKGISTLTAAAIIAEAGDPARFPNAATFASYVGVVPRLHHSGKRKFSGNGAIPLGNARLRHALWMPVLVAIRVNPWLRAYYQRLRAVGKRPKVAIIACMHKLLAAVYSVAKNRRPFVPRLSADL

SEQ ID NO: 187021 - protein, 457 aa, unidentified
MTGKEKGRRGKSSGSFSTINEHAAGLDVGSTFHVVAVRPDLDERPVRTFRSFSGDLHHMADWLMTLGIKTIAMESTGVYWIPVFEILEARGFDVVLVNARDVKNVPGRKTDVNDAQWLQQLHEYGLLRGSFRPRAGVAQLRTYLRHRERMVEYAASHVQHMQKALMQMNVQLHHVVSDITGVTGLRIIRAIVAGVGTPAQLATFRDIRCGVSEETIREALEGNYRAEHVFALKQALELWDFHQAKIAECDIEIEKVMKSLCHSCERPAKSIPPMRHAKNRNEPKFDVRSGLYTLLGADLSQIHGFGPYTVLRLIAECGDDMRKWPTVKHFTSWLTLAPGNKISGGRLLSSKTRRSSNRAAVLFRIAAVNIGRTQTALGAFYRRLSARVGKAKAVTATARKLAVLFYRALRFGLEYVDQGAHYYEERYKRRAVENLKRRAHDLGFTLLEKSELAQGVS

SEQ ID NO: 187022 - protein, 526 aa, unidentified
MVTKNKKRKSTGSKKRFIGKPTGQIQPRVQAVGPEHFGIVAVDCAKRRSKWMLCNFYGKVLVESTTVEHTAGALRVMTQLVAEACQAEGLTDTLVAVEMTGIYHKPVWRAFRKAQFDTRIVHPFASHHYRRPLHPDAKTDDHDLEAIFHAAVKGYGLATLRVDEVYQSLQAVSRHRHNLVKQRARLMIQIRRLLHQTMPGFADLFADDQLFRKSIALPVALQFSSADAIRQAGTGPIAAHLRKTKVRFQTRTIERIVAWSSTAAESSEVAAMHTRQWQQLNEVRQLLAAQIVGAEQEMAGFLVKTPYILLLSVTGINVVSAARLAGEAGPIEHYTSARAINGRAGLYPSRYQSDEVDRADGSLVRQCHRKLRGAAMLVAENLIKCHPYYRGLSELWKQQKVDPRDRRCRIANRAMRMVYQLVGGRQLWRGKSVDREYLLAKLQEFHRVHNTPIDQAIRDLHEAFAWLPKSAYNEEAQPLVEWSRKKQRGPQPIGDLMIPLLIRLGVAIEEENQHVESNTSEARSSD

SEQ ID NO: 187023 - protein, 441 aa, unidentified
MAMRKRDEEEVFPHAAGIDVGASSHWVAVPKHLAEESVREFGAMTDDLNALADWLLACSVDTVALESTGVYWIPIYEVLEQRGLKVWLVDARQMKYVPGRKSDVQDCQWLQRLMSLGLLRAAWRPSDEVCVVRAVVRQRDVLLTEQGTWVQRMQKALVQMNIQLTEVLSDVMGMTGQAIIRDIVAGERDPLVLARHHNHRIKASKDEVTKALTGNWRDEHLFLLKQSLAIFDDLAKRVQECDAKIEALLAPLQRHTVQLKASLKGKGKNNPAFDVRQAMANWAGVDLTRIDGLGVSVVMKLLSEIGTDLSRFANVKHFCSWLGLCPGTKVSGGKVLSAGTKRSANRARQALKMAAMSLSRSDSALGAFYRRLCSRMDKPRANTAVAHKLSRMVYYMLTRGEEYVDQGRERYEEQQRQRSISALKRRAAALGFQVAPIAAAA

SEQ ID NO: 187024 - protein, 367 aa, unidentified
MFKVGDKSESVTADRDGSRGRILMPEAVMSKRSLQVQETMYGGIDVSAKSLAVAIQRVRQPVEQKSFPNNPNGHRALIVWLRKAKSPVRVSLEATGIYSLDLAFALDAAEGIEVAVLNPKVANRFAQTIRRSKTDAADAEVLAEYTHRMPFTAWIAPSASSMRLRAIVRHVETLSVQSAQNQNRLHAAHGSASTPGCVVRDLKRSVASLELRISGLRREAMTLVRQDDLLRKRYELLVSIPGVAQVSAMQLLAELSTLPSDLTVREWVAHSGLDPAHEISGSSVRKASRISRAGNRHLRRALYMPALVASRCDPHAKAFFERLLARNKARLQALIAVARKLLHAIYGIFRSGVMYEGAKLFPSITLS

SEQ ID NO: 187025 - protein, 421 aa, unidentified
MDTQMLNEEPIGVVHPRCCGIAVHKRAVQACLLVSTPGGRVRQEQRAFATTTDALLALADWLVAVGCTHVAMESTGVYWKPLYNVLDGQVALLVVNAQHIKAVPGRKTDVTDAAWIAGLLRHGLLRPSFIPDRAQRELRELTRYRTSLVQERAAEVNRLQKTLEGANIKAAGIATDILGKSGRQMRDLLVAGETDPAVLAQCARGRMKEKIPLVERALAGRFGSHQRFLVARQLAHIDFLDHAIAEVSAEVAARLAPFEEEIALLDTIPGVGRETAEALIAEIGADMGQFPSAAHLASWAGMAPGNHESAGKRKSGKTRKGSRWLRATLVNAAHAAGRTKHTAVGARYRALVARRGKKRGAVAVGHTILLIAYHVLRDHEPYDDLAQQPVVCHHAPHPNHLVQQLQEMGFDVTITPKAPAA

SEQ ID NO: 187026 - protein, 408 aa, unidentified
MQLLYARCAGLDVHARQVVACARIVVDRTVSYHRLTVPTTTRGLLELLDWLTAHEVTHVAMEATGVYWKPVWHVLEGHVDLILANAQHVKHVPGRKSDVTDAQWLADLLAVGLIRSSFVPPTPVQELRDLTRTRKQLVREIGRHTQRLQKILEDANIKLTETISDIRGQSGRAILRALIAGETDPERLVALTRGLKASRAQLVDALHGRVTAHHRFMLKLHLDQIEMIETGLLTLEQRLSEALGPFRAAADLLKTMPGISDTVAAVILAEISDNIRPFPTAGHLVSWAGFAPRLDESAGKRRSTRTRPSAPWLKTTMVQAAWGAARTKDSYFHAQFARLKSRRGPKKAIMAVAASMLTAMYYMLRDGVEFHDLGSHYFAQHDKDQITKRLLRRLRDLGVDVEVKNRAA

SEQ ID NO: 187027 - protein, 369 aa, unidentified
MYKVVSMQNLAESPFCHRNSIMEMHQVGIDVSKAKLNVALLLAPEFSKKKTKVVPNNPEGFSLLIEWVNRQVNDQRPFRFIMEATGAYHQALALFLSDHGFEVHVINPAFIKRFGESMAARTKTDEKDCVIIAHYGLNKMNLKPWVPPSPEYRALDQLLRRLAQLDKMIRQEKNRLESLGSGPADQDVMDSIEKTLSYFEKESKQLLKKIKDHLDRHPDLKDDVKLLTSIPGIGEMTALRLATALEGGSRFASARQFAAYLGLTPKQNQSGTLKGKSSLSKMGPGTLRKALYMPSIVACQYNPDIRNLYDRLLKAGKTKMSALGAAMRKMAHIAFGVLKNRQTYTAFFSPILEPEVGKEANPFVVGLLS

SEQ ID NO: 187028 - protein, 350 aa, unidentified
MKTKYPVIIGIDTHKATHVAVAIDTQGIRLAALSIPTNPKGYLELERWSRSLGQVLAFGIEGTGSYGAGLSRSLLAHDHNVIEVTRPNRQLRYTQGKTDSLDAEGAARSVLSGQATARPKTQTGSSEMIRHLKIARDTAVKSRSQAMVTLKTLIINAPANLRDALDHIRGKVGLIRHVAAFRPGDIDNPLASAKAAMRALARRWLWLHEEIITHDRELERLVTERAPDLMASHGIATLTIAEMLILVGDDPTRIRSEAAFAKLCGVCPIPASSGKIHRFRLNRGGNRQANAALYRVAIIRMRSHEPTLAYVKKRTKNGKSKSEIIRCLKRYIVREIYSQLCVPKPVKTAT

SEQ ID NO: 187029 - protein, 349 aa, unidentified
MSHKLNAGIAVIGIDIGKNSFHVVGLDRRGAIVLRQKWSRGQVETRLANLPPCLIGMEACVGAHHLSRRLTSLGHDARLMPAKYVRPYSRGQKNDFRDAEAIAEAVQRATMKFVATKTAEQLDLQALHRVRERLVSQRTGIINQIRAFLLERGVAVRQGLRFLRAELPRILATPCDALSPRMLRVIEDLAGDWRRLDERIEDLSSEIKVLARRDVGCERLMGVPGIGPIISSAMVAAIGSGDAFTKGRDFAAWLGLVPKQISTGDRTILGKISKRGNRYLRVLFVQAAWVVLIKPKSWQHHGLKPWLEAAKKRLHHNVLAIALANKLARIAWSVLAHGRAFEASKIQVA

SEQ ID NO: 187030 - protein, 421 aa, unidentified
MRAVALDVHRDFCEVALVEEGDVRSSGRIETKPEALELFAQSLDPRDWVALEVTGNAWAIAGILERHVARVIVVSPNDTGIRQARAKTDRLDARTLAKLLWAGELDGVWTPDERIRTMRRRLSRRAQLVRARSRAKNEIHAVLMRCLKDRAPASDLFGVKGRAWLSEQQLPLCERETVDAGLRQVDFLNGEVAAVEQLIAADALSWPDVKRLMTVPGVNVIVAATFMAAVGDIRRFGDRRKLTAYLGLDPKVRQSGDAPATHGHISRQGSSSARHALVEACWSTVRQPGPIAAFYARIRARRGHSIAIVAAARKLACLFWCLLTRGEDYAFAQPSLTKKKMRRLELAAGAPKFQGGRDVWSTNKAMRQAERELALQAQRAYERTVKDWQQRGASATPGHASQTPSSGKAARQTSKPQRSAL

SEQ ID NO: 187031 - protein, 430 aa, unidentified
MKSNTQNAKIEAITEKTLVLGIDVGSEMHYARAFDYRGIEYSKKPFKFSNTEAGFVTFKEWILDLKERHEKDKVVPGMEPTGHYWFNLGKFLQDNEMKPVLVNPHHVKKSKELDDNNPTKNDRKDPKVIAGLVREGRYMIPYLPDGVYADLRTASNIRFQLQAELTRIQNRISRWFNIYFPEYKTVYGKPDAKSGMLILKAAPLPEDILTLGIDGVNQIWRDAKLRAVGKARAKTLIEAAEHSIGSKEGTMSARMEIRMLLEDYESRNTRLQEVMVLIEELVKEIPMAEKLLEIKGVGIRTVSGFLAEVGDISRFNNPKELQKLAGLALVENSLGKHKGETTISRRGRKRLRYLLFEAAMSLVAKNPEFRELHNYYTTRRLNPLKKMQSLMAIAAKLIRVFYAILTKGVDYDPKKMISDIKRPTVYLQAA

SEQ ID NO: 187032 - protein, 484 aa, unidentified
MRPWITNICSQSRDDYRISFESTGALEFDNEYSGLAVAPAHRYCFRRIQARIPCYKSNILELAMKDSQYTAFVGIDWADAKHDYCIQSSTAKSTDKTFGVVAHVPAELEEWLLALHQQYGGRLAFALELSSGPIVSVLQKYDFIDIYPITPSTLAKYREAFKPSRAKDDPSDAELALDLITRHPERFKKLQPQSVEMRTLVSLVEHRRKLVHERVRVTNRLRTTLKQYYPQILEWFDHIDTPMFCEFLENWPTLKKAQRVRKTTLTTFFSKHNMDRANVLERRFNAIDAATALTNDPAIIDPHQLLALAHADMLRTLLRSIAKYDKQIASIAPQLDDYQLFESLPGAGPMLTPRLLAAVGEQRDRFKTAAELQQYAGIAPVTERSGKKHWVHWRWQCPTFLRQTFIEWAGQTIKYSTWARVYYDQQRNKGATHQAAIRSLAFKWIRILYSCWKTSTPYDESRYINTLKKRVSPLMSQIELAKTA

SEQ ID NO: 187033 - protein, 337 aa, unidentified
MIVVGLDVHKHSLAAVAVDELGRPVAEHAGPVDEQVVVWARSLGEERLWAVEDCRHVTRGLEQALLGHGERLVRVPPRLTAPQRRRGRTRGKSDSIDALAVARAALQEPQLDGPRVGEETLRELKLLVDHRDDLVAERRRCQQRLRWHLHELDPTLTVPLGALDRAVWIDRLARQLARREQATQTRIARDLLARCRTLTRSISELDRELQTRTQALAPRLLKLAGCGPLSAAKLLCEIGPIDRFASDAQLARHAGVAPLDASSGKHQRHRLDRGGNRQLNCALHRIAVTQGRVHPPARAYLERKQSEGKTRREAIRCLKRQLARTVYTTLKNEPLLT

SEQ ID NO: 187034 - protein, 441 aa, unidentified
MRVMYERCCGLDIHKASITACALITEKGKTQEETRRFGTMTADLRELAGWLQQKGIRHVAMESTGVYWKPVWNILEPAGFELLLANAQEVKVVPGRKTDQKDSQWIADLHKHGLLRNSFVPPRAIRDLRDVTRGRAILTQEHTSVCNRIQKVLEDANIKLRSVASDVFGASGRAILRALMKEENDPEELANLSKGKLRNKIPQLRRALEGQVTAHHRALITGHWNQLEFLERQIADLETQIGERMKPTPAEMALTMQNVSEDAPVPLSPREEAIQLGMEIPGLGWTSACSMVAELGVNMDQFPSAAHAASWAALCPGNNESAGKRLSGKMRKGNIWLRRTMCEVAWAASHTNDSYFAAQFRRIASRRGRKRALMAVAYSILVTAYSMLKHKRHYKDLGADFFDGINRDKVRDRLVQRLAKLGFDVTLKSKGTVEGPADVTE

SEQ ID NO: 187035 - protein, 423 aa, unidentified
MTDPPIQVWTRYIAIDIHKHYLMIGRIDAHKRIVLQPRRIELHRWRAWAPANLHPTDAVVTHATTNAWVIYDQLVSLVGHAVVAHPAKVKLIADARVKTDTVDVLTLAQLLRADMLPEVWVPPPHVRELPSLLSHRRRQVSLQATAKNRLQSVLHRLNLRPPDGDLFAQRPRDWWDTLDLSATERLRVDQDLATLEHIQPQIAAIDAELRRLSTSELWAEQVPYLVQLPGIAVLTAMTILGALGDVTRFPTAKKLVGSAGLGAGVHDSGKTHRDKGITKQGRRDLRYVLIEAARTAVQTHPYWKRAFAQLAKRIGEHKAVVAIARKLLIVIWHVLLAKSADRRADAEQVAFKLMVWSWKLSDEQRGGLSSRQFIRAHLIRLGLGAELMHITRGRTKRALATIEEVLALRPELRGPPQTEQNGS

SEQ ID NO: 187036 - protein, 341 aa, unidentified
MDKELYFGVDVSKKTLDLAYYDGETIDWKNAHIKVSNDDAGFKKIGSWVARVGKDFDTFLFCMEYTGLYNQNFRLWLESKEYIYGMVEPRKMHRFEPDLDDDQRSLDRIKTDELDAFRIAIYCEQNHKKILRNPSKLPSPVYFKLKRLLAERKQNTKQSTLYKQQLHDICAYDTDLSVERKKLLLKDMKENQKAIDKEIDSYMNEDASISKNYDLLTSIPGIGRIIALETIVLTENFTAISNPRKYACYIGIAPFKKESGTSVRKRTSVSKKGFSEAKADLSIAVLSAIRNNPSIRDYWIRKRKEKCGGIVLNAVKFKLVLRMFAVIKRGTPYVETDAYKN

SEQ ID NO: 187037 - protein, 403 aa, unidentified
MSQEHSIDIFLGLDVGKSEHHACALDRDGNKVFDKPLPQLESDLASVFHQLQEHGTVLVVVDQPNTIGALPIAVARACGCEVGYLPGLAMRKAADLYPGRAKTDKRDAFIIADTARAMPHTLRAVDRNNEVLSALKMLSGFDDDIARDCTRTVNRLRSILTQIYPSLERVLAGSTLTRTPILDMLIHYKGPQWLKRAGYHRVLNWMIKHTRKDPTPLVDEIFAALKAQTVTVPGSDAAELVIPQLAANIKALKEQRDTIAEQVEGMLDDFPLCEVLMSMPGVGIKTATQILLAIGDGSDFDSAGHLAAYAGIAPVTRRSGSSIRGEFPARSGNKRLKNALFYSAFAAIRSHEPSRQYYERKRAEGKRHNAAVICLARRRCNVIYAMLKNKEFFREIPPRPVAA

SEQ ID NO: 187038 - protein, 351 aa, unidentified
MPRKPTVHTVTTIGIDMGKNTLHMIGLDSRGAIVLREKVWRGRIASRLANQSPCLIGIEAGMATHYVARELAALGHDVKQVPPTYAKPFRQGHKNDFRDAHAVAEAVQRPTTHFVPAKTDEQLDLQALHRVRSRLVSERTAVINQIRGFLLERGIIVRQGLRFLRQQLPDILAKRTEVLSPRMVRIVSDLAGDWRQLDERIEIVTDEIETLAKGNDNCRRVMTVPGIGPIISSAMVAAIGNGAAFARGRDYSAWLGLVPKQMSTGDRTILGRISKRGNGYLRMLFMQAARVILLRPANWPKHSFGAWLIRAALRLHPNVLAAALANKLARIAWTVLAQQRNYEARVTKAAA

SEQ ID NO: 187039 - protein, 377 aa, unidentified
MSKIRFVGLDVHAETIAVAVAEAGGEVRAHGVIPNRLESIRKLIGKLGPVGQIKACYEAGPTGYVLYWQLTQLGVVCEVIAPSLVPTKAGDRVKTDRRDAEKLARCYRAGELTPVWVPDAAHEALRDLVRAREAAKKDQLKARHRLGKFLLRHGRRPEGLKAWTKKYLEWIKTHVHFDQPALEVTLADYLEEVDHVAARIVKLEKAIDEAVRLAPPEIRAVIEALQALRGVAQTTAATIVSELGSVSRFQSPRQLMGYSGLVAREHSSGNRVRRGGITKTGNSHLRRVLVEAAWAYQHRPNVTGFLLRRQKNLALSDEVKKIAWKAQQRLHKRYQAFAARDKNKNQIVTALGRELLGFIWAIAVHTEKQQKQLNKIA

SEQ ID NO: 187040 - protein, 357 aa, unidentified
MGKSIQKLSSVTRLGLDLAKKVFQVHAVDANGEMVVARKLARGRLVGFFSQLPRCVVAMEACSSAHHWGRQLLALGFEVRLIPPAHVKPYVRRNKNDAVDAAAICEAAGRPSQRFVPVRSIENQAELMRHRARELLAGQRTAALNALRGHLAEIGVIAPQGVQHAYDLKRLAVDGFDEYGEVVVPDCVRVALRPLVSQIDAFDEAIGAIDNEIAMSVKADETAKRLMTVPGVGPVTASAIVATIQDMGDFASGREFAAFLGLTPRQSSTGGKPRLGRVTKMGDRYLRKLLVVGACSTLSHRKGHNDALRLWASGMLERKTVRYKFKLTAVALANKVARIVFVLMTKGGQYDDRPVAA

SEQ ID NO: 187041 - protein, 359 aa, unidentified
MTSIALGRGDVVVGVDTHKDEHVAVALDGLGGRLGELAIAANPNGYGELLAWADQLGAVAAFGIEGTGSYGSGLARFLRRHARKVIEVSRPPRKGERRLSGKSDTIDAEHAAREVLAGKATATPKLADGIVEAIRLVKIARDSAVNAHSQAMITLKATLVTAPDELRAQLEPLTDFKLIQACAALDGSGEVADPAVAMRHVLRSFARRWLELHEEIKVHSRHLKKLTKTAAPDLVAAFGIGPDIAAEMLVTAGDNTDRIRSDAALAKLCGACPIPAGSGKTNGRHRLNRGGNRQANAALYRCIIVRMRWHPPTIAYVERRTAEGLSKKDIIRCLKRFLAREIYRLLPEPSAPTELASAA

SEQ ID NO: 187042 - protein, 547 aa, unidentified
MNITTVGAEKKEELIVNSENHKDENVNSRDPEKHEDLDSAKMRKDLQDTQWTEMLNRRDEAIRQTMRDKYIKVGMSTKGVHDALVKIDDTLKALREEIRSGTGVYNWKNLEVGRRFTTDDKIGLIDEQTLIVGADIGKNEHHIRAFNKSKKELKRKDILRFDNREEGLEKALVWIEEKRVEYGFTKVILGCEPTGHYWFDAALYFERNGITVVLVNPNAVNKSKELDDNSQEKDDRKDPSVIAKLVIDGRYSVPYLPEGNYAALREIENLRIRYMEERTMCINRLHRFTDIHFPEIDDVTQSPEGKTNQLILLNAPLPEDLIALGVEGIQQLFRKNKLRGVGRKLAKRYYDAAVKSIGVTAYPEMARIEARYLAEDIQKYDERIADLEERYAEYGVKIPNMEKVLEIKGIGIASLCDALAEIGDISRFEDASQIFKLAGFVPVHQSSGKHIGEFKISKRGRKHLRKALWILAKNVSTQNDEWRQLYNYYLTRENNPLTGYQAYVAIAGKLLRVIFAILRKGYTYDPQKLLSEVKRVQTKPEEEAKIA

SEQ ID NO: 187043 - protein, 477 aa, unidentified
MAHPTKGPPDLQAVPMLKYESLYVGIDVGKQRHVAGFVSTTLLERHQRFEACPALAFEQSREGFRALMERIRSYAPLEQVSVLLEQTGHYHRTLVQYLQEFDIPVYIMPVQKRPPGILKTDKRDALSLANHLFNQLERGIQLADKTHLVRRLLTPTETALQLQGWMRHRYELVQECTRRKNKLTAICVELFPELTQVLKDPNLPTALALREHFPTPHALATAPFSALIALRAKSRPTLGQLEQLQQVASQSIGTKEMIRQRGLVLEQSQLIRELRMLQEHIEQLDTEIRRSIEQSREGKILTSIPGIGSIQAAAIIAAMGNVLNFERASRLKAYFGWAPQEERSGTSLDRVHLTHGGTRSMKQMLFLCVASAIQLDCEWARLYKRLVPKKCPYDERTQSYRGKVKVMGRIAGQMIEMVYALLKQDAEILSQFAPGKTPPDPILYDPEIHRRHRNGEYRPIKNVPCQRKVIRLPERLS

SEQ ID NO: 187044 - protein, 399 aa, unidentified
MKNLVSLELRVSVDIGCRSHNVAIGLSSGEILDEFSITHEPEGFRQFFSRIEKQERRFGCPVAVAMEGYNGYARPLDTLVRAHDYRLFNINNLKLARFKEIFPGAAKTDGIDARKGLELFQICDHLPMAKDVLQEVRKTPQGNEILKRLSRRRRRLVDERVRVLNNLQSDLHAVCPGLLEITGEADNLWFLNFLISTDDLRKLARMREATIRKIPGIGKTYASVILQWQKQAQFSHDVEWVGEMIQEDAARVLELRDKIESLETKMEDVALSSDIAQTLATIPGFGAICTSELAGEIGTIDRFNNEASLALYLGMANLDNSSGKQKGSKPPQQVNTRAKAAMMIAVDRHRKKVLQSQRYYNKKRAEGKKHNQAVRALGRHLCRVIFKMLKEVRGYILPV

SEQ ID NO: 187045 - protein, 318 aa, unidentified
MIVKHFVGIDVSKGDFYACINDVEAPRKFNNTPAGVRGFLSFLNAQQYLPRTTRIGLESTGPYHYPLSFSCTRQGYTVNIINPLITHAYNKTTVRRTKTDKKDASLIRYVLTQGAGYPFVETTDTLILKNLARERAYLSNMKRDIQRKAKDVQYKEAIINTPITNVNQEVFALLSEKMKDIDRQLRQYKTQEQTLLQSIPGLGPTTAATLVAEITDIKRFKTPKHFTAFIGLDPRTHQSGTSIHGKGYITKRGNKILRTLFYNCASVAIQRPNTFQDFYHKKVSEGKPKMVALIATTHKLAKVAYAVWKTNTSFDPNH

SEQ ID NO: 187046 - protein, 321 aa, unidentified
MVVGIDISKLKFDVCCLFDGKKSSKVFSNDEAGFVAFLEWVKDLNTASSDVHYCMEATGCYHEALAEHLHGNGCKVSVVKGLLIKRFRECKTIRNKTDRADAFAIAEFCLQNNPRAWTPKPLETKELQDLNKYIHYLKIELNRWGNRLEKKHCNKKVEEGINKKIEQLTEEIKELEEEIQNLIDKSPNLAEKAQNLGEIAGVGPKTILAVLAEMPDVNNFKNAEQYAAFVGVTPCHYSSGTSVRGQSRISRQGNSGIRKTLYMAGLSVKRYNPHFAKWIQKLENKGKPPKVIIMAIVRKLLHIIFKMLKSNQKFDPRLAFM

SEQ ID NO: 187047 - protein, 357 aa, unidentified
MTQVNKLDFTGATIFCGVDVHKKNWRVNIQDREFELEDFSQNADPVLLHKHLNRKYPGATFKVCYEAGFSGFGAQRWLSGKGIDCQLVNAADVATTDKEKRQKTDKIDARKLCEHLQTKKMKGIYVPSIQWEHGRSLVRARAKIVSNQTRCKNRIWQLLHFSGLPLPKGYEAGQYWSRNFIKELQTTDCSTQELKITLDLYIKDFLQTRALLLEATRAIRKLCRQVPYQKGIFFLRSIAGIGEINAALILFELQDIKRFKRFDNLCSYVGLVPNTHDSGETKKSKGITNRCNYYLRTALVESSWSVVRKDPALLMKYKGYCRTMDKNKAIIRIAKHLLSRINYVLKNEKEYVTGVVA

SEQ ID NO: 187048 - protein, 472 aa, unidentified
MSSNQGRSLESRLRRQAEEAAKLASLPVRHPHAAGIDVGDASHWVCVEHTPDGSATTREFPAHTPGLRDLMAWLTSCGVTTVALEATGAYGHVLFLTLLEAGWQVIITSPKFTRQIQGRPKTDRLDCQWIQRLHRHGLLPSVFQPDDATQTLRDFVRQRANLVRLSGQHIQRLQKALELMNLKLTTVVEDVTGVTGLKIIRAILAGERDPRVLAGLRDRRCKRTADEIATALDGRYRDEHLLELRCCFHLWEQYLAMIAEVDRAIAAQLQRMKKTAELPPLAKREHVRGRRPHDPAFDVRTALYLMLGLDLTALDGLDELSALTLISELGTDMAKWPTVKHFTSWLGLCPNFKKTGGKVQSSRTRRGKGRAAYTFRLAAWSLIRSKGYLGAHLRRQRSRLGAPKAITATAHKLARIFYTVMRYGLDYHRQSDEEFVIEHRKRMEKNLHRRAKELGYELRKVGQPEPEQLTAT

SEQ ID NO: 187049 - protein, 354 aa, unidentified
MKRTTKYVALDVHQAMTVASVREESGRIIARSIVPTEESAILEFFRGMRGAIQVTFEEGTQAQWLYDLLVPVVDRVLVCDRRGEKRHKRKDDQADADELSELLRRGGLRAVYHGSPQRSTLRELTRTYQNVVEDSTRVMLRLKALFRARGIKTPGKRVYHPKDRQEWLAKLGDDGARFRAQTLYAQLDVLRELRPKAKVAMVAEARRDPSWTVLRSIPHLGPVRIALILAIMRTPWRFRTKRNLWAYCGLAVVTHSSSDYELVNGQVVRKRRAPMTRGLNRNYNRELKDVFKGAATAATGRPGPLRDYYETRIDQGMREELARVTLTRKLTALTLRLWKKGEPYDPTKLTKQAR

SEQ ID NO: 187050 - protein, 329 aa, unidentified
MSAFVCGLDVHKDSTYATILSPEGKIVNQMKMNNEKVLSYLSHFNVGKVAMEASTPVAALYRQLAGKGFDVVVSHPKKTRYIAEAKIKSDRVDSRAIAELARLDALPLAYMPDREISVLREQVRRRAFLVRQRVKLKVKIKSVLTYEGVKWPSEYGLFTRKGVEWLHLLNLDPIESYLRIMRAFDDEIRLFSRQLRGLAKEDEDVKLLMTIPGIGYYSALLVKSEIGDVNRFPFGDRLCSYAGLVPSTRASGGVVRHGGVTKEGSRWLRWVMVEAAQAHVHKYDTAITRAYHRIAERRGRRAATVAAAHKLLLCCYSVLKNKREYYDQT

SEQ ID NO: 187051 - protein, 386 aa, unidentified
MVIIGVDPHKRVHMASVVEPATNRQVAALKVEASLAGYCRLLRWAGGFSERRWAVENARGLGRHLAHWLVARGEVVDDVASTATARVPELSRGGRRKNDVIDAAAAASVAALQGEANPVLAEDLTTVLALLDERRNNVVTQRTRLVNQLHALFRELVPGGAPTGLTATIASRLLAGVRPAGPVEAARKQLARDLVAEIRDADQRLKALTAHIADTVATTGSRVTQVAGVGPVVAARLLARTRRASRFASASAFANYAGVAPVEVSSAERVRHRLPRGGDRQLNFALHIVALTQVRMPRSSGRAYYDTKIAAGKTHNEAMRCLKRRLADHMWRAMIRDERQQSAGPGGHQGATLQSSAAGSTPTTSSSDKSLPEPATPDSTTGQTTA

SEQ ID NO: 187052 - protein, 403 aa, unidentified
MNNVAGIDVSKGKSMVSVLRPFGEVVAKPFSVGHTGSELKELADYLKSLDGETRVVMEHTGRYYEPVARFLHDEGVFVSAVNPKLIKDYGNNTLRKVKTDKADSRKIARYGIDNWAELRQHTPMDTIRMQLKTLNRQQSLYTKTKTMMKNNLIALLDQTYPGVNALFDSPVREDGSQKWVDFATTFWHVDCVRNMSLTAFAERYRKWCKRHGYNFSQSKAVEVHAGAQDLIAMLPRDALTKTMVRQAIDALNAISASMERLKAEMQALAAQLPEYPVVMTMHGVGDSLGPQLMAELGDVTRFTHRNAITAFAGVDPGADQSGTHEAKSTRVSKSGAPELRRALFLVMDCLLKTQPQDDPVYRFMDKKRAEGKPYLVYMTAGANKFLRIYYGRVKEYLASLEGN

SEQ ID NO: 187053 - protein, 371 aa, unidentified
MRILALDLGKYKSVACEYEAETGRHQFATIPTNPKAVHDLMVDREPDRVVIEICSIAGWVSDLARALEIELQVANTTDERWHWRKVKTKNDRQDALKLAQLSVVNQLRLMHVPQSEMRQWRALIAYRAKLVQRRTKIKNHIRDLLLREGQLLPRYRSAWTQEGIANLEAMARPFAEVSVEELWRGELAVELSQFKAVQAQLAEVVVKLDALGAANHNVRLLRTISGVGPRLAEAVVTMFDDPHRFQTAGQVSSYIGMVPKQFDSGETQRAGRITRHGNRLVRSLLVEVSWCALRHNPWARETYQRISGGKKSRKKIAVVAVGRKLLVRCWAMLRDQTEWQAPPLSGAGVVTESHERLAEVRTRGRRLRRAA

SEQ ID NO: 187054 - protein, 347 aa, unidentified
MNYYAGIDVSLEASSVCVMDASGKIIREAKVLSEPENLIGWFRDLGLEMTRIGLEAGPLSQWLYAAMKEEGLAVELLETRHVHDAFKAMPVKSDRNDARGIAQLMRLGWFRPVHCKSMPAQEVRALLTARKLVQSKLFDIEMSLRGILRGFGLKIGRTTPNRFRLRVEELVAGHPTLEIIGKALLAAHEILLREFNGFEKRVRQQARQDKRVRLVMSAPGVGPIVGLTYVAAVDDPARFKSSKQVGPHFGLTPKRYQSGETDYSGRVSKVGDASVRTALYEAANAILTRPLKGATALKSWGMKLAKRAGMAKAKVALARKLGVIMHRMWVDGTKFADKGISPKPVTA

SEQ ID NO: 187055 - protein, 314 aa, unidentified
MTSNAEFVGIDVSKSTLDVACWESKAYRRFSNETKGIQELIEWLKELQPELIVLEATGGLEMPLVAELAYAKMAVAVVNPRRIREFARSIGQLAKTDKLDAKVIAHFGVATHPEARNLPTEEEERLTALMTRRRQIIEMLTAERNRLHSARFAMKERIETHITWLEGELKDLNKEISDFIQQSPVLKEKDKLLRSVPGIGPVTSATILAMLPKLGTLDRQKIAALVGVAPVNKDSGKRQKKRRVFGGRANVRSVLYMAALSASKHNPIIKAFYDHLVRMGKEKKVALTACMRKLLVILNAIVRYNQAFSLLPTN

SEQ ID NO: 187056 - protein, 358 aa, unidentified
MKIIGCDLHARQQTIAMVDTETGEFTEKTLSHEGNAVREFYAALEPAVVVGIEATGAMQWFLELLEELGIECRVGHPAKIRAAETRKQKHDRRDAHLLLDLLVMKDRFPKIWMPSIEQRDLRTLLRDRHQWVKMRARLQHTLQSIALNHALRQGRALWSTAGQSALQALPLPPYSSQRRTALLRLYIQLQKRIQALDKEVEVQARQRPHARRLLTHPGVGAVTALATEVFLGDPNRFATGNQVASYIGMIPCEHSSGKRQRLGKLSKEGNSLLRYLWTEATMHAVGKDPELKRFYRRKLIQKGMGKARIAAARKLGIRLWIMMRDQIDYEEFCRRGILRQKGKAHAGMPDYNSGPALQ

SEQ ID NO: 187057 - protein, 353 aa, unidentified
MKTYYVGMDVHRASIVMVVLNGAGKVVMQSVIETGAERVRGFLKQLRGQVYVTFEEGTQANWLHEVVRPLVTEVVVCDPRHNKLLQSGNKNDRVDAQKLAELLRHGALKAVYHGDNGVRTLKELVRSYDCLVSDTTRVMNRLKAIYRGRAIGCAGHDIYRQDRRQQWLEKLTERGAKQRASFLYQQLAALKPLRHEAKRMMVKEARRQTAYPWLMSVPQFGSVSVAQLLAIVGTPHRFRSKRQFWTYIGLAVVTRTTADHEVVNGVLRRSKRPVSTRGLNRNHNHLLKRVFKNAANGACNSGPFKAAYELRVTQGMVPSLARLTVARQLAAITLAVWKRGEQFNPERMKQQAA

SEQ ID NO: 187058 - protein, 390 aa, unidentified
MTYYVGIDIAKYKHDSFIADDSGCVIRDSFSFSNDKDGFDVLLSILKELKPKGQIKIGFESTGHYHFNLKLCLEANGYDYVEFNPLLVHKFSSTQTLRRTKTDKKDASMLAKYLMTIDYKPYVNSFYHINNLKSLTRLRETLITDRTRFLNQITSYLDQIFPEFKPLFENGLNESAFYLLTHYMTPAKMSKLDSNKYSKMKSELRHPISYQKICQIKDAAINSIGHTSKALEYALEASLNLYLTLDKQIDELESKIIEIYDSLNCHIHTIRGISKLTSAGILSEIGNFNKFLTPAQFQAYAGLEPSKNDSGTHDGIGVMVKHGSSYLRKYLMNSAETFYVYNPTISDFYWKKRNEGKHHRVALSHVARKLINTIFYLEKHNQDFDSTLVK

SEQ ID NO: 187059 - protein, 412 aa, unidentified
MRRVIGINTHRTFGEVVIWEDGRLRHVGRVDMTRTALEGFGKKLLATDEVVIEATGNCMAVSRVLTPFVKRVVIANPLQVKAIAYAHVKTDKVDAGTLASLYAAGYLPEIWTPDAATERRRRLVARRYQVVRHRTRIKNEVHSILYAHLIPRCPHADLFGRLGRTWLTSQPLPDDERAAIERHLRELDRLGDDLRVLDQEIAQSALDDAAIKRLITITGVNLTVAAGLVAAIGDIGRFSSPQKLVSYFGLNPRVRQSGLGAAHHGRISKVGRSHARAMLVEAAWATAKAPGPLHAFFVRIRARRGHQIAAVAVARKLAVLCWHMLTKQTDYHWARPALIANKRRAMELQAGRPQKKGNKRGSTYAYNVKALRDQEMRLAQQAEQSYENLVAHWQPRPAKKQARGRLKPAGLE

SEQ ID NO: 187060 - protein, 382 aa, unidentified
MQASTVDTPTAGHCGTIFVSIELSQKSWLVTLHSPDRDRISRHKFEGGDHAGLLGLLEGVRVRAALKLGASPKVVSCYEAGYDGFWLHRLLTAAGITNLVFDPASIAVDQRARRAKTDRIDGELLLRTLMAHLRGEPRVVRIVRIPSVEQEDARRASRERDRLVKEQTAHTNRIKALLRLLGVAVGYPRRRDWLNWLEQQRDRQQHPVPPHLLAEVKREHARLMLVREQLAALEAARAAQAPAVPAPMAERRDALHRLKALGPAFATTLTNEVFYKDFRNRREVASYCGLTPSPWRSGGIDREQGISKSGNRRARQKAVELAWLWLRHQPDSALSCWFRARTASAGKRAKRVAIVALARKLIVALWRYLTTGLIPEQAMMKA

SEQ ID NO: 187061 - protein, 255 aa, unidentified
MSSSVFIGIDVSQARLDLAVNDGQKWSLPHDESAMTTLVDQLATLHPTLVVLEATGGLEIPLTSALAAAGLPVVVVNPRQVRDFARAKGLLAKTDALDAQVLAQFAERIRPQPRPLPDTEARALAALLTRRRQLVEMLSAEKNRLLSASSSIRKSLRAHITWLERELQRTDTELTATIQQSPVWREKDELLRSVPGVGPVLTSTLLANLPELGTLTNKQIAALVGVAPLNRDSGTLRGRRTVWGGAGRKCAPSSI

SEQ ID NO: 187062 - protein, 410 aa, unidentified
METTIEFTQIIERGCGLDVHRDTVVATILGKRLVEETRTFGTYTSELQDLGAWLQSNRITHVAMESTGVFWKPVYNILEFDFDIILVNARHIKNVPGHKTDKKDSAWIAKLLLSGLLKGSFIPCRYQRELRELNRYKRKLVQNQVSEWNRIHKVLQDANIKLSSIITDINGVSGRSIIDAIIDGQTDPEVLSQMARGVLRKKLKELKKALQGSLTQHHRFILAMHRRALRHLQECIQDIDRQMDEYLNQDQEALELLQTIPGIKKATATAILSEVGTNIDQFPTQSHLASWAGLCPGNNESAGKKRGSRITQGNKMLKTAMVEAAWAAANSKHKYFRAHFRSIASRRGNKKALVAVAHKQLCAAYYVLKNRSPYQSPDVDYITNKKKQALISTYMKRLHELGALPISIEQ

SEQ ID NO: 187063 - protein, 348 aa, unidentified
MPLYGGIDLHSNSNQSAILNQDRKRIMRRKLANDPALILNFWEPYKPDLAGIVVESTYNWYWLVDLLQDHGYRVHLANTAGIQKYSGLKHADDNHDAFWLAELLLLGILPEGYIFPKELRALRDLLRKRLHFVRVRTALILSLQNIVTRNCGTKLSSNHLKALKEDRAQGYLQDNEDLLLAGSASKAAIDALTRQIRRIEGAVVKKLILQAPYPQLLTLPGVGQIVASTVTLETGPIERFSKVGCYASYCRKVNSQWTSNEKVKGHGNKKNGNKYLAWAFGEAAERARIFHKASREFYQHKLRQKKHPALAHGALAHKLARAAFYILRDNVPFDHEKMFGYPEEPLDN

SEQ ID NO: 187064 - protein, 370 aa, unidentified
MAKSTPLFVGLDVHKDSIAVAHATGGGVEPPVFVGEIGTRQADIDRLIRRLQGKAPALRFAYEAGPSGYGLYRYLTGKGLVCEVVAPSLIPRRPGDNVKTDRRDAVELARLLRSGDLTAVYVPTVEDEAIRDLCRARDAARVTLKDAKLRLKAFLLRLGLHYVGRADWNAAHKRYLAKVVCPTPAQQIVFQEGARAVDEQVDRLARIEADLQELAPHWRRYPVVQALQALRGVQWVVALTVVAELGDLTRFDNPRQLAAFVGLVPSEYSSGPARRQGGITKAGNGRARRVLVEAAWAYRHPAKVSLHIQQRIDRLPKALQDLGWKAQVRLCKRYRRLVARGKHPNVVVTAIARELLAFMWAIARAIPNRA

SEQ ID NO: 187065 - protein, 419 aa, unidentified
MFHLGIDWASMSHAVCITDQDGAVVKQCKIDDDYDGYLTLLECLRNLPAETREILFSIEDKNLKLVDFLLSHSFSGFFVPPASMESYRKRYSQNHAKSDASDAFILSDLLRTDRNNLKPIVKDSAFIRELSALLKDRDAFVKDCSRLTLRLISTLKEYYPEFLKLFKDPARDTALDFLIKFPTFQDASKLSFPRLYKFCTKRHFCQTESIKKIFSILKAKPTPVDEVVMKTKSIKAVATAKQIKELLVVISSYEEKISSLFNSHPDAKIFSSLPRSGTITAAGLLTIFGDNKDKFASSDEVQMAVGTAPVTIQSGKFRIVKFRHGCNHFHRSVLHYFSMNSTRESIWAKNYLQTKLNQGKSFSCALRCLGYRWNRIIFSMWKNNTVYDENVLLANFAKQSIAVDLSKNLSRGAGFPATA

SEQ ID NO: 187066 - protein, 343 aa, unidentified
MEYYVGLDVSLKQTSICVVNQTGSVVREGVVDSDPKAIAAFVRSNAPGAVRIGLETGSTSTWLWTELKRLGLPVICIDARHAKAVLKMQINKSDRNDAAGIARIMQTGWFKEVRVKDLDSHSIRALLASRALLVKIKRDLENQIRGLLKNHGLVIGRAKFNVFAVRAEELIEDRPELMAAVGPLLAARRAIEQQVGDLDRKVLKLARYDVQVRRFMTAPGVGPITALCFKATIDDPTRFRRSRSFGAYVGLTTRRHASGEVDWSGRISKCGDAMLRTYLFEAANVLLTRVPKWSALKAWGMRLAKRNGLRKAKVAVARKLAVILHRMWIDGTEFKWSTKKAAA

SEQ ID NO: 187067 - protein, 362 aa, unidentified
MNKKRMPTSQDPKPLAPDKVDPCGTEVSAQELIVALCRKGVQQPLKSFPNTPEGHREIVRYLARKGRLVRVCLESTGVYGLDLALALAAQAGVEVMVANPRAIRHFAQALMERNKNDRVDAGVLQEFAARMPFEPWQPPSRPALHLCALARRLEAITDLCAAEKNRLHASAAAQALPAIIRQDLERSIHFHQRAAEHLTREALKLISSDNTLQLRYTLLVTIPGIAQTSALRILAELVMISSDLDVRQWVAYAGLDPREYSSGTSVHKKVRISKAGNRHLRRGLYMPALVAVCHDPHLRAFYQHLLARGKLKMQALVAVERKLLHAIYGMFKHQQPYDGSKLYPRPEGISPCQPTFSTAEVA

SEQ ID NO: 187068 - protein, 447 aa, unidentified
MNASEFSTAQAAAGQAHAQGKTIFSTLTHYGAVDWARGHHDLCVVDPAGAIVFELRIDDTAEGWANVRERIAALKTFGDSPATVGFAIETSSGPAVERLLEANLAVFPLNPKAAERYRDRKAPTGIKSDRLDAYSFADALRTDGHGWRPLRPQDPLTHELRLLCRDEITLIAQRTALVNQLQAALNEYYPTALAAFDDWTAAGSWEFVVAFPTPHQLASAGKRKHEKFLHTHKLYRPETSAKRLELFAAAGKSASPNPAVTAAKSLLAVSLAKQLRTLQMQLDEYRARINELFGKHPDRDLFGSLPGAGEKLAPRLLAEMGADRQVFDDPEALQCYAGAAPVTQISGKMRRVLFRHACNTVLRSTVHLWADRSRAKCPWADAYYWHKREQGMSHPAALRCLAMRWLKIIWKMWIERKPYDGDRHLRDQVKHGSWVISLLPQLTLKSN

SEQ ID NO: 187069 - protein, 305 aa, unidentified
MENIALIGIDLGKNSFHIHCQDRRGKAVYRKKFTRPKLIEFLATCPATTIAMEACGGSHFMARKLEELGHSPKLISPQFVRPFVKSNKNDFVDAEAICEAASRPSMRFVQPRTESQQAMRALHRVRESLVQDKVKTTNQMHAFLLEFGISVPRGAAVISRLSTILEDNSLPLYLSQLLLKLQQHYHYLVEQIKDLESQLKRKLDEDEVGQRLLSIPCVGTLTASTISTEIGDGKQYASSRDFAAATGLVPRQGTVAKLAMRQPFVLFKGLTFQKLCLPGAFRPGDHHNKMLRPGLCVMHASPQYL

SEQ ID NO: 187070 - protein, 410 aa, unidentified
MNTLYVGIDVSSNNNVIYLMKPDGSKHSNFKVANSLNGSKELIKRIISALNSLELTSLSIGLEATSVYGDNLVYFLREDGSIATYDKQIHVLNPKQVKKFKDSYNDLPKNDYIDSFVIADCMRFGRINKEAYLDDYRYKALQNLTRARYFAVQNLTKEKQRFLNYLFMKYSSITQEKVFSCKYSTTAFAVYEEFDSAEQLAEMDLHDLTEFIKAKGKNRFPDPDAVAKAIQKAARGSYRLPKTINDSVNQVLSISISSMRALESQIKELDKAIEEQVKLIPNTLQSIPGIGPVYSAGIIAEVGDINRFKNQASMAKYAGLAWSQYQSGDFEAEHTHLIQSGNRFLKYYLCEGAWSHVCCDTEYKRFYDIKYKEVNRNQHKRALALTARKFARLVYSMLKTNQLYKAPVSK

SEQ ID NO: 187071 - protein, 353 aa, unidentified
MIRTIGGSIMMTHFVGLDVSQKMTAICVVDNAGRRLWRGQCPTAPEQIAAMVRRHAGDDSRIGIETGAMTPWLVHELRALGLEVICLDARHARAALKMQINKTDQNDAEGLAQIVRTGWFRSVHVKSFDSHRARALLGARAQLVGMTTRLSNHIRGVLKTFGLLPGAMRGLRFDRKVEVLLEDRSDVAPIVRPMLAAWRQLREQISAFDKAIRVLVRSNSPCRLLMSVPGIGVLSALAYVSTVEDPARFSQSRSVGAHLGLTPRQYQSGDVDRSGRISKCGDTLARTLLYEAAVVIMTRVKKASELKDWALAIAKRSGIGKARVALARKLSVILHSVWRSGKPFRWAEPAITA

SEQ ID NO: 187072 - protein, 312 aa, unidentified
MSEQIVVGIDVSKEHLDLSSWPEGPSQQYENSDAGIEKMIADIQPLAPELIVLEATGGYQVLAANTLQAHGLPVVVINPRHTRDFAKSTGQLAKTDKLDAQGLAHFGYATKPEIRPLPDADSQRLQGLVARRLQLVEMRVAELNRQQQTTCELVREDIASHLRDLDERIDRFEQEIKSMIDNNDTWQAQIRLLRTAKGVGPVLAFSLVANLPELGTLNEKEIAKLVGVAPLNCDSGKSRGKRKTWGGRAPVRCALYLPTISAIRWNPPIREMNERLRAKGKPGMVVIVACMRKLLIVLNAMMRDQRPWQPNY

SEQ ID NO: 187073 - protein, 348 aa, unidentified
MFAIVNLKHKFMKTSENMYETFVGIDVSKLTLDVTILNPLCRKLHHRVFDNSDEGHLGLKEWLCIGHDIVFTQTLFCMEHTGLYTRSIEKFLDENDACVWKESSLHIKKSLGLTRGKNDKIDSRRIAEYAYRFCDKADIKGQCPSGIQILRDLLTTRERLNKSLKSIMVSVNELKRVDIQQAINLETYQLSAIRGLKESIREVEEALFETVEKDKQLRKHCEMATSIPGVGKILAIKLMVYTQVFTRFESVRQLACYCGVAPFEHRSGTSINGKTGVSKFANMDLKSTLHLASLSAIQHNPDLKAYYQRKVSEGKSKMCVINAVRNKLLSRIIAVINRQTPYVVLTQA

SEQ ID NO: 187074 - protein, 453 aa, unidentified
MCLEDRPVLEPNAAGIDVGAREMFVAVPPGRDQNPVRVFATFTEDLERLTDWLEQCGVTTVALESTGVYWIPLFEILEQRGIRPCLVNARHMKNVPGRRTDWHECQWLQFLHSVGLLRAAFRPGQDICAVRTLLRHRNELVAAASQHMQHMHKALTQMNLQIHHVISDITGLTGRAIVDAILAGQRDGAELAKLRDPHIKADIETIRKSLEGNWRPEHLFTLGQSRDLYRIYQQQIVNCDLEIEKMLREFEPRTDPAERPLPLDQKRYRSGSKRRKKNGHPHPEFDLRTETYKLFGVDVTQIPGLDESALQLFGEVGRDMSRWPSAGNFVSWLALCPDNDISGGKLLWRGARRVKNRAGHLFRMAAFSLHHSLTPLGNYLRRMKAKLGPKAATMATAHKIAVIFYTMVKNQVEYDETLWAARDAQREKRLETKLKRQAKQLGYELVPIEPKAA

SEQ ID NO: 187075 - protein, 328 aa, unidentified
MFQVHGVDAGGKAVLRKRIARGQVIAFFSSLSPCLIGIEACATAHYWARQLKALGHEVRLMPAHYVKPYVKRAKNDAADAEAICEAVTRPTMRFVPPKSEEAQAIVLMHRLRSQFVAQRTALLNALRAGFAEFGIIAAQGLKGAREILALAKTSDQRLPEVIRVTYRMLADAIAAVEERIKTFERQIAANTKFDDTCKRLSTIPGIGPVASTTIVALVGDASRFDTGRDFAAWVGLVPRQNSSGGKQRLGRITKAGDQTLRTLFVLGAFAIMKQAQINPSRASPWLTAVMARRPPLVAAVALANKIARIVWAVLTRGGSYNAKHAAQA

SEQ ID NO: 187076 - protein, 342 aa, unidentified
MEQVSIIGLDIAKQVFQAHGADASGKVVFREKIRRAKLLEFFDSKPPCTVVMEACGGAHHWGREIAKLGHQVKLIAPKYVKPFVKRQKNDAADAEAICEAAMRPTMRFVSVKSETVQASALVFRTRDILVRQRTQLINAVRGHLTESGVVVAQGVAHFKKLVAQLEDPASALPEEVRSVLSLLVQTVMSLDEKISALDKEIARRAREDEVARRLMSIPGIGPITATAIAALAPPAETFRKGRDFAAWVGLTPLQKSSGGKQKLGATSKMGERTIRRLLIIGAATVVRHAAMRGAPPTSWLARMLARKPRMLVIVALANKMARIAWALLVKGEDYKAPVVAAA

SEQ ID NO: 187077 - protein, 346 aa, unidentified
MPIVEAPRPVTGGIDTHLDAHVAAVVDVNGGVLAVESFPTTTAGFAELHDWLVGFGEMERVGVEGTGAYGAGLARHLRGCGLEVIEVDRPNRQARRRAGKSDPADAIEAARAVLAGRATGIAKAGDGPIEAMRSLLIAKRSGREARITCLNQLRHLGFCGPDGLREALRGVPRKALAARAAGLRPRAGSDVVTYATKLAMRTLGRRVLAIEADNTELDTLLADLVETTAGGLLAVQGVGVDTAAILLVAAGDNPERIRSEAAWAHLCGVAPLPASSGKLTRHRLNRGGNRQANHALWRIVFTRLASDPRTRVYVERRLNEGRSKPEIMRILKRYVAREVYRHLPRA

SEQ ID NO: 187078 - protein, 458 aa, unidentified
MGKSNDKQVPAKVNWKALDVVHPDAAGIDIGGREHWVAIGPDRDEQPVRCFQCFTEDVEQMADWLQAREVRSVAMQSTGVYWMPVFEILQERGMEVYLVNARHTKNLPGRKSDIAECQWLLKLHTFGLLNNSFQPSDPERALRTLWRHRAGLVGQASSAIQRMQKALIEMNIQLSHVLSDLSGVSGMAILEAILDGERSPTKLAALADPQVKADKSVIAKSLHGNWRPELLFVLRQEVDGYRGCQDQIAACDKQLRQHLQAMESKVDPEAQPLGPRPKGKRARGNAPKFDLRTELYRLTGVDWSQVDGIDVQVAQTVIAEVGTRLDAFPSEKHFANWLGLCPTNETSGGKVLKRRTPKVVNRAKVAFRQAASTLLKSKSYLGAQYRRLRTRLGAPKAITAMARKLACLFYRLLTRGQQYVDKGAAYYESRHRDQQVRSIMRRATQLGLKVVIPKGETP

SEQ ID NO: 187079 - protein, 345 aa, unidentified
MDIFFVVGVVVSKNKLDYCLMSNDKVLKQGTIVNETSAIRMTLILFLREFKLSNEQILICAEHSGQYNYPLIYSCECDRYKLWLENPNQIKIYCSGLQQGKNYRLSSKQIAIYGSRNSDKIKLSRQPVSEVEHLKQLHNELEMLEVDSAKLHSQLIDQKNYMSEEVFNINATRLINLLRGLEDAIATIKSEIKCIFAVNGFLSEQLELLTSIENVDTELALKMIVETDAFTRFENCRQFCSHAGIAPLNKDLKINEHSTHTINPKSDKGIKTILNQAALSIVKMNDSELKNYYIRKVKEGKDEKIVLNAIRVKLVARMFAVIKNNQKYQHVLMKEGIVTSVYESL

SEQ ID NO: 187080 - protein, 341 aa, unidentified
MEQATTIGLDIAKHVFQVHGADAAGHVLFRKRITRVKLLGFLAAQAPCVVAMEACAGAHYWAREIGKLGHHVRLIAPAYVKPFIKRQKNDAADAEAICEAAQRPSMRFVPVKTEEQQANGIVFRARDLLVRQRTQCVNALRGHLMEYGYVFPKGITHVETLVALVEDRQSSLPDSVRVILKLLVDTFTALEAQIAALDAEINQRSKSDPTARRLMTIPGVGPITSTAITALVPAAEGFPAGRDFAAWLGLTPLQKSTGGKQKLGAVSKRGERTIRRLLIIGASAVVQQASRRGAPKSSWLAQMLARKPKMLVTVALANKMARIIWALLVKGGTYRTPAAAA

SEQ ID NO: 187081 - protein, 410 aa, unidentified
MQTIVERGCGLDVHQATVVACLLIVRKNGTVHKQVRSFGTTTRELVSLREWLLAEGCTHAAMESTGVYWKPVYAVLEGALEIVVANAYHVKNVPGRKTDVKDAEWLADLLCHGLLRSSFVPPKPIRELRDLTRYRRKLVEAQTAERNRLLKVLESANIKLASVATDVFGVSGRLMLRALIEGVATPEEMSELAKGTLRRKIARLQPALEGNLEPHHRFLLKLQLQRVEAAERDLATLQERIQQKLEPYAAQSALLDEIPGVDRGLAAVIIAELGVDMTVFQSVSHLASWAGVCPGNNESAGKRRNSRVTKGNLYLKSALIEAANAAARAKGTYLRDKFYRLKARRGYKRAALAIAHKILVAVHHMLLQNVSYKDLGDLYLDKLNKHHLTRNLVHRLERLGFEVTLHLKAA

SEQ ID NO: 187082 - protein, 327 aa, unidentified
MIGLDENGVIVVREKVSRSRIAARLVNVRPCLVGIEAGMATHYMARELVALGHVVKQVPPAFAKPFRQGHKNDFRDAYAIAEAVQRPSTRCVPIKTDDQLDLQALHRVRSRLIGDRTAVINQLRGFLLEHGITVRQGHRFLRQQLPQIVATRTDMLSPRMIRIIGDLVEDWAHLDERVERVTDEIEGLARTDVSCGRLMTVPGVGPIIASAMVAAIGDGASFSKGRDFAAWLGLVPRQMSTGDRTILGRITKRGNRYLRMLFIQGARAIQLHPASWAKHSFGRWLTAAARRLHCNVLTVALANKLARIALTVLLEGRNYETRIKPVA

SEQ ID NO: 187083 - protein, 351 aa, unidentified
MIIIGVDYHPSFQQIAFLDQETGECGERSLNHSDGEAEKFYRDLKLRGVSVRVGMEATGYARWFERLLAELGIELWIGDPAEIKTKRVRKQKTDRQDAQLLLQLLLENRFPRVWVPSPENRDLRQLLWHRHRLVQMRTRIMNQLQAVAMNEGQRWRKKLFTEKGRMQLEKFLLAPWATRRRQDLLVLLDRLNPTIGELTAAIEQEAKKRPEVLRLMTHPGVGLITALAYVLIIGTPERFHCGKQIGSYVGLIPCEDSSAGRQRLGHISKQGNTLLRFLLVEAAQAAVRWDPDWRRRFLHLAMRRERRIAKVAMARKLAVRLYWMWRKGWDYRQTIEFGSHAGQLVETHGVK

SEQ ID NO: 187084 - protein, 346 aa, unidentified
MRIIGCDYHPSWQQICWVDTITGETEEKKLEHASGEAVKFYRGLREPALIGMESTGNCQWFVEMATTAGHEVWIGDAAKIRACEVRQQKHDRRDAALILKLLLEGRFPRIWTPSGEEKDLRQLLIHRHKLVRVRAQVKTELQHLAMNQGITKRGKLWSKAGEKVLHELPLKPWASRRREDLFKVREMLNEQIDRLDQAVVEVAQKNEKARLLMTQPGVGPITSMAFVLTMGDVSRFPRGKQVASYLGLIPREYSSGGHQRFGSISKQGNRFMRMLLVEAAQTAVRCDPGFRNEYLHRCHKKAKGVAKVAAARKLAIRLYWMLRTNRGYPEVVRVESSSRVAVVGAS

SEQ ID NO: 187085 - protein, 347 aa, unidentified
MKVLIGVDPHKASLAVAALDEAKGELLERASFPQNLAGLSALERWARRFPERRWALENACGLGRHLAGRLAGSGESVVEVPPKLSARVRVLSSGNARKNDELDALVIALAASRNERLAQVDPEAASEVLRLLSERREDLVAERTRALNRLHGLLRDLLPGGVAGNLSAERAARILRSIRPKGGASVRLRRRLASEVLRDVRTLDRKIADLSGRIESEVEASGTTLTQIFGVGPILAARIIGTVGDGARFPTKAHFASYSGTAPVEASSGKVVRHRLSLAGNRRLNYALHMIAVCQARSDARGGAYYRKKIAEGKSHKEALRCLKRRISDAVFRSLVADSQAPSSSVA

SEQ ID NO: 187086 - protein, 346 aa, unidentified
MDQIIRIGMDTSKHIFQLHGVDAAEHVVLRKRLGRKQMVAFFAKLPPTVIGMEACGASHHWARVLGEFGHEVKLIAPQHVKPYVMRNKNDGRDADGVCEAMSRPRMRFVPVKTAEQQAALMLAGIREQMIARRTQLSNTIRGYAAEFGGTAAKGLDKIEPLLAQIARDESVPALARELFAMQGREYARLQVELKAIEVRLRAWHRGNADSRRLARIPGVGPIGATALVMKTPDPRAFPSGRHFAAWLGLTPKDHSTAGKTRLGKITRAGDERLRSGLVAGATAVIQQAKHGRGHPSPWLIALLKRKPPKLAAVALANKIARIAWKLMATGESYDGARMPGASASAA

SEQ ID NO: 187087 - protein, 359 aa, unidentified
MIVIGIDPHMKTHTAVAVDCATGASLGTRTVSGNGTGQDGLLTWARDLGPDRYFAIEDCRNVSGRLERHLLENGECVVRVPPKMMAGARDSARTYGKSDSINAACVARAALREPGLPEASLAGPEHDVRLLVDHRDDLVDERKRIQKRLRWHCHDLEVDLDMPPRVLDRYVWLNRLQGILETLPESTRRRIALSELSRIRELTVEVRDLEREILGLMRELAPDLLAIPGCSAILAAHLVGQVAGFSRFSGEAAFAMHIGVAPLPVSSGKSCRHRLNRCGNRKLNSAVHMIAVTQVRMHPPAIAYMERKQAEGMSYREALRCLKRLIARTVFTTMLRTEKAAAGTAIRADFGAAPVALAV

SEQ ID NO: 187088 - protein, 372 aa, unidentified
MPPTNKTTDFKGQNFYIGLDVHKKSWTVTVRTLGLEVAHFTQIPDARQLARHLCNRYPGSRFISAYEAGFCGTSPHLSLCNEGIKNIIIHAADLPQTDKQKKNKTDLHDSRAIARYLESNLLTSIYIMPVEQQERRALYRLREAKVQDVTRCTNRLKSLLHYFGVQLPEEFKDKDYISKCFLNWLCTVQLTTQQGTMALQQYINDLIYQRQQLLQITQKLRKAIMTHFGESYTSLLTVPGVGAVTAMALLAETGDMERFNNPDEFASYLGLIPSEQSSGETTYSTRIQPRCNTHLRPILIEAAWIAIRKCPALLAYYKKHAGKNNKKAIVKVARKIALIAKAVALKKNSYQPDHIQQITEGKTKFICKGKPA

SEQ ID NO: 187089 - protein, 346 aa, unidentified
MKINRIGVDLAKNVFQLHGADHKGKAVWKRKLSRDKWLKVLFETVEPGTEIGMEACGGAHHWSRVLIEKGYEVKIIPPQFVKPFVKSNKNDANDAAAICEAMARPNMHPIKVKTIEQQDLQAVHRIREEIKSHRIAKANQIRGLVTEYGLVVPRELTSLRKAIPQWLEDADNGLTMFFRQLLHGLWDDLLSLDKRMTELDKQIAVIAQENPVAKRLQQLRGVGPLVATALVATMGDAKQYRKGRDMAAAIGLTPRQHSSGGKDRLLGISKRGDAYLRCLLVHGARSAMRTAKDKDDRLSRWITSLQDRRHANVAACAMANKIARMAWVMMSKGVDYDPDFKPVMAG

SEQ ID NO: 187090 - protein, 354 aa, unidentified
MESQKIFVGLDVGADLSTVCVTNADGAVLSEASLPTTCRQISEFIESLYPIKNVTVGLEAGSSSILLTKRLREAGYCVHLFATRQASNFLKIRQNKTDINDARGIADLVRLGRGVVAEVHLKSNASQQLRSQLVLRQKLVSHRVAGESVINSVFRMNGGRLKKSWSSASLQRHVRAELERLRDAEKLDLSLDVEPLLYICIATRRYLENLDRRLSKVAEANPVCARFMEIPGVGPISALSFYSAVDDPTRFRRNCDVGAYLGLVPRVKQSGTAVKRLSISKMGNRLTRSHLAIAAGTMMRQTKIECTLRSWAMNLVPRIGRPKAKTALARKLATVMISMWKTETPFATNPRSIS

SEQ ID NO: 187091 - protein, 371 aa, unidentified
MRKNTIVRKSAKTAITRDALDTPAAPKRTIGVDLGDQESHYCILDRHGDVLSEGTVRTTEGGLTRQFKKLVRARIVIETGTHSPWVSRLLERFGHEVVIANARQVRSIYESDRKTDKVDARVLARLGRIDKELLHPIRHRSAQAQADLAWLRARDALVRIRTKLINCVRGMVKSVGGRLPSASGAYFHKKVREYLPDSIRDALSPLLLQIEQLTAQINDYDKQIESMAEKKYPHTALMRQVPGVGVLTSVAFALTIEDPNRFSKSRDIASYLGLRPRLNESGQSSPQLSITKAGDHMLRRLLVGCAQYVLGHWGPDTDLRRWGLGLMARGGKNAKKRAIVAVARKLAVLIHALWVSGEVYDPLRQANQAAA

SEQ ID NO: 187092 - protein, 361 aa, unidentified
MKKTAQHLIAEVPARHSPTELTIGVDLGDVWSHYCTINQNGDVIDRGRFRTNPQGVEKWFKNLAPVRVAMEAGTHSIWISEQLQLLGHEVIVANVRELRAISHSDRKSDQVDAEKLARFARLDPKILRPIAHRTLQQQQALTLIRARDLMVRLRTAAVNAVRGLTKSCGHRMPASTTACFAKRGLAMLPAGLAPALGPVLEQIAEMTTKIKQYDRQIRQLTETEYVETQALLKVYGVGPITALTYVLTLGDKQRFQRSRDVGCYLGLRPRRSQSGDRDPQLGITKAGNGYLRMLLIESANHILRPPGKDSSLRRWGLALAARGGKKAKNKAVVAVARKLAVLLHRIWVTQEPYIPFYAEAA

SEQ ID NO: 187093 - protein, 410 aa, unidentified
MCLEDRPVLEPNAAGIDIGAREILVAVPPDRDAHPVRVCTTFTEDLQQVADWLVTCGIATVAMESTGVYWIPLYDILEARGIKVCLVNARHMKNVPGRRTDWHECQWLQYLHAVGLLRAAFRPEADVTAVRTIMRHRHELVQMCSQHVLHIHKALTQMNLQIHHVIDDITGLTGLAIVDAILAGQRDPVELAKLRNWRIKADEETIRKSLVGNWREEHLFTLRQSRELYRTYQEQIAKCDQQIEKLIGGFQPRVDPETKPLPADRKRYRNEKRRAKKSGRGETGFNLRTEAYKVFGVDVTQIPGLEAMALSLFGEVGRNMSKWPTADHFASWLGLCPDNDISGGRVLWKGTRKVQNRAGQIFRQAAYSLHHNLTPMGDYLRRMKARLGPAAAITATAHKIAVIFYTFVKN

SEQ ID NO: 187094 - protein, 385 aa, unidentified
MDNVCGLDIHKDSVFACILKTNGEKIQTQFGVTTPELDRLRDLLVEAGASRVAMECTSVYWQPLWRLLSTDSHMVLVNPYLIKQLPGRKTDVRDAEWIATLLAKELVRESFVPDETQSALRQYERRLHRLNRQIVHAESQMDNQMQACNIRLSNHVSDIGGKSYRKVVQALIEGETRPEELLKLIHGRTVNRCGSDTLIAALTGFVTGVDRDMLRFYMEECLLYERQREECLKSMEDICQEHYKEQKELLETIPGVSAQSAMCVLSEAGHDMATFPSASALVGWAGLRPRNQMSAGKIKGRKITHGNRFLRIVLVQCAWAAARCQGTRFALKYEGLKRRMPAQKALVAIARKLLVVIWNVLAKREKYRRNLYETASEDERKGKRH

SEQ ID NO: 187095 - protein, 373 aa, unidentified
MEVVCQRCAGLDVHKAMIVACVRLVENGKVKREVRTFETTTAGLIALLAWLTESGCTKVAMEATGVYWKPVWNILSDGNFELIVANAGHIKNVPGRKTDVNDATWIADLVAHGLIRASFVPEQEFQELRSLLRARKQLVREQSSHVLRVQKTLEEANIKIDTVITDILGVSGRRMIEAMIDGVRNPEKLAALADRRIRATPKELYDALHGRLTDHHRFLLRLYLGQYDALAAAIDAIDLEVNALIQRMDAEVAVGQATFRSLIILLCTIPGIGPLAAKVILAEIGFDMNRFPTAGHLLSWAGMCPGHNESAGKRKSSRLRKGAPWLKTTLVQCAWAATHKKDSYYKAQFNRLRSKCGPKKAICVTSRKALLAA

SEQ ID NO: 187096 - protein, 344 aa, unidentified
MANLNQFCDFTKLIGIDIAKSVFQIYSCDTQTGEITNVQIKRDKVLESLANCGKCLIGMEACGSSQYWARKLQTLGHTVRLMDPKLVKPFVRHNKSDKADAEGVYHALVNGVRSVAVKTETERDIQTLLTMRALLVKQRTARINHVRGLLAEYGHVMPKSVDQFDKKVDECINSLEGDAVQLVIDMLRDTIKSIRDEHDRIKTLQREISRLANQTRNAKHFLTVPGIGETIMAYMCVLLADPTQFSSGRQFAAYLGLVPMHTGSGGKTVTTKIPGRCDKALRALLVQGAHAVARSKYRTDWVKNILAKKPKKVAMVAIANRMARQCWAVASKGQDWRRMPVTAA

SEQ ID NO: 187097 - protein, 348 aa, unidentified
MLHAGLDLSRKKIDVCLLSEHAEIVEEFAAPPDADGLRALARRVAVHREPVRAVIESMTGARFVHDRLEELGWEVLIADAAKVKGLAPLACKTDKIDARVMAVLSHRDLVPEIWLPDPRVRREREQARFRMHLVKHKSSLKNRIHSTMITFGHPCPVTDLFGVAGRQLLDRLEVPQPWRGTIDASILLIDDLERQIDRVNRELRAGGADHPYVPLLLTVPGIGWVLAFTIAAEIGDISRFPTATKLVGYTGLCPRVNQSGDRDRRGPLTKQGPKYLRWAMLEATMHACRHDAYRERYQRTKQRLGKQRGAKVAQIDIARRLTEAVWHMLTRNQPFTPSAGGSAFRLAA

SEQ ID NO: 187098 - protein, 410 aa, unidentified
MEAMIERCAGLDVHQETVVACVLFGPLDKKPKTSIETFSTTTTGLLALSDWLTTLQVSDVVMESTGVYWKPIWNILEDSFHLVLANARHVKNVPGRKTDVKDAEWLAKLLRCGLIESNFVPPEDIRDLRDLTRYRKKLIHHRTSEQNRIHKILQDANIKLTSVLSDIFGVSGRRILEAILNGEKIETDGLRKMVDWRTKASITDIASAINGRIRRHHRDMLRYHWEHMSYLEKAIEELEKQIDQLLSPYRKEVELLDGIPGVNKAAAATFIAEMGVDMSVFKSAKHLASWAGVSPGNYESAGKKKTSKTTQGNKALKTMAVECVLATSRQNNRIASHRKRITKRQGKMKGRIASAHLLLTIAYNILKTGEPYQELGSNYLEEKQMNKELKMIEYLKKKGYTIDPSEQQTA

SEQ ID NO: 187099 - protein, 344 aa, unidentified
MGEVITIGLDIAKSVFQAHGVDEAGAVVFRKRVSRAKLLEFFASLQPCLVGIEACPAAHHWGRELQALGHTVKLMPPSYVKAYLKRSKNDANDAAAICEAVPRPSMRFVPIKTKEQQAALMLHRARQLLVRQRTMLSNAIRGHLAELGIVSAKGRKGTGALLEIIADAEDGRVPPAARGILDVLARQYSAIGAEIGSIDRSIVVWHRSCEASRRLEEIPGIGPIVATALVAEIGDWKAFGSGRNLAAWIGLVPKQQSTGGKDKLGRITKQGNRYLRWLLVAGAMAVIRYAQRHGTLKRPWLGRLMERRPTKLAAVALANKIARIAWAIIVHGDRYRETKPLLAA

SEQ ID NO: 187100 - protein, 482 aa, unidentified
MKKKNIYTNQSQELLTLFEEAGNGVKVMCVPIDYAKKDHVAMLCNGNGHILRKPFSVKNSPEGIEYLIEQVTRSCSHRQIDLKHVFFGGEDVGSYAENFVNTLRSGGWIVAGVNAHDAKEQRANMQASTDRLDLMGIASMLLNRRGNCSPAQSGIYRNLRTVVRHRKKLVAMSTEVRNRMHTVVDRLFPGFLDEKKSGIYSFSKSSLYLMEDRFSPRQIRRRKRQKLIEILKRCGTEKPESTAAKLQKYAARVLNTPNEYITTLQLSLTQHVKHLRCLQDSIDQLEHEVAVWLAQTQGAFLTTFRGIGIVLAAGVSAEIGNPHEQEPLNNLVSYSGIIPRVKQTGGSEGKTYTGKVAKRCNHILKDYVVQSGNHMGLHGPEELMADYKRREAAGQHADFGIGRRYLRTAMCLMRTSQIYMPEQLRNTKVKPEERAGYYLTIWPYLRKKWKKAGALDAAFEKDRPLGQWRCMVQELYEIKLKL

SEQ ID NO: 187101 - protein, 412 aa, unidentified
MGETLRLFVGDDWAEAHHDVELMDAAGRRLARARLPEGVAGMTRLHAMVAEQAGDAADEDVEVVVGIETDRGPWVLALVAAGYTVLAVNPLQAARYRQRLAVSGAKSDAADAHMLADMVRTDAHQLRPVAGDSAQAEAVKVVARTHKTLIWERTRHTQRLRHALRDYFPAALAAFEDLDAPETLELLARAPDPASAARLTIAQISAALKRARRRNVGEKAARIQSALRTEQLGQPTVVTAAYAASTRALVAVLAAVDEQVTLMRKEVEAHFGRHPAAEIILSQPGLGPVLGARVLAEFGDDPDRYATTKARKNYAGTSPITRASGRKRVVAARFVHNDRLVDALLVQASIAITKSPGARAYYQRQRARDAAYNTALRQVANRLVGILHGCLKTGTLYDETTAWSHHPQSAAA

SEQ ID NO: 187102 - protein, 348 aa, unidentified
MWIIGCDFHPEWQQVCIFDPQSGEIRERKLMNGNGEAEAFYRQLPAPSLIGLESCGNSQWLIDRLQQLGHEVWVGDAAQIRASYVRQQKTDRRDAAHILKLLLEGRFPRLWMPSAEQRDLRQLLLHRHKLVEIRTRVKNGLQHLMLNRGVQKKRKLWSQAGQQALRELPLHGWAAQRRQDLLALLGSLNQQIEVLDQAAEQAAAEHQQARLLMTQPGVGPITALAFAVTIGEADRFARGKQVASYLGLIPREYSSGGRQQLGSISKQGNRFLRMLLVEAVQNVVRLDEGFRKQYQHRCHRMAKGVAKVAAARRLAVRLYWMMRTQTAYPEIVRIESSPRVPLTVRSGE

SEQ ID NO: 187103 - protein, 316 aa, unidentified
MHTETESVFIGIDIAKDSLDIHVNPTEECWTSANTAKGIQDTVKRLEALTPACIVLEATGGLEMPLTASLAAADLPVAVINPRQSRDFARVMGILAKTDSIDARVLALFAEKIHPPCRPLPSEEGLALKELVTRRNQLIDMRTMEMNRQRRISSRHVVTSINTVIETINEQLKEIDHEIKQRIKASPVWRMKDKLLQSVPGVGDGTSAILMATLPELGLLTRRQIASLAGLAPMNRDSGKWRGRRMITGGRVNVRKALYMPTLTAVRYNPIIKSLYDRLVNKGKAPKIAITACMRKLLSILNALMRDNSSWRHVHP

SEQ ID NO: 187104 - protein, 343 aa, unidentified
MLYAGLDLSRKRLDFHLLDADGATVDVGASPPDADGLQHLSERVALHGEPVRAAIESMNGARFVHDRLELHGWQVEIADAQKVTGLGCKTDRIDAWVLAELARRDLVPAIWLPDPQVRAERERARWRLHLVRHRSSLKQRVHAVLLTHGKPCPVSDLFGVRGRQLLAQLGLPEPWQGTIEASLRLIDELDHEIGECERELRRLGADHRYVPLLCTVPGISWVLAYTIAAELGDIERFASPRKLAGYSGLCPRVYQSGERDLRGPLSKQGPRYLRWALVEAATHACTHPVYRDRYQQTKTRIGKQRGAKVAQIDLARRLSEAIWHMLSRGERFAPKGATDPLAA

SEQ ID NO: 187105 - protein, 341 aa, unidentified
MADLEFGGIDLAKNVFQLHGCSSTGAVIFRKQLKRNKLLSFISELPTCTIAMEACSGSHYWGREFEALGHSVRLIAPKYVKPFVKRSKSDAIDAEAICEAALRPTMRFVQVRSEDNQAAGLAFKARDLLVRQRTQIINALRGHLSEFGFVVAKGPTHVRKLVSAVEAGDLELPEVSRPLLSILVDTLEALNTRIRLLEAQIAQRAREDEICQRLTTIPGIGPIIATAIAALAPPPSTFRRGRDFAAWVGLTPLQHSTGGKQRLGRTSKMGNRALRRLLIIGASAVVRWAEHKGAAPGSWLARMLERKPPMLVRVALANKMARIAWALMAHGGEYRAQTVTR

SEQ ID NO: 187106 - protein, 345 aa, unidentified
MPIVGGLDIHRKQITFDYLDTETGQVRRGQISPADRAHLRAWLARFAGRQDVAFALEGCAGWRYVAEELAAAGVTAHLAEPADTAFARGRKRHAKTDKTDARHLRMLLAEDRVPECWIPPARILECRALLELYNDLRRERTAWAQRIHAVLFHQGAPPLGEGVLRTEQGVAGLRAAAAAHLSPVGQLQVATALEVIDALEARLHAVRHQLLDAARHLAGAKVLAARLYGVGPVTALAITCWLGGAGRFSSSRQAVRFAGLDITVSSSDRKGPPGKLSRQGPPVLRWAVYEAGKAHARTSAPDHGYYVAVKDRKNSKRACLSEARKILRQAHHILAELGDDALAAA

SEQ ID NO: 187107 - protein, 422 aa, unidentified
MLGVGIDWAEEFHDIALGTVEKGVIEQFRIEHGPAGVDRLIGRCLALEPDPAEVRVVLETRHGLLVEALLDAGFTVVPVNPDLVARRRGPARKKDDAEDARICCLLALDRHAGLKALIPHGELGGELRAIARDDERAARDQRRLLNRLRADLQTTYPAALVLAGTDLGAPTMLRLLERWSTQSELTTATRDELVDFARAGHHGWPEKFADRVAAALATPALPTRDYLVRAKAAGIRLAAVQLLALHEARRGWHQRMGELLLGGRRSGREHTVKDPDPGKAFPGGEIYLSMAGLGDILAARVAGEIGEHIEQFASPSGLQCYAGQAPVTRRSGKSDFVVARRLAHNRYLGTAVHQWAFCSLTQSGWAREFYDHKIAAGKSHHAALRALGNRWLEVLWHCLTKGVLYDEAVHVANRNRAPGRAA

SEQ ID NO: 187108 - protein, 409 aa, unidentified
MAGIDVHKKVLMVVVIETTMPEEKPERRRFTTLPGDLSRLSSWLRAQEVQEAVMESTAQYWRSVWLELEPHMLLHLAHAFSNRAPRGRKHDFRDAERLVRRLFADELILSFVPNGEQRIWRNLTRMKMQLTRDRIRLQSQMECLLEEMRIKLSSVVTDLLGASGLRILRALATGETEAKRLAALGDNRLKCTEEQLRDALTGSSQPMHREMLALQLERLQLIDTQIAKLNHLVAQAMKPHQEAVMRLAEVPGLGVDSAQQIIAEVGVQAGTFSSAGELTSWVGTCPGNDESAEENHSSRSAKGNKYLRRVLNQAAHAAVKKRGSYFQALFRRLLPRLGYQSAIWAIAHRLCRVIWKILHEGVRFIEKGREPDAQAKKKRARMLVQALRRLGYDVTITATHLAPQNAVQT

SEQ ID NO: 187109 - protein, 351 aa, unidentified
MAGSKRSIIGGVDTHTATHHAVVIDRNGRLLADAEFPATPAGYASMLKWMRGKGTLGQVGVEGTGAHGAGLARYLHAQGIDVLEVPRPDRRLRRQRGKSDPIDAEAAARTVLAGNASGAPKLADGPIEAIRMLRVARIGAVKARTAAVNTLRSMVITAPESLRTQLRGLSSAQLVAACARLRPDSTNLAEPAQAAKHALRSIALRVQHLDTETRSLRKQLDELTRTAAPATSAVFGLGPDTVSALLVTVGDNPDRLRSEAASAHLCGVAPIPASSGKTNRHRLHRGGDRTGNSALHIATVVRLRYDPRSRAYADRRTTEGLSMPEIIRCQKRYLAREVFQTLRADYANIST

SEQ ID NO: 187110 - protein, 323 aa, unidentified
MDGYVGIDVSKGRLDVLLVRESKREGQQFTNTPTGHEKLHRWLERRLKAEPVHVCLEATGSYGEAVAEYLYAQGYTVSVVNPARIKGYAASQMQRNKTDKLDAALIADFCRTQQPEAWTPPAPEMRQLQQLVRHLDDLTQARQVAKNHLEQTGLGSSIVQHWQDQLSLLDSQIAQTQRAISDLLDQHPTLKQQADLLRSIPGLGDTTIGKLLAECRDIRAFRDVRQLVAFVGLNPRHHVSGSSIHKRPTISRTGSASLRAALFMPALVAMRFNPILRAFADRLRARGAAGKAIVVVVMRKLLHLVYGVLKSGQPFDPNWAIAA

SEQ ID NO: 187111 - protein, 405 aa, unidentified
MDTLCPRCAGIDVHKNNVVVCVRCCDRPGKVFEEVRTFSTMTAGLLALSDWLAEHGVTHVAMESTGVYWKPVFNILEGRVAVILVNAEHIKQVPGRKTDVKDCQWLAQLLQHGLLKASFVPPAPIRELRDLTRQRTQLIQERTAAANRIQKVLEDANIKLVLGVSGRDMLEGLIAGETDPAKLADLARKRLREKIPALRLALQGRATEHHRFLLRMHLDHVTHLEELIARVGGRIEEALAPFAEAEERLQTIPGISQRVAETVLAEIGPRMEQFPSADHLASWAGMCPGNNESAGKRRSGRVTKGNRWLKRILVQAAWAASHTKGTYLQAQYRRLAKRRGVKRALVAVGHTLLVIIYHVLKRGTTYAELGADFLERLEPARLTRQLVKRLEALGHKVTLEPRPAA

SEQ ID NO: 187112 - protein, 456 aa, unidentified
MRRNEPGDNKIRHALPTVHPNAAAIDIGARMHVAAVAADRTAEPVRSFGTFTTDLHRLVDWFAECGVDTVVMESTSVYWIPVFELLEARGFEVFLVNARDAKHVPGRKTDVSDAQWLQRLHSHGLLRASFRPKGEIVELRAYLRQRERLLEYAASHIQHMQKALTEMNLQLHHVVTDITGATGLRIIRAILAGERDPAVLALLRDTRCHASVETITKALTGYYRAEHLFALEQALALYDAYQQKASACDARIEAVLRQLSFRRGREVGPLPSPRRNMRRQPNGPEFDVRAALFALLGKDLTQINGLGPYLALKLIAECGDDLSAWPSAKHFTSWLCLAPSNKISGGKVLSSRTRRSGSRAAALLRLAAVTVGRTDTALGAFYRRLSARIGKLKAITATARKIAVLFYNALRHGMDYVDPGASAYETRYRARVIDNLHRRAKVFGFVLQAMAPVAVS

SEQ ID NO: 187113 - protein, 354 aa, unidentified
MENYTIGCDAHKRYSQFTVMDGRARVRERKRIEHTVGAIQEYLSKYPAGTPVAVECVGNWYWIVDEIEAAGCVAQLTQAGKAKVMMGHVNKTDKLDADGLALLLHMGTLPTVWIPSRELRDQRELPRTRMALTKQRTAVKNRIHATLSKHAIHLEEDSDVFSGKGLLALRQALSGLPVETRHCVEEELTLLGEIQSHIEVLEARIRERMQCTPTLRLLKTLPGVGDILAMVIEREIGSVERFPTAEHLASYAGTTPKVNSSGGKTYYGPMRKDSNQYLKWAFVEAANVIVRCRHFPSWQNKHGVRLYERTARRKGHAIAVGAVARHLAEAAYWVLSKGETYHEPHSKKGLPKQG

SEQ ID NO: 187114 - protein, 315 aa, unidentified
MTNLKKSKTSINVGVDVGKAFLDVYIHEKELHWQEDNNEAGIKRLLKRLAHYQVERLAMEATGRYEFNLAQAAYEKNIPVCIVKPLLVRRFAGAMDQIAKTDKIDAQVIALFSVVMKPTITPRKSKNLIAIKDLIARRRQLMGLRTQELNRIKIMGKTLEVSIKRIIKCLDHEIKRMENKLAKHVEEQSEWSAKQAILKTVPGVGDTLVYTLLADLPELGELNKKEVASLVGLAPINRDSGKLRGKRRVQGGRANVRTVLYMATLSATLCNPVIRSFYKRLVAQGKHKKVALTACMRKFITILNAMVRDKVEWGL

SEQ ID NO: 187115 - protein, 403 aa, unidentified
MFTLGIDVSKKSSRYVLLNPEGRKVKSFSLDNSYEAFQDLLERFKELSIPKEDLLVGLEASGAFWENLYSHLKENGFSVVLLNPYHTNKFREALAKKAKTDDIDALIIAQLLRTGEYVQSQVAEELIQSLRELTKLRYELVKERKNYQRQVFSVLAVVFPEHEKTALKNPFSVASLAIFQAFPTAQDLAQAKAKQIEKIVRSIKGNNFDLKEIETLLQTAKRSIYAGRARKARATSLRILLRHVENLSSSIEELENEIKQILSPRQSEDSFPGENLLTIPGVGEKTVAAVLSYLGTNGANFSTSTKAVGYIGFFPKIHQSGQSQWDNVISKRGPTLLRWALYMAAVACLRHNPEMKSLYHKKLSQGKTEKQALICVAKKLLQIMLSMLKSGQAYNPSRVYVTC

SEQ ID NO: 187116 - protein, 327 aa, unidentified
MEREYIGIDLHKAFFQACAISATAERRWEQRWPTTPLGITAFLTRCSASSHVAVEASSPTWAFVDRIVEQVGAVHVVDTRKTRIKAGYAAKTDRLDAQRLADALRRDSIVGIYYPPPAIRDLRELGRYRCHLARLQASLKQRIHALLLRQGVSAPKALFTQRGTRWLDALQLPGWAGSELRGLRHVLTDVRGQLVPILAAIRTVAATDPIARVLDQAPGFGPVFSVTLRAEIGTITRFPDGRHLASYAGLVPRVAQSGRRQWSGRITKVGSPWLRWTLVEAAIHQFRRPDAFGRWARRLAVKIGMLKARVAVARALCGEVFAAWPRA

SEQ ID NO: 187117 - protein, 354 aa, unidentified
MNTTQVFEKRKIAVAIGIDLAKDHCDVVAYNADNKICFTKSNWAYPQLMEWLANAQPAVVLMESCKGSMVRARDIADLGHDSRLVKGADVKALRNVTQKNDIRDADYIARLFYVPGTKYVFVKNQRQQSLQFLQNEYKSLQELRIRVGNQIHAGLEEFGCPGSKSKKFIQSRMMAHLEKNAELIPDEVMASFLRRRDMWLNLFEQEEQAKTRMEEIAMTDDDAKRIMTVPGVGAQTAVGMLVHIGGDIGRFKNSGQFAASIGLVPKQNSTGGNITLNGITKCGPKRLRANLVQCGQVILMYADKLKGNFGDWVRKLRDSVKKRGVIACAIAAKIAKIIYRLMKDKVDYTPVPSR

SEQ ID NO: 187118 - protein, 348 aa, unidentified
MVHFVGLDVSVKATSVCVVDDAGKVILEQKVPTDPADIIAILTSLGATYGRIGIEAGPLSQWLVNALTAANLPVICVETRHMKALLTAQQISKTDRNDARGIAQMMRVGLFKPVHVKTLVAQEQRMLLTSRKLLQRKLLDVEADLRGTLRNFGLKVGVVGSSRYEARVRELVEGFPRLAAIVEPLLSVRRVMRQQFAVLHKMLLDMVRGDLVCRRLMTAPGVGAVVALTYRATVDQPQRFVHSRAVGAHVGLTPKRYQSGETDYDGGVSKCGDALLRTMLYEAAHSLLIHGRQWSWLKAWGIRVAQRRGMRRAIVAVARRLAVILHRMWVDGSEFRWRKDSAAVPAVA

SEQ ID NO: 187119 - protein, 330 aa, unidentified
MRFYNHSHAFYCGVDLHARSMFIHILDHNGKTVFEADLPAGPEAFRKAIAPYRAGLVVGCECMFSWYWLADLCEDDEISFTLGHALYMRAIHGGKAKNDRIDAAKIAGLLRGGMFPMAYVYPRAKRATRDLLRRRCFFVNQRAQLIAHIVNTNSQYNHPPFAKKLSYAGNRSEEIAERFTHASTQMSIRADLNLIDAHDAQIDEVERTVLKNAKINDPVTLNLLRTIPGIGKILSLALLYEIDQIARFPEVGNFLSYSRLVRCEHESAGKKKGSGGKKIGNAHLKWAFSEAACLMLRAEADAKKWLDRQTRKRGKKKALSVLEAKLGRAV

SEQ ID NO: 187120 - protein, 337 aa, unidentified
MSVYVGIDVHRKRSQVAVVTEDGTVQLNKNVVNGSEPFLRLIGDLPAGTPVAFEAAFGWSWLAELLEDYGFEAHLVHPLRCKAIASARLKNDKVDAAILAQLLRADLLPEAWLAPPRVRQLRALLRHRASLVRLGTQLRNRIHAVAADHGYDRSASYWTGPGRGWLAELDLPAASREIVGDCLAVIDGLAPVTDRIDGELHAHARADPRVKVLRTLPGVGEFTALVMLAEIGDITRFGSARKLASWAGLTPTVRGSDLKVRHGHISKQGSAWLRWVMNQAAQTAKRSPEFAASYAAIAKRRGKKIATIAVARKLLTRAWHLLNEMQATDTNAPLRRP

SEQ ID NO: 187121 - protein, 351 aa, unidentified
MSIIGCDVHTRYQVVAWIDEETGEIKVRRLEHAGEEVGKFYAQLPRGTVVGIEATFPALWFERLLAELGHELWVGDAAHIRASEVRLQKTDARDAEHILDLLRTGRFPRIWVPSMEERDLRQLLVHRMKLVRARTQVKNQLHALAISQGLCRKGKLWSAKGRAELEKLALLPWAARRRKELLEWLDQLDEQVRELDRAVEEAGRARPNVALLRTHPGVGTVAALAYVLSVGPVARFPRSGKLVSYWGLNPREHSSGGHQRLGSISKQGNTMMCWLLVEAAQTAARLDPQLRRTYQRLKSRRSSGVAKVAIARRLAIRLYWMLRTRHNYAQLVHMSGSPSSAVVPPQAESKL

SEQ ID NO: 187122 - protein, 360 aa, unidentified
MEAKRKRYVGIDLGKREYTMAIIGLKGKMTIHQGKTSIQGRQALYKKLEGTDKIALEAGNLAFIVAREIQERIGSEVRVLNSAKLPFIWDAPTKTDKEDAMKLAHLIEERRDEKLPIVPLPSEKEMARRKLLANYGREMKGRTRYINLLHALFVHQGHTTVVKKNLATAERRQQAVELLQGQEREEAGWLLKHLELYEQRIKELKGKIQQEAKTDEDMKLLQTIDGVGPIVAYAYIAHVGDGSRFSSGSQVSNYLGFVPRLDYSGTIKRQGHITKRGNGYLRGLLVQAAWSAVSSRHGGALKERYLYKTSVKGFSKKKTIVSVGRRLSEIMYSVLRNKTKYEVRPWNGVQDISSVKMMCA

SEQ ID NO: 187123 - protein, 405 aa, unidentified
MEIVVDRACGMDVHKATVVACIMGTGIKKEIRTYTTMTNDLLRLKEWLTDNRITHVAMESTGVYWKPVFNILEESFEVILANARHVKNVPGRKTDADDSAWLCKLLRSGLIRGSFIPPKEVRELRDLTRYKRKLIQAIVSEKQRVEKILEDANIKLSSIASDTFGASGKRIIEELMKGELKPEAMAELTKGRLRSRKAEMKEALVGNMEDHHRFMIQAHLTHIAMMEELLATVEKKIQETIERHFKKDYELLKTIPPVKDGASVIIAEIGVNMDPFPTKMHLSSWSGMSPGNNESAGKKKPGVTTHGNKHLKTILTEFGWIASKMKGTYLWSKYHSLVGRRGNKKALVAVDHKILVMCYHILNSKVPYKELGPRHLDERRKDRIAKSYIRRLSALGYAVTVKEAA

SEQ ID NO: 187124 - protein, 446 aa, unidentified
MRVMHERVAGIDVHKDMIKVAIRSPGEKGTRKTGVLEFRTFWGVLQEVAAELRRRGVTHVAMEASGVYTEPVYHALCEQDFTEVLVINPRHVKALKGHKTDARDCRRIAELLECGLLRGSYVPSAAQKEMRDLTRYRKKLVQARTSEIQRMQKALESAGIKLGSVLTDITGVSATAMIDALIDGERRPRVMADLARGTLRAAGKQADLKMALAGRFTAHHATMLRMHRDQVRLNNHAIAGLDEQIGTAAGRWQREMGLLMSIPGFGPVVAATWLAEIGPEPHTWFGGHGKLASWVTLSPGNNISAGKRKYGRTGDAGTYIKPALIEAAWGAIRPRGRIQARYNRLVRRFGGDKNPGARKKAITAIAHTLLKIAYQVLKSGEPYAEPGADFYTRRNSAAAQQAWLLRRLEKLNPGATITITPPPGGAPPSGGAPPGGTAEAALIRGA

SEQ ID NO: 187125 - protein, 430 aa, unidentified
MLYLGIDQHRKQLTVNLRDENGDVVIQRQVSTQWERVLQFFDQVAELAEAQGGFMAIVEVCGFNDWLVELLQEYGCREIVLVQPEIRAAHKTDRRDAGQLSQLLWLNRQRLLEGKRVHGLRRVLPPSVEDAENRQLTAMRKRLGDLRTRTLNQLQRLLLKHNLQQECPVKRIQTKAAREWLQTLDLKEIDRMQLNLLVAQWNLQDRQIAELQQQIVCRQREDAVAAILATVPGMQAYSSLTVASRIGSIDNFPRPGSLANYWGLTPGCRNSGDVNARLGSITKQGSVLVRFILGQVILHVLRRDPAMKAWHLRIKKRRGAKIAKVAAMRRLATILWHMVKHQQPYRLGQMMKLGQAPVAAQENTPGCNAVSRDSVPEVFQGITGQKNGQSSAGKKQPRSPKRPRPDGSFSRSDSGIPHRVAPQQSPTPFP

SEQ ID NO: 187126 - protein, 336 aa, unidentified
MTIIRIGLDTSKHVFQIHGVDENEKPVLRRQLRRSEVEKFFAQLPPTRIGIEACGASHHWARLLRGLGHAVLLMPPQYIKGYVKRGKNDAIDAEAICEAMSRPTMRFVPVKTAEQQAALTMLGVRDLLVKQRTMLMNALRGHAAEFGVAAAKGPNKIVELLQRLATGEGVPALAREMLGMLASQLEAVNGKLKAIEARLMAWHRQDQTSQCLATIPGVGPIAGVSFALKIPDARAFRSARHFAAWIGITPRENSTAGKHRPGKISHEGDESLRRLLVLGATAVIQRAKRGRVSPWLLGLLARKPKKLAAVALANKMARVIWAMMISGEVYRRPQEA

SEQ ID NO: 187127 - protein, 342 aa, unidentified
MEHFAGLDVSVKETSVCIVDDTGKIVREVKVASEPDALLPVLTNPAYRFKRIGLEAGPLSQWLFSALAEAGLPVICVETRHMQAALKAQINKTDRNDARGIAQMMRVGLYRPVHVKTLRSQKLRMLLTHRKLLQSKAIAVENDLRATLRNFGLKVGMVGTVKFEARIKELVENLPDLAALVEPLLVVRRVLREQIGILHRRLLVIVRDDAVCRRLMTVPGVGPVVSLTYRATVDVPARFRKSKAVGAAFGLTCFKYQSGEIDRSGRISRCGDEMMRVMLYEAAQSMLHSKKWSWLKAWAMQIARRRGKKKAIVALARRLAVIMHRIWVDGTEFRWARDAAAA

SEQ ID NO: 187128 - protein, 341 aa, unidentified
MRTFIRIGIDLAKNFFQVHAIEREGEPAVTRKLSRGKVLAFFAQAAPCRVGMEACGSSHYWAREIRALGHDVVLIPPAYTKPYVKRGKNDANDAAAICEAMSRPDMRFVPIKSADQQAVLMLHKTRELLVKQRTMAVNALRGHLSEFGLIAPKGIHRVKELLALAQADETLPEEAKQATAMLASHSDGLDEKIGDLEKTLARASGKNQTIRLLDEIPAFGPLIASAMVAFNPDPSVFRSGSDFSASLGITPSQHSSGGKDKLGGITKRGNRYLRKMLVVGCTSVLRVAHKYKGALAEWIAAMRARKPERVVAVALANKLARIAWAMMSTGEAFRTELYTKA

SEQ ID NO: 187129 - protein, 361 aa, unidentified
MGDATTSKETKVTVGLDLGDRHIQVCVVDEAGEVIEEARLATRPPALRRRFCGADPLRIVLEAGTHSPWVSRLLAELGHEVIVANPRKLRLIYANDSKSDRVDAQYLARVGRLDPALLAPLRHRGAETQVDLALLRSRNALVRARTRLISHARGTTKSLGARLPACSSESFAARAGACLPDELRPALDPVLAVIAGLDAQIGALDARIEEMARQRYPETALLTQVPGVGTLTAMVYVLTLEDPQRFPKSRSVGSYLGLRPRQRDSGSAQPQLRITKAGDEHLRWLLVGAAHYILGPFGPDTDLRRWGLALAAQGGRAAKKRAAVAVARKLSVLLLRLWTTGEVYEPLRNARLHGELLAAPS

SEQ ID NO: 187130 - protein, 467 aa, unidentified
MKIQYRRCAGLDVHKKSISACIRIRVHGHKVEVLTAEFGTVTRELERLRDWLKEHKVKPVAMESTGVYWIPVWNVLEQVRYGFELLVVPPQHVRALQGCKTDRIDCQRIAEFLQYGLLRSSFVPPRPIRQLRDLTRSRAHLQGDRNRVINRIGRLLETVNVKLGSVISNIVGASGMAILQALARGVGDPEKLAGYKVATLKCSDEELARALEGRFDDHFRWLLRDLLDRLTYLDRKLADLEARTRDAIEPYMPVVRRLCTIPGVDYKTACAIVAETGVDMSKFPTADHLASWAGLCPGNNESAGKRFSGRTRKGDRYLRRLLIQNAWAVAHKKDCGLTAVFYKLAGKRGPKKAAMAVAHKILVIAYYIIRDGVEYKDPGGDYLDRQDPERTAKRLLARLERIGFPVDPALRASMGKGRGKGKRARPPIPVEQAGGCRWCANRGITCIHARNQKRAGESGASDSPRSA

SEQ ID NO: 187131 - protein, 370 aa, unidentified
MHQSSTLYIGMDVHKEAIAVAYVAKDHDADVIYLGTIGTRHVDIDNLIRKLQAKAKHRVFVYEAGPCGYWLYRYLTKKGYVCWVVAPSLIPKKAGDRVKTDRRDAVQLARLMRSGDLTPVYVPQVEDEAIRDLTRAREDTIRDLKAAKFRLKAFLLRHDIRYTGRATWSPAHLRWLSEVVCPTPAQQIVFQEYVRAINEHTERLQRLEQELHEQVTSWRLQPVVAALQALRGVQFTVAVTTLAELGDLTRFDTPRQLMKFLGLIPSEYSSGERRRQGSITKAGNTHARRALVEGAWAYHYPAKVSRHLQLRLATQPKAIQDISWKAQVRLCKRYRKLIARGKHANQVVVAIARELVGFMWAIAKQVAVTP

SEQ ID NO: 187132 - protein, 343 aa, unidentified
MKITTVGIDLAKNVFQIHAVDERGKVVVKKQLKRNQVIPFFTNLEPCLIGMEACGGAHYWARKLEQLGHTAKLMAPQFVKPYVKSNKNDAADAEAICEAVGRPSMRFVSIKNGEQQALLSVHRARQGFVKARTAQANQIRGLLAEYGIIIPQGIKHISKRLPEILEDGENNLPGVFRQLLQRLGEHLNELARQVDELEAQIQVWHREHVASQKLAQIPGIGPITASALVATIGNAQCFKNGRQLAAWLGLVPRQHSSGGKPTLLGISKRGDAYLRTLLIHGARAVIRVAENKPDHEGSWLGQLMERRSKNVAAVALANKNARTIWALLAHDRNYESSYEQSAA

SEQ ID NO: 187133 - protein, 424 aa, unidentified
MKVTYKTCCGVDVHKSFLVATIITTTGGIEPSYQKKRYSTFNNSILEFKQWLLDNDCHDVCMESTGKYWVPVFNLLEDDINVVIANPKWVKAVKGNKDDTKDSKWIGDLFRLGLVRGSYVPCKKIRILREYTRYRYKLISCRSSEKNRYQNALTVCNVALDSVVSDIFGKSSTSIIDYLLEQSGTSINHEEIASKLLRSLKSKEDAVIESVEGYQMTDAQKYRMRLVRAHMDYITAEINDVDKMIENMISSNPDFENAVQFLCTIPGLKRDSAITIISEIGTDMSQFSSSKRLCCWAGLTPGSNESAGKKKSVRIIRAGVYLKPALVQCAHAAVKSDKYPYYKKKYDSLVKRRGKKRAIIAIARMILTAIYQMLSTGEQWNPNDLYKIDMPVALVEKQKAKAIKQAKKLLQREGLLPPDEPLAS

SEQ ID NO: 187134 - protein, 326 aa, unidentified
MSNILGIDVSKDKLDLILLSEKGKSHKVISNDLAGFKTLDQWLISRHIDQVHVCLEATGQYGDAVSEYLYGQGHDVSVVNPTRIKRYGESKLHRNKTDKADADLIAEFCLKEKPALWEPLNPDLKHLRALVRRLIDLQANYRQEESRLSSGEKDAWVIQDLTVHLEYLKACVEATEAEIQNFTKGTPDLKAEQELLVSIPGVGEKTSARLLGEIGEVSRFENAPQLAAYAGLNPKGFSSGSSVHKKTCISKQGRSELRACLYMPAIVAMTHNPVIRAFKERLQKKQLPNMAIIAACMRKLLHIVYGVLKSRKPFDPEYDRQFNYSA

SEQ ID NO: 187135 - protein, 346 aa, unidentified
MGIDSHKQTHTAVALDTATGRKVGEITVKARTRGFERLLLWARELDDVDRFAVEDGRHVSGALERHLIAHGETAVRVPPAMMFQARRADRVRGKSDPIDAEAVARAALAHPELPTATLAGIERDLDLLVAHRESLVNERTDKISKLRWLLHDIDPDLAPPLRSFDRFKVLARVQRNLDSMTPTTAVAVCMDLLARCREITVQANKLEREIIGLVDLHAAALLKIPGCGALTAAKILAETAQVKRFPSEGHFARYVGTAPVPVASGASHRHRFNRRGNRQLNAAIHRVAITQLRIHEPAQAYFSRKRAEGMSKTEALRALKRQITRTIYKTMVSMDQPTDYAAAVAA

SEQ ID NO: 187136 - protein, 386 aa, unidentified
MQTVANQPEAPTAIRTDLGAIFVSLELSRSTWLITSLSPGGGEKMSKHVVRGGDVAGLLERFAQLRKKTRARTGKVFPFVVIQEAGLDGFWIDRVLQNEGIESHVVDPASIATSRRRRRAKTDRIDGEALVRALLAYKRGEPRVCAMVKAPTPEEEDRRRLCRERKVLIAERVRHVNRVKGLLFSQGISDYEPQRRDRRERLDKLQTGDGRLLPEHLKAQVRRELDRLELLLEQIKAVEAERDVLLAAQQVAAPATMLLDIKGIGPEFAAILWSEVLFRRFDNRRQVASYAGLAPTPWQSGSVDREQGVSKAGNPRLRTTLIQLAWLWLRHQPQSALALWFGERVRRNGGRHKKTTIVALARKLLVALWKYVTAGVVIEGAVMKAA

SEQ ID NO: 187137 - protein, 353 aa, unidentified
MITIGVDAHKRVHVALALDEAGRELGQWRGPNSTAGWQGLAQWVLATGGDRQWGIEGAWGYGRGLAQHLVAAGETVYEVNARWTASGRRSARRPGKNDRLDARAVALLVRQEAPTLPQVQAEDETAVLDLLTTEREQALSEATRLRNQIHALLLHLDPEYQVHLPVLKSRASLAALETYIAPGGGPLQLERAASVRRLAQRLRLALTQAEELASRIRDSAAEDFSPLTRLCGVNLLTAGTLAGVLGPGRRFATDAQLAAYAGVAPLEASSAGLVRHRLNRGGNRRLNAILYRIALTQAHHSSEARAYLDRRVAEGKTRREAIRALKRFIIRAIWRLWQECRSVSNTSLEVRAA

SEQ ID NO: 187138 - protein, 351 aa, unidentified
MNTVTIGMDLGDKNHALCILDKSGKVTKQTTITNTSDEIKKFFTKYKGATIALEAGTHSPWISRQLAAMGCNVLVGNPRKLRAIWDSNDKSDNRDAKMLARIARFDPELLYPINHRGAQAQVDLELLQARDILVGNRSSIINHVRSSVKSLGGRLPKCSAECFHRKADKHLPEELGDILKPLLMIIEQLTAQIKTFDRQVEEISRERYPETELLRAINGVGPLTSLAFILTLEDPSRFDKSRQVGNFLGLTPRRDQSGAIDKQLRITKAGNPYLRRLLVSAGQYILGPFGEQCDLRRFGKRLAARGGKNAKKRAVVAVARKLSVLMHRLWLHGEVYDPNYAVNSRTLAKAA

SEQ ID NO: 187139 - protein, 384 aa, unidentified
MSNIAPACAEASVGRSLETERHQFLYVGMDIHKDNHTAAATNCFGQNLLEVEVSNSKKDFDDLVARVERLSKAENLKPVFGLEDSYGYGLRLAKHLYGKGLLVKMIAPVLVDRERQYETHPEKSDSLDALGVAKVLIQRIDRLPNYSLSKNDEISKNIKELTLDREFLVKEQSRLKNQLHRLLHKAYNSEYRTKFKDPFSLKALRYWRGHPVPQKRADIMGNISILKNQIRRKIKRLLDIKKEVKEIEQELQCLIQQTNQKIDTLNGCGTVLASQVLAEVRNIDRFQSPHSLAKYAGLCPREKSSGKTFRHIKTKSGNRRLNMAIHRIALSQISKSGNQYAKTYFQRKISEGKTKVQALCCLKRRLIDIIFMMLKYKQSYNYIA

SEQ ID NO: 187140 - protein, 345 aa, unidentified
MTTMNYIGLDVHKKTISYCVKDVSGRIQQEGKIGSTRRELDCWMKTLPQPWTVAMEATIFSGWIYDHLLPHATQIKVAHPLMLRAIAAAKKKNDQIDASKLADCLRCDFLPECHMMPRAIRDRRRTLRYRHLLVRQMVQMKNRVSGLLMETGVEYNKQRLHKVSYFRELLSANGEVDPSIRPLLKLSRETIERCQKTEYALVSSLQRDPVLADRIKRLRTVPGVGPITALTWALEIGDVSRLGSIKQAISYCGLCGDERSSADKAMRMPLSKQRNKHIQRALVEAAKLAPRQNHEMAVIYDQERQKGNSNRATLAVARKMVAYLLAVDRQQRDFVPAEERRTTAT

SEQ ID NO: 187141 - protein, 387 aa, unidentified
MVQINDLSRSLAAFDPISTLVVVVEMSKASWLVSGVVPGVERQPLKKLEPDATALLRLIERWRNEAVRAGRPIRRIALAYEAGRDGFWLARWLIARGIEAHVIHSASVAVSRERKRAKTDRLDAAMLMRVFLGWLRGERGHCGMVAIPTMEEEDARRPSRERECLVNERSRITNRMKSALARLGVRGFKPHLRKAPERLAGLRTAEDTDLPANIIEELRRDMARLALLREQINSIEKTRAARLERAPDTGPHAMVRLLARVIGIGIETADMLVREILSRRLRDRRAVARYAGLTGSPDESGLKRREKGLAKAGNARVRRGLIQLAWRFLVFQKDSALARWYRTRTEGPSGARKTTMIVALARKLLIALWRLVTTGEVPDGVALRPAP

SEQ ID NO: 187142 - protein, 413 aa, unidentified
MIEPVVKCCAGLDVHRASVVGTVLEEDDEGQVRKETREYGAFRKSLVELGGWLRKRGVELAVMESTGVFWKPVYEILEEQIAKVYLVNARSVKKVPGRKTDVLDSEWLAELARCGLLTPSFIPPKDFRELRFLTRYLLKLIGYMAGEKNRLHKILDDSGIKLGCVVSDINGVSAKAMIEALIEGKMRPEEMAKLARGQLRKKEEALRLSLHGTISDRRRYLLQCIQRHIRWLERQKAEIVRQVVAAMEPYRREWELVQTIPGFDELSAAMLLAEIGVDMSRFGKSERLTSWAGMCPGNNESAGKRLSGRTRKGNKYLRQSLVEVSNSARKTQSQFQSIYQGLVIRRGHKRAIMAVGRKLLEVAFVVIHRKEPYRDPKIDYEQMVVLRNAPRWITKLRKYGYIPVSLTQKSAAA

SEQ ID NO: 187143 - protein, 349 aa, unidentified
MNNVTTYGLDLAKQVFQVHWVDADTGEVQRKTLKRAQVSVFFARRVPGIVAMEACGSAHHWGRVLVGLGHEVKLIAAQFVRPFVKTNKTDAADAQAIWEAAQRPGMRFVAVKNEEQQAVLSLHRIRAQWVKIRTMQAHQIRGLLYEFGVVMPISHRALLAQAGPLLAQPSGCPVPELLRGELLIQLEGLRTQTARIAALDKQLASWQRQEGECQRIAAIPGVGPLTATAVVASVADAKSFRSGREFAAFLGLVPRQSGTGGRVKLLAISKRGDPYLRTLLINGARSVLIQQSRADRTLDPWLKDLLMRRPKNVVVVALANKMARTMWALLAHGRSFDQNWAQRASPTLS

SEQ ID NO: 187144 - protein, 426 aa, unidentified
MPYMIAGIDVHKKMLAVVVADVELAEEYRFERCRFGTTPQHLQALCAWLAERNVQEVVMESTAQYWKPVWSTLERDWKPTCKQQEGAAKVAGALHLAQAESNRARQGRKTDFIDAERLVKRLAANELVLSFVPDEEQRLWRSVMRRKYQIIRNRVQLQNRLESLLEEMKIKLSSLVSDLLGLSARRMLGALAKGETEPQVLAAMAHQRLRATPEELQDALGASRELNPVYRRMLKMMLTELRLLEQQMRQLDREMATLLLAHADAVRRLTEIPGLGVDSAQQIIAEVGPTAAAFESEKNLSSWAGVCPGEEESGGKCKSHRSPKGSRHLRRILNQCANAAAKAKGTIFQAIYLRLVPRLGHKQTIGAIAHRLCRLIWIILHRGVSYEERGPALTAKAKQRRTAKMIRELSKLGYRVEPPNLQPAVS

SEQ ID NO: 187145 - protein, 368 aa, unidentified
MATGDRSSGPRSNKTVGELDRRRFHEISPNSRKSRSGAPGRPSSHSQGRDIVMDVAFKSVVGIDIAKRTLDVHVLPERTSLKQQNDSKGRGQLREKLPPPGECLIVVEATGGYERALVAELIDAGYQVTVVNPRQVRDFAKACGTLAKTDRVDAAVLALFGQRMGELRIQAKIPEKQLELQDLVARRRQLVELRTAEMNRKEHVGSKFVKKSLQESVDALNKQIRRFEKRIAALVQSDDDWKQKLEIVQSAPGIGPGTSATLIAEVPELGQLSRRKISALVGLAPFNRDSGEFRGRRAIRGGRSSVRCSLYMATLSARRSNPVIRAFSERLKALGKKPKVIITACMRKLLVILNTMVKNKTHWNPATT

SEQ ID NO: 187146 - protein, 317 aa, unidentified
MSNPESFVGIDVAKDWLDVAWLAGQTLHIDHTDEAIAGLLEQLLSQPPTLVVMESTGGLETAVASALAAAGLAVAVINPRQVRDYAKACGRLAKTDRIDALILAAFAAAIRPQVRELPDEHTRALGDLLARRRQLVEMRVQENLRLQRASNVQRASLREHIVWLDERIGRLDIDLTHALRSSPAWRDKDDLLKPIPGVGSLTRATMLALLPQLGTLSRRQIAALVGVAPFNRDSGQHQGGRVIWGGRAQVRRTLYMAAVAAMRCNPVIRSFYQHLRSQGKPAKVALTACMRKLLVTMNAMLKHHSAWSNRLDTQHSC

SEQ ID NO: 187147 - protein, 314 aa, unidentified
MTSNAEIVGIDVSKSTLDVACWESKAYRQFSNETKGIPELIEWLKELQPELIVLEATGGLEMPLVAELAYAKMAVAVVNPRRIREFARSMGQLAKTDKLDAKVIAHFGVATHPEARKLPTEEEERLTALITRRRQIIEMLTAERNRLHSARFAMKERIETHITWLEGELKDLDKEISDFIQQSPVLKEKEKLLRSVPGIGPVTSATILAMLPELGTLNRQKIAALVGVAPVNKDSGKRQKKRRVFGGRANVRSVLYMAALSASKHNPIIKAFYDHLVRMGKEKKVALTACMRKLLVILNAIVRINQAFSLLPVN

SEQ ID NO: 187148 - protein, 430 aa, unidentified
MEVMDASGRRLAKARLPEGVTGMTRLHALVGEHAGDNPDDVEVLVGIETDRGPWVAALVAAGYTVFAINPLRASHYRARHTVSGAKSDAGDAHVLADMVRTDAHQLRPVAGDTATVEAVKVVTRTHKTLIWERTRHTQRLRHALRDYFPAALVAFEDLGAADTLELLAKASTPAEAARLTVSQISAALRRARRRDIPAKAAAIQAALRAEHLGQPDVVTGAYAVSVRSLVAVLTVLDDQVKFLQGQVEEHFGRHPAAEVVGSRPGLGPVLGARVLAEFGDDPDRYATAKARKNYAGTSPITRASGRKKTVAARHVHNDRLIDALMTQAFTSLRWSPGARAYYDRQRERGASHNAALRQLANRLVGILHGCLKAGALYDEATAWPPGVEKIAAWHFSSWDVFRDGRGIGSGGRFRTRGSGCRGPRRRDSRG

SEQ ID NO: 187149 - protein, 413 aa, unidentified
MDLLVERCAGLDVAKREVVACVRTPEPGTGGQRRQVVRTFATFSAELEALADWLQAEGVTQVVMEATGQYWKPIWYVLEERGFALLLVNARHVKILPGRKTDVADAAWLCELLECGLLRGSFVPPPAIRRLRDLTRYRKKLVQAHTAETQRVHKTLEDAGIKLGSVAADVLGVSGRAMLAALVAGERDPAVLAALAKGKLRKKLPQLRQALAGRFSEHHALLVELSLGHLEHLEGAIARLDGRVDEVIAPFAVARDRLDTITGVGKRAAETIIAEIGADMRVFPTAAHLASWAGRCPGNNLTGGKRRSGKPTKGNRWLGEVLVECAWAAAHTRETYLAAQFWRLARRIGRKKAAGAVGHSILVIAWHLLSNDCDYHELGGDWFAGRSDHDRHKTHLVKQLQALGYSVTLQPAA

SEQ ID NO: 187150 - protein, 370 aa, unidentified
MVERFHGIDRHRRSATVSVLNREGVEEKFFSLTHDFNRYVEMLGAEDVVVMETGAGSFFWADKIEARGARCFIIDPYRFRIIKDSWNKTDKRDSRNMSKALWVYMVTGEFGLPIVYKPSALIRELRKLYAQHQILNKQIRMLKNNIQTVLADNGIVLPALQKNHLLSVKRGKDVLEELDISEASRISIAMNLGILWHVVEKKEEIVKEILRIGEPLKEEVDLLISIRGITPLTAMAFLADVGDIRRFKTLRKMNAYLGLVPKMKESGSRSRSGHINKASRKLTRTILTQSLIQITDASLYFRDYYDELKSRRGSGRARIAVIRKLCGIMRRMLLDGKAYKHVEIPLYEKKRKCYEKQLNQIKEKMERQSA

SEQ ID NO: 187151 - protein, 430 aa, unidentified
MPGINKKPMIENYQFKATIGLDWADQKHDLWIRPADGSKPEHLRLEQSPEAVHEWAAKLRKRFGTGPVALGVETSRGPVISALMTYDFIVLFPINPKALKDYRAAFSVSGAKNDRTDAQLIEEFIRLHSEKLKALQPDTQLTRKLSGFVQDRRHLVDERTRIVNQLHSKLKTYYPLAETLIGSELNSLLAAEFLSRWPDLESLRAAPVPTLRAFFYKHNSRSAKKMEQRLEAIKTAQALTTDPGIIEPARELVLALAGMLKCLHKSVARLEQAIELAMDQHPDAALFRSLPGAGPALAPRLLVAFGTQRDRFESAQEVAQFYGVAPVVIQSGNSELVRLRRRCPKFGRQTFHENASCVAKSEPWGRAYYQQQRKKHDDKHHQACRALAYKLIRIYFSCWKARTEYRSNTYLNALQKHGSPLHNKLNMIGE

SEQ ID NO: 187152 - protein, 415 aa, unidentified
MLILGCDVGSETHYLRAIDTRGRELSKSAFPFSNDSAGFQSAKEWAVRIAAEHEKKQIVLGLEPTGHYWFCLATWMIFNGISVVQVNPYAVKQTKEVEDNSQLKDDTKDPKLIANLVKDGNFGMPYLPEKLYAELRRLSMFRDQLNEDRIRAINRMHREMKIYFPEYKDAFGKVDGAFSLELLKSAPFPDDLKALDEDGIRQIWHEAKLRGRGYIRSGEILGYARSSVGIRDGADAAKIAVQWFVKKIMELDEELAVIENLINHKCKEIPHTGNILEISGIGENTLSGILAEMGDISRFDDVKEIQKLSGLGLVACSSGKHKGETKISHRGRKRLRYWLFQAAKSAVAHADEFKELHIYYTTRTKNPLKKMQPLIVIACKLLRIIYTIMKKGTAYDPKKMLTDIKRQEKQEALAA

SEQ ID NO: 187153 - protein, 412 aa, unidentified
MQDILTCVMGLDVHRDIIVACLVKGAVDAEPEAETRTFSTLIPEMQKLRDWVIESECRNIAMESTGIYWQPIYEMLESCFDGEISILVVNARHMKNVPGRKTDMKDAQWIATLLRAGLLKGSFIPDKTFRELRHLTRYRKSVVHDITAQKNRIDKFLQSSGFRFTAFLSDTFGASGRNIIRHLIEHGSIDREALDKCLKTKTRNRIDEILVALNGSLSVHQRRFLNMVFLHLEDLEAHKHTIEDEITEEVLKHTDALNLLCSIPGIDVTAAAAIVAEIGTDMSAFPDSQHICSWAGLSPGNNESAGKRKSVHINKGNPYLKSMLCETAWIMASHRKLYLSGWYWKVKQRKGAKRATIALARKVLSIIYTMLKTGTPYSEECFEQRRQRCERKRANRMVNELQKLGYTVVAPD

SEQ ID NO: 187154 - protein, 387 aa, unidentified
MSQVDDLSRSLAAFDQNTTLTVVVELSEASWLVAGLVPGVDRQPLKKQEPDPRALLRLLERWRAEATKTGRMIERIVLAFEAGRDGFWLARWLRARGIEVYVIHSTSVAVSREHRRAKTDRLDTGMLMRVFLGWLRGERGHCRMVAIPTLEEEDAKRPSRERESLVGERTRIINRMKSALARLGIRGFKPALRKAPQRLEALRTPEDTPIPPNMLDEVRRDMIRLAVVREQIDAIERARLVRLEQAPASGSHPMVRLLARVIGVGIETADMLVQEVLSRKLRDRRAVARYVGLTGSPDESGKRRREKGLAKAGNARVRRGLIQLAWRFLRFQKDSALAQWYRARTEGPKGVRKTTMIVALARKLLIALWRLVMTGEIPVGVVLRAAA

SEQ ID NO: 187155 - protein, 422 aa, unidentified
MGKRSYRSTAFDEMDWSAVLSRIEGERVVLAVDVAKEAFMAQLLTEEREVLATVRWRHPQQTRALVETLKGWLGHCRVEVVMEPTGTYGDALRGLLVAQGWPVYRVSPKRVHDAAELYDGVPSLHDAKAANVIGRLHLEGVSEVWEEVSEERREMKALQGLLRLYRGRYRRGLNRLEAQLARHWPEVLGMLALDSVTLLQLLATYGEPGRIAADPEGATLLMGRVGGRGLCADKREAVLASAVQSVGVPCLEAERELIQRLAADVLATREELRKLERRVKAKVERTPVLRRMAAVVGSTTSAVLLATQGSPLDYPEPRSYQKSLGLNLKERSSGQHKGQLKITKRGPSLARQYLYFAALRLMDRDPMVRHWCERKAGRDGGRKGKAVTAVMRKLAKALWYVARGERFETRKLFTVETWPMAA

SEQ ID NO: 187156 - protein, 364 aa, unidentified
MKQKEKHNTIGLDLGEGRHRFCVLDEAGEVIEQGSLSNERAALARLTQCYRGALVVMEAGTHSPWISRYLKELGSEVIVSNPRKVRAIYQHERKSDQRDAQMLARLGRMDRALLYPVRHSSEQAQQDLLRIKLRDSLVRARVGLINSVRFSLKSLGYTVRNPSSERFHKVVSGTLPEAVRQMISPSVQALAELSVRIKVLEHEINVLARTKYPQTLWLQQVPGVGALTALYFVLKIEDPQRFENVRDVGAYVGLCPRRDQSGGNDPQLRISKRGDAYLRRLLVSAAQYILGPFGPQSALRAYGLMLAADGSARAKKRAVVAVARKLAVLLLSLWKNRTDYEAFPHWQRIEDKRSGTIAVHRVKA

SEQ ID NO: 187157 - protein, 361 aa, unidentified
MDLPITHTDEEALPVVLGVDTHVDAHVAVALDGLGGRLGHKTVPATEAGYALLAAWAEEFGGLERAGIEGSGSFGVGLTRFLRARGVEVVEVNRPNRQHRRRFGKHDTADAEAAARALQANTVAGEPKSADGPAEMVRALHVVRRSALKARTQAANQLRALLVTAPEGLKAELRGLSTTKLVATAARFRPGAHSEDLRAATKLAMRSVARRHLTLSEEIAELEEQIERLVKEAVPALASLRGVGTDTAASLLVAVGDNPERLKSEASFARLCGVAPVPASSGKTVRHRLNRGGNRDANRALHVLALGRMSWDERTRAYVARRTAEGKSRREILRCLKRYVAREVYRILVAPGALPPSISVP

SEQ ID NO: 187158 - protein, 357 aa, unidentified
MLSSNVKYIGLDVHKEAIAIAVLNGAGKLVMESIVETKSSTLLDFLHGLRGELHVTLEEGTWAAWLYDVLKPHVREIVICNPRRNALLKEGSKSDKIDARKLAELLRSGMLRAVYHGENELRTLRELARSYLTVSKDLKRVKNRLKALYRSWGISCAGKQVYTPRHREQWLSKIAQVGVRRRAELLYQQLDGLQVLRHTVRGELLAESRKHKAVKILRQVPLVGPLRAALLLALMQTPHRFRSKRQLWTYSGLAVVTYDSAQHRYVDGQLQRSKKPQQIRGLNQNHNHAMKDIFKSTALSASCCAGPLQDFYARLLAKGMKPDMARLTLARKIAAITLTLWKKGGSFDAEHLKSQAA

SEQ ID NO: 187159 - protein, 350 aa, unidentified
MVVVGADVHKRTHTFVAVDEVGRKLGEKVVEATTAGHAGAVMWARECFGAQLVWAIEDCRHLSARLERDLLTAGQQVVRIPPKLMAQTRASARTRGKSDPIDALAVARGFLREPDLPIASHDEISRELKLLVDRREVLVAQRTATISRLRWRVHELDPERAPKAASLDRAKHRQILGAWLITVPGLVAELACEELADITRLTEQIDALAKRIGERVRAVAPTLLAIPGCGDLTAAKLVGETAGVTRFKSEAAFARHAGVAPIPVWSGNSAGRVRMTRSGNRQLNAAVHRIAVTQIRLQGCGQAYYRKRVATGDSKHEALRCIKRRLSRIVFSRLHTDHHNRTQPCQTAAA

SEQ ID NO: 187160 - protein, 361 aa, unidentified
MRKGIVHRASVTRAEQITGQKVVVGLDVHKRSIVAAIRVNGEEVKHCTMPADPEVVVRTLEPYRAGMRMVVYEAGLTGYGLARALEGAGMPAVVVAPSRTPRSSTAQSKSDRLDCGKLALFAEKGELLKAVVIPTEQEEHDRQLIRTRQQLVDQRRRIKQQIKSLLTCYGIVEPPGLAYWSCAAVQELRSMKLSRPLRACLDALMHLLQAVSQELDRLNEQIARISRQARHRQAMSLLQSHPGVGGTTATNFLVEVYRPERFANEKQLAAYVGLAPRVKQSGETRHAGPLMKAGRGHLRAMLVEAAWSWIRRDEQAKAVYRHLLHATGSAGKAIVAMARRLAIRLWRMLLRREPYRATCPA

SEQ ID NO: 187161 - protein, 479 aa, unidentified
MHLVMTNSQKSSISDSTIRLSQDQVCPLSGDDSMLDTIRAVQQEPEWAAFAAIDWADQQHTWTLVPAGSSLPQRGKVENTPEALHLWATALSVQFGGRPIAVCLEQCRGLLIYALSKYAHLVLFPVHPTTAARYRQTFSPSGAKDDPRDADSLLDLLLHHRDHFPRWQPDTVTNRHLQRLVEQRRLMVHEKTRQSNRLTACLKTFFPQILQWFDDITAPVVADLLKRWPTLEQLQHSHPGTLKKFFLQHNSRSEKRIQARLNAIYQAVSSTHDEAVLESESIAALGFLRLLKTLGENIEILDHRIQQLVATHPDAPIFASLPGAGPATIPRLIVAFGSRRERWTSAYEMQCYSGIAPVKEASGRHEWIHFRRSCPKFLRQTFHEYAFLSTNQSPWAQAYYRHQREKGIAHPAAVRSLAYKWIRIIFRCWKDSQPYDEARYAAAQQKRNSPLAALGIDTKEVAGFQKPALKKSCSKRLTE

SEQ ID NO: 187162 - protein, 448 aa, unidentified
MSKSKTKKEKVKRISQLTVINPTAAGIDVSDTEMMVAYPISPEQLEIRVFGCFTRDLHSIANCLKENGTTTVAMESTGVYWIPLFLLLQEYGFEVYLVNAKHVKNVTGRKDDESDAEWIQKLHSCGLLNASFQPDNMERTLRSMVRHRKNLVRTSSTYLNRIQKALELMNIKVHTIISDIDGKTGLLILEAILAGERNPEVLADLRDKRIKASREDIIKSLEGHWTTEHLFELRQCYQLYSTHRQMVDECDKEIEKQLIVQIASKNEGVIPDIPKVKRKVCGKHKVKFNLTADLKEILKVDVTEVFGINELSALTILSEVGCDMTKWKTEHHFTSWLGLAPNTKISGGKVMSSRIMKKKHHAGQAFRMAANGLYNSKSPLGDYFRRLRAKAGAPKAVVATARKLAIIYYKMVANKEAFNPKFLDDYRKKYNEKKIKQLKRKIAQLEAA

SEQ ID NO: 187163 - protein, 349 aa, unidentified
MTEQRRSYAGECVYVGVDVHKETYTVTCVCHKQIVKTVTVQAEPAGLAASLPRWFPEATLYSVYEAGFSAFVLHRVLTKASIRNIVVNPASIAVAANDKVKTDRRDSKKLAIDLADGRLRGIYVPTEAEELARLLPRTRAQIVEHRATIARQIKAKLPQFGLIAPSSRRMISNRYLREIATWSLPPELSVSLTLLAEQWRFATRQLIEMRRLLREQAQAQQEIEKVYRSVPGIGAVAARPLATELGAMTRFANERALFSYTGLTPSEYSSGASVRRGPISRQGSSRVRHVLVAIAWRAMPRDAVLKEIFDRIAATRGKKRAIVAIARRLTGRLRACFRQGTTYAVGTYA

SEQ ID NO: 187164 - protein, 380 aa, unidentified
MSESMALVGLDVHQAQTVAAVLDRVTGELDVKRLRGAPGDVVPVFLEQLGRPVRAVYEAGPTGFTLARAATARGLDLRVIAPGSIPRAPGDRVKTDRRDARRLVRLFAAGELSFAWVPSEADERFRDLVRCIDDARKDLMRARHRLSKFLLRCGLRFGARQWTQPHQRWLGSLTFDDALSRTVFIDYCCAVDAVAHRRRTLIAVLEDAVAASSHAETVARLRCFRGINTLTAAGLCAEVGSFERFAKPALLSGFLGIVPCEYTSDQKRVQGQITKAGPTHARRLLVEAAHHYGAVRASARSSAPATTARTHASSESRGARSGACISAGRTSARHAASRPEPSRSPARASSRHSAGRPRPWTDPFINIQPRAAGGCRGAHE

SEQ ID NO: 187165 - protein, 310 aa, unidentified
MEQTYIGIDVSKDRLDVHVRPSEEAFAVGRDGEGLAALIERVGMLDPYLVVLEATGGFELTVAAALVAAGVPLAVVNPRQIRDFARATGQLAKTDALDAKAIARFAEMVRPEPRAVPDEQARALGELVARRRQVIEMMTAERNRRRQLTSRRLIKSVDRLLAVLLKELAELDRDVGEGIRGTPAWRERDELLRSVPGIGDIVSRTLIADLPELGRLDRKQIAALVGVAPLNRDSGKMRGRRTTWGGRAKVRSALYMAAPVASRHNPVLTAFYQRLVSAGKAKKVAITAVMRKLLTILNAIIRDRRPWQTA

SEQ ID NO: 187166 - protein, 345 aa, unidentified
MDHHRTVIAVDLAKTVFEIAISHTPGDVAETKRLSRTAFQGFFRDREPVTVAMEACGSAHYWARELQAFGHTVELIPPHLVRPYVTRNKTDRADAKGILEARRNTEIRSVPVKTLAQQVIGSIHRFRSGWIGARTAQVNTLRGLLRELGLIIPVGVEKVVPTVRLLVEDADSTVPDGLRPMLALACDEIESLNARIKQSERELETIAEASPVVARIRSIPGIGLLTGTALAAFVGDVKRFGSGRRFASYLGLTPRERSSGMKQRYGRISKRGDSYLRLLLIHGARSVLGHATRAKSNDSLRTWAVSLNKRTKYNKASVALANKLARIVWAVWSRDTVYRSEPVTA

SEQ ID NO: 187167 - protein, 338 aa, unidentified
MSLYCGIDLHANNSYVVVSGQEDEVVLGRRYPNDLGRILRALEPYREELSGIAVESTFNWYWLVDGLRQAGHTVHLVNPLAAQQYQGLKYADDRSDARWLAKMLRLEILPTGWICPATERGVRDLLRKRVQLVRQRVACRLSLRNILERTTARRLSGAALTRLTQEDLSDWIEDEHVRLSMTTTLAVIETLDEQIKLIEGVVFEQARKESAFSVLTTIPGVGPILASTIQYETGDLGRFAGVGHYASYCRLVRSQHLSNERRKGQGLRKNGNAYLSWAYHEAAHFAVRYQPGARRWYERKRSKTCALVAIRALAHKLARAAYFMMRDQVPYEPARLFG

SEQ ID NO: 187168 - protein, 314 aa, unidentified
MTSVSNPASRFIGCDVGKSAIVVFDDATGRTRTIANQPESLARFAAGLDSSCLVVCEATGGYEAALLEALLAANVPAHRADARKIKAFIRSFGTLGKTDALDAKAIARYARERDPQLPRWLPPDPDRATLQALVLTRHDLVRQRTAFSNRRQAPAAEPVRAYLDDLLACIARQIKAIELRIAAILKASQPLKRDADILTSIPGIGFKTAADLLALMPELGSLDRRQAAALAGLAPHSRQSGRSDAYRHTKGGRSELKRALFMAALAARNHHPTLRPFFLKLLANGKKPLVAIVAVMRKLLIIANAKLRPQPQLS

SEQ ID NO: 187169 - protein, 344 aa, unidentified
MKITRVGLDIAKLVFQVHGVDEYGKVRARKQLARAKVLEFFVQLPPCLIGIEACASSHYWGRELTKLGHTVKLIAAQFVIPYRKRDKNDANDAEAICEAVGRPNMRFVAIKSEEQQSVLMVHRARTLVVANRTAQVNQIRGLLGEFGLVVPKGAARLRRELPGILEDAENGLPVLAREVLAGLLDQFHDFDTRVTAYDRQIRALAEASEPARRLMQVEAIGPQTATALVASMGDPHVFSSGRSYAASLGITPRQHSSGGKERLGQITRQGDSYLRTLLVHGARAYLRVVDKKTDAKSAWARRLKERRHVNVAAVALAAKHARVAWAILAHGTEYRPAGPEAVAA

SEQ ID NO: 187170 - protein, 375 aa, unidentified
MKKNSSGCKSPKASIKATKSTNVTAGMDLGDKTSRYCMLDENGEVLREASVGTTKEAIAQVFATMKPCRVAIEVGTHSPWVSRLLKSFGHEVIVANARQVQLISKSSRKNDRMDAQMLARLVRVDPRLLRPIQHRSEQAQEHLRVIRVRAALVEARTMLVNAARGLTKATGERLPSCDADQMGVERMESLPAGLQNSLRPLLEEVESLTEKIQALDQQVEQIARTDYPETSLLRQVSGVGSLIALTFVLTVEDRERFQKSRDVGCYVGLRPRQSDSGESEPQLRITKEGDPYLRKLLVQGAHCIMGRRGPDTDLKRWGLKLSARGGKNAKKRAVVAVARKLAILLHRLWVTGEVYEPLRNNQAEPPVKETGKAAA

SEQ ID NO: 187171 - protein, 343 aa, unidentified
MKPLYFGIDLGVKVCAWHLLDRDGSTVSKGEFVTGERLLIDSVNGHVGEVHVLMEECELSGWAYRALLGHVKSVRVCDPRRNAWIAKAGDKRDEVDAYKLAEQLRIKHFKEVYNPEDEEMAAFKKAVQQEVRLARLLTVTKLHIKAQLRREGVSYRGGNPYSSKGIEELVANIENESVQDLIFQNFRLMRLLEEEKKIALARLRCFLPRIPILNAFLEVPGAGLRTSCRFVAYVQTPHRFSSIRKLWKYCRLAVIKRSSDGKPIGRERLDWNANGVLKDVSRKVFMGARACKSDNLFKRTYRKSLARTGNNVHARLNTQRKIIAVFYAMWRKGTEYNDAIDRV

SEQ ID NO: 187172 - protein, 365 aa, unidentified
MNRVFVGMDVHKEKIVAVGIPLEGTVPVFREEFSGSDLSRIVKRLVRLSKTHQVASCYEAGPCGYGLVRALQEKGVDCHIVAPSLIPKKPGNRVKTDARDARELALSLRAGTLTFVRIPSEEEESVRGLIRCREDIGKEVRRLKHIIAHWLLTHGYRKPSGVGNWSPTHWRWMRGMELAALDREVLDHYLDTLRMLDERLQVIDGQIVELSEADTYREKVRRLRAFRGFSALGAMRVVAEVMEFTRFPSAPAFMKYAGLTPSEYSSSDRIRRGRITKAGNSLLRYVLVEAVQSVVRTPYPGRALLQRMEAVQGPLREIAVNCLGRLRTKFLRLLHRGVSSGKAKVAMARELAGFVWAMMTAPEAA

SEQ ID NO: 187173 - protein, 411 aa, unidentified
MVFVGDDWAKDHHDVELVDGNGRRLARARLPEGIDGVSRLHALIAEHAPPEWADLDPDEVAARVRVGIETDRGPWVQALVAAGYQVYPINPMSVARYRERHSTSGAKSDAGDAHVLAEIVRLDHAHHRPIAGDSPQAEAMKLVARTHQTLVWDRSRQLLRLRSTLREFFPAALRAFDDLTAPDALHLLGAAPDPDRAARLSRTEIIAGLNLAHRRSAAAKATHIQDLLRTDRLGQSAPVQAAYAAIVTTQVRLITALNTEIEHLGQVVADHFGRHRDADRYLSQPGLGVVLGARLLGEFGDDPHRFTDAKARKNYAGTSPITRASGTRRVVLARYARNRRLGDAVHQWAFCAMRGSPGARAYYQAMRARGIGHQAALRQLGNRLVGILHGCLKTNTTYDEATAWPHPQPDS

SEQ ID NO: 187174 - protein, 310 aa, unidentified
MKQTIVYIGIDVAKAHLDVAWQKRLRRFDNDKAGRATLVKWIKQKQSDPVQVICEASGGYEQELLDALAEADLAFSLVQATRVRQYARAAGILAKTDKVDARVLARFGAAMRPEPTSPRSAAQKLLRELESQRRHLSYLLVAEQNRLEQLNDEKLRRLTRALMGTLKKQIALIDSRIATLIMQDQELCQKAQKLTSVKGVGERTAALLLAQMPELGTLNRREAAALAGLAPFNRDSGTMRGKRLIFGGRRAVRHGLYMAALVASRRNPILSSFYRRLRIKDKPHKVALTAVMRKLLLALNQALTPNQSFT

SEQ ID NO: 187175 - protein, 364 aa, unidentified
MKRKVYVGMDVHKETIQIAYLTSNSKEILKEQQIKHNEVQIKKFIKKLKTEWNEIYCCYEAGVTGYPLYRYLKSLGVNCILVAPGKIPRQNTDKIKTDKRDAIKLARLMRSGELESIHVPSEEDEAVRDYLRSRDSLRLDLGRNRQRLMKFLLRKNIKYSTTKYWTVSHYKWLNNLHFNNEILQETFNDYYSRVRVQEENLKAMDKKIQEIAESEPYREKVGILRCFRGVDYLTAMFLLCEVNDFKRFKTAGSFMSFLGLVPGEYSSGSKRKQTGITKTGSPRLRRILTEAAWQHRFPGTGSKIITARRSGQPALVVALAEKASLRLHKKFRNLQLRGKTPQVMITAVSRELSGFLWAAMNLVA

SEQ ID NO: 187176 - protein, 409 aa, unidentified
MNAVGIDVSKGKSMVAIMRPFGEVVASPYEVTHTDSELSKLANSLKSLNGETKVIMEYTGSYYYPIAYALHEAGLFVSAVHAKLIHDYGNNTIRKVKTDKADAVKIANYGLSNWLKLPEYLPEEDVRRMLKAFSRQYTKYIKLKTMLKNNFISLTDYTFPGVNELFTSPPRKSDGHEKWMDFAFKFWHCECVCGLTVKAFTDRYQKWCKRAGYNFSQDKADDIYASACGHWLALPKNETTKLLITQAIGQLNAVSENIAVIAREMKRLAESLPEYPVVSGFYGVGDILGPQLMAEIGDVYRYRNKGSLVCFAGLEAPPYQSGKFDSQNRSISKKGSPHLRKTLFQVMDIYLKSAPADDPVYQFLDRKRAEGKHYYSYMTAGCAKFLRVYYARVKEYFSKLDSEQEPSKV

SEQ ID NO: 187177 - protein, 403 aa, unidentified
MNGPIVSVDVSKGKSDYQAFKDLNVKFTDVRSIKHTKEGFDEIVNLVKDMERKLETEVCVVYEATGVYHRVLKKVLEDNNIKQFIINPLLSAKTRKNDSLRSPKTDKLDPKSIAKTYYNQSLHSSYKPQTTYHELRELSRYYEDILVHIRKDKVAFRAQLDIVFPGYDTLFDDLYGAVSLTVIEKYPHPELLQKKSINTVSKIIQKKTHHRQAVSNKMASKAIEYSKTIYSGCGKDDIDVLILERLIKKLNEDLNEAERTINEMIRLVQELPDFIIIKSIPGIGDNLAARIIAELGDMTRFKKKNELVAYAGLDPRIYESGQKDGAHMHITKKGNKRLRCLLYLAVTCSIRLKRDDNSIKDFYIKKMQQSNPMCSKAAKTACASKLVRIIYSMCKTGELYQYE

SEQ ID NO: 187178 - protein, 337 aa, unidentified
MFNSEEGYLHKVVQLGIDVSKAKLDCTLLLDRDTLRSRSKIVPNTAAGFVQLVEWVQRQAQVAAAEVVAAMEPTGVYHQALALALYEAGMTVVVVNPGQLRQFDEGLAVRTKTDAKDSVVLARYAGQPERIVWQPAPVEVRQLQALMGRLATVETELRRELNRREAAQLGHDPQLVQASIADAIAFWSAEQSKLQQAIDEHIDRHPGLKIERERLLTIPAVGPKTANRMLCVLSAHDFGRASQAAAFIGLTPVEHQSGSSVRGRPRLSKCGDARLRAALYMAAVVAIRHNPDVRALYQRLLKRGKAKLSALCAAMRKLVHICFGVLKNQQDYRPQCA

SEQ ID NO: 187179 - protein, 449 aa, unidentified
MKKSATKQPGLPVVHERAAGIDIGSRFHVVAVPPDCAEEPVQTYQAFTGDLQRMADWLVRTGVKTVAMESTGVYWVPVFEILEERGIEVILANAREARAVPGRKSDVNDAQWLQRFHACGLLRASFRPARDIAALRVYLRQRESLLDFTAAHIQHMQKALTLMNLQLHHVVSDVTGVTGMKIVRAIVGGQRDPHVLANMRDVRCKASLETISAALVGNYRPEHVFTLTQALALYDFYQERIEACDRQIEHALAILNVDKVCPEAPMPKAKHRTKQPNDVSFDVRSVLYQLTGRDLTQIHGLGPYLALRLIAECGTDLSKWRSAKHFTSWLTLSPGCKISGGKVLTAHTKKTTNRVTAHLRLAAVTVGRTHTALGAFYRRLAARIGKAKAVTATARKIAVLFYNAMRFGMAYQDPGAEHYEKQYRDRVVKNLHRRAAEFGYKLERAEGVS

SEQ ID NO: 187180 - protein, 403 aa, unidentified
MNAAGIDVSKGKSMVSVMRPLGEVVAKPFTVCHTGSELKELADYLKSLDGETRVIMEHTGRYYEPVAQFLHDAGLYVSAVNPKLIKDYGNNSLRKVKTDKADSKKIAKYGLDNWGELRQYASMDMIRYQLKTLNRQHALYSKMKTAMKNNLIALLDQTYPGVNALFSSPAREDGTQKWVDFAASFWHADCVRGMSQATFTERYRKWCKRNRYNFSSDKAAEIYTGAKDQIAMIPKDDLTKRLIRQAIDSLNTVSKTVEQLKAEMLKLASQLPEFPVVMEMHGVGDSLGPQLMAEIGDVTRFAHRGSITAFAGVDPGANQSSEREAKSVRTSKSGPPELRRTLFLVMDGLLKSMPQDDPVYQFIDKKRAEGKPYLVYMTAGANKFLRIYYGRVKEYLASLETAD

SEQ ID NO: 187181 - protein, 530 aa, unidentified
MITIPVIMERCAGIDVGKRGLAVAVATGPADKEAEIRTRWYGTTVPALRELQGWLREYGCASVAMESTGSYWIPVKNILEEECKITLVCARKHQPKKGDKTDFRDAINLAIHHRHGLLTGSYLPERGIVELRDLTRRRKKLIGNLQSEKNRIQKVLETANVKLGNVVSDVFGVSGQEILQALLEQKPATAEELAGLAKRRLRTKIPQLTEALESHQMNGHHRWLIEQSIQHAKFLDQQVEELEEQIQKHLEPYRRQYELLMTIPGIKEAGAANILAEIGPDMNQFPDGDHLCSWAGICPGNNRTAGKSKSSHIKKANKFLLASLVEAAWGASRKKDSACQRKFHRWMGKLGKKKAVIAICRSQLRVIWSVLKNDRPFVEPDATVLKTLEREKQIRHHALRLRQLGADEETIAAMVENLLEDAPILTDPGVDTAEVSETIDPPPADAPEIADPACQPPPTCSPRNKASRLPKHQPPTRGVLGFRIHTREKKQYSVFKEPPGTATPPPATTSPRKRGRAPTRKKGGAHAPEH

SEQ ID NO: 187182 - protein, 327 aa, unidentified
MNYLGIDVSKARLDCTLLDPATDKRKSKAVSNDPKGLEALSAWLDKQGVPPTDVHGVMEATGVYHEQAALWLTDAGMRVSVVNPVQVRDFARGLAMRTKTDGTDSVALARYGALTQPEPWEAPPIEIRELKALITRLEALEMDARRELNRREKALVAQAPALVRESLDNHLAALNREIARLQQAIDDHINRHPGLKADRERLLSIPAVGDKTANRMLAVLHSRKFRSADQVAAFLGLVPVEHQSGSSIQKRPRLAKNGDARTRAVLYMAAIVATQCNPHVRALYTRLCAKGKAKMAAIGAAMRKLVHLCFGVIKHQTTYQPNWQPTC

SEQ ID NO: 187183 - protein, 305 aa, unidentified
MTIVAHAHPFVIGVDTHARTHTLAVLVAATGEPVATEQFPATAAGMDRAVAWAARRTDGEMATLWVIEGVATYGAHLASVAKRAGFEVVEAARMDARAHRGAGKSDPFDARRIAAAVLSLEPEQLRRPRSDDGIRAALRVLVTAREHMTTERTATVNALTALLRVAALGIDARKPLTAGQIGEVARWRTRAEDVATSTARAEAVRMAKRVVALNEQLAANQAQIIDLIHTSKAAALLDKTGIGPVTVAVVYTAWSHAGRVRSEAAFAALAGVSPIPASSGNTIRHRLNRGGVRRRPGFRGRGSCG

SEQ ID NO: 187184 - protein, 354 aa, unidentified
MLIIGVDYHPSFQQIAFCNRENGECGERRLNHSDAEAERFYRGLKQRGISVRVGMEATGYARWFERLLSELGFELWIGDAAEIKAKRVRKQKTDRNDAQLLLKLMLEDRFPRIWVPSPENRDLRQLLWHRHRLVQMRTRIMNQLQALAMNEGRRWKTKLWSAQGRAELEKLPLAPWASRRRQELFELLDRLHPTIEELTTAVEQEARKRPEVLRLMTHPGVGALTALAYVLVIGTPERFRRSKQIGSYVGMIPSEDSSAGKQRLGHISKQGNSFLRYLLVEAAQAAARINSEWRRRYIHLAMRRHRSIAKVALGRRLGIRLYWMWRNGCEYSQSLEFGSYAGQLGTGDGVTTPS

SEQ ID NO: 187185 - protein, 330 aa, unidentified
MTLQEGQVVLMRFSREADADALVHYVHKHYPSYTVECCYESCCVGYHIYRRLSAAGWKVLVVNPGDIPRTGKQASTKTDKIDSRYLCQQLAAGQLKGIYVPDEKQEQFRSLFRRRNDLVKNLRRMKCHIKGMLLYYGVVIPGHYDNINWSKAFVVWLSKVKWTFAPAGEALKSRLHEYAFLHKEYLHGCNELRSYARSSYKKDYYLLRSVPGVGPFIAIAILAEVGDLRHFKGIERLSSYIGLVPSLHSTGTKSYTKGITVRSKHLLRSYLIKGAWIAAKKDPELMQYYEERRGSDHKKLIIKMASKTLSRMCSVIKRGEPFKLKETVIV

SEQ ID NO: 187186 - protein, 471 aa, unidentified
MNEVRLGIDVACRADHRASLADERGEFIWSSWKFRTTTTDLERLWAKLPAGASVTVILEPTRNAWVPLSAWLQARGATVILVPPEQSADLRDYYNKHTKTDRLDSKVLARLPLLHPEGLRGIDNLGPAQSLRRAVRHRFSLVKRRSAASLRLDALVELLGPGWADSLGSATASKTALVILEKYADPRALKRLGRARLNALLIRSSAGLWRQDKAEELLAMANETLELWSGGGIDFAELAHDIASEVRVLRSLDDEIAAADKRIAVLYDEADPKGIVRSAPGLGPVLSAAILGNAGDFNRFANLAGVRSFTGFVPKIDQSGLVAAHKGITKAGDAGLRQALYLAADHARHIDPTFAQRYYRLVMVEGKHHNSALCSVSAVLITRIAACWRKGELYQLRDEDGEAITEAEGKAACADRFKIDPKVRAARRRNTPAKVFKNRVAGRGRKESARKVAPATDPPGEEASENVARRA

SEQ ID NO: 187187 - protein, 314 aa, unidentified
MLSFCGIDVSKDRLDVMVLPDEYSSSVPNDPAGWAILVEQLRGFSITAIGIEASGGYERGAVRSLQAAGMPVRQVNPFKLRQFAKASGVLAKNDPLDARMIASFVGIMPTRPAQRTTPAAEQLVEMLAIRRQLSAEKIAAENASRLLEDPMLQRLSRRRITRLAADIELLDKRLVEIVATDATLAHRYRLLTSMPGVGPVLACTLIALLPELGGMSRKQVAALVGVAPYAFESGTLKGRRCIWGGRANVRQVLYMAAMSASNWNPALKLFHDRLKGAGKLPKVVIVAVMRKMITTLNAMVRDNIAWADRLIPIR

SEQ ID NO: 187188 - protein, 310 aa, unidentified
MDAHFVGIDVSKDWLDVHILPSGESVRVSNDSEGIVRLRGHLDALKPERVALEATGGLETLVAVELSAVGLPVVIINPAQVRSFAGALGKRAKTDPIDAAVIAAFASAMRPEVRPLPDGETRLLADLVARRRQIVAMIVAEENRARAATARQTQKSIKRLLAALRRELESVNEDMDGHIRKSPSWMVRQDLLTSMPGIGPTVARTLIAELPELGSLDRRQIAALAGLAPFTRQSGVWRGKSFIGGGRSSVRSALFMAALVAIRYNPVLKLFRDRLVAAGKPKIVAVIATMRKLLTILNAMMRDKKPWQTA

SEQ ID NO: 187189 - protein, 343 aa, unidentified
MNITTVGLDLAKSVFHVVCFNEHFNEVKKRMLRRKQVLQFFTQLPPCQISMEACASSHYWGRELRGLGHDVKLIPPQHVKPYLRGNKNDYNDARAIAEASTRPAMPVVSIKTVEEQDMQAIHRMRAQCIRDRTALSNSTRGLLGEYGIVLPKGLATLRKSIHGLLEDADNGLSDRFRNLLARRYEQLVELDEHIAFYTNELELLSQQDDACQRLQTIPGFGPIVSSAFRSTIGNGTAYARGRDASASLGLVPRQHSSGGKNVLLGISKRGDRYLRGQLIHGARAVVLQAAKKEDSLSRWINRIREERGWNKAVVAVANKLARIGWAVLRYNTSYQPVATEEMR

SEQ ID NO: 187190 - protein, 325 aa, unidentified
MQYLGVDVSKDTLEVADVSGKLRCSFHNTGAAIEELLLWSSQHFPEGDLHLVLEPTSTYHHLLVKALASKGVPYTLINPSHTAAFSPLQGRRAKTDRVDAHLLASLGESLHPKPSPPLEEEQEKLKVLSRHVEWLEKEMQGASNRLETARFSPWTPQAVLDSLEPTIQQLEEEAKKVREEMAAHQQEQPEWNAQVKLLTSIPGIGERTAVLLLSEMPQVANCSNAKSWVAFCGLNPEPRESGKAHYSRLSRVGTARVRAGLYLPAVSALRWNPAVKALGKRLGEKGKLGRVRVVAAMHKLLRLCFGVLKSGRPFDMALHQSTLTA

SEQ ID NO: 187191 - protein, 368 aa, unidentified
MKKFAGVAQKVKTDVIGLDVHKDVIVFSHLDAQGDELHAGELPSEAQKVIEAVHGLRDGRPVHVTLEASGGMLWLYDVLVAEFGEEFVHVVHPRFIRAIAQSPDKNDANDAYWLAHYTHEGRLRESWMPRGAVRELRIAIRGRHEAVRQRTRATLLLKSQLRQMGVKLPGVRMDGDAVQAKVRELGATIPGMRGLALRVLLRRFEAAARDVETWDEAIATLCADMPEVKKVQEHIPGVGKTLAAVIVAESGPVARFSTPKAYGKYTGMTPSDRSSGGRTIHGAMTRHGSPLLRWALLQAVMACLRGSREMGSGPRGAVARWVDAKERRTGSRMKVRVAAARKLANSIWWLFHQPEQFSASKSFTPAGT

SEQ ID NO: 187192 - protein, 401 aa, unidentified
MWCLQAAGSEKRESGELEHTPEAVEAWVGQLCQRFGNRPIAVAVEQSRGALVFMLAKYEPLHLFPVPSTMAANMREALYPSGAKDDPRDADLLLDLLLQHRDKLRGLSPDTEATRRVQNLVEERRKLVDEKTAQINRLTSHLKIYFPQILDWFEHLDTELVCALLEHWPTLEELQKVPPPKLRTFFRKQHCRGQELIERRILAIRQAIPAIRDRAVIEAKSTVVKVIVQLIRSLVKGIGDLDEKIEEAAAAHPDFFIFESLPGAGAVIAPRLLAAFGSQRERYGNAGEVQSYSGIAPVTERSGKKKWVHFRWACPKFLRQSFHEWAGHSIAYSVWARSYYQQQRSQGQDHHAAVRALAFKWIRIVFRCWKDGVAYDESKYLASLARRGSPLAALAATAKTL

SEQ ID NO: 187193 - protein, 320 aa, unidentified
MEKAKVYIGVDVSKATLDAAVHSSPKKWQFSNDEAGIDRAVGFLVELAPHLVVMEATGGYETPLAYALRTAGIPCAVVNPREVRDFAKATKKLAKTDSLDAQVLAHFAAVLEPAPQPMSSEQTEELGALLARRRQVIEMLTAEKNRLHSARKPVKEAIKAHITYLESELGEIETNLEGRIQESPVQRMKDKILRSVPGVGPTLSTTLLADLPELGSLDRRQIAALVGVAPLNRDSGTFRGKRSIWGGRGQVRAALYMAALVATRFNPVIANFYHRLLASGKAKKVALIACMHKLLVILNAMIKHRTTWHSSLPEALVPCP

SEQ ID NO: 187194 - protein, 343 aa, unidentified
MKSYVGLDVSLKQTSICVMDESGSVVREGVVISDAEAIAAFVRLNAPGAVRIGLETGPTTTWLWTELKRLDLPVICIDARHAKAVLKMQINKSDRNDAAGIARIMQTGWFKEVRVKDIDSHLVKALLVSRALLVKIKRDLENQIRGLLKNLGLVIGRGKFNVFAVRTEELIEDRPELVAVIRPLLAARKAIEEQVHNLDRRVLKLARHDMQVRRFMTVPGVGPVTALCFTATIDDPTRFKRSRSVGAYVGLTTRRHASGEVDWSGRISKCGDAMLRMYLFEAAGVLLTRVPKWSALKAWGMRLAKRNGLRKAKVAVARKLAVILHRMWIDGTEFNWSKEEASA

SEQ ID NO: 187195 - protein, 482 aa, unidentified
MKSKPQEKNKRATNHPTQHHWHEMNRKQRREMLRKMQSEDLSLEVIHPDAAGIDIGNESHYAAVPPSRDSQPVREFRCTTAELKAMAAWLQQCRIRTVAMQSTGVYWVAVYDILEEAGLEVYLVNARDTKNLPGRKSDVQESQWLMKLHTYGLLRNSFRPPQEIRTMRTYWRQRNDLVQSAGRHILRIQKALTQMNIQLANVLSDVSGVTGQAIIKAILAGERDPHKLAAFRDPRVKASEEQIAQSLEGNWQPDLLFLLKQEQDGYEFCQRQMAECDRQLMQYLQRREDRSHGAPLPEEKRKGRLNKKRANKPQFDLREGLFRMTGTDLTRIDSVDVMTATTVISEAGYDMSKWETENHFVSWLRLCPDNRISGNKVIGKGRLPTNNPLSIALKMAASTLRQSKTYLGAQFRRLRTRLGAPIAIKAMAAKLARLIYRMLRYGMKYVDQGAAVYELQHRNLQIKQLKWKAAKLGFQIVGAPAA

SEQ ID NO: 187196 - protein, 404 aa, unidentified
MNNVAGIDISKGKSTVSVLRPFGEVVAKPFSVGHTGSELKELADYLKSLDGETRVVMEHTGRYYEPVARFLHDQGIFVSAVNPKLIKDYGNNTLRKVKTDKADARKIARYGLDNWVELRQHTPMDTIRMQLKTLNRQQGLYSKTKTMMKNNLIALLDPTYPGVNALFDSPVREDGSQKWVDFATVFWHVDCVRNMSLAAFTERYRKWCKRHGYNFSQSRAVEIHAGAQDLIAMLPKDALTKTMIRQSIDALNAISASLERLKAEMRTLAAQLPEYPVVMAMHGVGDSLGPQLMAELGDVTRFTHRNAITAFAGVDPGADQSGTHEAKSTRASKSGPPELRKALFLVMDCLLKTMPADDPVYCFMDKKRAEGKPYLVYMTAGANKFLRIYYGRVKEYLALRENAD

SEQ ID NO: 187197 - protein, 408 aa, unidentified
MKTLHKRCAGLDVHKVEVVACLRLVARGKASYEVRRFPTTTKGLIKLAEWLEAAQCTHVAMEATGVYWKPVWHMLEGRFTLILANAAHIKGVPGRKSDVNDATWIADLLAHGLIRASFVPPQPIQELRDLTRTRKQLTREIVQHTQRIQAVLEEANVKLSSAITDILGMSGRRILKAIVAGETDPAKLAELGGPQLAASRSDLADALHGRVREHHRFLIGQHLKTIEQLEATIAAFDTRIEAALRPFRDTIERLKEVPGLSQTSAAILIAEIGADMNQFPTAGHLLSWAGLVPRLDESAGKRRSTRVRKGAPWLKPVLVQCAWAAARKKNSYFQAQFLRLKARCGPKKAVVAVAASLLATAYHMLADGTCYQDLGADHFARRDPARIVAKLANRIRSLGYAVDIRAAA

SEQ ID NO: 187198 - protein, 345 aa, unidentified
MQSMYYIGLDVHKKKISYCIKDGSGQVHGEGVIPAVRSELDRWMKTLPQPWTAAMEATIFTGWIYDHLKPHATALKVAHPLMLRAIAAAKKKNDRIDANKIADCLRCDFLPEAYMASTEIRERRRTLRYRNLLVHQAVQLKNKISGLLMEAGVIYNKQKLHKVGYFQELLATNPDINAELKTLLRLCRETLVRQQKMESALIRSLQRDSLLAERVKRLMTIPAVGPVTALTWALEVGEVQRFSSIKKAISYCGLCGAENRSAETSKRTPLSKQRNKHLQCVLVEAAKMAPRNSPALAMLYDREKRKGNANRATLAVARKLVAYLVAVDRRQKDFLVVENEHRTAA

SEQ ID NO: 187199 - protein, 323 aa, unidentified
MPTLGIDISKDSFHVELSINNKLRHRRFANRKEGFAELCVWLAKHKAGSVHACLEATGPYSEAVALYLHEQGHPVSVVNPAQIKAFGQSELLRNKDDRPDAGLIRRFCEKQQPAAWQPPPAHFRELQALTRHLENLLETRQQQVNRLEVTTTKEALKSLRKLVAHLEAEIKRTAQQIDDHVDRHPDLRQQCQLLQSIPGIGKRTATKLLAEIEDISRYKSARQVAAYAGLTPKNNRSGTLRGRTRLSKTGNARVRKALFLPAIVARQHNPIVSAFCHRLAQRGKSKMQIVGAAMRKLIHIAFGVLKSGKMFDPNHELLLKPVS

SEQ ID NO: 187200 - protein, 336 aa, unidentified
METVYFLGIDVSKKQLDSALTIDGKNYHQDEIENTANAIGVFFRNMKKTFGMKSSQLIVCMEHTGIYCLPLLDFLTKNKIKTCLESALQIKKSQGIARGKSDQIDALRIAQYAYKNREELHYWEPQRGVVQQLKALLVTRDRLVKIRTQLEVPIRQCAEFIVESIRKDMMENCRRTLKALHLDIRGIEQAMDELIRTDPKLAEQVKLATSVTGIGKITATNMIIATGEFTRISDPKKFACYAGVAPFPHDSGTTIRGKTRVSNLANMNLKKLLHLAAMSAIQCSKGELRTYYKRKTQEGKNKMSVINAVRNKLISRVFACIKDKRMYEKIYPHPLA

SEQ ID NO: 187201 - protein, 406 aa, unidentified
MKVYIGIDWSEKKHDICYVHENGEVLRYLKISHDVEGFLELDRARQELGVASSDCLVALETAHNLLIDFLCNQNYGALYIIPPNAVKSAQGRYRQSGAKDDSQDARLIADILRTDRGRFPLWRPDSALTRQIRAKISLILFLTQGIIRHSNRLRAVLLRYYPAALQIFSSLDTLISQAFIQAFPTPQDAQKLTFEDFKLFAQQHHHTHPKNWARCYNQLQAHYPSADPDVVTAYSQEAVILTEILNKLVRTKQQALHDLQILYRQHPDHFIYTSLPAAGVFLEPALLAKLGDDRQRYLSPAALQSLAGTCPVTRQSGKSRIVVFRRGCDHEFRQIIQQWAKMTIRVSPWAEAYYRSVRPHCDSENDAVRRLANRWLAIIWKLWQDRIPYDQNYHLRQHALRCLPNH

SEQ ID NO: 187202 - protein, 384 aa, unidentified
MSRVVIGVDPHKASNTLVVIDAQERLLAQQRFANDRAGYRSMKTFARAHRDRVWAVEGARGVGAGLARRLVAEGEPVLDVPARLSARVRALGGGSGRKTDDADAFAVAVAGLRSRDLQVVRPDDTVEILRLLSTRRQEVVAQRIATVNRLHDVLCQLIPGGAKRHLSATRSRQLLSAVRPRDAVGKARKQLALDYLGELLRLDARLKDLKKSLTEVLDEHPTTLREINGVGPINAAKILAETGDVRRFPSKAHFASYTGTAPVDVSSGDNNRHRLNRGGNRRLNHALHIAAVVQYRMPGPGQDYYRRKRDHGKTHLEALRCLKRRLSDVVYRHLIDDTAAGSPGGQVGASLQSSAADLIPKANTSEQSLPGLANDPTPDLAVVS

SEQ ID NO: 187203 - protein, 403 aa, unidentified
MNPCITIDVSKETSHVQGFLDNNVPLSKPRKILHTKEGFSNILTVYNQIVYRTGIKPTIFFEYTGVYHKTLMAYLKANNLSFIPIPPLVAAKVRKSDLRNKKTDARDCKTLSFVYYEDKVKKYYEPTKDEKRLKDLQRYYMITEKQYQEITGHLCEMIDTIYPFYKSIMSEFDCFTSLKFLQKYPHPDYVTSHREKTLIKDFMEITGHGEKYSTNVIHKLLNVINDTISGCNSDDFEVEMLKDYATQALFYKTKLNKTLEEINRIITQDSSKKSLVENIDSIPGVARNTAARFIAEVSNVDRFKSSKALIAFAGTDPNINQSGIIDGKHLPITKCGSKRLRTILFIMVRSMIRKRIPANPIKDFYKKKTQLGLPPKVVLIACINKLLGIIYQLNKTGEVFVLK

SEQ ID NO: 187204 - protein, 338 aa, unidentified
MKLYAAIDLHSNNSVLVILDEMDRTVLQRRLANNLEQICQALCAHREAIEGIAVESTYNGYWLVDGLMEAGYRVHLVNTAAVKQYEGLKHKEDVDDARWLAHLLRLGILPVGYICPKEARGVRDLMRKRNQLVGQRSRQILSIENVLSRDTGGRASANEIKRWQETDVDQLALGESSRLAVKSNVAVMHCLNEQIERLEAEILKKAKLRPDYQGLLTVSGVGKVLALTIALETGEVSRFATVGDFSSYCRCVGSEHLSNGKKKGSGNVKNGNKHLAWALVEAANFAVRYEPAIKRFYQRKCARTMPVVAIKAVAHKLARACYHVMRDRVPFDVQRAFA

SEQ ID NO: 187205 - protein, 467 aa, unidentified
MTPHAGKRFRTSPPGDDLAVQHPQAAGIDVHAAVHFVAVPAEDVPPGFVNPEPRLPAGVRKFGTNTGDLEALADWLTACRVTTVAMESTGVFWIPLFDLLASRGFQVILVDPRQTAHAPGRPKSDVLDCQWIRRLHSYGLLTGAFRPADEIVRWRGFQRQREMLIRYAAQHIQHMQKVLEEMNVKLTEVVSDIVGQTGMKILRDIVRGVRDPVKLAKHRHELCKATKEQIAAALCGNWRPELLFALRQALKLYDFYQKQLQECEGRIEECLRAMEDKSKGAPLPPPPRKRKSQKNEVRFGARVLLFKMAGVDLTQIEGISATTALVILSELGVDLSAFPHEKNFVSWLGLCPQHRGSGGKIFKRRTRRGANRVARALRMAAQGCHHAKNALGAFYRRIQARCGGAKAVVATARKLAERVYRMLRYGQEYVRQSQEAYQEAYQLRLVKALAKKAASLGYKLVPEARTP

SEQ ID NO: 187206 - protein, 302 aa, unidentified
MCVIGATGRIVREAKVASEPDALIAFLAGLSLPLARIGLEAGPLSQWLHAALGAAGYEAVLLETRHVKAALLAMIVKTDRRDARGIAQLLRMGWFRPVHCKSAPAQEVRALLVARTQLQAKMRDVELCLRGLLRGFGLKVGEISKGQFAARVRTLVAGHVMLERIAEAMLQAREALRVEFARLHRAMLTIVRGNEVCRQLMTVPGVGALIAATFTSGVDDPARFARSKGVGAHFGLTPRKYQSGETDIMGADAVRDQLVGSDDPRACEGLGAHRLMARYGAVDHGRGRAGARRGPQSLWCCG

SEQ ID NO: 187207 - protein, 349 aa, unidentified
MNATTVAVDLAKNVFELAVADGEWRIVERHRLNRARFVRFFVHRPPCQVVMEACGSAHHWARRLVAEGHTVRLLPAHYVKPYVGRSKTDRADAAALIEAARSSQILAVPIKSLEQQQLQSLHRLRSQWLSTRQRYLATLRGILREFGIMIPLGPSVAKAHIGLALAQADSDIPQGLRPALVQMLQEIAPLEEKILSVERQLATLTRADKCVQQLREIPGVGLLTSTALLSTVGDIQRFPTGRHFACWLGLTPSERSSAERRRLGKISKQGDVYCRTLLVHGARSALLAAHRSQRSGKPLDRLRRWALNCERVRGHNKATVALANRLARIVWATWKYERPFDGNWANQAA

SEQ ID NO: 187208 - protein, 425 aa, unidentified
MKITRIAEKINLNQVMDISVDVHKDTLNFFFASAGKEYTDLCSNRTDVIQRRIIKYKQIAKEHGMSNLRIICEPTGQYQNSLLRTARRNGCLTCYVNAESVKKFRVVETNDTGKTDIKDPRVISTLAGLNKVIRHRMIGEDYLMLRKLGKIYDETDVEIVRLKGRLNKLMVELFCDYSFKKDFLYSNSGLALIKKYGCNPYRIVKSGFNRFGKTMRHAAPRIQGSTLKRLFEDAQSSVLNELPTGYIEVLQNRFYHLFQNYLNQQKRKEGIVKEMIEILDRLREKDPNIPPPTPGVISAKNLARLFGETGPINDFSSYRKLMRYFGLNIRMRQSGKYQGQNKITKKGRPLGRKVLDNIVLPLVKKGCLYGDYYHVKKEKEKRPGNKAMTIIMRNFLKKFYGWYKSGKAFDEKRFFDNKSLYLKAA

SEQ ID NO: 187209 - protein, 372 aa, unidentified
MEHHTEAFVGIDTSKLRNAVAIADSGRGGEVRYLGEFPATEAAIQKLVAKLAAKYRHLTFCYEAGPTGYGLYRLLKSLSHECLVVAPSLIPKKAGDRVKTNRRDAVSLAKLLRAGELTAVWVPDERHEAMRDLSRARQAVKKDLQGKRQQISSLMLRLGRIYPGKTTWGPAHMRWLTSQKLEHREQRIAFEELLEGIRQESERMERLEGAIREVVPEWSLAEVVAALQAMRGIDLIAAVGVLAEIGDLSRFQNPRELMGYLGLVPTENSTGDKVKRGGITKAGNGRARRILVEAAWSYRYPPRVSRDKQPKVEAAPRRAREIAWKAQTRLCGRFRSLERKGKRRTVIVTAIARELSAFIWAINRELTPLRQA

SEQ ID NO: 187210 - protein, 400 aa, unidentified
MDERKGFSWFLGIDISKETFDACCISGQGGKHFSISTSMDRKGFEDLIKQLSSQSVPQESVLVGMESTACYHVNLYSFLVSSGYTVIVINPLLISNFVKLQLRKTKTDKKDAYVIAQFLFLNRDSLGRTVGSSDFSDVRDLSRQRESLVDQMTSNKIEVKRLLTMTFPELEHVACIFTKSMLRLLCQYPSAASIRQAKRSKIARILIPGSYGKQTDSSVERIIKAAETSIGTASSAKEIILKQKVFLLIQLEQHLQELTDILTEHCKGKMTKDMDILTSMRGIGKKTAMNFLVEVGGDVKRFESHKKVIAMAGLDPALYQSGKIDRKGKITKRGNRHLRRVIWLMTTKVIQFNARFKQYYLKRINDGLPYKMAVLATAHKLIRIMFAMLTNQTQFNESMN

SEQ ID NO: 187211 - protein, 311 aa, unidentified
MDRKCRWSRIIGLDLSKATFKGCILSGEGFTERKNFSGEMKRDESGYVLINNTIQAGDIVLMEAGSSTFNLARYLLKNSKANDVVVLNPANLRIIWDSQKKNDKADAMKIACIARDMRPEAWPRVTVPSEQEQSERSVIMHWVFLRKQETMLFNRFFALFNSLGYPEIDKPKLRSKSEFRVETINNLLTSNELAFTDAVMLEEQITVIQSQLHFMEDRLRTICLTHPQQALAWLSLPGIGLVNAATLIAYIGDGSRFTKADQLLNYAGMVPKQNQSGTVDIKGKITKRGCSAIRRNIIQGAHITMQLPVIC

SEQ ID NO: 187212 - protein, 412 aa, unidentified
MTATNQFAAHVGLDWADKKHDVCVQFKNGERVFHVIEHTAEALDVWLTELHQKVKGRIAIALELKKGPVVYALQKYPFITVFPVHALSLARYRQAFSPSGAKDDPQDAELALELMLRYPQKIKAIEPDNADIRLLQQLVEQRRQLVEDKRRFVNRLINTLKQYYPQPLEWFSHRGSLLLCELIMRWPSLQQLKRARHDTIRNFLNAKGGRAMALTEQRVVSIDNSIPLTTDPSVIEANALMATALVTQIKVVSEIIKTYDERIETLFDSLPDAGLFKSLPGMGPCMGPRMLAALGDNRDRFNSAEEIQNYAGIAPVTERSGQKSWVHWRWQCAKFVRQTFVEWTAKTVNSSYWARLYYQGQREKGKSHQSAIRALAFKWIRIIYRCWKTRTRYDEAKYLLALEARKSPLLKP

SEQ ID NO: 187213 - protein, 355 aa, unidentified
MDSVKYIGMDVHKEAISIAVLNSSGKLMMECVIETKAISILQFFQGLRGSLHVTFEEGTWAAWLYDLLRRQVTEVVVCNPRRNALLKEGNKSDRIDARKLAELLYLNKLKAVYHGENGVRALQELSRSYLTISSDLVRVMTRLKALYRSWAIPCTGKQVYALRYRAQWLGKITEVGVRRRAEFYYQQLDALRSLRQQVRRELLAESGKHQAWKLLCQIPSIGPIRAAQLIAILQTPHRFRTKRQLWAYGGLGIETHSSADHRYVDGRLQASKRPASLRGLNRNHNHDLKNILKGAAIIAATKPGPFREFYADLVAKGIRPEMARLTLARKIAAITLIVWKKGVCFDAQYLKPQTA

SEQ ID NO: 187214 - protein, 337 aa, unidentified
MDYFAGLDISMDETHVCVLDREGVVIHESKTASTAQSIADELAKAPSCRRIVFETGRMAPILFHGLSQLGLPVVCVESRQAYQALKSLATHKTDRNDARGLAHLARTGFFKPVHVKSLSAHAVRSLIIARKKLVGQRVTLENQIRGLAVVFGIRLPRALTAAFIDQALKASEGVAGLSAAMRGLIAARTAVMTAVAAIDADIRRMTTASEACRRLMAIPGVGQLTALAFVAAIDDPSRIRRSRDVGAYLGLVPKRHQSGEVDYVGGISKCGDRRVRTLLYEAANVMLTRYKGQLKLKDWAFAIARRSSMRKARVALARRLAIIMHAMLRDGTAFISA

SEQ ID NO: 187215 - protein, 343 aa, unidentified
MDVATIGLDLAKHWFQVHGIDAQGRVVIRRKLRRGEVVAFFAALPPCVIGMEACATAHHWSRELSALGHEVKLMPPAYVKAYVKRNKNDAADAEAICEAVTRPTMRFVPAKTADQQAVLMLHRARSLLVRQRTMLVNALRAHMAEFGIIAATGLRHVEDLAAEIAREQSRLPELARCILQTVVDHLRDTMARVQQIEIQLTRWHKDSPVSRLLATIPGIGVMGATAIAATVSDPSLFRSGRDFAAWLGMTPRQNSSGGKERLGRTSKRGDKYIRCLLITGATSVLRHMRTRTTKDAAWARGLLARRPPKVAAVALANKSARIAWAVMMRGEAYRSRSEIVQAA

SEQ ID NO: 187216 - protein, 387 aa, unidentified
MYFVGIDISKYKHDCFICTETGEVIESNFSFPNTSDGFEQLLNLLKSIDNFKEIRIGFEATGHYGMNLKLFLEKNNYSFMEFNPKLVKEFISGQTLRKTKTDKKDAYQITKYLISADYKPHPKQFYHKYSLKSLSRMREKLVKQRSYYEVALTNVLDHIFPEYKPFFNNTFSASSIFILSKYKSPDKIKNMKDYDSIRKISRGKFTSAQFFLLKDLAKNTIGTSNEIFELELETLLILRSQIEFEIKKLESNIEEIIKELNPPILSIKGIGYILGAGIVSEYGDVSRFKSADAMVAFAGIEPSICQSGTESHTGHMVKHGSGHLRYYLLNAADCIFLHEPIFTEFYYKKRNEGKSHRVALNHVTKKLIRIIYKLETENITFDSSKVK

SEQ ID NO: 187217 - protein, 425 aa, unidentified
MEVIHRRCSGLDVHKETVVACVRLVLDDKITREVRTFETTTSGLLLLLAWLTELGCTHVAMEATGVYWKPVWNILSDGDFELVLANAAHIKNVPGRKTDVSDAAWIADLLAHGLIRSSFVPEQEFQELRELLRTRKQLGRQQSSHIRRLQKTLECANVKLDSVITDLVGKSGRAMLQALIAGETDPVKLAALADRRIKASAQELREALRGRVTDHHRFLLHLHLQHIDFADSAIQDIDRNVTALIARMDQEVEAGQTRATFQSLILLLMTIPGIDVLSARIILSEIGRDMSRFPTAGHLLSWAGLCPRNDESAGKRRSTRLRKGDPWLKTLLVQCAWAARRKKGSYFNAQFLRLRGRRGPKKAACAVAASLLTTIYHMLKDGTQFQDLGADHFDRRSKDVRAKRLVAQLANLGFNAKLTPLAQAA

SEQ ID NO: 187218 - protein, 318 aa, unidentified
MGEMFVGIDVAKRRLDYAYGGQRGSAQVSNDEAGIAQLVQDLTARPVSLVVVEATGGLELPLVAALLQAGVPTAIANPRQVRDFAKGLGQLAKTDQIDCHLLAQFAQMVRPRVYVLPDAQSQALTALLARRRQVIEMLTSERNRLSSTHVSQRERVSAHIDWLAQELADLNEDLDQAIRDTPAWKAKDEQLRSAPGVGPVLASALISDVPELGQLNRHQIAALIGVAPFNQDSGQMRGRRRIWGGRADVRGLLYMATLSATRCNAPIRAFYLRLVGAGKPRKVAVVACMRKFLTMLNAMIKHGTHWIEPKPVSAQVTA

SEQ ID NO: 187219 - protein, 375 aa, unidentified
MTATTRPEMSVSEPTLYVAFELGKKEWKLAMTSRFGVEPWVRTVPGGDLGAVDRLLRQGRQRFALPAHARVVSCYEAGRDGFWVHRALTALGLANRVVDSASIEVSRRKRRAKTDRLDARKLVTMLVRVCCGEQRVWSEVRVPTVAVEAARQMSRERTALMQDQTRLTNQMRGWLASWGCAFPRHRPDAWWTTVRDWAGAPLPGEVQTRLARAAARMAVLEEQIAALDAQQQAVVTAAPATSAIRQLVRLKGIATTGASVLLDEGLVWRAFRNRRQIGGLLGFAPTPYDSGETQREQGISRAGNNRLQGVSIQLAWSWVRWQPGSALTLWYRAQFGTGKRARRIGIVAVARKLVIALWRYVTTGVVPAGAILKVA

SEQ ID NO: 187220 - protein, 339 aa, unidentified
MFYVGLDVSVARTSVCIMDALGQIVREQSVASTPEAIAGAIRAAGTNVERVGLEAGINSAWIARGLLDAKLPVIVIDATHAAAALKTGFRNKTDKNDARGIADLMRVNKFRAVWVKSPGAQRDRAMLTVREQLRRQSLDTRNTIWSILQIEGLKPPKLANPAFDALVARSLEDEVLAPLLRPLVAVVEHVDRQVAELDKLIAARAKASAVCKLLMKVPGVGPLVAMTYTAGVDDPARFGNSRSVGAHFGLTPRRFQSGEMDWSGGISRAGDASVRRALYQAANVLIHHSGGWCALKSWAVRLAKRRGLGKAKVALARKLAVVLHRIWLTGKDYRLTAAV

SEQ ID NO: 187221 - protein, 338 aa, unidentified
MGYFVGIDLHGDNNYIGILDEEDRRVFKRKNRNDIKEITRVLEPYQEEIEGIVVESTFNWYWIVDGLMDAGYTVHLANTAAMQQYEGLKYVDDTRDSFWLAHMLRLEILPEGYIYPKETRSVRDLLRKRMMLVQQRTAHILSMQTMVNRNKGIPISSDTIKTMSGEEVEGLFGDEHLVMSAQCDHEVVGVLSGQIDKIEKAVHKEVKLKKPYKKLLTVPGIGEILAMTIMLETGDIERFREVGKYSSYCRCVSAKKVSNGKNKGKGNRKNGNKYLAWAYVEAAHFHVRYCEEARKWYQRKASKSNAILATKALSNKLARACYYIIKEQVPYDKKRMFG

SEQ ID NO: 187222 - protein, 355 aa, unidentified
MNDEKYIGLDVHQATIVVAVLDSTGKLVMESILETEAATILQFFAGLRGTLSVTFEEGTWSAWLYDLLNPHVDKLVVCNPRKNALLKDGNKSDRIDARKLAELLRGNQLKPVYHGETGVRMLRELSRSYLTIVKDLSRVMNRLKAVYRSWAIPCAGRDVYYRRHRAQWLAKIREAGVRRRAERLYEQLDMLQHLRQQARRELLAESRKHAITAKLRQIPYLGPIRSALAVALIQTPHRFRSKRQLWAYSGLALETRISAEYRLIEGQVRRSKKLLSIRGLNKDHNHDLKGLFKGAATMASVRPGPFQDFYQAALAKGIKPTMARLTLARKIAAITLTLWKKGENFDAEKLKSQAA

SEQ ID NO: 187223 - protein, 319 aa, unidentified
MHCIGVDVSKQELVTFDGTAERTFPNTRGLTEFSRFLDRSEDALVVFEPTSTYSRRLEALCRTRQILCCQLNPRVVPHLRQVGRGRSKTDSTDAELLYRYGVARGDGEATQLNSDALAESIQARLACYRVAQKARVAYQGLVEALSQDPATPRELLDELKMEIEELNVKERHHLAAAEQLVEGDAQAAQRLEAQLSIPGIGPITALTLLGLFRKYATANRNQIVALAGLDPIRFQSGTSVHGKSRISKRGSREVRKRLFEATLSAARYNPSIRSIYRRLKEQGKPEKVARIAAARKLLLIAHAIYKTGDPYCDPSEKEG

SEQ ID NO: 187224 - protein, 402 aa, unidentified
MNAVGIDVSKGKSMVAIMRPFGEIVSAPFEIKHTASDIHSLVELINSVEGESRIVMEHTGRYYEVLAHQLSEANLFVSAINPKLIKDFDNDSLRKVKSDKADAVKIARYTLDKWQNLKQYNVMDELRNQLKTMNRQFGFYIKHKTAMKNNLIGILDQTYPGVNTYFDSPARSDGSQKWVDFASTYWHVDCVRKMSLNSFIDHYQNWCKRKKYNFSQSKAEEIYGKAKELVPVLSKDAITKLIIKQAVDQLNSASTTVESLRTLMNETASKLPEYPVVMAMKGVGTSLGPQLMAEIGNVSRFTHKSAITAFAGVDPGVNESGSYEQKSVPTSKRGSSDLRKTLFQVMDVLIKTHPQDDPVYQFLDKKRAQGKPYYVYMTAGANKFLRIYYGRVKEYLSSLPES

SEQ ID NO: 187225 - protein, 340 aa, unidentified
MTKHTMTVGLDLGDRYSHVFLLADEDEGEQSRVATTPVGMRRFFERIPPARVVLEVGTHSRWVSQQLKEMGHDVIVANPRRVRLITENARKSDQNDPELLARLGRADVKLLSPIEHRSSESHRVLSLVRARDGLVRARTKLINQCRGVAKSWGYRFSKCASSTFHRSAMPVELAPVLDPLMHAIATLTEQIKGCERTMKGLSEQIPEAALVRQVSGVGPVLSLAFVATLEEPKRFRRNRSVGAYLGLCPRRDQSGNADPQLPISKAGDPYLRRLLVSAANHILGPRGRDSDLRRWGLERATRGGKNAKKRAVVGVARKLAVLMLTLWKTEQTYQPLRKAA

SEQ ID NO: 187226 - protein, 360 aa, unidentified
MTTYYIGADVHSNSTELAVEKNKRIVARYNLPTSIPALSNVLDGLKGKIYLALEEGPMAGWLYRNLSSKVEQLIVCDPRRNKLIDSDGDKDDKIDAAKLACLLRGNYLRPIYHTDDVSRTELKHWVSLYQDRVRDAVRNINKIRARCRMHGVSIPRMVVRNPSARAEWLSKLNNPPLAGQLEMLWIGYDATSRQVRIARRRLSMLGAKHTIIKFWGELPGVGLVRATTLFAFLDTPWRFRKKNKLWKYCGVGLQRTTSGTDKKGRPKPARLQLPWAVNRILKCAALGAATSAINQKKNLFKDYYERMLADGILPSNARHAAARKLLTAMWAMWKTNSRFNEKLCRNPDNEKVTALPGLPL

SEQ ID NO: 187227 - protein, 457 aa, unidentified
MPQPKRSRSRTGLSAVHPAAAAIDIGATMHVAAVGPDRDTEPVRTFQTFTDDLHRLADWFARCGVKTVAMESTGVYWIPVFEILEQRGFEVMVVNARDAKHVPGRKTDVSDAEWLQRLHEYGLLRPSFRPQAEIAGLRAYLRQRERLLDYAAAHIQHMQKALMQMNLQLHHVVSDITGVTGMNIVRAIVAGERDPNVLASHRERGCHASVETICQALVGNYREEHVFALSQAIELYDVYQTKVAACDRQIEVILKRLKKSATPPASKLLPPKHRSRQPNAPSFDARAALHAILGVDLTQIHGLGPYLALKLVGECGTNLTAWPTAKHFTSWLGLAPHNKISGGKVLSSKTRRTSNRAASLLRLAAVSVGRTDTALGAFYRRLAARAGKAKAITATARKIAVLFYNTLRHGMSYADPGATYYEERYRQRVLGNLQRRAKSLGYVLHQAERDPVQMVVS

SEQ ID NO: 187228 - protein, 343 aa, unidentified
MKINVLAIDLAKSVFQVHGFSATGERVLAKRLGRRRFGQWLQVQDRCEVVMEACGSAHYWGRWLLELGYRVRLIPPQHVRAYVVGNKTDGNDADAIYEASQRRGLRWVPVKTVAQQDALLAHRVRERRQKARVAVLNQIRGLLAERGLVCGQGVSALRRLVDTVLEAGAAGQVTEYFVQQLAELRGEWRQLEAQIGQAERAIQAHVQASPACRRLMEVRGVGVLTASAAVATVGQARQFRSARQMAAWLGVTPRERSSGERRQLGGVTKRGDPYLRTLLIHGARATVKASRGKDDTHSRWIQALVQRRGFNKAVVAVANKNARILWAMLARGEHYRVPSPVAA

SEQ ID NO: 187229 - protein, 333 aa, unidentified
MTDLIHGILGIDISKAKFDVALMVAGKVKKTRVFENAPDGFKALSDWLLKQGISSVSACMEATGCYGDALATYLHDQGFAVSVVNPAQIKSFSGAQLNRAKTDKADAKLIAQFYQQMSPAPWTPPPMHVRELQALVQRLSALMQMERQELNRMDTAPAVIRPSIATVLATINAQIKTVEAMIRDHIDRNPDLKEQSKLLDSIPGIGKATIAKLLAFIGDVQRFDHAKALAAFVGLNPTVHQSGSSVRGKPHLSKKGNSVLRKALYMPAIVARRYNPVIKEFADRLKKAGKPNMVIIGAVMRKLLHIIYGVLKSGKPFDPSWSANHDLTVKTVS

SEQ ID NO: 187230 - protein, 445 aa, unidentified
MVEKELKSYTWRELETNGKFAKNDKLSFITDDMLIVGCDVGSETHYIRAIDVRGREVSRGAFEFSNTEEGFENARTWMLILAAENGKKQIVLGLEPTGHYWFALAAWMISNGISVVQVNPYAVKQSKEIEDNSQRKDDRKNPKLIANLVKDGNYGMPYLPEKIYADMRRLSMFRDQLTEDRIRNINRLHRELKIYFPEYMDAFGKIDGAFTLEVLKVSAIPTDIVALGTDGLRNIWHNAKLRGRGYSRAHEIVSCAEKSVGLTDGIDAGCEAMKWYAGQILKLDVQLAAIESTLHKKCREIPYAENILAINGVGENILSGILAEMGDISRFDDVKEIQKLSGMGLVACSSGKHKGQTKISHRGRKRLRYWLFQAAKSAVSHADEFKQLHEYYTTRADNPLKKMQLLIVIACKILRIVYTILKTGTTYDRQKMLKDIKRPVSSQAA

SEQ ID NO: 187231 - protein, 342 aa, unidentified
MTIAVLGIDLGKNSCSLVGLDAGGRVVLRRRIRRETVIAFGAKLTPCVVAMEACCGAHHMGRALAAQGHTVRLMSPEYVRPYVKAHKNDDRDAEAIAEAATRPTMRFVAIKSEAQLDMQTLHRVRDRLVGERTALMNQIRSILLERGHVVPQGRAKLAGFLTSLLEAEEGVILTPRMQALVADVRERWQLLDQRIAALDAEFAEQARTDEAARRLTTIPGIGALNATALVAAIGDVATFARGRDLAAWLGLVPRQVTTGGRPKLVGITKRGSKYLRKMLIQGARATMPTLRQSDTRLGQWLRGLLARAHANTAVVALAAKMARIVWALLRHERVYEATAVAA

SEQ ID NO: 187232 - protein, 412 aa, unidentified
MLFVGDDWAKDHHDVELVDETGRRLAKRRLPEGIDGIALLHALIAEHVPEDWIDPRTGEVAGRVLVGIETDRGPWVQALVAAGFRVYAINPVQAARYRERHSTSGAKSDPGDAHVLAEIVRLDRDHHRLVAGDTPDVEALKLVARAHQTLIWERTRHTLRLQAALLEFFPAALQAFEDLTAPEALELLGRAPDPARAGSLSRAKITAAVRRARRRDVEGNTERIYTLLHADGLRQPPAVERAYATIVASQIRLLTALVDDIKELQAVVGEGFGQHPDAELYLSQPGLGPVLGARVLAEFGDDPHRYADAKARKNYAGTSPITRASGKKTVVLARYALNDRLADAVHQWAFASLKGSPGAHAYYQTLRARNIGHHAALRQLGNRLVGILHGCLKTDTLYDEHTAWAHHQTTAA

SEQ ID NO: 187233 - protein, 328 aa, unidentified
MFFIGIDVSKAKLDCSLLLDVTGGKRKSKSVANSKSGVIDLLAWCTKQAVVATDLHAIMEGTGAYHERAALALFDSGVIVSIVNPAQVKDFGRSLGVRTKTDNIDSLILAKYGALINPKHWLPPTQEARELQALLARREAVAQDLQRERNRLEKTEATEVPPFIHQSILDTIAFLEQQLGKLQLNIDQHINNHPRLKEDRDLLTSLPAVGVQVGNEMLAVLHNHPFRSAEQFAAYLGLVPVERQSGSSIKGRPRLSKTGPAHIRAKLYMAAIVATRHNPHLKGLYQRLQANGKSKMSALGAVMRKLAHLCFGVLKTRTPYLPDYAIPC

SEQ ID NO: 187234 - protein, 382 aa, unidentified
MEEAIKQCVGIDISKATFTACVCQKFADGRIRLSSVESFDNGKKGFNQLVKWSRKLGIPQLELLFLMEATGCYFEPLAYHLHRLNLPVSVILPNKVKHYGKSLNVKTKTDVVDARVIAQLGAERQMPHWEPPQPIMRQLRGITRLRTDLVRERTAFQNRITSGESAESVERQVSRGLRAVVKELDRQIDRCYKEVEALAHREEWLWEKMKLLQTIKGVGLVTVASVVAEMQGFALVKSRKQLASYAGYDIVQRESGTSIKGKTKISKKGNSRIRAALHMPARSAARHNASLRGFYERVNVGKPSKKVGETAVARKLLLLMYTLWKKNEAYQEKTFGNQEAKELLRQGEESEKKVGSPNELPTQDGLSYNQSAEVLLRRPQVT

SEQ ID NO: 187235 - protein, 314 aa, unidentified
MAKSQVFVGIDVAQATLEVAVRPTCEAWQVANNELAFGDLVERLRQLKPSLIVLEATGGIHLPVVAALAAAKLPVVAVNPRQARDFAKATGKLAKTDRIDAQVLAHFAEAVRPEVRPLPDAATQELAFLVARRRQLMEMRVAEQNRSRGTPARIRTQIREHVEWLNRQLDELDRDIGQRVRSSPAWRERDELFRSTPGVGPVLSTTLLADLPELGTVSHKQIAALVGLAPLNQDSGKKQGKRVIWGGRASVRAALYMATLVATRRNPMIQSFYQRLLDMHKPKKLALTACMHKLLRILNAMARHQTPWSDPAGA

SEQ ID NO: 187236 - protein, 415 aa, unidentified
MSTMDWSIPLLFVGDDWAEDHHDVELQDEAGRVLARAKLPVGVTGIARLHAMIGEHLGDDDEADVVVGIETDRGPWVLALVAAGYTVYPINPLRVARFRERYHVSGAKSDTRDAHVLADMVRTERHQLRPIAGDSAESEAVKIVTRAHKTLIWERTRHLLRLRHALLEFFPAALVAFDDLTAPDALELLAAAPDPVSAAALSVDTIEAALKRARRHRRAAKAQAIASALRAEHLGQPAVVASAYAATVRAQAAILTVINAQVDAMEEQVDAHFSKHPDAKVYLSQPGLGVVLGARVLAEFGDDKNRYTDAKARRNYAGTSPITRQSGKKKVVLARYVHNDRLMDAIGRQAFSALTASPGASAYYRQLRARGAGHHAALRQLGNRLVGILHGCLKTGTLYDETKAWPTTQDQQVAA

SEQ ID NO: 187237 - protein, 351 aa, unidentified
MLIIGCDLHTRYQVIAMLNSETGELVTRRLQHENGEAGAFYASLPAPAQVGIEATGYTQWFERLMAELNYELWVGDAAQIRARAVRRQKTDSRDAEHLLELLSTQRFPRLWIPSPEQRDLRQLLKHRHKLVTMVTTLKNQLHFLAMSQGLCRKSKLWSERGREELESLSLGPWARRRRQELLALLDQLQPQIAELDVAVAQAAAADPAAVDLMTQKGVGPVTALAFVLTLGPVERFQNSRQVVSYLGLNPREHSSGGRQRLGGISKQGNPMMRWLLVEAAQTAVRFDPELRRKYQRLKFRRGGSVAKVALARRLAVRLYWRLRQRKAETQPVRMPGSSGSAVVLPRAGSRH

SEQ ID NO: 187238 - protein, 343 aa, unidentified
MKHYAGLDVSVKETAVCIVDEMGKICREIKIVSHPDDLLQILQNPAWDFGRIGLEAGPLSQWLFEGLSTVGLPVVCIEARHTRAFLKAQVNKTDRNDARGIAQMMRVNLFRPVHVKTLSSQKRRALLTARKLLQEKAIAIENDVRGLLRNFGLKVGVVGATRFEARIRELVESMPDLIDIIEPLLEARRELREHFAVLHRKLLALVRNDEVCRRLMTVPGVGPVVSLAFVATIDTPARFRTSKAVGAALGLTPVLHQSGESNRVGRISLCGDGMMRTLLFEAAQAMLTRITRWSWLKAWTMKVAQRRGGRKAVVALARRLATILHRIWLDGTEFRWTREVQAA

SEQ ID NO: 187239 - protein, 329 aa, unidentified
MFVGLDLHKNYLQAAVMDDQGRLLSQERIPNNDEYIEEFTRKTLKDSHAEIVIESSSTWYHVYQLLSKMKNCHVVLSNPVKTKAIASAKVKTDKVDALTLANLLRTGYIPESYIPPRHIMDLREMVRYRTSLVRMRVEAKNKIHAILLQNGTKINEKPFTIRFVEELRKLGDYRIDGYLSVISSLSRQIRSVSTTIKKEAREDESTRLLLTIPGIHYYSALLILSEIGDINRFPDSHHLCSYAGLTPSTHSSGGVTYHGSITRSGSRYLRWILTECAKAHIRSQRDSQLTRFYTEVARRRGGSKATVAAASKLLRIVYWVLKEKRPYHS

SEQ ID NO: 187240 - protein, 415 aa, unidentified
MKKHNNSPKKSEPTSKRAKSRGPVQRDPKEVLAELVGKLRQKLDPRVVAGSAGDEDSRGELRPNRDRLTVGVDLGDQWSHYCILGLEGERLAEGQLRTTPQDVAGFFQALNGARVVVEVGTHSAWVREVICGYGHEVLVANPRLMEGSKRRKRKNDRIDANKLARLGRVDPQALHPMQHRSPEVRQDLVMLRARDALVAARTELINTTRGLVKSMGARLPKCSSPSFAPKAEEAVPVAIREALLPLLRLTAALSDCIQGYDEKIEKLGREKYGHTALLRQVKGVGPITALAYVLTLENPERFVKSRDVGPYLGLVPKQEDSGESQPQLGISKAGDTMVRRLLVGSAQYILGPFGPDTDLRRYGLRLCERGGKNAKKRAAVAVARKLAVLLHRLWVSGEVYEPLRHALSVPIAAAA

SEQ ID NO: 187241 - protein, 339 aa, unidentified
MLIIGCDYHPSFQQIAWLNTETGECGNRRLEHNEEAEAFYRGLRGQAVVVGMEATGGTGWFRQLLSACGHGLQVADAARVRARATRRQKTDARDAELLLELLLDRKFVWLTMPTAEQRDRRQLLLHRHRLVQMRTRVKNQLQSLAMDQGVRQQKKLWSSQGRTQLEALSLPPWTTVRRGDLLQLLDDLDQRLVGLDREVRQQAYGSAEVRRLMTHPGVGPVVGLAFQLTILDPARFAGSRHLTSYLGLIPSEHSSGGKQRLGHISKQGNALLRGWLVEAAQVAVRRDPQWGRQFRRLAMRKNRSIAIVATARKLAVRLWWMWKRGLDYGQMVQSGSHVE

SEQ ID NO: 187242 - protein, 401 aa, unidentified
MTGTDTKAAMVIGGVDSHADTLHVAVVTDRGGQLADAEFPTTPAGYTAALAFVAAHGVVAAIGVEGTSSYGSGFTRAAHQTGLTVIEVNRPDKAERRRIGKSDPIDAYAAARAVVSGRATSAPKGDAVSGIRALHNAARSAIKARTAALNQIGHILISAPNAIRTKYEVLQGDKRIAALTRLRVGNDLALAPVLTSLRTLAMRVQSLTAEHDALTAELDVLVTRLNPGLRAAYGVGPDTATQLLITAGDNPARLRSEASFAALCGVAPVPASSGKTNRHRLSRGGDRAANAALHRIALVRMRRDQRTRDYVARQTDAGRTKKEILRLLKRAIAREVFHLLTTTVEVPEIADLRPARQAKNITLTAAANHFGVWPAVISNIERGLRRDDAFASSYREWLAAA

SEQ ID NO: 187243 - protein, 271 aa, unidentified
MKAIVVGVDIAKRVFQLHWVEPDTGEIVALQLKREKFLEHFANRSKCLIGMEACGGSQHWARSLQKLGHEVKLMSGRMVKPFVVGNKNDAADARGIWMAVQQPGLKAVAVKSEEQQAVLALHRMREQLVKFRTAQSNGLRGLLTEYGEVMPQGRAGIKRDIPGALGRLSDRLPAIVIDTLREQYARLSEIDGQISQIEGRLRQWQREDLATQRIAAIPGVGLLSATAAVATMGDAKAFKSGREFAAWLGLVPRLPSTALVDIGRPSLRHRS

SEQ ID NO: 187244 - protein, 364 aa, unidentified
MQQNRTSVGLDVHARSIVACGLDGQTGRLFERRLCPDHTEIISWVRSLPGPVAVTYEAGPTGFGLARFLTAEGIDCLVAAPSMLQRPAGDRVKTDVRDARHLARLLHLGEITAVAVPSVEQEAARDLVRAREDVRGDLMAARHRLSKLLLRHGIVYYGGRAWTGQHDQWLRAQRRNAVFAAPALGMAFDIAYDTVLAAVARRDRLDAAITAMAAASEHTPVVRRLCCLRGVATLTAFGLAVEIGDWHRLTGRGMGAYLGLVPSESSSGASRSQGSITKTGNGHARRLLIEAAWHHRTPLRPTVALRRRQDAAGPAARDRGQRANRRLHARWIAFDARRKQPAVANTAIARELAGWCWSLAVLKD

SEQ ID NO: 187245 - protein, 369 aa, unidentified
MADYREAFVAFDVAKIKHAVAVADSGRAGEVRFLGEIENRPVTIERTIRKLAKRYDRLHVCFEAGPTGYGLYRQVGDLGHDCMVVAPALIPKRSGERIKTNRRDAVTLARLHRAGELSAVWVPDIVHEAVRDLVRARQAGAEDLRRKRQQLLSFLLRHGRIYDAGGHWTLAHRRWLARQAFEHQAAQIVFQETSDAIEDAAQRLHRLDEQLAAIVETWSMKPVVEAYQAMRGASFLVAVIFAAEIGDVRRFETPSQLMAFLGLVPGERSTGDTVRRSGLTLAGNRRARRALVEAAWTYRYPARVSEPLRARLEGLPKAVRDIAWKAQVRLCARYRRLAAAGKKPPVIAAAIAREMAAFLWAIGREVAPS

SEQ ID NO: 187246 - protein, 391 aa, unidentified
MVCVGIDVAKDKHDCCILDSEGTILADCFTIPNNLDGFKKLLQTIQNCTQNSDKIKVGLEATGHYSYNILGFLLDNGLPTYVINPLHTNLYRKSLSLRKTKTDRVDARTIATMLLSDVDLKSYTDTAYHNEELKSLTRYRFEKVQERAKLKQSVSRLVTILFPELEQLVPTLHIASVYSVLSEYPGAKQVSEVHLTKLTNLLTTASKGHYGKVKAIQMRDVARTSIGSVMPAKSLELKHTIKLIRELTSEIDEIEVSIQKIMDELNPPILSIPGMGIHSAAMILAEIGDFSNFESPDKILAYAGCSPSTYQSGKLTNCYAHMEKRGSRYLRYALYNATKYVCHWNPVFAEYLAKKRAEGKHYNVALSHATKKLVRLIYALQKSGKAYLTAA

SEQ ID NO: 187247 - protein, 338 aa, unidentified
MALYCGIDLHSRDCWLAILDGKLKVVQEAKVGNDLEVILQILEPYREDLEGIAVESTFNWYWLVDGLMDNGYRLHLANTSAVKQYEGRKHTDDRHDARWLAEMLALQILPKGYIYPKNERPERDLLRRRSFLVKKRTSFLLAMRGAYECRSGLRTSSNEVKQWTSEEVKENWDDPTVALGMICLLEPMKALDDQIRIVEKEILRHAKLRSEFAPLLTVWGIGKILALTVMYEVGEISRFKKVGNFASYCRLVKTARLSAGKRKGSGNRKNGNPYLSWAFSEAAHYASRYHPEARKYVQRKTSKTNGIVAIRALAHKLARASYYVMKDHVEFDPEKVFG

SEQ ID NO: 187248 - protein, 330 aa, unidentified
MKPAVASEQARAAIVGIDVAKAKLDVALKLPSNKWRTKVVANSAAGCQELRTWLAKQAVPCAHVCMEATGIYWERVAEDLADHGFAVSVINPAQIKAFAAAVGVRTKTDVVDAKVIADFCASQAPALWQPASKSVRRLRALVGRRESLVELRTQELNRLEVATTEAVRQSIEKVLAHLNEQIADIERQIARDVDDDPTLRAQRELLASIPGVGDKTIATFLSHYGGELRFEKTRQAVAFAGLDTQKHESGSSVRGKPRLSKKGHSSIRRALYMPAVVAMTRTAWGKAFSSRLLAAGKPKMLILGALMRKIVAIAYGVLKSGTPFNPALHA

SEQ ID NO: 187249 - protein, 318 aa, unidentified
MSSVAPAFVGIDVAKGELVIAIRPSGEHWTIANDVAGIHTLVQRVRGHSPTLIVLEATGGYERAAVAALAAAQPPVVVANPRQVRDFARATGQLAKTDRIDANILALFAERVRPAPRALPDAAAQALDALLTRRRQVLEMLTAERNRLEHAVPAVRRGITQHIRWLERQLDDVDRDLDDTIQASPVWRAQENLLRSTPGVGPILSRTLIGEPPELGTLPRKQIAALVGVAPLARDSGTLKHKRLVWGGRAPVRAALFMGALVGTRCNPVLRAFYRRLVAAGKPKKVALTACMRKLLIILNAMMRTNTAWHHIDLSPTT

SEQ ID NO: 187250 - protein, 381 aa, unidentified
MLHKNHYKRFVGLDIHKKTASFAMVNREGEISARGTILMVNLVRWAEEKLSKEDQVIIEATGNSYHVYDQLSPIVDEVQVAHMLGMHDRTCSRKKTDKLDALKLARALASGYTHKVWVPSKEIRAKRELASHRHALATYVVSMRNQLRSLLYRHGLDYAGQDILDKKALDYVENASLPELSKQQWRSNYRIGQSFLTEIHQLDQELASEALKNDQCLKLMTMPGIKAQAALIITSAIGDVARFDSPKKLASYSGLVPSVIGSGEKVFYGGITKQGRSLLRWIMVEVANAATMTPGSIQDRYHRFRRKGKTHNVAIVAIARHLLEIIWQMLKDNKVFKHARPKYLVVKFRSLLHQAYGRCPQNAAPRLAKTVMGWNDYPSTA

SEQ ID NO: 187251 - protein, 346 aa, unidentified
MEYIALDVHKHYTWARVENDQGHKLYESKLAHSRGTIKNFTKQWNPGTPVAVETVGNWYWVVDEIEAGQGSPQLVNARLAKLMIGSVNKSDKLDAKGMNRLQRSGTLPTVWIPPSSVRDARELPRTRMVLSDQRTQLKNRIHATLGKYGLKVEGVSDAFGKRGRTIIDRLLEELPPNTRQALKLMLDELDHVEANLKTIEGQMREAFAPCQQTTYLQSEPGVGEMLAVVIWTEIGTIERFGRAEQLASYAGLVPRENSSGGKVRYGRVRRDVNLYLKWAFVEAANSAVLNCERCEYTHVSRLYDRVKAKRGHGKAIVAVARHLAEASFWMLKKGESYREPVSFTQG

SEQ ID NO: 187252 - protein, 340 aa, unidentified
MAVAGGFDLHRGQLTFDYVDTGTGESCRGRICPADRESLRGWLRRFDGVPDVEFAVEGCTGWRYVEELQRAGITPHLAEPAETAGLRGSKRRAKTDWADARHLRDLLLDGRIPESWIPPAHVLEARALVRLYKDLLEERTSWQQRVHATLFHQGIPVVPKLGTADGQQRLDAAELSAAGRQAVQAGLRQIDRLNQEMAPLRRELARLSSRQPGCRALRKAHYGIGALLSVAARAELGDYRRFSSSDDAVRHTGLDVTVDDSDGRRARGHIARQGPPVLRWALDEAARYASRPASPDYAYFCSVRDRIDGQRALLPVARKLARRCSHTLRDLDEDALLPAA

SEQ ID NO: 187253 - protein, 447 aa, unidentified
MGRIMDQAPVAAALDYDSTLIGALELSSKKWVLAIQSPGSRKHTKYVVEPDGPALARLIETLKARSAAAGKPIGRVAVTHEAGRDGFWLARFLLRRGVEVHVMQASSLPVDRRARRAKTDAIDAEMLLRTLLAWLRGEPRVCSMVPVPSEADEEARRAHREREDLTGERRSILNKIDGLLATLGICGFKGLRRDRRKQLDALRQPDGAAVPPAALARIERLLDRLDLVMAQIGTVEAAREAVVRKDAPADASERMIRDLSGMRGIGVESATLLVREAFCRSFANRRALGSYAGLTGTPFASGSMAREQGISKDGNRRLRTCLARLVLASLSARERSGAVVSRAGERGEGPRGQDHDRGDGAQAAHRAVAVRRGRRHSGGRDDESRIRSAISPIPVGGRRKPSIAQDSFTGAPFLRVAPPRGTPLPHAGSWFGTKVPPDTRLARRPSP

SEQ ID NO: 187254 - protein, 369 aa, unidentified
MSSVASRAGAIHLGMDTSKKTIMVATLMPGEQIPVTERIANEEAAVRRFIARLGDPSQLRACYEAGPGGYDLYWLLTSMGVACEVVAPSLIPKGGSDKVKTDRRDACRQARLHRAGELTPVRVPTRAEEAVRDLVRVRAGLLADRKRAQQRLTAVLMRHGCIWCHGSYWTGAHRAWIAAQRFTEPALTAAIAHYRAALDTREAELAAIEAELAPWAHREPLAGPAARLGCYRGIAELGALTLASEITDWRRFPAARAFMSYTGLVPAEYSSGERTRRGHITKAGSEPVRTTLIEAAWAYQHGPAIGATLRRRQAGAAPGTLARSWKAQRRLHARYRHLTSRGKAPGEAVTAVARELAGFAWAEMTADPA

SEQ ID NO: 187255 - protein, 416 aa, unidentified
MNKRSYRAQKVNEVQWEVVAQRVKDKVVVLAIDVAKVEQYGVLMDSERQAVVTVKWVHLAETLELLQQLSALPCRSLTAVMEPTGVYGDTLREQLRQAGVEVHQVSAKRVHDACEVYDGVPSLHDAKAAQVIARLYWEGASRVWIEASAPQREFDAMGRLYRLYQKQYQQQQNRLEAALQRHWPEVGHYLELDSVTLEALLLTYGSPASIVRQAEAAREQVRQVCRGRLSGDKIEAVLDRARHTIGLPCVEAEQDYLKALAAELRHNRRQRDEVAARLAQMTQTDPHLEPLRDTLGQVTTALLIAERLDPREYANSRSYCKALGLNLKERSSGQHKGELKLSKRGSGQARRDLYLATLRLIHRDATVREWYERKVQAQGGRCKQKIVVALMRKLARALWHLARGQAFDARKLCAAG

SEQ ID NO: 187256 - protein, 408 aa, unidentified
MNPLFVDIDVSSKNNVVCLMKPDGTKFSTFSVQNNLGGARILSERIVSALDKLRLSEVTIGMEATSIYGDSLVYALREDGSLGRYQRHIHVLNPKQVRKFKDAYPDLPKNDYVDAFVIADHLRFGRISSEVYMDDYRYRSLQTLTRARFDAVQNLTREKQRFANYLFLKCSGIAQDKDIPNTSATTLALMEHFETVDELANCDLETLTAFVSAAGRGRFADPEATAKAVQAAARGSYRLPKTVNDSINQAMSVSIASMRALEGQIKVLEKAIEQQFEIIPNTLTSIPGIGKVYSAGIIAEIGDIHRFESQASVAKYAGLVWTQHQSGDFEAQNTRMIKSGNRYLRYYLLEAANSVRRCDPEFKRYYDLKFHEVNKFQHKRALAFTARKLVRLLFRLLKDNRLYIPPEG

SEQ ID NO: 187257 - protein, 359 aa, unidentified
MNDGSSEQLGMTAGLDLDDKYSHLCLIETRSVGVMEEGRMRTTPEALKRRFASEQSLRIAIEARTHSSWVSRVLGECGYEVLVANARKLRLIYANKRKTDEIDAENLARLARLEPKLLYPLKHRGEESQAHLAIIRSRQALVGCRTQLVNHVRGAVKSFGDRLPKCPAVSFHKRAAEHIPEALMPALGSILEQIASLTERIRDYERQLETISEEHYPETDLLRQVEGVGTLTAPTFVLTLEDPYRFAKSRTLGAYLGLVPASDQSGDRDLQKRISKEGDEMLRKLLVGSAHYILGPFGSDSDLRRHREKTASRGGKNAKKRAVVAVARKLSVLLHRLWVTGEAYEPLYNKHRRAEEEAA

SEQ ID NO: 187258 - protein, 341 aa, unidentified
MQITTIGLDIAKNVFQVHGIDAAEKVVVRKQLRRGQVLKFFAALAPCLVGMEACASAHYWARELRKLGHEVRLMPAKDVKAYVKRSKNDAVDAEASCEGVRRPTMRFVQVKSAEQQGRLMQHRARDLLMRQQTQVINALRSHLAELGIVAAQGREGLKQLLAIIADESDERLPIDARASLIVLAAQLQALHTMIGSIERRLTVQHRANEASKRLQSIHGIGIIGASAIAATVTDPKSFQSGRDFAAWIGLVPRQNSTGGKPKLGPISKQGDRYLRRILVVGAHSVLRRAKQNPEKYPWLTQLLARRPFKVVAIALANKMARIAWALLASGGHYRPRLAAAA

SEQ ID NO: 187259 - protein, 356 aa, unidentified
MTNQQNIDFNATNLYIGIDVHKKNWEVAIRCNGIQLKRFNMEASVKHLAAFLNKTYPNANFIAVYEAGFCGFWICRQLCDLGIHCTVVNPADVPTSQKEKVNKNDCIDAGKLSRELEKNSLQEIYVPDPFHEQLRSLMRFRKQLAKERTRTKNRIKALLFYYGYTIPAEFADRNWSGHFIHWLKQLDFQYESGKQTLDRLIKMLEYIRLAIKDTLKALRNMAKDPLINPTIKALISVPGVAFITAMTFYTEIMDISRFSNFDKLASFVGLVPSRVGSGEIEYDRGITFRKNKILRPLLIEAAWVAAAVDPALTMKFNQLCKTMSRQKAIIRIAKKLLSRMRYVWMNQKEYVKAVIK

SEQ ID NO: 187260 - protein, 448 aa, unidentified
MIEGNEEEGYSPFLRLFIPTTNKEETTMNRVRAKRVRGVGEGTLIVAVDIGAANNTGYCTTLDGRSTKSFRFDNTKEGFEKFWWMAVASKNRFGCDEVLVGYESTGPYAEPLVHYLAKKQVKIVQVNPMHTKKMKEVNDNSPLKTDDKDPGVIADIIRLGRALTIVVPEGDAASLRRLNNARERHVGEQTALLNQLQQLVFLIFPEFKTVLKNMKSKTAQYILKRYTTAERIGTLSKEALGEEMRKQSMGKFGIKEAESLIGLARETVGIKEGLGGIFLDIRHILMQLEAEGRFLSEIEVKMRATLERIPCSVRLLSIKGLGIVSVAGLIGEVGDFSKFSTQSEIMKLAGLDLYEISSGRRKGQRRISKRGRSLLRKILFYAAIQMIRKNGIMYEYYARLTGRGMERMKALIAVSRKLLRIIHAIVRDNRDYVEQYHASERRVIKMAA

SEQ ID NO: 187261 - protein, 395 aa, unidentified
MVGMDAHSRKLSLCLMRREGDRIVKLKSVATTLDALEGTYMKQMPSGVLTVLEASTNSFIIASRLKAIGFGTKVLCSDVLSGLSRQDRVNDRIDAENLARAYLRYGPELRAVFTPTERGMEMREMYFAYRDAKKDMTRMSNRIWSFCSRHGLDVDKRMSRSRGEGLLRDVRAMGWTAPLAERAGSLVAEWEHARGRCGMLEKAIERAVFEDERMRRLQQVPGVRSIGAFALVAFVEDVRRFDNPKKLVSYIGLNPSVSASGEKESRRKVSDFGRSDLKSLFVEAAQSAMRTDCAMTKWARHLLAEGKEWNKVMVALARKLVVLCWHILMGHPTPNREREAATARKFVRLARQVGKELVRASGHSSADEFAEAECSKIYGHLPEEQAGKVAVCVSA

SEQ ID NO: 187262 - protein, 388 aa, unidentified
MIQHESGESNGGRTVVGIDPCREFLQLAILAPNQETKFLKLPLAPSITAEIVKSTNPHTTQIAIESYGSYGKLFIYDLLKKGYDIREVNPHISKRLSGLYSEEHSDLKDAESLAKALLLIPNLPKVAITDKQQWLAKLTRTRRKLVKDLNGYLNRLHIALTESYGAVYKKLFKILSMKKALKFFEDYPTINDSVSDERLKERLGEEKWELLRQAGKWEDNTYLETLRTEIRGYIGIIRSITSTKVAIETKIRDAADVVEEMKLLGTFPGIGGVAGATLLSAIGDIERFGTESHLSAYCGVRPVIWQSGTGQIRTKRRRRYSRRLKGILYFISLSQIRINPESRAYYDRKRNEGKTHWQAMNALSRQLIKIIYYILKDKVPYQRTPLVN

SEQ ID NO: 187263 - protein, 356 aa, unidentified
MPTQVTKKIDFTGKQLFIGLDVHKKSWSVTILVDGTEHRTFTQPPEPESLNSYLQRMFPGGEYNSAYEAGFCGYGIHRRLNELGINNIVINAADIPTSQKDKLQKRDPVDSRKIARSLEKGSLRGIHIFDRELEEMRSLNRTRFYLMRDLRRSKTRIKSFLQYYGEPIPVEFDNNQWTLRFVSWLKQVKMQTMSGQDAFSNLISSYEYHRSQLLTLSRQIRERIREYDRELYTLLKSVSGIGPLTASALITELGDINRFTNIDQLGSYVGLIPRIRESGETTHTGGITFRCNSFLRTLLIESSWQAIRMDPAMMQYYHAHLINNKGHKVVIKVARKLLNRIRYVMKNRKPYLTGVA

SEQ ID NO: 187264 - protein, 500 aa, unidentified
MRIIGLDIHRAFAEAVAWEDGKLRRLRRVDMRRDRLDAVAATLSKGDVVVVEATGNAAAVAAVIAPHVTRVVIANPKQVRIIAHAKIKTDTIDAGVLAQLYASGFLPEVWIADEATQALRRQVTRRNQIVRQRSRLKNIIQSILHAHLIPSCPHQDLCGPRGRAWLSEQVVPEDERLAVERHLREFDRLGEDLKVIERDLARSALADESITRLMTIPGIDMVVALALKAAIGDIQRFERSQKLVSYLGLNPSVRQSGPGPAYHGRITKQGRGHARGMLVEAAWAAARAPGPLRAFFLRVRARRGQHVAAVATARKLAVLIWHVLRKGESYLWARPALHAKKVRDLELKAGHAPSRGHSGVRLIRRTNQPLPCPTSGSDFTHDAAEGSRPRLQPAQPSRAGTALGRAGRDGLCALRGGLEPTRAEGAHGRRKGGATIGAARQGLRLRPCSSPRGHPCATEGYRRAAQKALVNHISALRALQGGCPRLQPDLTREAAGFAET

SEQ ID NO: 187265 - protein, 421 aa, unidentified
MSNVTEFGKKANNQVHELMENVSWVVGIDIGKEKLSCALMDIKKALICRFDVEGSLAGYNELLNRVKKETKGSGKIIFALEPTGHYWMVLGQFFEDHNQSYVLIHPLVVARSREVHRLNKGKTDSLDARLIGELACDRSITRTQIPEDYWATIRFFAREYMDREKEIAREKNRIVSYLETTLPGFVEIFPKPLCMSGRACLRFLANFREASKGDMEHFEMQIRKHFPGKRLMTSRVRRLYDMLQRGDVLGLRAGRQAMFFRIIHSLNRLEMYEGQEEAAKQAMLDMYKKSEYKEYLDSIWGTAPSVNALILGFMGDPALYDSPASLVKLAGCDPVPNESGKFKGRASISHRGRSLLRKAGDRVSFLLEKRNSVFRAFFNHLMSRQKNKFTKRQARVACINKYFRIVWVLCHYRVPFNPALA

SEQ ID NO: 187266 - protein, 413 aa, unidentified
MDVLHPRCCGLDVHKSSISACILLREAGRVQKHQRRFGAMSQELQELAEWLRQFGVSQVAMESSGVYWKPVWNILEGQFTIVLANAQHIKNVPGRKTDQKDAEWIAQLLQYGLLRASYIPCEIIRDLRDLTRMRTSLSQEASRISSRIQKVLEDANIKLASVATNVLGKSGRAMLEDIISGEDNPEHLASLALGHLRVKIPQLRLALEGKIRSHHRFLLGRLMDQIQFVEHEIALLDERLEDIGRQRPDLAQAVARWDTTPGIDRVAAWALLAEIGDNMAQFPTAEHLASWAALCPGNHESAGKRLRGTTRQGSPWLRRMACQCAWAAARTKNTYLSSQFRRLAARRGKKRAIIAVAHTIIVIGYHLQKNQSNYEDLGGNYFDRIHSDGLKRYLVKRLQQLGHKVTLEPMEAA

SEQ ID NO: 187267 - protein, 392 aa, unidentified
MGKHSEVFVAFDVAKKKHAVAIAEGGRTGEVRFLGDVENSSLPIERTIKRLADRYDRLHVCFEAGPTGYGLYRQVKALGHDCMVVAPALIPKRAGERIKTNRRDAVTLARLHRAGELTGVWAPDAAHEAVRDLVRAREAAADDLRRKRQQLLSFLLRHSRIYSGGGHWTLAHRRWLAGQRFEHAAQQIVFQDGIDAIEDALQRLRRLEKQLAVIVPEWSMAPVVEAYQAMRGASFLVAVTFAAEIGDVRRFDTPRQLMSFLGLVPAESSTGDTIRRKGLTLAGNRRARRALVEAAWTYRYPARVSDTLRTRLDGLPKSVRDIAWKRRSVYAPVTAVSAPRARSCPSSWLRSPARWLRSYGPSDGRSRQRKRGLFLTAAQSRERSTQVGNSRR

SEQ ID NO: 187268 - protein, 326 aa, unidentified
MFFIGIDVSKAKLDCSLLLDVASSKRRAKSVTNSKTGIADLLAWCTKQQVIIHELHAIMEGTGVYHEQAALVLSDAGVTVSIVNPAQVKDFGRSLGVRTKTDGVDSLVLARYGALLNPRVWTPPSQEARTLQALLARREAIAKDLQREHNRLEKADATDTPVLIRQSLVESIAFLEKQLTKLQQEIDDHINKHPDLKADRDLLTSIPAVGPQVGNHLLAVMHNHDFQSAEQLAAYLGLVPIERQSGTSVLGRPRLSKAGPARIRAVLYMAAIVGTQHNPHIKAQYQRLQERGKTKMSALGAAMRKLVHLCFGVLKTRQPYQPNYAI

SEQ ID NO: 187269 - protein, 367 aa, unidentified
MAKFLIVGADVHEEYVMTKWCVDQGEASKSSFRMTESGQSKMIAMLHNTARTAGVKEIVFAYEACCMGFGLYDRLTDASITCHVLAPTRIEKSNKQRRSKCDEKDAQQILEILKGHLLAGNSLPDVWIPDHQTRQDRTVVRRRLELTKKSTRVKAQIRMTLKKADVKRPKDLSKGWTKAFRQWLRDICDLEEGVLQYGEILALESYLRELRFLEDEIQLQDHNVEVLSRDERYLEACQALCEMKGVSTLTAMVFLTEVGDMSRFSNRRQIAAYFGLSPSSYETGENSDRKGHITKQGSERVRKVLCQAAWCRSSDDAAYARVLARNQKKKKVALVALMRRTAIKMWHIARDAQQQNGSFAELSRAET

SEQ ID NO: 187270 - protein, 402 aa, unidentified
MNAVGIDVSKGKSMVAIMRPFGEIVSAPFEIKHTASGINSLVELINSVEGESRIVMEHTGRYYEVLAHQLSEANLFVSAINPKLIKDFDNDSLRKVKSDKADAVKIARYTLDKWQNLKQYNVMDELRNQLKTMNRQFGFYIKHKTAMKNNLIGILDQTYPGVNTYFDSPARSDGSQKWVDFASTYWHVDCVRKMSLNSFIDHYQNWCKRKKYNFSQSKAEEIYGKAKELVPVLPKDDITKLIIKQAVDQLNSASITVESLRTLMNETASKLPEYPVVMAMKGVGTSLGPQLMAEIGDVSRFTHKGAITAFAGVDPGVNESGSYEQKSVPTSKRGSSDLRKTLFQVMDVLIKTHPQDDPVYQFLDKKRAQKKPYYVYMTAGANKFLRIYYGRVKEYLASLPES

SEQ ID NO: 187271 - protein, 333 aa, unidentified
MVEGTLGSHHKEGSKKMSKHSMICAGIDTGKRKLDVAIRGRADELQVDNMPDGHGTLSAWLRRHRVKRVGIEASGGYEQAVVAQLRRDKFEVVVFQPAQVRAYAGFHLQRAKNDKIDAALIADCTAAISQTHAPPDPRLAPFAKHLTLIEQITEDVARLKNRRESCRDKRIQRLWSEEIARLNRILRSERRQLVAAIRRHPDLAERLELMASVDGVGLPTAVAILVRMPEIGHITREQVAALAGLAPYDDDSGDHVGVRCIAGGRERLRKSIYNATLAACFRWNAQLIAIYQRLIAAGKTHKVARIACARKLLIYVNTVVERGTPWVQNPAAA

SEQ ID NO: 187272 - protein, 338 aa, unidentified
MVYGAIDLHMRHSQIRIVDEPGAVLRDQRVPTSRERLVQAFDGLGPMRIVVEAGTESEWVAQALEGAGHTVIVVDPNYAPMYGDLQRRVKTDRRDGAALAEANRRGWYRAAHRTSAVQRETRQVLRVRRQIVRMRSGAVALVRALVKQDGDRLPRCSAERVPARLARLELPAARRAILAPLVEMIDTATEQIATLDRYLEARAAADPVVQHLRTVPGVGLVVALTFRAPIDDVERFHHAGQVSAAMGLVPREDSSAERRQRGHITKTGSSELRRLLVQAAWVCWRSKHSATLRAWAEQLAARRGRRIAVVALARRLSRVLYAIWRDGTTFEVKTLAAA

SEQ ID NO: 187273 - protein, 321 aa, unidentified
MTIIGFDVAKDAIVGVRIDRSAQIKEQFVIGNTEPEIQVLIERFVATKRRLVAACEATAEFHVTLAKVCLKRGIPFRLLNPILTKQFTRATVRKKKTDLTDAHIIAKLALQGEGTLVNDNHFLPVKAIARTGHRLIRIQQTVHLMSERYRQHLPDETELREQLDQCLKLLKASAEFFRQRARESVDPAVLRLLQSIPGIGPTIATGLVTEIGEISRFRSGKALVAYVGLDPKVKQSGISLNHNTRITKRGSAHLRKYLFVAAAIAERFDAELTAYYAKKRLEGKRYKEATIAVARKLTYRIYAVWKRGEKYEARPSLPAGA

SEQ ID NO: 187274 - protein, 350 aa, unidentified
MIIIGCDYHPGFQQIAWLDTDSGELQERRLGHREEAEQFYHELKSRGMKVRVGMEASGHARWFERLLNELQFELWIGDAAAVRTKRVRKQKTDRQDAQLLLRLLLEDRFPRIWVPDPENRDLRQLLWHRHRLVQMRTRVMNQLHVVALNEGLRRKKALWRPAGRAELQALSLAPWASRRRQDLLDLLDRLTPKIHELTGKLEQIVERRPVTRQLSTHPGVGPLTALAFELVIGTPERFACAKQIASYVGLVPSEESSGDRRRLGHISKQGNVLLRFLLVEAAQVTVRSDPQWRSQFFHLAMRRGRKIAKVAMARKLAVELYWMWRRGWDYEQMQQLGSHAGEPGNRHGVQ

SEQ ID NO: 187275 - protein, 340 aa, unidentified
MLYVGLDIHKRQITGCVLDENGKVKERWQVADVEQLLKRLVPLPAFEVCYEASTGYGRFHELLKTVAARVAVAHPGLLRLIYRSKKKNDRADALKLAKLLYIDEVPEVHVPPADVRAWRELITFRKRLIEKRTRAKNGLRCLLRSLGIEPPQDFGLWTRQGIAWLAGLEFSQPLHAVKRDMLIDELDTHARHIQAVEQELRKFSQGNPAVILLRTIPGVGLRTAEAVVAFIDDPHRFPNSKRVGSYFGLVPSQDQSDGANRLGHITREGAPVVRAMLTEAVWQAVRRSPTVRAFQERVQRGDKERRKISVIATAHYLVRVMWAMLKHGTVWKEQVQVAAA

SEQ ID NO: 187276 - protein, 456 aa, unidentified
MAEHASKKRDRKIRQLNPNAAGIDIGSQKHYVAVPADRDNEPVRSFGCLTPDLHQMAKWLKSCRIETIAMESTGVYWVPVVAVLESYGFDVKLVDAYKVKNVPGRKTDVKDCQWLAELHRFGLLSGAFRPDKQIQVLRSYWRHRSTLIEACSTQIHLMQKALEQMNIQLHKVITDITGVTGMKIIRSIIAGERNAVRLAGMKHPLVKSSTETIAKALTGEYRQEHLFTLKQALEIYDVYQNKIAECDRRIEEYMKTFEHKAEANDLDSKPGKNNRTKRRKNQPNFDLRTRLFEMTGVDLTQIDGIETMTAQTVISECGFDMSVFPTEKHFTSWLGLCPNNQITGGKVRKRSTRKVQNRAARALRLAAQSLHSSKSALGAFYRRMRARLGAPKAITATAHKLAKLVYRMLKHGMDYVDSGQKYYENQYRERVIKNLTKRVREMGYAVVCTNTGLLVS

SEQ ID NO: 187277 - protein, 382 aa, unidentified
MKSNPIKSQNQRVERICTTTLVIGIDIAKEKHAAQAINFRGVVLTKRPILFSNDIAGYEHLEQSIRKLQKIHGMNDVVVGMKSTGHYWFNIANWLVDQGIDVALVNPMTTKRNKENRDNSPSKNDPKDALVIADAVSRGFYTPFSPKDEAFRRIRVMVTNREHWVVKSGRIKNRIHRWLDIRFPEYRQAFDDIFSDRSLATLRRFPAPSDLLQLTPEQMVQIWGEYMARPGGVRGKNKAMELHSLARHSVGDTTALEEDKWELMHLIEEYERICRIIDEADEMIEKILPEIPFSDLVRSVGASVPATAAILAFGGDLRKLSHGNQLLRKAGLNLAERSSGKYKGQIKLTKRGNSLLRKHLYFTVFHLLSFNGAFQAMHAHNT

SEQ ID NO: 187278 - protein, 326 aa, unidentified
MQGKEPSQQSATTRVYIGIDVCKARLDVYIHPVGERLTLANDTAGLKQLKKAIARCDVALVVMEATGKFHRLAHRNLHASGFRVAIVNPLRSRRFAEAVGTFAKTDRVDARMLALMGESLKPGALEPRPELMETLQELARGRETAVDLRTAILNQIAVSNSKVLVRELKRQLSVVETTIDNLEAELERQIEADPILARRFEILTSIPGIGLVGAVTLIVELNEIGQLSSKQAAMIVGLAPIACDSGEKTGRREIRGGRKHLRTALYMPANSARQHNPDLKIFYDRLIEAGKLAKVAITAVMRKLVILANTLVREDRLWQPKCVIAK

SEQ ID NO: 187279 - protein, 361 aa, unidentified
MIYRTSVGLDVHARSIAAAAFVPETGEVVTRSFGYDPSAVAEWVLSLPQPSRCVYESGPTGFDLQRRLEKAGVGCVVGAVSKMLRPSGDRVKTDRRDAIFLARMLAVGNVVEVAVPTEAMEAARDLARAREDCRHDLTRARHLLSKFLLRKGIVYDGGGAWTKAHARWLSGLEFADPTEQLVFDEYLEGVRSLELRRDRLDRAIAERASEPDLAPTVAAIRCLRGASTVTAFSVAAEVGDFSRFPTARSFMSYVGLVPSESSSGETVSRGGITRAGNAHVRTLLVEAAWQHARPLRALSPTAASAYAAVPAGVSEAAARANRRLHDGCAHLRGRGKPACVVNTAIARELAGFVWALARMAA

SEQ ID NO: 187280 - protein, 377 aa, unidentified
MKRIKFVGLDVHAETIAVAVAEQDGEIRSLGMIPNREESVRKLVKKLGPVEQLRFCYEAGPTGYVLYWQLTKMGAACTVVAPTLVPVKAGDRVKTDRRDALKLARNYRAGELTAVWVPDAEHEALRDLVRAREAAKKDQLRARHRLSKFLLRQGQRPPVGVQPWTVKYSEWVKRDVHFAVKAQEATLLDYLHEVEHMAARIVRLDSAIEEAVKVAPAKMRAVIEGLQALRGIAQLSAVTIVAELGEVTRFSKARELMGYGGIVVSENSSGERQRRGSITKTGNAHLRRVVVEAAWAYRHRPAIGFTLRKRQEGLSEEVKEMAWKAQHRLHARYGKLMAKGKNKGVVVTAVGRELLGFIWAIGVQVEAQQKESLRQAA

SEQ ID NO: 187281 - protein, 374 aa, unidentified
MSAGKKFIGLDVHQDTIAIAVADESTEKEVRFFGTIPNTSEALHAALKKIGQDGSELRVCYESGPCGFVIYRFLARIGVDCMVISPSSMPRRPNDRVKTDRRDAQTLARLLRAGELVAVWVPDEAHEAVRDVVRAHRQAKQDLAGAKATLKSFLLRHDRRFPGKAIWGGRYWRWLSEQVFPFPHQQYVFEEYKRRIHELEDRCERLEQVLAEALEEWPLAPIVMALQALRGIKLIAAVTLVAEIGDLHRFDSPKQLMAWIGLVPAEYSSGKRIKRGEITRAGNAAARSMLIESAWHYRFPAREGRALRERNGTIPDNIRTIAWKAQVRLCGKYRRLVNAGKQTVKVVTAVARELVGFIWDIARNTPVAAVEPQR

SEQ ID NO: 187282 - protein, 438 aa, unidentified
MRRVIGIDVHRTFGEVVFWEDGRLRHAGRIDMTRTALEGFGKTLLASDEVVVEATANSMAVSRVLAPFVARVIIANPLQVKAIAQAHVKTDKIDAGTLASLQAAGYLPQIWTPDAETERKRRLVARRYQVVRHRTRLKNEVHSILHTHLIPKCPHADLFNVRGRAWLAAQSLLDDERAAIDRHVRELDRLAEDLALLDREIAQDAIDDPAVNRLMTITGVNLAVAAGIVAAIGDISRFNSPQKLVSYFGLNPRVRQSGLGPAHHGRISKIGRSHARAMLVEAAWTAAKTPGPLHAFFVRIRARRGHQIAAVAVARKLTVLCWHLLTKGEDYQWARPALVANKTRAMQLQAGHPQQKGSRRGPAYAYNIKALRDREMLIAAQAERSYERFVSQWKPRRPKNRRAGASARQDQIGSPVTLAADASRFATRSPARDDHNRR

SEQ ID NO: 187283 - protein, 360 aa, unidentified
MSFNGTSVGLDVHALSVVAHAVDEETGRVERARLCPDHGEILAWLDRLRGPVRVAYEAGPTGFGLARALAAAEIDCVVAAPSKLIRPAGDRVKTDARDAAHLTRLLRLGEITAVTVPEADVEAVRDLVRAREDARADLMRVRHRLSKLLLRHGRVYCGGQAWNGVHETWLRRQRFDDSHTMAAFDHHFDAVLTATAARARLDQQIVTVAASPRWADPVNRLGCLRGISALTGLALSVEIGDWTRFTGASIGAYVGLVPTEYSSGASRVQGSITKAGNAHVRRLLIEAAWHHRAAYRNPGPTMRARWAKVDPALKDRGHAGNRRLHQQWCRFNERKKHHVVANVAIARELAGWCWSLATLN

SEQ ID NO: 187284 - protein, 373 aa, unidentified
MKEFSKYVGLDVHKETIAVSIAEAGGGEVRYFGEIANTSEAVAKLARQLKKGDARLSFCYEAGACGYGVYRQLRELKHECLVVAPSLIPRKAGDRVKTDRRDSLSLARLHRAHELTAVWVPDGAQEALRDLTRAREDMKHLQRQSRQRLLGFLLRHGQRYSGKSHWTQAHARWLETVKLEQPVQQIVFQEYVDTVRALTQRVGAFDQHIERASNESVFWPVIQALMALRGVSLLSATTVVAEIGDLRRFAGAPQLMAYLGVVPSEHSSGGKQSRGGITKTGNGHVRRVLVEAAWTYRHPARKTAVLQRRAERAPEAIQDIAWKAQTRLCGRYRRLEGKGKLKVQVCTAIARELAGFIWAIGQAVPPVTAQASI

SEQ ID NO: 187285 - protein, 344 aa, unidentified
MEYYAGIDVSLEASSVCVVDASGKIVREAKVASDPQALTLFFGEVGCELTRIGIEACPLSQWLHAGLSAAGFAVVLLEVRHVKAAISAMAVKTDRNDARGIAQLLRMGWYRPVHCKSQSSQDVRALLTARKQLLVKAIDVELCLRGLLRGYGLKMGQTTDVRFSARVRELAAGHPVLEQLSEAILRARDVLRKEIAALHRQLLAIARSDNVCRHLMTVPGVGALTALTFKTAVDDPTRFTSSKRLGAHFGLTPRKYQSGTVDITGSITKAGDAMVRSALYEAAHSMLTRAKSFSSLKRWAMSVAKRRGLRRATVALARKLAIVLHRMWMNGTDFRFGKEEAVAA

SEQ ID NO: 187286 - protein, 426 aa, unidentified
MRVMFERVAGIDVCKDMIKVGIRGPGHRAWTRTSEVLEYRTFYGVLQAMARDLRRRGVTHVVMEASGVYTEPVYYALTEQDFEQVAVVNPAHAKALRGHKTDAKDCLRLAELFECGLLRGSYIPCQELKDLRDLTRYRVKTVQARTSEIARLAKALESAGIKLGSVVSELTGKSATAMIEGLIDGERRGQVLADLAIGRMRTAGKLADLSQALAGRFTDHHAMLCRLHRDRVMLLSAAVSDLEARIAVRAAPYRRELDLLKSIPGFGDAVAQAWLAEIGPAPHEYFASHDKLASWTTLCPGNHMSAGKRKHGRTGDAGTYIKPMLVQAAWAAVKAPGRLQARYHKLVRRLGGPRNPAAVKKAILAIAHTLLKIAYQVLKSGKPYQDLGADFYARRESPEQRRAYLLRQLEKLSPGCTITITPAEAA

SEQ ID NO: 187287 - protein, 340 aa, unidentified
MRYVGLDVHKEFCKASVLDDNGIEFVNERFDSTLEALNRFLDRFEEAKFVLESTGIWEFIYEGIEARGFEVQLAHPLKVRAIAEASVKTDKVDARTLAKLLRLDMVPRSYVPSRGIRDLRQLVRQRAFLVQRCTSFKNRVHAELARNGIRRPDDMAKAFSKKHREWMRSLGIWTLSNDLDCLEAIESRIADINVELFAEYQRRPEAQLIATIPGIGYYGALLIWAEIADVSRFQDAEHLCSYAGLTPTVSQSASTVHYGGVSKEGSKHLRWILIESVHVHRRYAPETSLSMFASRIERKKGKQKATTAAARKLLHIIYWMLTRGEEYHGHGSNLVPKPAA

SEQ ID NO: 187288 - protein, 424 aa, unidentified
MKNTQNEKILQIKNDTLVVGVDIAKRFHFARAFDYRGIELGKLLRFENSAQGFEAFDAWLEKIKQENRMTEAIVGFEPTGHYWFNLGDHLITYGHKLAIVNPFHVKCARELDDNSPSKSDRKDPKTIAMLVKDGRYRDVYIPEGFYQELRELVCERERLQSQLSSLKNQIVRWLDIYFPEFTTIFKDWSKQASWLALRHFSTPQRVVDAGAQEILQTWREEMKRPSLKRAEKLYQVAKDSVGRKEGTMAATSSLQFMLTQYELITMRLEQLRGEMEACLHQIPNASHLLEIKGMGVVAAAIIVSEIGDISRFTDPRQLIKYAGLNLRENSSGMHKGKTTISKRGRKRLRHGLFQAMIPILATNLEFRALHKRNITRLENPLSKMESLTALCGKLLRVTFALLTKDLPYDPEKLAINKSHLAQAA

SEQ ID NO: 187289 - protein, 420 aa, unidentified
MQQLVSREVSAKTLIVAVDCGKVANRALLASGERGVIGKPVSLSTLREGIAELERLIASAGGEGPPVIALEATGSLHRAWATELERRFHGSLRMFAPSETQAARTQLGSRRFKTDERDCAALISLARQGLGRAPQDQSVEALLSAVRHRRALVTMRKGLQQRLHDQLNALAPGLSAPSGHGRALKLEDPSGQAVLACAVAFQGRAPSDRSLIARAPGRFTRANAAFWAERWRGCLPAPVDAAQRAERLGWDLERWRALQRDILRTEAQLVQLLAATPGQVLTTLPGVATVRAAGFAAHSLPIERFASAEHLYSATGLAPASYESGSLRKRGAISRQGLSEHRDALMGIAWGLSQHCASFRHRERQLRARGKRPIEARVALARCACRLCFALLRTQQPFDEERYAQARHGAGGDGANGYAA

SEQ ID NO: 187290 - protein, 337 aa, unidentified
MIIIGCDFHPSFQQIAMLDTETGATKEHKLMHTSGEAESFYRKLASPAVVGIETVGNDQWFVQLLQKLGHEVRVGDAAQIRASYVRKQKTDRRDAKHILQLLVEGRFPRIWIPDAGMRDHRQLLMHRHKLVQIRTRVKNELQHLMLNQGMQKKQKLWSTEGRAALASLPLEPWTDRRRKDLLNLLAMLDAQLESLDDAVTRLAKEYPGVPLLMSQPGVGAVTALAFVLTLGDVHRFPRGKQLASYLGLVPREHSSGGKQRMGGISKQGNRLLRFLLVEAANIAVRFDPELRKEYLHRCHQKHFTVAKVATARKLAVRMYWMLRTQTPYPQVLSSRVA

SEQ ID NO: 187291 - protein, 318 aa, unidentified
MENISQWVGIDISKATLDVYLRPLGKAMKVANTKEDISKLVETLKSYTLNLIVLEATGGLETELVIQLQAADLPVALINPRQGRDFAKATGKLAKTDAIDAQILAHFGEAMQPQILAVESEESRQLGDLISRRRQLVEMRTAEKNRRERARGKALVDIEAHLEYLDNCLEKLNQEIEELTQANQQWLEKVNLLKTVPGIGQVISTTLVSDLPELGQLTAKQISRLVGVAPINHDSGQHKGKRMIQGGRAQIRATLYMGAVVAMRHNPVIKTFYERLVGRGKSKKLALTACVRKILVILNAMVRQNQPWQLADNLPPCS

SEQ ID NO: 187292 - protein, 360 aa, unidentified
MQPNDTVNPTILLAIELSASTWLIAARVPGAEKPHLHRIDGGDTAALLALISLLRARVARRLDAPEIGVVCCFEAGRDGFWLHRLLTAHGVASHILEPTSILVNRRARRAKTDRLDAEGMLRVLAAYLRGDHQACSMVRVPTLDEEDAKRTHRERENLVHERLRIENRIEALLFTQGIRKRPSLRSWERDLDVLRTGDGREIPRHLRAELDRLRRRLVITLELIREVEAERDQAAETKPQDQACRKIAALCRIRGIGANFAAVLTREVFYRSFDNRRQIASYVGITPMPYQSGGMDRDRRISRAGNPRARTTMIQLAWLWLRYQPGSELAEWFRERVGTLAGRTRRIAIVAMARKLLIAL

SEQ ID NO: 187293 - protein, 368 aa, unidentified
MLRFRLMVKRGLAFCGLKHQKEKRSMDYFAGLDVSVKDTSVCIVDETGKIVREVKVSSEPDALLTVLRNPAYHFKRIGLEAGPLSQWLFSALAEADLPVICVEARHMRAVLKAQINKTDRNDARGIAQMIRVGLYRPVHVKTLRSQKLRMLLTHRKLLQSKAIAVDNDLRGTLRNFGLKVGVVGAARFEARIRELVEGFPDLAVLIEPLLVVRRVLREQLDILHRRLLAIVRDDEVCRRLMTVPGVGPVVALTYRATVDVPARFRKSKSVGAVFGLTCSRHQSGERDRPGAISRCGDEMMRTALYEAAQVMLMHSVKWSWLKAWAMKIARHRGRKKAIVALARRLAVIMHRIWVDGTEFCWTREAAAA

SEQ ID NO: 187294 - protein, 353 aa, unidentified
MAISCDYDKEVDMVTTIGIDPHKATHTAVAIDETETVLGELTVPADRDQTKTLLDWAQNLDGDGRVWAVEAAGGLGYLLSQQLIADGEQVVDVPPVLASRVRLLGSGRSEKNDPNDARSVAIAALRQPGLAVVRPEDHTQALRMLAKRHLELTALRTQAACRLHAVILQLRPGGIARRLSAKQASRMLQGMRNLDVIGEQRRMMARAHLADIRRYDREIKANKVLISKAVVASRTTLTDVYGVGPVVAALLIGYTNNIGRFATADHYAAYNGTAPVEYSSGGKKRHRLSMRGNRVLNHAIHMAAVTQISHDTPGRIYYDKKQAEGKTKKEALRALKRRISDVVYRKLLADQQS

SEQ ID NO: 187295 - protein, 403 aa, unidentified
MAGIRTAGVDWASEAHEVCVSEEGQVVARLSVAHDERGLQRLVRELATHRVARVAIERPDGILVERLLAAGLEVLAIHPNQLKAARPRYAVAHGKSDRFDAFVLAELARTDAHRFRALVPDSDETKALRALTRAREDLVGVRVELANKLRAQLESFWPGALIFGAVDNRVSLAFIARYPSPADARGLGVERMAGFLARNHYSGRTDPAVLVERMKAAPTGTAGEAEHDARRAVVLGLVAALEPVVTEISALDTKTRAALAAHPDAAVFAPLFRNVKTTICPATLIAEIGDCRGRYPTEAALAADAGMSPVALESGKMRVATFRRACDKRLRKAVTVLADSTRHWHPWAREVYERARARGQNHPHATRTLGRAWIRVLWRCWQDEVPYDPSLHGNLSSLRTAGG

SEQ ID NO: 187296 - protein, 400 aa, unidentified
MNPELRVAVDVGCTRHRVAVGLSEGKLLEEFDINHDAAGLREFFERVGRHERQWGRPVAVAMEGYNGYARPLDERVLLHGYRLFNVNNMKLARFKEIFPGPAKSDPVDARKMLEMFSLKDKLPLAREALQEVAPVAEVNLQLKALTRRRKQLVNERMRVSSRLQTDLQAVCPGLLDVTGEADNLWFLNFLTCRADLTKLKTVREPSLLALQGVGKAYAGKIRHWQKQATFSETVAWVGPMIIEDAKRMLELRKNIGALQAQIDALAEHSEIARRIDTIPGFGRVCAPELAGEIGSLQRFRGESSLALYVGMAPLDDKSGTRSGSKPPRHVNVRAKAAMMIAAAQNAATVPESKAFYDKKRAQGKTHNQALRALGRNLVRVMWSMFKHGRNYQLESPSKRA

SEQ ID NO: 187297 - protein, 363 aa, unidentified
MRFYGEQRRFYCGIDLHASKMYVCVLDDQGTVVLHRNMRTEPNSLKRALAPYRESVVVGAECMFSWYWVADWCRAEGVEFVLGHALYMKAIHGGKAKNDRIDSEKIARLLRGGTFPLAHAYPKEMRGTRDLLRRRNLFVRRRADLLAHVQNTFTQYNVPTASGKGRDRLREGDVGSSFEDPSVQVMLDADIEVIEQLDETIADLETHVLKHAKVHDPARLHLLRTIPGVGKVLSLVMLYEIQDVNRFKNIGQFASYARLVACAKESAGKKQGSGGRKIGNAHLKWAFSEAAALMIRSSPEAKAFMEKMTRQRGKARAVALVAAKIGRVAYWIMKRKQPFDARQFWKNSLPKGMPTVEGAAMTP

SEQ ID NO: 187298 - protein, 319 aa, unidentified
METKVTVGIDISKNTFDVALPTTTKDSYRHLKFSNNAEGFKKFSAHLTPNSACVMEASGVYYLQLAIYLHDQGMKVSVVNPLTIKRFSQMRLMRTKTDKRDSAIIAEYGKVENPIEWKPRAEHMLQMQQLQALQDSFIGQSTRLKNQQEAFAESGINNKIGAKILLKEIEHVTKQIELIEKELTKITLTFHQDLFQRLQTIKGIGKRAAMTLILITDGFERFENSKQLCAYVGLSPRIFESGTSVKGKVKICKMGMARMRKLLYLCAMRARTCNKACKEMFERLTERGKNGKLALIAIANKLLRQAFVIGKSQMIYKEF

SEQ ID NO: 187299 - protein, 349 aa, unidentified
MTIVEDRPVITGGVDTHADLHVAAALDPIGGLLGVQEFPAAAAGYASLLGWLGGFGDIALVGVEGTGSYGAGLARHLAAAGIRVVEVDRADRQDRHRAGKSDPLDAVSAARAAQSGRASGAPKGRDGAVEAIRALMVAKRSARAERTQAINQARALIVTGPDELRARFAGHRPAQLVEAIAALRPRPGDVPGYATRVALREPVRRARFPGAQLDRLDELIGPLVTARAPGLLALHGVGPDTAALLLIAAGDHPERLRSESSWAHLCGAAPIPASSGKVSRHRLNRGGDRQANHALWRIVITRLGSRPGHPATRAYVERRTKEGLSKKEIIRCLKRYVAREVYHQLRAGA

SEQ ID NO: 187300 - protein, 322 aa, unidentified
MEMLSFGGIDVSKDRLDITVLPDEQCSSVSNDAAGWAELIEQLRGSLITAIGVEASGGYERGVVRALLAAGMSVRQINPFKLRQFAKASGILAKNDRLDARMIASFVAIMPTRPAQRQTPMIEQLAAMLTVRRQLSDHKVATENASRLLEDAMLQRLSRRRVARLTADIDLLDQRLVEIVTADPALAHRFRLLTSMPGVGAVLACTLIALLPELGQMSRKQVAALVGLAPYDFDSGKLKGRRCIWGGRARVRHVLYMAALSASNWNPALKAFHDRLEATGKKPKVVIVAVMRKMITTLNAMLRDGTAWVDRYSGRRRASTAR

SEQ ID NO: 187301 - protein, 391 aa, unidentified
MGRVVIGMDPHKRSATIEVIDGRERVLAQGRYGTDTGGYAQLLAAGRRFPDRVWAVEGCAGIGRHIAQRLVADGETVLDVPAKLSARVRVFDTGQGRKTDPVDAHSVAVAGLRSPGLRQVRLDDATVALRLLVDRRDELGRSRTDIVNRIHQQLLELIPGGAKKFLTRGQASYLLRTAPEPVGIAAQTRHQLAAELIDELAAIDAKIKAADKQLRQLVAAAGSSLPELNGIGPSSAARLIGDVGDIGRFATAAHFASWNGTAPIEASSGDQRRHRLSRAGNRRINRVVHIMAIVQLRHDTPGRDYYQRRRAEGKTTMEALRALKRHLSDVVYKQMVRDANRARNDRTGPGGHSGATLQSSADGPIPTAASSDKSQPGPATGKRRTKLARTP

SEQ ID NO: 187302 - protein, 317 aa, unidentified
MNTPSPCVGIDVAKDKFDVLIDTTGELFTVENQPKAIAALAKKLLALSPQVIVIEHSGGYERRLAIDLMDAGLPVALINPRQTRDYARSQNQFAKNDRLDARLLAEFGRNSRPQLAQRPPENRLLLDELVTRRRQLVEFRAAEQNRLQQARAKDIQRSIATHLRHLNTMIDKLDRQIAQLIEHDQDWRGKTRLLQSVPGVGQVTAATLLAELPELGTANRQEIATLAGLAPFDRESGTWKGKRRCFGGRAAVRKVLYMATITAVHHNPVLAAVYQRLTAAGKPFKVAIVACMRKLLVILYTLLKTGQSWQPKIAANS

SEQ ID NO: 187303 - protein, 451 aa, unidentified
MEILYTNCAGLDVHKKTVKVCLLTPGSNGRPHKEFRTYATTIEELLNLSDWLHEQGCTHVAFEATGVYWKPLYNLLEGHFEILVVNAQHIKAVPGRKTDVKDAEWIADLLQHGLLKASFIPSGSQRELRDLTRYRVKLTEEKAREINRVQKTLEDTNLKLGDVVSDIMGKASRTILYAIADGETDPSRLAAFAIGRVRASQEQLEAALTGRVTDHHRFLLREHLTQIRHLELAIDRVTAEITRRFTPPSPPEEPTASEKEDEATQERASESTPLPEAPVPPQAALSWTQAVVLLCSIPGISERTAIGILAEIGTDMQQFPTAAHLASWAGVCPGNHESAGKRLSGKTRKGNPQLRCLLVQAAHSASHQKHCYLAEQYRRIAKRRGAKRAAIAVAHSILVIIYHLLSNQTTYLEKGETFFEERDRQGMEKRLVRQLSRLGYQVELQPIAQAG

SEQ ID NO: 187304 - protein, 311 aa, unidentified
MDATVVVGIDVSKDRLDVHVLPSGENFAVARDEEGVSKLVARLAALGPYAIAMEATGGLESLVAASLNGANLPVIIVNPAQVRAYAQALGKRAKTDAIDAAVIARFVEATKPVIRALPDADTVLLAQLMTRRRQIVQMIVAERQRQTQLPTRHLRRSAARLIKALQRELDVLDRDIDSSVRGSPIWREKEALLRSVPGVGPIIARTLLAEMPELGTLTRREIASLAGLAPWTRQSGRWRGKSFTGGGRAPVRAVLFMAALVGARFNPILKAFHQRLIAAGKPKMVALIALARKLLTILNAILRDNSPWQSA

SEQ ID NO: 187305 - protein, 351 aa, unidentified
MVKTKLDRTKLSNNDYLRELDIYDNYIALDWSQVNMAIAKMTRNSKQTKVIDVPSNIDDLKAYLDNLQGKKILTIEETNTSHWLYVELKEYADRIVICDPYRNRLLSEGPKNDKIDADKLCKLLRNGLLKEVYHSSDNIYELRKLMSAYDDLVKAGVRLQNQKSAIYRSEGKSHKKEEEINNTTTSFILEQINKGIEDYQRKKDEFEKFIKRVNKTEDLINKQMTIPGIGSIGAIKIVSTVIDGHRFGNSGKYLSYCGLVKHKKISGNRNYGNKNPRYSRKQKSVYKTAALAAIGGNNPINDYYEYLITNKSLPEDKARHQISRYIARISYGMLKNGEKYNPYRWRKHKTT

SEQ ID NO: 187306 - protein, 318 aa, unidentified
MEQQSQWVGIDVSKANLDVYLRPSGKQFQAKNQASGIIELIQQLQSFKIQQVILEATGGLELEVSQALQERGFAIAIINPRQARDFAKASGKLAKTDRIDAAVLAHFGEAMQPAITVLASANEQALQEAVTRRRQLVEMLTAEKNRQSSLRGKMRQNVDEHVEWLGKRIRELDDEIEQLSQAHDQWRSRMALLRSVPGIGKVIATTLVAALPELGKVSDKRISALVGVAPLNRDSGKYRGSRTIWGGRANVRAALYMGALVAVQHNPVLKVFYARLVSQGKAKKAALTACMHKLLRIPNAMIRDGKPWQPPTLATEQN

SEQ ID NO: 187307 - protein, 403 aa, unidentified
MGRAVEELAVDDDEERLQRVAAIDVAKASGKVCVRLPGSGGRRVTRVWDVESTTAAILALADELVGMDIERTVMESTSDYWRPFFYLLEAAGLRVWLVDARAVKQVPGRPKTDKLDAVWLAKLNERGMLRPCFVPPAAIRQLRDYTRLRRDLTEDRSRHKQRLEKLLEDALIKLSTVATDIFGKSGRAMVEALIVGERDAHALADMALGKLRPKHAALVEALNGRFDDHHAELARMLLDQVDALTDQIIRLGRRIDELVAELPQAQPQPPTDPSGPGSGGGLGVVDRLDEITGIGRDAAHTIIAEIGLDMRQFPTAGHLVSWAKLTPRTIQSGPRTRSGKTGKGNPYLKERAPPAHLASRAHAPARATIHFLISVEPSKVVCGLDGGRSVVKTDSTAEHPGTL

SEQ ID NO: 187308 - protein, 346 aa, unidentified
MNSVGIDLHRKRSHVAAIDEEGEQLLSRRIVNDPQTFLALLEGVGACRVALEATYGWEWLADVLQDAGYELHLAHPMRTKAIASARVKTDAVDARTLAHLLRADLLPEAYIAPRELRDLRDLLRHRVALTRMRSALKNRVSAVLAKNGVERPYSDLFGPGGLRFLTELELREGPRRRLDSTLALIGDFTREIDATSREIDARASDDPYVPVLCQIRGVGRYIAMLVIAEVGDITRFATARRLCSWAGLTPTVRSSDGKARLGHISGQGSPPLRWALVEAAQHAAGGGGPLRDSYERIAKRRGKQIAKVAVARRILTLCFYGLRDGEIRCLVPRATTRAVRPPAVSA

SEQ ID NO: 187309 - protein, 342 aa, unidentified
MNIPVRIGMDTSKSVFQLHGVDENEVVVVRRQFRRAEMIRYFERLPPVLVAIESCGSSHHWGRLLQSFGHEVKLIPPQYVKAYVKRGKNDAADAEALCEAVTRPSMRFVPVKSKERQAACMLMTVRERLVSVKSQLSNAFRSYAAEFGIVGPAGRQNVAALIKRVLEDESLPEMARDLFRLQADEYAAVQVRLAKIEAKLMKWHREDDISRRLATIPGVGPIGSSMLSMKAPPPETFRSGRDFAAWLGLTPKDHSTGGRQRLGGITKAGDSILRSTLIVGATALLRHVRKGRHKPTPWLASLLERKPPKLVAVALANKFARIAWRLMISGGVYNQPVAAMPT

SEQ ID NO: 187310 - protein, 366 aa, unidentified
MKKSSTVAKRGNEIFRKPKLTIGLDLGDRTSHYCILDEAGNVILERSLPTTPKGIHQTFSKMPRSRIALETGTHSPWVSRQLTQLGHEVIVAHARNVRLIGESSRKDDQLDARTLARLARIDPGLLGPVRHRSAKAQIHLTAIRARAALVSTRTALVNAARGLTKSYGERLRKCGTRQMNREIAQGLSQELRDALEPLLEEIESLNERIAEYDRRIEQIAKEVYPEVALLQQVKGVGTLIALTYVLTLDDPHRFRRSRDAGCFLGLRPGRRNSGNSEPQLHISKEGDRYLRTLLVQGAHYILGPFGQDSDLRRWGLKLAERGGKNAKKRAVVAVARKLAVLLHKLWVSGEVYEPLRNNHEVVSAVA

SEQ ID NO: 187311 - protein, 354 aa, unidentified
MKYHTSTTQFNCGIDLHARQMYVCVLDRDGKKLVHTNIKNNDFAYFLKLVAPYRHDLTVCAECMFGWYWLADACADAGIHFVLAHALYLKAIHGGKNKNDRLDSEKIAHLLRTNFIPPGYVYPTEKRPLRALLRQRLLYVWNRTELLARIQSHQLAYNRPTHRQTLYNRESWSKQLLSAEPDPVRQLALQNDLALIGHYDTQLATLERELLKLTKQTSSRDFTLLQTTPGIGDYLGLTILHEIGDIARFPSVKDFLSYCRLVKGTVASAGKIKGLRGAKLGNPYLRWAFGEAAVVAKRDPLLIGPLAQRLEARLNNKFKANTVLAIKLARAVYFMLKQKTVFDPERLVAALSKN

SEQ ID NO: 187312 - protein, 387 aa, unidentified
MYFVGIDISKFKHDCAIVDELGDVITPSWSFQNDREGFSLLKELLDALDGEKKIGLEATGHYGQNLKLFLENNDFSFMEFNPLLINRFVHSKSLRKTKTDSIDALMIAQYLMTVEYKPYPPSFYTLEKLKSLTRFRDSLIRQRSKQLVELTNILDKVFPEFKPFFKGRFSATALYILSHYASPEKISNMNSKSYEPLRRLSRGRFSMVDFVELKTLARNTVGSTCNYLLQEMEITIDIYNQLQSKVEEIELQIHDCVLALAPPILTIPGIGAASAAVILSEFGDLSKFNNPSKLLSFAGMEPGYFQSGTSESTGKMVKHGSSHLRYAMMNCAQTVINNEPTFAAYYAKKRAEGKEHRVALTHVAKKLLRVIYTLQTKELSYNPDLVR

SEQ ID NO: 187313 - protein, 386 aa, unidentified
MPQKLKPMRTVCGLDVHKDSVFVCILNENGILFQDKIGVLTPDLERLVVVLHEHGATEVCMESTSIYWMPVWRILEPYFSLKLVNPYFIKQLPGKKSDVKDAEWIATCLLKDLIRGSYVPEDRIQQLRQYDRRIFDLNKDIVYKLTKLDAALQRCNIRISNYVSATDGKSYHKVVEKIAEGTTDPKILAGLIHGRIMNRVGKDVITASLTGVITQTDIDVIRQIRDEVMLAQKHRKECLDKLEELCNKWFPDQMKNLQTVPGVSLRSATSVIAELGTDMSSFEDAAHLVSWSGLKPRNDESAGKIKSRKITHGNKFLRKTLIECSWAAAKTRGCFYNTFSYHQTVVRRKNKMKVQVAIARKMLAAIWFILHDNVPYRDYTPDIVAE

SEQ ID NO: 187314 - protein, 374 aa, unidentified
MNFIGIDLHTNRFTCCYRDENSSVENPAKGKTMMSFELNALGLNAFYKTLTKETYVLVEATTTTFSFVRLFKDMVKEVIIANTYELKQVSLARCNTDKIDADKLCRILKAQVLSGELLVSAVTLAPPEIQQLRSLFTTYRLFQKQNIQLKNRIHSLLKEQLYGFTQEEIFGKCSREKIRCIAASEAMHFQINLLLDRLECGEQDIQLLKNQVLIKAAPFMRQIEILTSMKGISVFIAIAIIADIIDVKRFKNSKAFTSYLRSAPKVSNSNTSISIRGTNKKGRKLSATLLTQSLNHVLDSSIKLHRWYNHLCEYKKAGLVRTALRRRVLAEIFQMLKKGEYHYARDEKKHEAKMMQYKHFLEIQKSQTVFTKTA

SEQ ID NO: 187315 - protein, 345 aa, unidentified
MKKYAGLDVSMEETAVCVIDEAGKVVAEAKVASDPAAMAEHLARWRDELVVVGLEAGGLSPWLWHGLRELKVPAICIETRRMKAYAKASPVKTDRRDARLIALAMRAGLYREVHVKSEDSQKLRLALTARQTVLRQARQLQGKVRGDLKPFGIRLGKVGSGGFAGRVKELLAGRPDLWALVRPLIELRAVLLEQVRAYDRLLRGFARTDAVCRRLITAPGVGILTAVGFRATIETPDRFRRAADVPVALGLTPRIDQSGERERCGAITKAGDQLLRGLLFEAANALLTRTRRSCALKRWGLALAKRRGMNRARVAVARKLAIVLHRMWRDGTEFRFGAATANQAA

SEQ ID NO: 187316 - protein, 343 aa, unidentified
MDHFAGLDVSVKETSVCIVDDTGRIVREVKVASEPEALLPVLTSDTYHFKRIGLEAGPLSQWLFSALAEAGLPVICVETRHMRAVLQAQINKTDRNDARGMAQMMRAGLYRPVHVKTLRSQKLRMLLTHRKLLQSKAIAIENDLRGTLRNFGLKVGVVGKVRFEARIRELVENLPDLAVLVEPMLIVRRVLREQIGILHRRLLAIVRDDDVCRRLMTIPGVGPVVALTYRATVDVPARFKNSKAVGAVLGLTPSKYQSGEINRSGAISKCGDEMMRVMLYEAAQVMLTRTNKWSWLKAWAMKIARHRGMKKAIVALARRLAVIMHRIWVDGTEFQWTREAAVA

SEQ ID NO: 187317 - protein, 360 aa, unidentified
MVVIGVDTHKATHTLVGVDAGGRKLGELTVQATPVGHIKALGWARREFGSDLVWGIEDCRHLSSRLERDLLDAGQQVVRVPTQLMARTRASARTRGKSDPIDALAVARAVLREPDLPTASHDEVSREFKLLVDRRAALVAYRTAVSNRLLWRIHELDPSHAPKAGSLGIFKTQTALQIWLSTQPGLVAELARDELADITALTTQINALERRIAARVRATASSLLTIVGCAELTAAKLIGETAGVSRFRSEAAFARHAGVTPIPHWSGPKRVRLMTARLGNRQLNAALYRIAVTQIRHNGPAEAYYRKRREVGDSHAEAMRRIERRIARIVYGRLRADRAHRSATSDTAGPIGMPTQVETP

SEQ ID NO: 187318 - protein, 521 aa, unidentified
MRPVLLWCRVPVLWEFGPGSRAATSLVTGSVPIPLGRLLQPSPLPRSLPQSIPCHPIVERAVAQHKRKKSPAEQQLPAQLHAVNLHAAGIDVGAEAHWVAVPVEADPQPVRAFPAHTASLHALAAWLTLCGITTVALESTGVYWIPLFELLETQGFEVILVDPGTMPKNGRPKTDVHDCQWLQRLHTLGLLSAAFRPDDPVVVLRSYLRLRLTLLADAARHIQHMQKALTQMNIKLPHVVSDITGVTGLRIIKAILNGERDPRRLATLRDQRCKEDETTIAQALHGTWREEHLFALHQAVAAYEFCHQQIQEGDAKIAAQLQTFEDRSKGESLPPKPRKRHRNRLSFETRPLLYRMTGVDLTKIEGIDETTALIVLGEIGLDMSRWPSEKHFTSWMGLCPRVRVSGGRVLSSRTRPTANRAAAALRLAAASLHHSQSALGAFFRRMKARLGTPKAITATAHKLARLIYAMLKHGTAYVAESMDTYEQKYRQRVVNNLSRRARDLGYDLVAKREAVTQVGLG

SEQ ID NO: 187319 - protein, 343 aa, unidentified
MKLSYVGVDLAKNVFQLHGVDRSGKAVWRRRLRRHQWHGALMEAADTSCVIGMEACTGAHHWARQLQVHGYTVRLIPPQFVKPYVKSNKNDANDAEAICEAMSRPHMRFVTVKSVEQQDIQATHRIRAELKDQRNAKANQIRGLVAEYGLVAPQTLLALRRAIPDWLEDAENGLTDYFRSLLHGLWDDLLSLEDRITELDKEITRLANGNEVTRRLQQLRGVGPMIATALVATVGTGEQYRKGRQMAAALGLTPRQSSSGDKYRLLGISKRGDAYLRTLLIHGARAVVSQAKHRDDPLSRWATDIAKRKHTNVAAVALANKTARMAWAMLRNDTDYDPNLAVS

SEQ ID NO: 187320 - protein, 343 aa, unidentified
MGNDTRIAVDVAKAVFEVAISDRPGHVVRRERLIRDQFLPFIAQQPAATVVMEACGSSHHWARKIESLGHRVVLLPPHHVRPYIRGNKTDRTDAKGILEASRNEEIHPVPVKSVAQQVLTSLHRLRSGWVAERTARLNALRGLLRELGFFIPMGAEKVVPALHSVIEDAESELPDGLRNILYDACQEVRDIEARIKKTEAQLDATARQIPAVALLRTVPGVGPLTSTALVAFFGNIQRFPSGRHLASYLGLTPREFSSGLKRRLGRISKRGDGYLRTLLIHGARSVLLHARKTQPDRLRVWAHKLDKTLVHNKAAVAIANKMARILWAVWSRQTPYRSLRNAA

SEQ ID NO: 187321 - protein, 428 aa, unidentified
MAWRRTEKGRVMTEDVQWFAGIDWASQTHQVCVIDAGGKIVGERGFTHGGAGLAELCSWLLTMTGAPAPAIAVAIEVPHGPIVEALLERGFQVHAINPKQLDRFRDRFTVAGAKDDRRDAYVLADSLRTDRHCFRQLSAEDATVIELREWSRMSEDLQQERNRLTNRVREQLWRYYPQALAISDDLAADWFLELWAAAPTPATARRLRESTLEGILKRHRIRRITAAKVLALLRQKPLTVAPGTAEAATAHIRTVAQRLKLVNRQIKQAHQRLDALCDRLAENEEDNAAGQNCEQRDVTILRSFPGVGRVVLATLLAEASEPLRRRDYHALRTLSGVAPVTKRSGKRCIVVRRQACHRRLQSAVYHWARVATQHDPRSRLRYAELRKRGHSHGRALRSVGDRLLAVACAMLTHRTPFDPDYAVRQIAA

SEQ ID NO: 187322 - protein, 483 aa, unidentified
MKSKPEEQNKRATNHPTQHHWHEMNRKQRREMTRQIQSEDLSLEVIHPDAAGIDIGNESHYAAVPPSRDSQPVREFGCTTAELKAMAAWLKQCRIRTVAMQSTGVYWVAVYDILEQAGLEVYLVNARDTKNLPGRKSDVQESQWLMKLHTYGLLRNSFRPSQEIRVMRTYWRQRNDLVQSAGRHILRMQKALTQMNLQLANVLTDISGATGQAIIKAILAGEHDAHKLAEFRDPRVKASGEQIAQSLEGNWQPDLLFLLKQEQDGYEFCHKQMAECDRQLAQYLQQRKDRSQGAPLPEEKRKGRLKKKKGNAPQWGLREGLFRMSGTDLTRIDGIDVMTATTVISEAGYDMSKWQTENHFVSWLRLCPDNRISGNKVIGKGRLPTNNPISIALKMAATTLRESKTYLGAQFRRLRTRLGAPIAIKAMAAKLARLVYRMLRYGMKYVDQGAAFYELRHRELQIKRLKSKAEKLGYRVTPIPVAA

SEQ ID NO: 187323 - protein, 412 aa, unidentified
MEVVYERCCGLDVHKRTVVACLLIPGERGVPQKEVRTFGTMTADVLALAEWLATAGCTHVAMEGTGVYWLPIWNLLEERFTLLLVNARHVKAVPGRKTDVKDAEWLADLLRHGLLASSFVPDREQRELRELTRYRTALLRERAAVANRLQKTLEAANLKLASVVTDITGKSGRAMLRALVAGETEPTRVAALAEGRLREKIPELQRALVGQFGAHQRFLVAQQLDHLDFLDARIAQVSAEIATRTQPVATVVARLDTIPGVGQRTAEVLVAEVGTDMARFPTADHLASWAGMCPGNRQSAGRQLSGKTRKGSPWLRAAWAEAAQAAGRTKGSSLQAQYRRLAARRGKQRATVAVGHTILRIVYHLLRDPASVYEERGTHAGDERDRQAIERHLVRRLQQLGNTVVLHPLGVT

SEQ ID NO: 187324 - protein, 497 aa, unidentified
MPNKSTIYSRCNPQWLQLFETAGHPAKVLCVALDYAKAQHTALICNGVGDLLRPSFAIDNTAQGATQLLREVRACAKSRKVRGEHVFFGGEDYPSYAENFLRHLRQEKFLVVRVNAWEAKQPRDNFQASSDSLDLLGIARCCLHRRGQSVRDLPQAYPNLRLATRDRDKLVRMRTAVSHRIHTYVDRLFPGFLSVGKSPLEPFSKASLDLMEDRFSPAQLRRRPRQALTEWLGRRGITQPRDTADQLKQLAQHVLEPAPEQTVLLQQTLAQRVGLYRNLEQCIARIDREVAYWLARTPGAWLTSIPGFGITLAAGWTAELGPPSQWYSVRQLCSYSGVVPKSKQTGGPDKEPIIGAVQARGNKRLKNVVLQAVEKVIQHGPEELRRTAQELEARGAHTEFALAKRWVRLAKYLAVTGTVYRPKTLMDPQTPKARLADHYQTVWEKLLPKWRDKADRREVFAPQHPLGQWRQMVQELYALELRLPHPRAAQNSRALAP

SEQ ID NO: 187325 - protein, 359 aa, unidentified
MKIVGCDFHPRWQQVAIFDAETGEIGEHKLLNGDGEAERFYRGLEAPALVGIEACGNSQWFIDLLERLGHQVWVGDAARIRASYVRKQKTDRRDAGHILRLLMEDRFPRLWTPTGAQRDLRQLLIHRHKLVEIRTRVKNGLQHLALNRGMQKQRRLWTASGMAALKDLPIEGWSLRRREDLLHLLGELDRQVGELDEAVSRAAAAHPGARLLMTQPGVGAITALAFVLTIGDVGRFAHSGQVASYVGLIPREHSSGGRQRLGSISKQGNRFLRQLLVEAAQTACRRDEGFRKQYQARCHHKPKGVAKVAAARKLAVRLYWMMRQKVGYPEIAHIESSSGVPLTGTKEVVTLNERSRIRQ

SEQ ID NO: 187326 - protein, 400 aa, unidentified
MIGVDPHKASPTAVAISAAEEPLGQLRVRACVAQAERLLAWAQAWPQRTWAVEGAGGTGHLLAQQLVSAGERVLDVQPKLGARVRLLAAGNVNKNDPNDTRSVAVAALRSAGIREVRPDDHAAVLKVWSKRYRDLGRNRTQAACRLHAVLAELVPGGVPKAVTTARAARVLKALRPEGAVETARWELAAELLDDLRRIDARLREARKKLAAAIAAAGTCLTGLFRVGPVIAAAVIGEVRDVSRFGSRDRFAAYNGTAPIEVSSGQRKVHRLSRRGNRRLNHAIHIVAITQVGHRHSQGRAYYDKKLAEGKTPKEALRALKRQVSNAIFGCLQADARQAAARFGNPGGQQGNGSVASAAGLHPRHRLFGQATPGPAHHTTTAAGNPAPSHSRNRRKTGRTP

SEQ ID NO: 187327 - protein, 390 aa, unidentified
MPLDHHSEEPTAIRTNLGAIFVSLELSRSTWLITSLSPGGGEKMSKHSVSAGDIAALLSRFSELKQKAFARMGQSFPIIVIQEAGLDGFWIHRVLQSEGIESYVVDAASIATSRRRRRAKTDRIDGEALVRALLAYKRGEPRVCAMVRAPTPEDEDRRRLCRERKTLTVERVQHVNRIKGLLFSQGVSGYEPLRRNRRQRLDGLKTGDGRPLPPHLKGQIGRELDRLELLLGQIKAVEAERDALLTPATETEGMPAPQAMLIDLRGIGAEFAAVVWSEGLCRSFANRRQVAAYGGLAPTPWQSGSVAREQGVSKAGNPRLRTTMIQLAWLWLRHQPNSALAQWFKERVKRNGGRLRKTTIVALARKLLVALWKYVTAGVVVEGAVMKAVS

SEQ ID NO: 187328 - protein, 347 aa, unidentified
MRFYNKQHRFYCGIDLHARTMFVVIIDQAGEVLLERNVRTDARVFLELIAPYRSDVVVAVECIFTSYWLADLCAREQIPFVLGHALYMKAIHGGKAKNDKIDAHKIAALLRGGMIPQAYVYPAPMRSTRDLLRRRLYLVRQRAELLSHILNTNSQCNLPDFGGRINYKSNREGVAERFQDASVRKSIEVDLELLDHYDSLIQELELYIVRTAKVHDADTFHRLRSIPGVGKILAMTILYEVHDIGRFDRVQEFASYSRLVKCSRESAGKRQGFGGTKIGNVHLKWAFSEAAVSFLSKCAAGRTLVERLRRKHGKAKALSILAHKLGRAVYYMMAREKTFDMQRFVSC

SEQ ID NO: 187329 - protein, 315 aa, unidentified
MTNLKQSKSNVNVGVDVGKYELDVCIYEKQLHWRDANTSEGIKRSLKRLAHYHVERLVMEATGRYEFNLAQAAYEKQLPVCIVKPLRIRRFAGAIEQLAKTDKLDAELIAEFAFRVQPEVTPEKSKSLLAIKDLMARRRQLMNIRTQEMNRPHMVDKLLVSSCKRIIKTLDQEIQRIEKRLAKHVEDQTEWTEKQAILKSAPGVGDTLIYTLLADLPELGDLSRGEVGKLVGVAPMNRDSGKMKGKRRIQGGRHSVRTILYMATLSATQCNPVIKAFYQQLVAQGKHKKVAITACMRKFIIMLNAMVRDRCVWVY

SEQ ID NO: 187330 - protein, 346 aa, unidentified
MKVKTLGIDLAKETFGLHGVDPLGRVVVHRRITRKQLLGFLVKLEPCLVGMEACGSAHYWAREIEKLGHTVKLMSPQFVIPYRKGNKNDPNDAEAICEAVTRPSMRFVPIKNEEQQDLQALHRVREQLVKNRTALVNQMRGLLRERGVVVAQAIARLRAALPVILEDESNRLSALMRELLGEMAERLRMLDDRLRQYDQRIARCCQQDERCRRLVKVEGVGPLVATAVVGAIGNARQFTNGRELSAWLGLVPREHSSGNRTILLGISKRGNRYLRTLLIHGARAATRVAERKCDARSIWLSRLKLRGGPNVAAVALANKNARVLWALLARGDSYRVRSALDRASAA

SEQ ID NO: 187331 - protein, 388 aa, unidentified
MPQSNDLSRSLAAFDQDRTLIAVIEMSQSNWLVAGLVPGLERRPLKKLSPDEDALLKLVQRWRNEAAQAGREITRIVIAYEAGRDGFWLARWLRRRGIEAYVIHPSSVAVSREHRRAKTDRLDTELLMRAFLGWLRGEKRHCSMAAIPTIEDEDAKRPSREHEKLVGDRTRLVNRMKAMLARFGIRTFKPTLRKAADRLDGLRTAEGTPLPENTRAELRRDMMRLRMVREQIKEIEQERLRKLTAAPAEKGPPTMVRFIARIIGIGIETADMLVSEILSRGLRDSKAVARYAGLTGAPDESGRRRREKGLAKAGNARVRRGMIQLAWRLLIFQKDSALAQWYRARTANARGATRKRMIVALARKLLIALWRMATTGEIPEGISLRAAP

SEQ ID NO: 187332 - protein, 389 aa, unidentified
MIYVGIDVAAEKHACCILAESGKVHKQFTFSNDISGFEKLHKALLAPSETKIGLESTGVYGNNLAEFLRRNGYETHIFNPLLVKKSIQATTLRKTKTDKSDAKHIAQYTKEHSQPNLEPSYHISELKSLSRGRFSLVRERSKVKTQAKSLLVQLFPEFSQAFSDVFGAAASAVLRQLPSARMIAQCPVDVLTDLLRTASHGRLGKVKAELLIDLAKHSVGTHSMALELQMQMFLQQIDLFTLQINRYEVEIKSEMEKIQSPITTIPGIGSVLGAVILSEIGDIRRFATPAKLQAYAGVDPSVGESGSSVSTPGRMVKHGSHYLRWALCQAARCVSLYDPIFAAYMKAKRDEGKHYCVACSHVAKKLTRVIYSILKNNTAYSLTYSQIGA

SEQ ID NO: 187333 - protein, 342 aa, unidentified
MQITTIGLDIAKNVFQVHGIDAAEKVIVRKRLRRSQVLTFFKALLPCLIGMEACATAHYWARELTKLGHKVRLMPAKDVKAYVKRNKNDAADAEAICEAVRRPTMRFVQVKSAEQQGQLMQHRTRDLVMRQRTQVINALRAHLAELGIVAAKGDKGVKELLTILADEKDTRLPIDARASVIVLAAQLQALQTLIGSIEKRIKAQHRSNQASKRLETIPGIGVIGATAIAATVADPTVFRSGRDFAAWIGLVPRQNSTGGKQKLGPISKQGDRYVRRILVVGAHSVLRRAKENPEKYPWLTQLLARRPFKVVAVALANKMARMAWALLAHGGTYRAPELAAAA

SEQ ID NO: 187334 - protein, 410 aa, unidentified
MRIIALDVHRSFAQVAILENGKLRDAGKIDLDRNRLLQFAKKLKSDDEIVIEATGNTSAIVRLLSPFVGRVVISNPILVRAIAWAKVKTDKIDAATLAKLHASGFLPEVWMPDEETETRRRVTAERTQLVSQMTRLKNRIHSVLHANLIPPYKGVLFSKRGRAWLEAQPLSEDQRRLVLRHAGELDRLGAELAEVEKNLAQKALDEPLVKRLMTIAGVNAIIAISVLAAIGDIQRFSSPQKLVSYFGLNPRVRQSGDRPAYHGRITKQGRAHARSMLVEAAWVISGAPGPLRAFFIRIKDKRGKQVAAVATARKLAVIVWHMLSKNEDFIWNRPALFQWKLRKLDLAAGNPSRRGGKQKGPAADYSKKSVRDSEREMIGDAEEEYRRFVATWKTQSPKGRSGAINEVRRS

SEQ ID NO: 187335 - protein, 353 aa, unidentified
MSHLELTAGIDLGDRHSHLCLLGTESGEVIEQSRISTNPKAFEKRFRGCQQMRVAIEAGTHSPWVSRLLEECGHDVLVANARKLRLIYAEGRKTDKLDAEKLARLARIDPKLLAPLKHRGEASQAHLTLIHSRESLVGTRTKLVNHVRAMVKSLGYRLPACSTRTFHRRVAQHLPEPLRPALGPVLEIIASLSAQIREYDAKLEAVAKELYPETRLLRQVKGVGLLTALAFILTIEDPSRFEVSRTVGAYLGLVPSKDQSGGCNPQQHISKRGDELLRKLLVSCAHYVLGPFGQDSDLRRHGLKIAGRGGKNAKKRAVVAVARKLSVLLHRLWVTGEDYEPLYNANHFGGQAA

SEQ ID NO: 187336 - protein, 388 aa, unidentified
MQIITDRSQAPTAIRTNLGAIFVSLELSRSTWLITSLSPGGGEKMSKHTVRSGDVAGLRARLSQLKDKVQVRTGQVVPVIVIQEAGLDGFWIHRLLQDERVESHVVDPASIATSRRRRRAKTDKIDGEALVRALLAYKRGEPRVCAMVRAPTPQEEDRRRICRERKTLTAERVEHVNRIKGLLFAQGISDYEPLLRKRRERLEELRTGDDRPLPKHLKAQIGRELDRLELTLQQIKSVETERDAMLSPSDEGTPAPGAMLKNLKGIGPEFAGVLWSEGLFRSFSNRRQVAAYAGLAPTPWRSGSVAHEQGVSKAGNPRLRTTMIQLAWLWVKHQLRSMLTLWFHQRVQSNGGRVRKVLIVALARKLLIAFWKYVTAGVVLEGVETTAA

SEQ ID NO: 187337 - protein, 480 aa, unidentified
MNIKTRRTKKQVNVENQAINLLSKEELSKKIEVVEKELRSYTWRELETNGKFAKNDKLSFITDDMLIVGCDIGSETHYIRAIDVRGRELSLGAYEFSNTAEGFESAKAWILELAAKNDKKQIVLGLEPTGHYWFALAAWMISNGISVVQVNPYAVKQSKEIEDNSQLKDDRKDPKLIANLVKDGNYGMPYLPEKIYADMRRLSMFRDQLTEDRIRNINRLHRELKIYFPEYMDAFGKIDGAFTLEVLKVSAIPSDIAALGAEGIKNIWHDAKLRGRGYSRAGEIVSYAEKSVGLKDGTDVGREAVKWYAEQILKLDEQLAAIESALHRKCREIPYAENILAINGVGENILAGILAEMGDISRFDDVKEIQKLSGMGLVACSSGKHKGQTKISHRGRKRLRYWLFQAAKSAVSHAEEFKQLHEYYTTRTNNPLKKMQSLIVIACKILRVIYTILKTGTTYDPQKLLKDIKHPVAAQAPLAA

SEQ ID NO: 187338 - protein, 332 aa, unidentified
MSNCIGIDVSKASINVHISKNSQDLLLDNNLKSFRVLFSKLKKIYKKEIEDIIFIFEPTGSYSEALRKYCSEKEIKCFMINPKQFSNYAKALGVEVKNDVEDARVLSHAIHLAKEGQVKIPVFNEDVEQIKELMSFYKFTKKQSTQQKNHLESLLSKDGDKFSIKELKKSIKESQEKELRIIEQVQTLIDSTDEYRIAYENITSIKGVGQIAGIVLLHLFLKYPEANQRQITSLTGLNPIYRQSGTSIQSGYKIAKTGASLYRSVLFMSVFTAVQHDKNFKIFYERLKSNGKHTTSAQIAVMRKIILTAHSLYKNNRKYDENFNQKEDDEMK

SEQ ID NO: 187339 - protein, 420 aa, unidentified
MCLPFIFSRATRLFEVKQSRTNGRDLEGSGALQLNNNEQTNTPMKKELYLGLDVHKDCIITAVAEEGRKGEVRDTGVISNDLHALEKWVGRLRKAHGRDVILRACYEAGPCGFGIARRLKQLGVECEVVAPSLTPKRAGERVKTDRRDARKLARLLRAGELTPVYIPEATDEAIRDLCRARTDAVDDRRRSRHRLKGFLLRHGYRYQGKSSWSAAHERYLRELVLPHPAMKVILEEYLQGIAAAGERIARCEVGMRALLEQWRLAPAVRALMALKGFQTVAAMIVVSELGEVDRFAHPRQVMAYLGLVPTENTSNDKRRQGRITKCGNAHARWLLVECAQHYATPPKVSKELSRRQEGQPAQVRAISWRAQNRLHSRYTRLLGRRLQRNKAMVAIARELCGFIWELLHTQSCYHVQATSV

SEQ ID NO: 187340 - protein, 363 aa, unidentified
MENVRFVGLDVHADSIAIAVAEPGRGEPGLLATIPNDTVLLLKRLRRLGAVRCCYEAGPTGFGLHRALTAAGIDCIVVAPSLVPMKAGDRVKTDRRDAVKLARFLRSGDLTAVYVPDEATEAMRDLERARDDARKAERVALHQLSKFLLRHGRRSPMKSKTHKYLEWARRQHFEHTAQEVVLVDYLKTYEDLRERVARLTRSLEQFVESWSQKPLVKALQALRGVNVISATIIVAELGDLSRFQTAPQLMGYLGLVPSESSSGETRRQGRITRTGNGHVRRILTEAAWAYRFRPAVIQPIRARSQGISDEVRHIAWHAQERLCGRYRKLTARGKNKNRTVIAVARELAGFIWAIGREPKLLAT

SEQ ID NO: 187341 - protein, 345 aa, unidentified
MEIRTIGIDLGKTVFHLVGLNARGELVVRKKCSRTQLLRFTSNLRECLIGMEACGGSHFLGRALREQGHDVCLMPAQYVKPYVKTNKNDYIDAEAIAEAVTRPTMRFVPIKTDDQLDLQVLHRVRERWVVRRTAVINQIRGLLLERGITMRKGREHLKASLPRILEDADNRLSGALRQLLTQLQIDMQYLHRQIEESDKLIVRIASELEACRRLIAIPGIGPLIATATIAAIGNGAAFKNGRGFAAWLGVVPGEHSTGGKQQLTGTSRRGNKYLRKLFVLGAHSVLLQRTKQSSGLSMWLASLTARKRKQVATVALANKMARMVWAVLFKGEAYRPPLLPQPVTA

SEQ ID NO: 187342 - protein, 394 aa, unidentified
MKLVGIDVGKNSHHFCVMDKETGEFNVTPTSFSNNKEGFDFLINSLKPYSKKSILIGMEDTGHYHVALLKFLLSNGYTVALINPKATDLTRKMEGGITKNDKLDTITICDVLDTPERKKQYRITKVDRFDLYEQRQLTRHHHNLKEELNVYCNRLQKSIDLVFPEFNTLFSSKYSIVYMNLLKTFGSAEAIASTDIRTIRKCFEIKGRGNRISLTPEKLKECAKNSIGISSEVETIQIKHLVSQITLIKEQIAEIDKKIEEFSITNNSPILSIPGISHFSGTSILAELGDIGNYSKPSQIIKFAGVAPYHYESSQYNAQHTGITKKGSKYLRKTLYQIILTVINNNPVFKKYYLLKISQGKGHRCAQGHCIRKLLRIIYHLLETGQSFDPALLR

SEQ ID NO: 187343 - protein, 346 aa, unidentified
MYYVGVDYHKKYSTATVMNEKEEILVQKDIPNTLAAFRVLLAPFQPAVAAVEATRNWSVAVNILEQLVNDVRLAHPADTKIMVKRLSTDKIDSRGLARLLVHNMLPEAYLRDRPNRDNQAILRARSFFVQQRTRVKNRIHDLIDRQAEPIREQTQSYSDLFGSKGLTWLKSLELPVPYNKLVNQLLASLENLSTQISTSDKLVKELLAVDGEAQLVDTVPGFGPFFSVLIRTEIDDIHRFPDADRLCSYAGVVPWTESSGGKVWHGSLIKQSNRWLRWAFVEAAIPAIVADEGLRRLYERYRKVKGTKIAKVVVARRLARIVYQVLTQKRAYYPSPVAGGRKPQEQ

SEQ ID NO: 187344 - protein, 374 aa, unidentified
MGEYTRYLGFDQHKETISIAMVRAGREPGEFLGTIRSREEDVGRWLHQRSREWGGLGEVLVCYEAGPCGYELQRQLKQMGVACEVVAPSLTPRKPGERRKTDRRDAKKLSHLLRSGELSPIWVPDEAHEALRELLRGREAAVEDVLRHKHELSTLLLRHRKHPPAGVRAWSYAYQRWLDGLKWQQPIHQELMAEMRQAILTAQQRVAHLEDRLVEAVAASPWAAAVAGLSCFRGIDLLVGATLVAEVGAAGRFLHPRGLMGYAAFVPGESSSGARTRRTDTGPGGNHHLRRVLVEAAWAYVHRPVVGEKLARRQRGQPAEVIDIAWRAQVRLYKRYRQLMARGKNRNKVITALARELCAFVWEALQVLPTPEAA

SEQ ID NO: 187345 - protein, 411 aa, unidentified
MQVVVERCAFLDVHRDTVMACARVPDGDGGRREEVAEFRTTVSQLLVLSDWLVERGVTLVGMEATGVYWKPVHWVLEDSIDDVWVINARHMRNVPGRKTDVADAQWGAQLLEHGLVRPSFIPPRPTREQRDLTRYRKSVIEERGRETQRLHKVLEDAGVKLSSVASSVMTKSGREMIDALVAGQRDPAVLAEMAKGRMRAKIPELTDALAGRFNAHHALLCRAMLARIDQADATIDELTKRIEELLDPHEAAVTLLVGIPGVSNRTAQVILAEIGTDMSRFPTPEHLASWAGMCPGNNESAGKHRSGRTRYGSKWLRIALVEAAQAAGRSKNTYLSAQYARIRGRRGPGRAAVAVGHSILVIAWHLLSTGETYTDLGGDYFDKRRNSTAHQKRLVAQLEAMGHRVTLEPAA

SEQ ID NO: 187346 - protein, 343 aa, unidentified
MQAVTTIGLDIAKSVFQVHGVDAEGKVIIRRKLKRRYVAAFFQKLPPCLVGVEACASSHHWSRELKALGHTVRLMPPAYVKPYVKRQKNDAADAEAICEAVTRANMRFVETKTPEQQSCLMLHRTRHLFIRQQTAVINAIRAHLAEFGVVAPVGRNGVEALLDVVADSSDKRVPEIARACLVALGAHLRVLKTQILEFDRLIMAWHRSNETSKRLDEIPGVGPALATALVASVGDARAFRSGRDFSAWIGLVPKQNSSGGKEKLGSISKRGDRYLRSLFTAGELAVIRYAKLHGTEHRPWLTALLARRPTKVAAIALANKIARMAWAMMAKGERYKEPVALAR

SEQ ID NO: 187347 - protein, 320 aa, unidentified
MASRESLFIGIDVSKQTLDVAFGADPHAPLETIPSTDEGVQLLVTRLQRLQPTLIVLEATGGLERMVFAQLLQAGLPTARVQPRRVRALAHAEGRQAKTDRLDARLLARFAERVRPPHHQATDEQRASLRDLLVRREQVIQMRTAEINRLTAAAPNLRPGIQQHIDWLDQEIRALEQERDNEAERTDEVRRKRELLESVPGIGAITALNLLLRLPELGTINRKEAAAFVGVAPYANQSGAQHKPRHISGGRRDVRSVLYMATLAATRRRLVRRAFDQRLCQAGKPRKVAIVAAMRKLLTILGAILRQQKPWDPAVHTSAP

SEQ ID NO: 187348 - protein, 406 aa, unidentified
MKEVTTIGLDLAKAVFQVHGVDAVGAVTLRRTVRRRQVLAFFAKLPPCLVGMEACATAHYWAREIGKLGHDVRLIPPAYAKAYVRRNKNDPADAEAICEAVSRPSMRFVAIKTEGQQAAAGIHKVREMLIKQRTMLINTLRGLMAEFGVVVAEGPQHVGELVAILADPANRRIPTPLHEGLLAIVETLRGLERRIEIVDKQIVGWGRGNATCRHLITIPGYGPILSSAMTAFAVDPAAFASGRHFSASLGLVPRQDGTGGKVKLGPISKRGNGYLRRLLVNGAMAVLCSKQAKADPWLVKLLETKERKVAACALANKMARIGWAVMVRQEDFRSRRHDQPCADLNQLGAVLTAVKTASRAPSQWPSASLDRGSARRHPTTRSGRRNGPLIEQRNRERHRTCEGEEA

SEQ ID NO: 187349 - protein, 315 aa, unidentified
MDASQDLMVGIDVSKAYLDVAVDGLAVAPRWNNDAPGCAELAAAVAGAELVVVEATGGYETRLVRTLMAAGIAVAVVNPRQVRDFARASGRLAKTDRVDARVILHFAKAMRPAQIPHIDDGRVALAALVARRRQLIDMAIAEKNRLEHATAAIAPLINEMLLALKAQLARIDAAIALAITDDPDTAERRDLLLSVPGIGGVCAAVLIAELPELGSIDDKKLAALVGVAPIAHDSGMMRGQRHIGGGRATVRCALYMATISAIRCCPPIKAFHARLRNAGKPPKVAIVAAMRKFITMINTIIRRKTPWITQTQHGC

SEQ ID NO: 187350 - protein, 338 aa, unidentified
MNVTRIGIDLAKQVFQVHGVDRIGKVLIRKQLRRTQMLDYFSKLMPCLIGMEACGSAHYWARELSKLGHDVRLMAPQFVKPYVKSGKNDANDAEAICEAVGRPNMRFVAIKTVEQQAIQAEHRIRARLIKSRTALSNEIRGLLAEFGIVVATSIGRLRKALPELLEDGENGLPGNFRVLLAGLGEELRALDDSIAAFEARIAQAARKDDRIRRLLEVEGIGPITASALVAAVGNGTQFNSGRDMSAWLGLTPRQYSSGGKNRLGGISKRGDKYMRMLLIHGARAALNAAKNKEDGRSRWVKSLAARRNKNIATVALANKNARIAWSILSRGESYRKAA

SEQ ID NO: 187351 - protein, 312 aa, unidentified
MDKPPTFVGVDVSKHRPDVHLRPSGEHFTVSHDEAGVAALVERLTALAPALVVLEATGGMEVVPAAALAAAGLPVAVVNPRQVRAFARATGRLAKTDRLDAEAIARFAEAVRPPVRPLPDEATRRLAALVARRRQLLEMLVAERNRRHMADPILREGIDAPLRWLEEALDAIGRDLGEAVQASPVWRAKEELLRSVPGVGPVSARTLLAELPELGSLTRRQAAALVGVAPFNHDSGRMRGRRAIGGGRAALRACLYMAAVAAVRAGNPAIAGFYGRLRAAGKPAKLALTACVRKLVVTLNAMLRTGTAWKQA

SEQ ID NO: 187352 - protein, 324 aa, unidentified
MSDSVTVGIDVSKLTLDVHVSPAQLRQTVSNSDSGFAELKTLLSLQQVSLVLLESTGGYEDAVVCFLQSLGYDVSVINPRQARDFARSMGRLAKTDRIDAELLAQLASVIDSRPDRERFVKKVTDDRRRKLACMVTRRRQVVNMISTEQQRKSAASVYSTDSINKVLSFLRSELKNIDADISLHVRSHFADISGLLASFKGIGPATIGVLLGEVPELGRLNRRQISALIGVAPFNRDSGVMRGRRTVWGGRTMVRNALYMPTLSAVRFNPAIREFYTRLISQGKPRKLAQVAAMRKLLCIINAMLSSGTMFNPALHLHSVQEAQ

SEQ ID NO: 187353 - protein, 391 aa, unidentified
MFYIGVDIAKKNHEASIIDSDGKLVSESFSFSNSIRGLEKFQKFISSFSIDSNNCIIGMEATGHYWLSLYSFLIDLGFSCVVINPIQSDAFRKMYIRQTKNDSVDSFVIAQILRFGEFSVSHFSDEDTFALRNLSRFRFALVDEASDWKRKLVCILDQVFPEYSSLFSNIYGVASKELLSKYPLPEDMISIPADELAKMLSKCSKGRFGIDKAKEIQEKASNSFGVKFALKSFSFQIKQIIAQISFLEDQIADIEDEISSMINSLCPVITSITGIGDVLGAAIFSEIGDISRFERANQLVAYAGLDVAVKQSGNFNATDTKISKRGSPYLRRAIWLAASVAAFKDPALSVYYQKLRQRGKAHGTAIGAVARKLTNIIFAVLRDNKTYIPNI

SEQ ID NO: 187354 - protein, 392 aa, unidentified
MRFVGIDIGADSHMVAVVDEAGGLLVKPTKIPEDADGYRRLLELLGESGNTLVAMEATGHYWKNLFAMLAGHGFVVALLNPLRTARFASEELARTKTDAIDALGIARFAAQKRPAPTRLPDGATEELRELVRLRDRLVQDFGDRLRQLHRLVDLGFPEFVRYVRRLDSALATAILHDYPTAAAFQGTSPRRLAGLRYDGRHKVGDELAHALLEAAARSVGRHHGEPYRIQVRYACEDLDLLRRRLRALEGDIERMLDHHEVGALLTTIDGIGPQTAARLVAELGDPAHFRSAGALAAYVGVIPGLRQSGKRIGLRAGLTPIGHAPLRAKLWMPVLTAVRKNPWLRAYYRRLVARGKLPKVALVAAMHKLLIAVYTVAKHRRPFVPVVAEVRP

SEQ ID NO: 187355 - protein, 454 aa, unidentified
MCLEDRPVLEPNAAGIDIGAREIFVAVPPDRDEHPVRVCTTFTEDLERMADWLVACGITTVAMESTGVYWIPLFDILESHGLKVSLVNARHMKNVPGRRTDWHECQWLQYLHSVGLLRGAFRPEPDITALRTIMRYRQELVQMSSQHVLHMHKALTQMNLQIHHVIDDITGLTGMAIVDAILAGQRDPAALAKLRNWRIKADEETIRKSLVGNWREEHLFTLQQSRELYRTYQRQIVQCDQKIEALVCGFEPRVDPKEKPLPPDRKRYRSDKKRARKSGRLETDFNLRTEAYKLFGIDVTQIPGLETMALSLFGEVGRDMSKWPTADHFASWQGLCPDNDISGGRVLWKGTRRIQNRAGQLFRNAAYSLHHNLSPLGDYLRRMKTRLGPAAAITATAHKIAVIFYTIVKNQVEYDETIWATRDIKRKNRIEGKLKRQARQLGYRLVPLETEPAA

SEQ ID NO: 187356 - protein, 391 aa, unidentified
MPEDAPRPTQAAIRMDLGAIFVSLELSRRAWLITSLSPGSGEKMSKHSVAASEVSGLLHRFAELRRKAAARTGRDFPIIVIQEAGLDGFWIHRVLRSEGIESHVVDAASILTSRRRRRAKTDRIDGETLVRTLMAFKRGEPRVCSMARAPTPQEEDRRRVCRERRILVGERVRHVNRIKGLLFAQGVFGYEPLRKRRRERLEDLRTGDGRPLPAHLKAQIVRELDRLEVVLTQLKTVEAERDAMLKPASDEAASPAAMLVQLKGIGPETAAVLWSEGLFRRFDNRRQLAAYAGLAPTPWKSGSIDHEQGVSKAGNARLRTTMVELAWLWLQNQPTSALSLWFRERVRRLDGRMRKTTIVALARKLLIALWRYTTAGVVIEGAVMKAVPAPI

SEQ ID NO: 187357 - protein, 344 aa, unidentified
MEILRQNVGIDIGKDSFVATMTVLLEGQEVKHLATKTFQNNPKGIKEFYLWAKKAKPDVSQVNFTMEATGVYYENLAYYLFGKKETVHVLLPNKAKKFAGSLNIKSKTDKIDSKTLGQMGVERKLMKWELSSNIYRKMRTLTRERKQLVKESTRIKNQIHAEEYSAEPLRSTIRRMKSHLNFLGKQIKKIEQELRKLVNTDETLSQKIRQITSVPGLNFITVASIVAETQGFANITSIKQLTSYAGYDIQIKQSGKWKGKPAISKIGNKHIRAALFMPSLSAKSHTETYRKFYERLNEKKQNGLITGAAVQRKLLGLVYTLWKNNATFIDNYQSQKTINSVSVQ

SEQ ID NO: 187358 - protein, 344 aa, unidentified
MQNMYYIGLDVHKRTISYCVKDGSGTIHAEGTIPATRFDLDRWMKTLPQPWTAAMEATVFTGWIYDHLQPHAAGLKVAHPLMLRAIAAAKKKNDRIDASKICDCLRCDFLPECYMASTAIRERRRTLRYRNLLVRQMVQMKNKISGLLMEAGVSYNKQKLHKAGYFRELLATNPDIDEGLCSLLRLCRETVVRLGKTESALVRSLERDRLLVDRVERLMTIPAVGPITALAWALEVGDVRRFSSIKKAISYCGLCGSEQSSGNTVQRTPLSKQRNKHLQTTLIEAAKMAPRYSPHLAMLYDKEKQKGNANRATLAVARKLVAYLLAVDRGQRNFQVVETNCIAA

SEQ ID NO: 187359 - protein, 328 aa, unidentified
MYLCILNQDGEILVHRNMPAGPEPFLKAVAPYREDLVVCVECIFPWDWLADLCAREGIPFVLGHALSMKAIHGGKAKNDQIDSQKMAVLLRGGMLPQADVYPAAMRATRDLLRRRMHLMRKRAELLAHVQNTNSQYNLPGMGKNIAYKANRDGIAERFPDPAVQKSIAVDLALIGHYDPLLNDVEFSIVHTAKQPDPQTLSRLQSVPGIGKILSLVLLYEIHPIDRFPRVQDFVSYCRLVKGAKESAGKRYGTSGAKIGNAYLKWAFSEAAGLLLRTNPAGQKYLARLEKKHGQGKALTVLAQKLARAVYSMLKRKTAFDMPMFLQSS

SEQ ID NO: 187360 - protein, 371 aa, unidentified
MITLGVDAHKTMHVAVSVDEGGRPLDTWEGTNSQSSWQEMLAWASQWESRQWGIEGTGNYGRGLAQHLVAVGETVYEVNPRLTAQGRRRARKQDKNDRLDAQAVARALLRDVPELPEVVLEDEAAVLELMNRERDRLRTQVDRLRNQLHNRLFQVDPQYRKSFPSLSKLAAIQNLEQYTAAADTPLASVRGAAVRRVASLLRLVLEQHQQITGEIESLSGTRYGALTEIQGVARLTAGILAGILGTRRFATEGQFASYSGASPIETSSAGRVCHRLNRGGNRRLNRVLYLIALTQWKQKGAGRNYIQRRMEQGKSWLEAVRALKRFIARAVWRLWQRHYAIKHPPNPDPTSPQPGPSKYSQHCPLPQPQLT

SEQ ID NO: 187361 - protein, 338 aa, unidentified
MVLIGIDPHKATHTAVAVDTEETALAELTVKADRHQVERLLKWAIDFPDRRWAVESANGLGFLLAQQLVAAGEDVVDVPPTLAARVRVLGSGKTQKNDRNDALSTAIAAMRAKRLRNVVAEDHGGVLRLLVDHHHDLGSLRTQAVCRLHALVRCLIPGGTGVRLSAARAAVVLRSVRPTNAVDVERKRMALGHVADIRRLDAEIAASKARIVTAVAASGTSVTELYGVGPVVAAFLIGHSGDMARFANRDHYASYNATAPIEASSGPRVRHRLNPRGNRHLNHAIHLIAIVQIRHPSEGRQYFDRKVAEGKTTKEALRALKRQISNAVYRQLVIDSTR

SEQ ID NO: 187362 - protein, 422 aa, unidentified
MKVVYPICCGIDVHKTFLVATIIKTTNGIEPSYTKKRFSTFNNSILQFKQWLLENDCHDVCMESTGKYWIPIYNLLEDSINVIIANPKWVKAVKGNKDDTKDSKWIGDLFRLGIVPGSFIPEKRIRILREYTRYRYKLISCRSSEKNRFQNAFTVCNVALDAVVSDMFGKSASSITDYLITSDEFDSEKCASFLQKSLKKKADTVIESIEGYQMTREQKDRMIMVRSHLEFVENSIAELDNKLDLMVAPYESAISLLCTIPGIKRNSAITIISEIGTDMSQFNSSKRLCCWAGLTPGNNESAGKKKSVRITRAGIYLKPALVQCAHAAVKSNESPYYKTKYERIYKRRGKKRAIIAIARMMLTAIYNMFISGETFNPCDLYKIDMPQELQDKQKAKAIKQAFKLLISQGLINPIDQAISTVS

SEQ ID NO: 187363 - protein, 366 aa, unidentified
MTSVAPAGERIYLGMDVSRDKIAVAVLRPGQDVPAVEMISHDGEMVRRLIGKFADRSVLAACYEAGPGGYELHRLLTSAGVACDVVAPALIPKAAADRVKTDRRDCVRLALSHRAGMLTAIRVPSEPEEAVRDLVRTRADLVDDRKRMMQRIGALLQRHGRVWRAPRWTCQHRAWLDRQSFTEPALEAALRTYLAALDARDAELAVLERQLRGCWASVDPLASMVRQLGCYRGIAELTALTLAAEVADFRRFASAPAFMGFTGLTPSEYSSGARTRRGGITKAGPQLVRGALVEAAWSYRHRPAVGATLRRRQAGCAAETLARSWKAQQRLHATYAKLTRRGKIPSVAVTATARELAGFVWAEMTS

SEQ ID NO: 187364 - protein, 431 aa, unidentified
MGIQSLPAPSNIILRGCVMLKIVYPICCGIDVHKTFIVACIASTNGQGVTTYQSKRFSTFTNDLRRCAVWLAKNNCKDVCMESTGKYWIPVYNILEATCTIVLAHPKYVKAIRGKKTDKKDAKWIADIFKHDLVSGSFIPPADIRQLRDLMRYHWKLTSFTTGEKNRAQNCLTVSNIKLDDVFSDVFGKASSAITTRLLESSEPFDVTPYLTKNIKAPVEKIQAAVEGKMCAEQAEKLRIIRSHMDALELCRLNLQSLILTTAEKYLPQLNIVATAPGIQAFSAIGIISEIGVDMSVFPSSKHLCSWAGLTPQNNESAGKKKTTRISRAGVYIKPLLVQCALASIKAKKKHPEIFNRYNNLKKRRGHKKAIIAIARMLLTAIYNMLKKNEPYNPELYRKADRPPIHREVSVEEAVYILQRQGYLVTAPPTA

SEQ ID NO: 187365 - protein, 316 aa, unidentified
MQTFPNIGADVAKDTVVVACAAQSFPVHSVTNQRAPLLAWLKSLPAGSRIGLESTGSYHELLADLAHAQGHTVFLLNPLDTRHYARAMGNRAKTDRVDAELIARLVDQEHTNLRPYTPPTADQRKLDRMIRRRAKIVRIKSSLTLTMSSLNGFATELKAALRKLDALIAKLDSAMSAIAARSPQHEEAQQRLQTIVGVGPVVGMALTNTLERVPFRRADAFVAFVGYDPRANDSGHKIGRRRLSKRGPAELRRLLFIAAMAAIKTKVWKPIYVHYRTLGWSTTASLVIIARKIARTAWSIHHYKSVFDPERITKNA

SEQ ID NO: 187366 - protein, 403 aa, unidentified
MYYVGIDIAKRNHEASVIDSTGKPLSGSISFSNSKEGCDKLIALFEKLGVDVDNSIIGMEATGHYWLSLYSHLLEQGYDLKVINPIQSDAFRKMSIRKTKTDSKDSLNIAQIMRFGEYSSTRLSDENVQAMKLLTRYRFSIVAECASCKCKVIALLDQVFPEYERLFSDTFGSASKELLLNYQTPEDLLEISSAKLASLLTKASKGKFKMAKAEQVRAAAVVSFGVSFARKAFSFQIRQLIEQINFIEKQIDELDEEISSLLAQTNSVITTITGVGPVLGAAIIGEIGDITRFDSPRKLVAFAGLDASVSQSGEFTGTQGKLSKRGSPHLRRAIWMAASRACFCDPTLSDYYKSLRARGKHHLTAVSAVARKMCNIIFTILKENRPYESIPPKKTTVCEVLSE

SEQ ID NO: 187367 - protein, 463 aa, unidentified
MSLTGSSPNDTKEDVVSKSNRLSRGDKRRNAKLAELRRLVPFDHAIVSIDLADKKQVLVVCNHDSQVLARTTVKVHAWDMGPVLDWAQQQAHKHGFAGMTVGCEPTGHRWMVLGQLAAQRDMTVVCVNPMLVGRAREAEDYTRDKSDDKDAMLIARLVAGLHCYAPERSEETWARLRQLGARRERLITEATACVQQVRDLLECAWPGVLEAAAKPFDSTNWCAALAVVLDRCNGRPERLARMGLARFEAAVCRELPRWGGSRRRRAIIEAVYTAVVDSRGVVAQRRGALERCRYVLADWRSATTRLAEVEARMVEVLDELGLTELVTSIPGLSALGAAAIVAETGDLTRFDSPRALVKHAGLCPRDNTSGTYAGRSRISRRGRPGLRLAAWRATWGALHHNPVMGARYRYLIGRQHNRLTDGQARAAIAAALLRWIHVVVTNGVRWDAAIAGAGVHALPAAAA

SEQ ID NO: 187368 - protein, 343 aa, unidentified
MIYIGIDVAKDKHDCFITNSEGEVLFNAFTIPNNADGFHDLFQKISSLTNDFSNVKVGLEATGHYNYNLLGFLIDKGLPTFVINPLHINLFRKSLSLRQTKTDKVDAHTIALMMMSGVNLQSYSDTSYHNEELKSLTRYRFDKVQERAKLKTSISRLVNILFPELEKLVPSLHMVSIYALLAEFPSSAQIASCHLTRLTNLLANASKGHYNKEKAIEIRNAAKHSIGSNMPAKSLELKHTIRLIQELTSEIDEIECFIKSIMDEIRSPILSIPGINYRMGAMIIAEIGDFNRFSSPDKILAYAGLSPSTYQSGQLDGCYSHMEKRGSRYLRYALFNATKFVCI

SEQ ID NO: 187369 - protein, 350 aa, unidentified
MPCKTVAIAHTIGIDTGKNTLHMIGLDKKGTIVVREKVSRTRIAARLVNVPQCLIGIEAGMASHHVARELLALGHEVKQVPPAYAKPFRQGHKNDFRDAHAIAEAVQRPSTRCVPVKTADQLDLQALHRVRSRLIGNRTAVINQLRGFLLEHGIPVRQGLRFLRQQLPQILAMRTDVLSPRMIRIIEELIGDWEHLDERIESVTDEIETLARADENCRRLMTVPGIGPITASAMVAAIGNGAAFAKGRDFAAWLGLVPKQMSTGDRTILGRITKRGNRYLRMLFIQGARAILFRPAGWAKHSFGPWLAAAARRLHRNVLATAFANKLARIALTVLVEGRSYAARVEPRAA

SEQ ID NO: 187370 - protein, 382 aa, unidentified
MSTNHRFIGLDVHKDTTVVVVAEAGRDGEVRQFGTISSDLHALERALTKLRADGATLHVAYEAGPTGFVVERHLRAMGIDCLVVAPSKMPVPAGKRQKTDRRDAELLARLVRAGDLTAINVPDEVDESIRDLGRARTDAVEDLKRAKQRLKSFLLRLGYHYKGTANWSEAHLRYLRSLTIPLAAHKAVLQEYLLAFEQCTKRVERLDDLLVVQVPQWSRYPYVQALMNLRGFQLVAATVLVAEIGDIRRFKHPRHLMAFLGLVPREETTGTSRHLGAITKAGNGHARWMLIETVQCALNVPKVSAELSKRQVGQPTARRDLSWSTQVRLHKRGRHLLARGLLKQKIIVALAREMAGFVWAMLHLVPALPPTPQPGGPGLRRT

SEQ ID NO: 187371 - protein, 414 aa, unidentified
MDIVHTHCAGLDVHKKTVVAAVSVPNSGGGWYQATHTFATMTGDLLALSDWLMQCNVTHVAMESTGEYWKPVFNILETNFEVVLVNAQHIKAVPGRKTDVNDAEWLADLLKHGLVKASFVPPEGQRDLRELTRYRTTFVRERATLVNRVHKVLESANIKLTSVATDVTGASGRAILAEVIQGTASPAIMADLAKGRLRAKRDQLIKALEGRVKAHHRFVLTELLCQIDNLDEAIDRFDQQIQEYCRPFEEAVQHLDTIPGVARETAEIIVAEIGTDMSRFPSADHLAAWAGVAPGSNESAGRRRSGKTRKGDRPLGVALNQAAHGASHTKNTYLAAQYHRLAARRGKKKAIMAVAHSILVIAYHLILRKEDYRELGGDYFDKRRPEATANHLVKRLKALGYTVNIQSQTASVAA

SEQ ID NO: 187372 - protein, 341 aa, unidentified
MQNVTTISIDLAKTVFQVALFNKYGVQKSNNKMSQAKMVLFIAQHPEALICMEACGTAHYWGRRFQKSGHRVLLVPAHVAAKYRTGNKNDANDALAIYEAIKRPKTYFVQVKTLEQQDLASLLKLRQGYVKQRTQTANRVRGLGMEYGVKIPQGIAKIRKHLPRFLEDAENELTTSSRFILRDLLDQLFLLDIQVDEATKRLVTRAKEVPVCTRLVALPGVAWIIASALYARLGDGSAYKCGRDASASVGVVPAHSGTGGNNKLLGITKRGDRCLRSLLVHGARSVVSRIKDKQDGLSCWIREQLTKNHLNKTAVAYANKLVRMAWAILKSGEVYREPVAV

SEQ ID NO: 187373 - protein, 347 aa, unidentified
MKFYTKSHQYYCGIDLHARLLYVCILDERGNKVLHQKIKADPHQLFKLLEPYISNVVVGVECMHCWYWVSDFCRELKVDFILGHALYMKAIHGGKAKNDKIDSYKIASLMRGGNFPLAYNYPAETRSTRDLLRRRTHIMRHGGELKAHVVNTDSQYNLPAQSLNLKNVSAREGLRHHYDDPIVQRMIELDMNILDCYIRELKHVESFIENKAKQHYGALLSIVRTFPGIGQILGLTILYEIGDIERFASVQKFASYSRLVKCKAESAGKTYGTSGNEIGNGYLKWAFSEAAVLYLRNNDKAKHYLTTLQKRMNKAKALSALAHKIGRCIYFMIRDKQVFDEKKFLKG

SEQ ID NO: 187374 - protein, 411 aa, unidentified
MSLEVMYERCAGIDVHQRFVVVCLIVAEGGKRHQEIRTFRHETAGLLALRTWLLQEGCTHVGMESTGVYWMPVYRRLEGFFELIVANAQHIKAVPGRKTDVQDAEWIASLLQHGLVNPSFVPSQEQQDLRDLTRLRVSLVRERARLVNRVHKALEEAGIKLATVLSDIMGLSGRAILQALCEGESDPERLAKRVHPGVQASQEQIVTALTGEMREHHRFLLRELLSLIAVQDRAIEHLEEEIEHHLHPFEEQIMRCEQINGVSRHVLYVLMAEVGTDLQRFPDAEHLSSWAGVCPGQKESAGKRLSGKCKKGNRYVREVLVQAAHGVRRSRTYLGERYRRLKKRRGSKRAALAIGHDILVIYCRMMKTGQEYQEKGVEFFQQKDRSKVEHLLVRRLEHMGYQLTRPSQPVA

SEQ ID NO: 187375 - protein, 350 aa, unidentified
MDAITIGLDIAKSSFQLHGVNAAGAVVLRRKLPRSRVLEFFRGLAPAVVGIEACGASQHWAREIAALGHRVRLLSARAVKAYLPRQKNDAADAAAICEAAGRPQLRDVPVKTPAQQAGLSVLRVRELLVKQRTMLVNALRGHLAEFGLVAPRGREGVSALSELALDPAVPALAQAACAALVAQIEALEGQILSLEAQLRRRHAEDPLSQRLAEIPGIGLLGATALAVGTDPGRFRSGRDYAASLGLVPRQNSTGGVERLGSISKMGDGRARSLLAVGASALLKRLRPRQGTPPAALAGSALGSWALRLLERKPWRVAMVALANKLARVAWAVLTRGAGYCAEGGPVRAAA

SEQ ID NO: 187376 - protein, 320 aa, unidentified
MNEKSYKFYMGIDISKKQLDVAINTNATVLLFTNDIAGFKKLMALLPDKDRSLIVMEASGGYEKEAAKWLKTQGCSVAIVNAKRVRDYAKAAGRLAKTDTIDAMMIMKYGQAFNPIPQALESQIEEHLGDCANRRAQVIQMLTMEKQHLETTSIKIKKHILKHIVVLEKELDLIEKDQKEIVNQDASLKEKVSRLDEIKGVGEITAINVITYLPELGKLTNKEVAAITGVAPFNRDSGTMRGKRTTWGGRSALRSALYMAILSARRCNPALKIFYDRLIAKGKAKKVAMVACMRKLIIIMNAMIRDGQPWRATSKSANLG

SEQ ID NO: 187377 - protein, 430 aa, unidentified
MTTGHLPAKDVIPSTWVAIDIAKDSHAVLIESAGTRRTLRVDNTLESIDRFLAHLQALPQPVRIAFEPTGVYHRPLAYRLVSAGFDVCLVSSLTCARYREARYTSWDKNDPKDARVILEVLQQGMTMRYVDPLIAGWHDVQEVAKTYWQVTLARTRVQHSLLTHFLPLYWPEFARFWRTSRSEQFIRMLLAYPTPASIVAADLNTFVVSAWDAAGRKVGKRAWLTGVYETALRSVALPIALESAAVTTYRLRLQTFLDLSAQRKLLEAQADTLLADNPDYHQLQTIPGIGPVFALTILAEAGDLRRFAHHRQFLKFCGLDLAKSQSGQQRGQEQLSKRGNNRLRSAFWFAGRIAVRSREHSVRDKFERYVATEPFSAARRRKAYTAIAAKMARITHAVIKTGRPYRGYFEHELPSGSIPFNRAVEAPATS

SEQ ID NO: 187378 - protein, 409 aa, unidentified
MSHTIAGIDVHKKLLVVVIADEAKPDVPLQSRRFGTGSAELRHLSAWLSQYGVVEAVMESTAQYWKPVWMELEPHLRLHLAQAQSNKAPHGRKSDLADAKRLVRRFVAGELMLSFIPEPEQRAWRMVTRGRLQLIREKVQLQNQIESLLEEGRIKLSSVITDLLGVSGRRILRAMAQGETSPEALAALGDRHLKCGLPALLDALTGSMGDIHCRLLTQHLDRIDLIDRQIEELNKLAATQMQKYQDAVTRLIEIPGIGAEAAQEIIAEIGPEAAAFPSAEQLASWIGVCPGSNESAGENHSGRSAKGNRFLRRLLCQSAQAAARTNGSHLQSVFKRLVVRLGYVKAIWAIAHRICKIVWNVLRKGARFIEFSEARNPKAVQRAINHHLKALRRLGYSIPSVPQPAAAGE

SEQ ID NO: 187379 - protein, 314 aa, unidentified
MESNVGIDVSKKQLDIAVRPGGEHFTVERNANGLERLIARLGALKPARVIVEATGGFETVVAATLAAAGLPIVIVDPAKIRAFAKAAGQRAKTDAIDADVIARFGEGVKPMPRPLPDEATRHLADLLARRRQIIEMIGAERQRGMRATARSLQRSIARLIKALEKELSSVDTDIDEAVRKVPAWVEKEELLTSVPGIGTKIARTLIAELPEIGTQDRWQAAALAGLAPFTRKSGKWKGKSCIGGGRSCVRAALFMGALVASRHNPVLKTFFQRLVAAGKPRMVALIAVARKLLTILNAIVRDRRPWNAAPATAS

SEQ ID NO: 187380 - protein, 439 aa, unidentified
MLQTINPHAAAIDVGSERLHVAVVNQAVQVFDTFTDSLQALRDYLLSAGVTTVAMEATGVYWLPVYEVLEAAGLEVCVVNGAHVKSLPGRKSDMQDCQWLAELHSHGLLRSGFVPPHDIRRLRDYQRLRQDHIRMGSAHIQHMQKALDRMNLKIHEVLSDLTGLSGLGLVRAILDGVRDRQQLLALCDVQIVQRKREAMLKALKGNWQPEHLFALRQAYEGWKFYQQQIAACDHEISAVLEQLAAGAPPTTAAGGGAAPKRMQHNAPQIADLHTLLLRITGGQDLGALPALSDYSVLQLLSEVGTDMSRWPTVKHFTAWLGLAPSSRRSGKRRRREKRFRNSAGQLFCLCARSMARSKHLALGGFYRRLRAMHGAQVANIATARKLAVLFYNTLRYGLAYVEEGLERYQEAYRQQCLRRLQRTARQFGLTVAPATHANA

SEQ ID NO: 187381 - protein, 453 aa, unidentified
MAQRNRSFPLKPGKSRAALTITHPNAAGIDIGSASHYVAVPPDRDDEPVREFPSFTVDLNALADWLTACGVDTIAMESTGVYWIPLFELLEKRGFTVLLVNARHVKNVSGRKSDVLDCQWLQQLMTYGLLSGAFRPTDAVCALRSLWRQRGMLLKAQGRHVQHMQKALTQMNIQLTNVISDVAGETGQKILRAIVAGERDGRVLAEMKNARIRASTDEIAKSLQGNWRGEHLFALKQALAMFDFIGTQLAECDREIEQQLQSLQAHEGEPVKGKKRGRTRNAPKFDLRTQLFRMCGVDLTRIDGIDVTTALAVVSETGADMSRFPTVGHFTSWLGLCPGTKITGGKVMSGKTKRVANRASQALKLAAAALRSSQSALGAYFRRMCARMDKPKAVTAAAHKLARLIYTMLTKGEEYTDKGQDYYEERYRERVLRQLALRAEKMGMKLVASENPA

SEQ ID NO: 187382 - protein, 468 aa, unidentified
MKRKSRRAKCQKVSPFDGELKLIEPDAAAIDVGSRSHWVAVNPQRDSNAVREFGTFTTDLSRLADWLAQCEVKSVVMEATGVYWVALYELLESRGFKVYVVDAHTVRHLPGRSKSDVKDCQWLRRLHSYGLLRGSFRPPAQIRQLRNYLRSRTKIVEAAAQQQLRMQKALTLMNIQLHHVISDISGLTGLSIVRAVVGGERDPKPLARLRDPRIRASKETIQKSLEGNWQEELLFDLKIALDSYDHFQGQIAAYDEQIRRELKEVQSKVDVLNEPLPAARPKACRKRPGMSQQEQLDLREELYRISGVDLTRIDGISLQTAQKVFFEIGTDVSAWPNEEAFSCWLGLSPNHRISGGKVLKRSSRKVVNPLSIALRLAARTLRNSHSALGANFRRLIAKIGMPKAITAMARKLAVLIYRMLKYGTQYVDKGMAHYEAKYRETKLQYLRSQAAKLGMVLIPNQGALTAAP

SEQ ID NO: 187383 - protein, 335 aa, unidentified
MNYIGLDVHYRTSSICILDKNGKKIKQQTIRGGWSKLIEQLQHAPRPFAICFEASCGYGHLYDRLSKVARRVVMAHPGKLRLIFRSARKNDRVDAEKLAKLLYLDEVPAAHVPSMNVREWRELIEFRRRRVDKQTACKNQIRSLIRSHGMKAPRGLWTKNGLAWLAEQQWPSISSEVRCEMLLDDYETNVARIKKVTRLLDAIGDKHPGVLLLRTIPGVGARTAETVMAYIDDPQRFARSSQAACYFGLIPRQDASAGINRLGRITKQGPSTARKYLVEAAWQAVRRSPTIRARYDRILKDQPRRRKIALVAVARWLVACMQAMLTTGEVWRESA

SEQ ID NO: 187384 - protein, 346 aa, unidentified
MSYSTTVGVDLAKNVIQISVVSSRGKELSNRSLTRKKFAEFLGKQKPSRVAFESCASAHYWARVAQRHGHEARIIPAKAVAPFRQGHKTDSNDALAVAEAARRPNIKEAPMKTVEQQGLQAIHRSRELLNQESTALSNHLRGLLMEFGIVIPKGFASLLKAVPEILEDGENELPDLYRPTLHRMYTRLLELREDIAVMTREVERLVKAHPTCSKLMALEGIGPIGALLLYATMGSGSAFSGSREFAAYLGLAPKQYSSGGKTNIVGLNKKIGNSRLRSVLILGARAYTYKLKEPKSLKDKWLKANIERNGECRAAIALANKNVRTAWAMVTQGTEYQRRVQLEMAA

SEQ ID NO: 187385 - protein, 371 aa, unidentified
MGKDSTTKFIGLDVHSKTISVAIADEGRKGEVRHYGTIENTTEAIEKVIKSLTTSGAELRFIYEAGPCGFALYRYLTGNGFKCIVTAPAMIPKRKSVRIKNDRRDALTLARLYRAGELTGIYVPDPEDEAIRDLTRARNDARLAERKAKQRVISFLLRHNFVYPGKKPWTKTYFVWLAKVSLKHPAQKISLQEYIDAVHESTERVKRLNEQISLAVEEWRMAPVVKALQSLRGVSLITAAITVAELGDIARFQHPKELMAYLGLVPSEHSSGESIKRGHITKTGNSHARRVLVESAWTYKHHARVTSYLIKRQRDLPKSICQISWKAQLRLCARYRRMMARKKPMQVVVVAIAREIAAFMWAIAKEVEATA

SEQ ID NO: 187386 - protein, 469 aa, unidentified
MIVFPLRTILRLLGNESKVHLFQAILFQEMLPTRVKSHLTRFLRHFPTMTKDILVLADWLTSVGCTHVAMESTGVYWRPIWNLLEGLFELLLVNAQHMKTVPGRKTDIKDAEWIADLLQHGLLRASFVPPAPQRHLRELTRYRSTLLAERARLVNRLHKVLEDTNLKLTAVVTNIMGLSARDMLNALLQGETKPEVLAKLARGKLRKKREDLEQALVGRVDDHHRFLLTSLLTHIDFLDEQVGDCNGKIEQFLSAPSDQKAEQVSCASDDQPQEQAPVSSTLVGTEAALAQDRVPEQGPKVPLSSQQAIALLDSIPGVNQRIAEIFLAEVGTDMQRFPTAGHLASWVGICPGNHQSAGKQIRGTTRKGDRWLRQALIEAAQGAMRTKDTYLSAQGRRLTHRRGKKRAVVAVAHSILIIAYHVLQRQQPYQDLGSNYFDERERSAIARQSVHRLEQLGFKVTLEAAGEAA

SEQ ID NO: 187387 - protein, 392 aa, unidentified
MFYVGIDIAKKNHEASIINSNGELLDKSFSFSNSQAGCAKLVALLEKFEADTSNVVIGMEATGHYWVSLYSYLIDLGFTVNVINPIQSDAFRKMYIRQTKNDSKDSFIIAQIMRFGQFSSTSLADEDIMALRQLSRYRLALVDECSDWKRKCIAILDQVFPEYSKIFSDTFGVTSRELLSKYPTPEDMLYVDTDTLIELLAEASKGRFGVSKASEIQESAANTFGVSFAKDAFAFQIKQIIAQINFIEEQLKELETKISELLHQINQVITTITGIGDVLGAIIIGEIGDISRFETASKLVAYAGLDVAVKQSGDFVGTQTKISKRGSPYLRRAIWLAATVAAFKDPALSLYYQSLKSRGKHHLTAIGAVARKMCNIIFAVLRDNKPYVPDIK

SEQ ID NO: 187388 - protein, 414 aa, unidentified
MFAVGVDVSNGRSMVAVLGARRSVVVQPHEVPHTADGFAELAARLHALDGEVRIVMEHTGRYYESFAMSMYRAGFFVSAVNPLAIKGYQEGISVRKVKTDKADALKIAQFAIDKWEILPHYTPMDTIRYDLKTLHRQFQLSSKTKTALNNNLIALLEQSYPGANRYFDSPVRPDGSQKWVDFVDTFWHVDCVARVSRKAFVERYQKWCKRHGYNFSEAKAVEIHEDARQRFPLVPKSDTCKLMVREAVAQLNAVSRTVETYRAEMDRLASQLPEYETVMAMTGVGKSMGPQLIAEIGDLRRFAHQKSLVGFAGTDPIKDDSGDKVSDSKPSSKRGSPYLRRTLFVIMTILLQLQPPDDSVYQFLDKKRSEGKPYYVYMTAGMTKFLRIYYGKVRDCLKEKGLWEQPNVDEVNPV

SEQ ID NO: 187389 - protein, 325 aa, unidentified
MYVGLDLHKNYSEFAVMDVTGNILRQGRIENDLVKMRAFSESIPAESSLVIESSSTWYWAHRLLSERHHVTLSNPIKNKAIASAKVKTDKIDSVMLATLLRGGFVAECYVPSNETIDIRELVRFRANLVRERTKMKNQIHAYLLQNNISIAASPFSNGFVEELRKIENPRVQAYLRLVESLNGEIREASITIREKATSNEDAVLLMSIPGISFFSALLIAGEIGEIGRFEGSSSLVGYSGLAPSTHSSGGKTYHGPIMKSGSRYLRWVMGQCARAHMRAEPDGTVAAFYARIRRKKGDQKAIVAASAKLLKIVFWVLKEKRAYHS

SEQ ID NO: 187390 - protein, 405 aa, unidentified
MFEIEDVGVFLGLDVGKSAHHGHGLTPAGKKVFDKPLPNSEPRLRAVFDKLREKFGTVLVIVDQPASIGALPLTVARDAGCQVAYLPGLAMRRIADLYPGEAKTDAKDAAVIADAARTMPHTLRSLELTDEITAELTVLVGFDQDLAAEATRTSNRIRGLLTQFHPSLERVLGPRLDHQAVTWLLERYGSPSALRKAGRRRLVELIRPKAPRMAQRLIDDVFDALDEQTVVVPGTGTLDIVIPSLAASLAAVHTQRRAMEAQINALLEAHPLSPVLTSMPGVGVRTAAVLLVTVGDGTSFPTAAHLASYAGLAPTTKSSGTSIHSEHAPRGGNRQLKRAMFLSAFACMNADPASRTYYDRQRARGKTHTQALLRLARQRISVLFAMLRDGTFYESRTPKDVELAA

SEQ ID NO: 187391 - protein, 278 aa, unidentified
MSRQQAKETYRVYCGIDVAKKTSVVAALPTTDDVIHPFDITNDEKGIKKIRKTLERGGIKPADILVVLEPTGTYYLPIATLLYRAGYDVVVINSLTARRHIQAMLEQNKTDKIDAMRLAEIAGYIRGQLNLWQEPPQIYEELRQRLSLRDELVNVRVKQLNRHHAVQSRPKLSDLDDERKEIIAYIDDKAKSLEKEMKKILWAHPEWGKTARYLHSIPGFGVYTVVSLIVYTLNFTMVDSAEQLASFVGVVPRKYESGQTSYTRLYPFSRRKRVDKLS

SEQ ID NO: 187392 - protein, 340 aa, unidentified
MDITTLGIDLAKSVFQLHGIDTNGVVVLQKKLRRGAVLNFLSKLEPCLIGMEACATSHHWAREIAALGHDVRLIPPAYVKPYVKRQKNDAADAEAICEAVTRPNMRFVPVKTEEQQGVLVLHRSRDLLMRQRTMILNAIRAHFAEFGIIAAQGPRKVAELVGGLADEGDLGLPETARSALQALAAQLNGLEQEVRKIERQLLAWHRQNAASQRLETIPGVGLITATALAASVPDPTAFKSGRQFAAYLGLVPRQNSSGGKDRLGHISKMGNRYLRRLLVVGATSVTRRAPTTDTRTGAWVRSLLERKPTRVVTVAIANKTARTAWALLAKGESYKATPAT

SEQ ID NO: 187393 - protein, 395 aa, unidentified
MYPLSIRVAVDIGSTCHRVAVGLPDGKLLDEFDISHNAGGFKEFFHHIERLEKRHQLPVAVAMEGYNGWARPLDGQILRHGYRLYSVNNLKLARYKEIFPAPAKTDAIDARRILELFRLSEHLPLAKNALHEVAPTPVENDQLKRTTRRRKQLVWERVRVINRLQSDLHAVCPGLMAITGEADNIWFLNFLTCRDKLTKLANLRRSSLLAIPGVGKTYAAQIQAWQAQAQFATDVEWVGEMILQDAHRILALGKDIKALDLKIAGIAAQSKLAQTIGSIPGFGKTSMAEIAGEVGTLERFKSETGLAMYMGMSALDNSSGKKNGVKTPRHVNTRAKAAMMVAVARHIAYVPMSRAYYDKKRAEGKQHNQAIRALGRHLVRVIWSMVKQGRKYEVR

SEQ ID NO: 187394 - protein, 373 aa, unidentified
MPKYSTAFGMDVHLRSTTVCALDADTGEAVTRRFPGNPWGEIAGWMDGFPGPSLAAYESGYLGFAPQRELAGLGVECVVAAVSKIPRSAADSASKNDRNDAARMAKAILAHDISPVWVPSPEVEGIRDLAGAYDGATARLATAKQRLLAFLAKRGFVYGGTTPAGNPRKYWTYDFLRWLDKVRPEDDGGVRTLAALRNEVEAAAEARADLLSEYRAAVDASPIAAEVAALQSIKGCAFALAAAFSAEVGDFTRFRFGRQVTAYFGLAPSQRSSGDSVRLGGISGAGNALVRKLAVEGSWCYAAARHQPKLMPRDTGVPLEIRMHGRKGSERLLRRREEMLARGMPAAKANAATAAELVRWLWALGMMCREGAE

SEQ ID NO: 187395 - protein, 347 aa, unidentified
MKHYAGIDVSLNSSSVCVVDEIGKIVREVKVASEPVALIHCIKSLGVRVERIGLEAGPLSQWLYGALRESGLPVELLETRHVKAALSAMPVKTDRNDARGLAQLMRLGWFRPVHCKSMAAQEVRALLTARKLVQSKLYDIEMSLRGILRGFGLKVGPTTSRSFAARINHLAAGHPSLEMVAEALLSTHAAALCAFKNLEKTVRQISRADARVRLLMSTPGVGPVVALTYVSAIDDPKRFTSSKPVGAHFGLTPKKYQSGETDISGRISKIGDSSVRAVLYEAAHIILTRPIHGGALKSWAMRLAKRAGMKKAKVALARKLAVVLHRMWVSASTFDFEKANGCTRAAA

SEQ ID NO: 187396 - protein, 417 aa, unidentified
MRIVRPICCGADIHKDLIVATIATTNQDGITEYIQSSFSSQNFDLNRLKAWLKEHHCIEFAMESTGKYWIPVFNVLEDEIKVFVVHPKYTKAIKGKKIDKKDSKWIADLFKHDFLKFSFIPPKEIRELRELSRYRIKLIAMRSSERNRYQNSMTISNIGLASILSDPFGKSSRAVMKEVIRSSSVTEERISKLLERNAKKKVKEVLQSLEGSHIESDQRLKMNIASLHMDQIDSHVKRLETEMAIRCIPYATLINLLLDIPGISYLSAMTIIAEIGTDMSVFETGKQLSCWAGLAPANNESANKKKSVRISKAGSYLKSLLVQCALAAINSKSNPYYRIKYNRIKKRRGHKKAIIAIARMILVNIYHILSTGEAYNPCDMEQIINPKPVKKVMTIQNAIEFLQSQGFDTSKLILSSS

SEQ ID NO: 187397 - protein, 390 aa, unidentified
MFTDSAGKRQKEIRTFGTMTADILSFSDWLASAGCTHLAMESTGVYWKPIYNLLEGLFELLVVNAQHIKMLPGRKTDVRDAEWIADLLQHGLLRASFIPSSNQRELRDLTRHRSTLVSERARIVNRLQKVLEDTNIKLASVASDITGVSARKMLQALIDGERDAAALAAMAKGRMRSKQVLLEQALNGRMREHHAFLIAEHLNHIDYLDESITRFTTEINQRLMNEMQEIELLDTIPGVSARTAEILLAEIGTDMTRFPSAKHLSSWAGMCPGNNESAGKRKTGKTRKGSKWLRQVLTEAAHGAAATKNTYLGALYRRLAPRRGTRKALVAVGHAILVIVYHVLKRGEPYQDLGANYFDERDQQNVRRRLVRRLEQLGYQVNLAAIAEVS

SEQ ID NO: 187398 - protein, 327 aa, unidentified
MYVCILDGTGQVLVHRNVPSAPTALLEIVAPYRTDLVVAAECMFTWYWLADVCAAEGLTFVLGHALAIKAIHGGKAKNDKIDSHKIAVLLRGGMLPQAYVYPAAMRSTRDLLRRRLHLVRKRGELLAHIQNTRAQYNVPAFEKRLAYPGNRDGVVAHFPDPSVHKSIEVDVAVIDHDDALVNDLELTIVREAKRHDGDAFHRLRSVPGIGKVLGLTILYEIHDITRVDRVQDFASYARLIKCAKESGGKKMGTSGAKMGNVHLKWAFSEAAVLFLRHTTEGKRILARLEKQHGKGKALSILAHKIGRAVYDMLSRGTVFSMKKCLAA

SEQ ID NO: 187399 - protein, 473 aa, unidentified
MIKSVGIDLAGIGEHKVRCLDERAQLCDGFSFETTTAGLEKLEERIFSDGSNPIIIFEPTGLAWLPVAVYLKARHPDSRLVRVQAQKVVALRKYLNRSSKSDKIDSLTLAKMPFIDPEKLEEIYFPPGKIYAIQRLARQRKRLENEIAGRKRRIGAIVDGHFPGIRSAFSDPWSAHARAFLRSRLNPLAVVRAGEKALHTFLTKTRKHCKVDAFVESHGVYLTCREVATLYKASSSVGTIDADFFSALQDEVSRELRLMEMEEAESAAIAKRLEHLYLEVHPSDNLRTIPGVGDITAPIFLATVGDPARFRSQSAFANYCGVVPGANQSSDMEAKGLRMTKAGPAIMRWALFQAGGIGRAHDPQLACIYYREMVHNGKTHMQAMGAVMSHMSARILAVLREDKPYDLRDMDGRPVTREEARRIILLKYQVPEEIRRERRHRKTPGNYKLQKTLREMLVPRTYEAAEAPQPVVI

SEQ ID NO: 187400 - protein, 348 aa, unidentified
MTEQVMAGIDLHSNNLVIGIVNQDGQRLKHQKLDCDLKQVDDFLAPFKPRLKSVAVESTYNWYWLVDGLRARSYPVKLANPAQIDQSSGIKHADDKNDAFFLAELQRLNILPTGHIYDPQLRPVRDLLRRRMSLVHQRTALMLSFKSLYARTTGQTMSLSRLKDMEITEAKTLYEHPANCLIAKIQKEHIEKLDQSIETIEKAVLKCAGELPCYEKLKTLPGIGRILGMAITMETGQINRFKTPGDFASYCRTVDSRRMSNGKKKGDNNQKCGNKYLAWAFVEAANFAKRYDEHCRKWFDRKAAKTSTVIATKALACKLAKAAWHVMSQTTDYDSKRMFPELAMKNEK

SEQ ID NO: 187401 - protein, 340 aa, unidentified
MNIKRIGLDLAKNVFQIHAVDYREHVVLRKTLRRDRMAAFFTQLSPCLIGIEACGSAHYWARELTRMGHTVRIIPPRLVKPYLKGQKNDANDAEAICEAVSRPGMRFVAIRTERQQTLQAEHRVRARLIRARTALSNEIRGLLGEFGVVLPAGIAQLRKALPEIVSQQVQWDECFIRLLCELSEELQGLDERVARHDRRLQQSARDDIRIKRLLAIEGMGPVVASALVAAVGDGRQFRSGREMAAYLGLVPRQHSSGGKARLGHISKRGDRYVRTLLIHGARAVLNACQNKTDRRSQWLQGVSERRNRNIATVALANKNARIAWALLSREEDYHGIQVTG

SEQ ID NO: 187402 - protein, 356 aa, unidentified
MRHDVKMADAMRVTVGLDISDTYSSLCFVDGDGQVLEEGRVRTTKAGLTRRFSTARCRVVLEVGTHSPWVSRLLAELGHEVIVANPRKVRLIAESDRKHDRADAEQLARLGRLDPQLLAPIQHRGISAQEDLAIIRSRDSLVATRTTLINHARGVVKAHGDRLPPCSTKAFHRRVVTAIPDGLKLSLLPHIELIAHLTAEIERADTVIAARIAERYREARALQQVSGVGPITALTFVLTLEDPARFRQSRQVGAYLGLTPRQRDSGASAPQLRISKAGDAHVRRLLIACAHYILGPFGPDTDLRRWGMRHGAGAKGNARKRAVVGVARKLAVLLHRLWSTGEVYEPLRAAPQGASA

SEQ ID NO: 187403 - protein, 330 aa, unidentified
MKNYVDVIGIDVSKLTIDAHIYKMSSHRLFMNNTKGFVKLLSWAKKELGLVSFFYCFENTGNYSLKLSVFLADRAIAYVEENALTIKRSAGIVRGKTDKLDAAMIARYAWLHREELKPSSVKSKELQELGRLLAFRDQLVGDRTGMKNSLKELQSLLRSPSTDICCKSIQRSIDYVSKQILVLENRMKYLMKSEISLDKNFWLLNTIRGVGLILSCQLLYHTSNFKRFGSWRQFSSYCGTAPFEYSSGTSIKRRNKCHKLGDRKMKTLLSLASVSAIQHDSELRLYYKRKISEGKPKLVALNNVRNKLLSRVFAVIKRGTPYVELQQFAA

SEQ ID NO: 187404 - protein, 403 aa, unidentified
MNMNAVGIDVSKGKSMVAILRPYGEIVSSPFEIKHTSGSIQSLIGHIKSIDGESRIVMEHTGRYYEPLARELSLAGLFVTAVNPKLIKDFGDNSLRKVKSDKADAVKIAHYTLDSWTELKQYSLMDEIRNQLKTMNRQFGFYMKHKTAMKNNLIGILDQTYPGVNTYFDSPAREDGSQKWVDFAAAYWHVDCVRKMSLNAFVDHYQKWCKRKKYNFSRDKAEEIYGAARELVPVLPKDDLTKLIVKQAIEQLNTASKTVEELRTLMNETAAKLPEYPVVMGMKGVGPSLGPQLMAEIGDVTRFSHKGAITAFAGVDPGVNESGTYEQKSVPTSKRGSSSLRKTLFQVMDCLVKTKPQDDPVYAFIDKKRAQGKPYYVYMTAGANKFLRIYYGRVKEYLMSLPE

SEQ ID NO: 187405 - protein, 420 aa, unidentified
MDKYDDNRLEEFRQLKGEIRGSTQHLVIGMDIAKERHHAFFGTPAGKVLLHRLVFDNTKEGFEKLCFQADILKTQHGLAHVVFGMEPSSDYHKPLGEYLIEQGHKVVLVAGTAVKKNRELLDGRWDKNHTKDAANVADLITQGKCLFYEFPSLSLRELRSLLSLKRRLKKLEQGYKVRIRNHLIAQYFPEMDAYFNYAEGPDLVRCLDPKRLAGLQFQELVRMVHPGNEKQEERLGEIHAKAVSSIGCETHPSVAFEASTLLDGLKGLHVMIRETDRKIAEVCRAFPEYACLLSIPGLGPDVSAKVLGALGNPHRFENHRQVLKMAGLDLSADRSGKKQDVVPVISKKGKADLRYGLYQAALVASTGNKQFMTYFANKLKGREREKGIGTKMRVKLSAKMLVIAWTLMKKKEMFDPGCIE

SEQ ID NO: 187406 - protein, 329 aa, unidentified
METMYIGVDLHSASFQACAVMPDGTRVWEERFPRTDAGVAAFQARCPADSAIAVEATTPTWHFVDAIAPRVQRVSVVDPLRTRLKAGFAAKTDRLDARRLADALRRDSVVGVYYPPLAIRELRELCRSRHALVHTRTALIQRLRAVLLRHGIADARQRLTRRSGLAWLDTVALPPYAAASVRRLRRVVETVLEETREVDATVTHVAGGDPVVARLVTITGVGPVLGLTMRAEIGDISRFATPKHLASYAGVVPRVDASAGRAHYGRITKTGSPWLRWALVEAAMHGTRRSDHRGRWARRLAMRKGGLKARVAFARTLCDEIWGVWPRSR

SEQ ID NO: 187407 - protein, 342 aa, unidentified
MSPRPEAATYVGIDVAAETLAVAWLVPGVAAAPAETVPNTAAGWRQLAQLLRRQGAQPEGALLVMEATGSYWIGAATALHQAGWAVAVVSPASARHYARARLRRAKTDAVDALILAQYGRDLGPARWTPPPAEVQLLQLLLRQRDDLVAMRTQTTNRLHALAQWPDLPADLADPLRAVLATVEAQIAQLDERIQQRAAAAGTIAADVARLDGIAGVGWLTATLVLTELWVLGPTASPAQAVAYAGLDPAPHQSGTSVRGAGHISKAGNARLRQALYMAALSAARSNPTLRAFYQRLLGRGKLKKVALVAVARKLLVLMVTLVRQRRTFDPAWRGQRGQPPAP

SEQ ID NO: 187408 - protein, 413 aa, unidentified
MELERLIERCAGLDVHKASVTACVRIPGDADARVAHTQTFATTTRGLIGLHDWLASFNITVVGMESTSVFWKPVYYMLEDDFECWLLNARHLHNVPGRKTDVADAAWICQMVEHGLVRPSFVPPPPIRDLRNLTRYRKAQIQERTREGQRLEKVLQDAGVKLSSVASKVLGVSGRAMLEALVSGTHDPEVLADLARGVLRRKIPALQEALEGRFRAHHALMVSQMLAHIDYLDEAVETLSAEIERLIAPFSEKVQLLCTIPGVDRRSAEMILAEIGPDMQRFRTHRHLASWAAICPGNNESAGKHQSGRTRNGSKWLRSGLVQCAKAAARSKGTYLASQYARLKGRRGHGKATVAVAHSILVACYYILLRNQPYTHRGPDYLLTRDSTDAHKARLVRQLERMGHKVTLEPVAA

SEQ ID NO: 187409 - protein, 346 aa, unidentified
MPIVGGLDIHRKQITFDYLDTVTGEVRRGQIAPADREHLRAWLARFAGHGDVAFAVEGCTGWRYVTRELAAAGIAAHLGEPADTAALRGRKRHAKTDKTDSAHLRRLLAEGRLPECWIPPEHILEYRALLETYHDLRREHTAWVQRIHAVFFHQGAPPLGEGVLRTEAGLARLRAAAAAHLSAAGQQQVATALDMLAATEARMGPLRHQLRQAAAHLMGAKVLAERLYGVGPVTGLALTCWLAGAGRFSSSRKAVRFAGLDVTVSSSDRKGPPGRLSRQGPPVLRWMVYEAGKTHARASAPDHGYYATVKDRCNGKRAALSEARKILRQACHILAELGDDALAPAA

SEQ ID NO: 187410 - protein, 348 aa, unidentified
MAVTMLETRPVTGGVDTHLDIHVAAPLDANGGLLGVESFATTPEGFTTLYRWLASFGPVARVGVEGTGAYGAGLARHLRRAGIEVIEVDRPNRLLRRVAGKSDTVDAVEAARAVLSGRARGVAKTADGNVEAMRALLIAKRSGREARITCLNQLRHLGFCAPDELRERFRGVPRTQLADVAAALRPRLDSDPVSYATKLAMRALARRVLSAVEDTDHIDTVLAHLVTATAPGLLELYGVGIDTAAILLVAAGDNADRLHSEAAWAHLCGVAPLPATSGKVTQRHRLNRGGNRQANHALWRIVFTPMGSESRTRAYVTRRLDEGLSKPEIMRVLKRYVARETYRHLRPT

SEQ ID NO: 187411 - protein, 316 aa, unidentified
MEQAVLGIDVAKKKLDVALIFNDKVLVKKFDNAVKGFELLQGWLMSLHLERVHTCLEATGAYSEAVAEFLHERGHRVSVVNPLRIKGFAKSDLKRNKTDTADARTIAEFCLAKDPDPWHPLPPEIKQLQALTRRIESLQGILNSEQNRLELAAPKVRSSLKRIIRTLEKEIELVQALIKEHIDHHPNLKDQRDLLQSIPGIGEKTAAVLLGELEFAAFPSARSLAAHSGVTPAQFQSGTSVDRTRLSKLGNGRIRKALYFPAITALKYNEIVKTFAIRLTQKGKTPMQVICAAMRKLIHIAFGVIKHNRPFDPNLA

SEQ ID NO: 187412 - protein, 429 aa, unidentified
MNYNTQNAKIASITEKTLIVGIDVGSETHYARAFNWRNYEYSKKPFAFSNDEAGFSSFKDWMDDIAEKHGMKVVIPGMEPTGHYWLNLGAYLQEQGMKPVHVNPHHVKKSKELDDNNPSKNDRKDPKTIAGLVNEGRFSYPYIPTGIYAEIRNLSNLRIQTQEEITRIKNRIARWFSIYFPEIKDVYRNPDAVSGLMVIKQAPLPCDIKELGVDGVNKIWRDARLKGAGIKRATTLVTAAEHSIGNTEAPRSARKEIRNLLNDYEIYKNRMDELMEEIEKTLSEIPYIDKLMEINGIGIKTVSCVIAEVGDIGRFDNPKQVQKLAGYAIVADSSGKHNGESRISHRGRKRLRYALYEAAISVIGKNKEFKEIHSYYRTREKNPLKKMQSVIAVACKLIRIFYTILTKGVDYDGQRMLADIVRPEMQLAA

SEQ ID NO: 187413 - protein, 418 aa, unidentified
MRNAGIHANSLLEVRRMYNAVGIDVSKGKSTVAVLQPGGTVIRKPFDVSHTSQNLNELADYLSSLDGTTKIVMECTGRYHEPMIKALSEAGLFISIVNPHLIKNFGNNSLRKVKSDPADARKIARYTLDNWTELRQYSGMDNTRTQLKTLNSQFSFFMKQKVAAKANLIALLDNTYPGVNKLFDSPTREDGSEKWVAYSFWHADCVRKIGLKAFTERYMSFCKKHHYIFQQDKPEKLFNASKELVAVFPKEKTYKLLIQQSIQQLNLASEHVERLRREMNELASTLPEYSTVMGIYGVGKTYGPQLIAEIGDVSRFTHREALTAFAGVDPGVDESGQHKSKSNRASKVGSARLRKTLFQIMTTLLQNAPEADPVYRFLDKKRSQGKPYYVYMTAGANKFLRIYYGKVKECLRNLEQTE

SEQ ID NO: 187414 - protein, 344 aa, unidentified
MTYYAGFDVSLRTVNICIIDEQGEYVTETKLASDVQDIVAYLDELDLDIESLALEAGTLTQYLTYGLQSAGFEVICMEARQVKGALSAMRNKTDKHDARGIAQILRSGWYSQVHVKSIASHHIRMLLSSRRAVLSKCVDLENEVRGLFKIFGIKLPPKLGHGVFDITVRDIIEADEALSHALLPLLEARLALYWSFRELDNRTRKMANKDSVCQRLMTVPGVGYITALTFKAGVDDPTRFKHSRTVGAHFGLTPRRCQSGEIDIDGHISRAGDPDVRSALYTAANAMLTRSSRWSSLKAWGMHIAKTRGHRRAVIAVARKLAVVLHRMWIDDTQFRWGTEGARS

SEQ ID NO: 187415 - protein, 341 aa, unidentified
MKHEMHVLGIDIAKRVFHAVGMDDRGNIVYRKRLSRHDLIPCIAKLPPVRIGIEACGGAHYWARRFRAHGHEVKLMAPQFVKPYVKSNKNDSRDAEAIAEAVTRPTMRFVPIKDVDQQDLQALHRVRERLIGARTALVNEVHGLLHEYGIVIPKGVAKFRQAVVGKLESEKDKLTPLSQELFWKLVDEFALLEKQLAYYQEKLDTVATTHPECQRLMTIPGIGPLTATALVAAISDASAFKNGRQFAAWLGLVPRQHTTGGKERLLGISKRGDTYLRKLLVHGARATIRWVGRKTDRRSQWVRQLLERRGKNRTAVAVANKNARIVWALLTSHQDYQPATS

SEQ ID NO: 187416 - protein, 329 aa, unidentified
MKDQSKEPVVALGIDLAKRSFHLYGVDVSGKPALDKKLSRARLSPFMANLPACTVAMEACSSAHHWARLFRTYGHEVRLIAPQFVKPFVKSNKNDAADAEAICEAAQRPTMRFVTVKTVEQQDIQAIHPMRSLVVERRTAQVNPIRGLLLESGSEMLQGRAAVGRCVSEILEDATNGLSERFRAELQGLAGELRHLDTRVAHYDDQIEQNDALARCLPTIPGLGAKGATALVAAVGEDPTQFQNGRGLAAWLGRVPRQHSTGGRDCLLGISKREDVYIRQLLIHGARSVLRWVERKDDPTSRWAIALKARRHSNVAIVQQFSFWNVINP

SEQ ID NO: 187417 - protein, 337 aa, unidentified
MKYCAIDLHSNNSVVIVSDEEDRIVFHKRLPNDLRQIAGAVEPYREELVGVVIESTYNWYWLVDGLMDAGYRVHLANTTAIKKYEGLKYSGDFADAAYLAQLLRLGLLPEGYIYPREQRGARDLARKRLQLVRYRTAQILSIENTLARQTGARLSGEAVKRLTAEQVEALGFVPDVTLALESNRAVSQVLQQRIEELEQRLKERVSLRSEYRLLKTTPGIGEVLATTIMLETGTVTRFAQVGNFSSYCRCVDSRRESNGKKKGAGNAKNGNKYLAWAFVEAANFALRCCPEAKRFYERKKRKTNSIVAIKALAHKLARACYHMLREQKPFDVSRCFA

SEQ ID NO: 187418 - protein, 338 aa, unidentified
MMCYAGIDLHATNSVLVVIDEADRVLYQKRLRNDLAVIFTALTPYQTTLQGVVVESTYNWYWLVDGLMEAGYRVHLAHAPALPQYSGLKHVDDQHDAQWLAHLLRLGLLPTGYIYPKAERAVRDLLRKRSQLVRHKTMVVLSLQSLLTRLTGNRLSLPRLRQLTPEGIQALVPFPEHVQSVSSSLAVLQCLEHEIHTIEGTVREAGRTQPGYVLLQTVPGIGPILAGTILLEAGDLRRFATVGHFASYCRCVGSEHVSNGKRKGAGNTKNGNKYLSWAFIEAAHFAIRYEAVIRTYYQRKQARTHPLVALKAVAHKLARACYHMLRAQVPFDLSRAFG

SEQ ID NO: 187419 - protein, 413 aa, unidentified
MLKVHYERCAGLDVHKKTVVACVQTPGDGPEPQQETRSFSTMTVSLEQLRDWLAQHGCTHVAMEATGVYWKPVYNVLEEHFTLLVVNAEHLHAVPGRKTDVKDAEWIATLLRHGMLKGSFIPDQDQRELRELTRYRTAKIRDRASEVNRLQKTLEGANIKLAAVLTDVMGVSGQRILEALVAVEGDADPEALADLAHWRLKKKREELEQALVGRLSATLRFVVRQQLAQIRAFDQQIAACDHEIAEAMRPFVVELTRLKTIPGVGDRTAQTLMAEIGTNMSRFPTARHLAAWAGVAPGNRQSGGTRYRARTRRGSPWLRAACAEAGWAGGRCHEGYIPALYHRLAARRGRKRAVVAVGHHIIVAVYHMLSKAVDYVDLGGNYFDERRRESVERNAVKRLEGLGYTVHLEPSVA

SEQ ID NO: 187420 - protein, 472 aa, unidentified
MASQAQRAQSELQVIPMLALETLYLGVDIGKATHVAGFVSPTLLTRHQRFESCPAFSFTNSREGFRALVDRISTYVPLTQVYVVLEVTGHYHRALLHYLQELDIPVYVLHVQKRQAGLLKTDKRDALGLANLLLNQLEKGVQVGDPMQAVRRLVPPTPAAAQLRGMVHHRYELTVESTRRKNKLTAICDEVFPEFVQVCKNPNLPTALAIRTHFPTPAALATASLAALQERRGSARSLSDAKLLELQRLAAQSIGTKEAGRLRGLVVEQSQLIEELTLIQQHLEQLETELRQVVTTCREGQILTSIPGIGPIQAATIIANFERAAQLKSYCGWAPMLSQSGTTLDRARLSSRGARLLKHIMYLVAWQAVRLKDCEWARIYERLLLIKCRYDERTRRYSGRGKLIGRIAGQIISVAYALLKKDQELLSSLFPGTTPPGPTLYDPQVHRRHREGHYRATHSREKVQKLIQFPLH

SEQ ID NO: 187421 - protein, 460 aa, unidentified
MKKKAQKRSHKKEKINASMPVLRPDAAGIDIGHREHGCAVPADRGQQPVRAFGTFTQDLAEMARWLKECGIKTVAMESTGVYWIPAFQILERHGFEVCLVNARHVKNVSGRKTDIQDCPWLQRLHSFGLLNASFRPPDHICVLRSYLRYRDDLVGLRSMQSQHMQKALQQMNVQLHQVLSDVTGLSGTRIIEAILQGERDPIKLAGLADKRVRASKAALQKALVGDYRPEHLFMLQTAFDLYQIYDQKIHLCDEQALAQMAQLPTQEGQPLPERKACRKPIHDMVAGKDLRAELHRWGGVDLTTIEGFGVQTAQVILGEIGPDVSRWPSEKQFASWLGLCPDHRISGGQVLSRHPRRVVNKVSNALRQAAVTLQKSQTALGAFYRRMRGKLGAAAGVTATAHKLARLVYRLLKHGELYVQQGLEEYERKYRERAVRHLKKAAASMGLEVVEKQPLASGVS

SEQ ID NO: 187422 - protein, 318 aa, unidentified
MSKRSTAHAGIDTGKDYLDAALRKRGDDLRVKNTPEGHRALSTWLRNHRVKRVGIEASGGYEMDVVAHLRRDGFTVVVFQPAQVRHYAKFHLQLAKNDKIDARLIAACTAAREDEDIHDPPDERLAPLAAHLTWIDQIGEDVARHKTRLETCRDARGQAHGKQEIARYQKLQKAQITLLEQEIRRHEDLARRLDLIESVNGIGIKTALLILVRIPEIGRLSREQVAALVGFAPYDDDSGSRHGERHISGGRKRVRAGVFAAALPASLRHNPLLKALYQRLRAAGKAHKVALVACARKLIIFVNTVVARGTPWQPQGAF

SEQ ID NO: 187423 - protein, 416 aa, unidentified
MLRVYRRCCGMDVHKETVVVCVLPPDGEEGEIVRKVFGSFRNELARMRGWFKQLKITHVAMESTGVYWMPVWNVLDGHGFELKLVNPGQVKALQGRKSDQRDAKRIAEFLQDERLDGSFVPPREIRELRQMLRHRQSILEARNEVHNQIRDLLETANFKLSSVATDLMGLTGRNILRALADGLDSPERLSWKARGSLRHKEAKIKEAMKGQASEFFRWMLKSHLEHYDFLTNLIATLERQIEGYMAPYEEHILRLITMTGVDRLVAWNLIAELGVDMSVFPTAAHCASWAGLAPGTHESAGKQKTGRTKRGNRTLRRILTQSAWANTRCKYGYLKVFFLRIRARCGWSKAIVATAHKILVIAYGILKNHQPYQDLGGDYYDRLNPDKTIRRIQNRLAKLGYQATLTLLPAPTMRST

SEQ ID NO: 187424 - protein, 423 aa, unidentified
MKRTYPICCGVDVHKTFLVATIITSEYVMPHYHQKRFSTFYNGLVAFKKWLLEYDCKDVCMESTGKYWVPIWNVLEDSCHVVIANPKWVSAVKGNKDDKKDSKWIGDMFRMDLVPSSYIPSKDIRILREFTRYRSKLVSMRSSEKNRFQNAFTVCNLTLDAVVSDMFGKSATDIENYLLDTDAVDPEHCVSLLRCSLKKKASDVVEAVSGFNMTPEQKERGRIVQEHFADIDHRIAQLDEIIGDLVAEYEGQISLLCTIPGIDRRTAITILSEIGTDMSQFGSSKRLCNWAGLAPASNQSAGKKKSVRISRAGVYLKPALVEAAHAAVKSTEKQPYYRIKFERLMKRRGKKRATIAIARMILTAIYAMLSTGEVFNPSDLKKFDMPEDLKRKQTLSSAKEAIKLLVSLGLVTAGSISLDALAG

SEQ ID NO: 187425 - protein, 419 aa, unidentified
MSFKIFKFNCCGLDVHKTWIYACIGITDSNNRTEYKQARFSSFTKGLNELCDWLAKYNCKDVCMESTGKYWIPVFNILEQHSFWVTLSHPKYTKPMKGNKTDRKDAKWICDLYMCGMVKPSFIPPADIRELRDLVRYRFKLTCMITGEKNRAQNCLTVSNLKLDDVFSDVFGKSSRSITEHILQHPGEKFDIAPFVDSRCKTPITEIQAAVDGAISKEQVVKLRQCLDHIDELNKHISEVEQEILRLSDKYEAALNLIRTVPGFNKNPLTAIQVLSEIGGDMSVFPTAKHLVSWAGCCPRNDQSNQKIKSTRISRAGSYFKPVLVQVANALIKSKKHLEFTTRYKRIKARRGHKKAIIAICRMILTAIWHILSDLKPYTPEGFLESRPVKEGKVLSTSQALNLLKQRGYIIKGEPLAVS

SEQ ID NO: 187426 - protein, 373 aa, unidentified
MPRYSTAFGMDVHLRSTTVCALDAETGEAVTRRFRGNPWGEVAEWMSGFPGPSLAAYESGYLGFAPQRELSGLGVDCVVAAVSKVPRSAADLSSKNDRNDAARMAKAILSHDVTPVWVPSPEIEGLRDLAAVHDAATARLAAAKQRLLAFLARRGYAYGGTTPAGNPRRYWTYGFLRWLDGIHPADDGGIRALAALRNEVEAAGETREALLAEYRAAVAAGPLSAEVEALQSIKGCGFALAAAFASEVGDFSRFRSGRQVTAYFGLAPKQRSSADSVRLGGISGAGNALVRKLAVEGSWCYAQAGHQPKLMPKGSGVPLEIRMHGRKGSERLLRRREEMLERGMPQAKANAATAAELVRWLWALGTMCREAGE

SEQ ID NO: 187427 - protein, 319 aa, unidentified
MTTSSVVVGVDVAKDRLDVAMRPSGETWSEANDEAGITALVARLRPLGPALIVCEATGGFERAAIAALAAAGLPVVVANPRQVRDFARATGQLAKTDQLDAGILALFAERVRPTPRPLPDAAAQLLDAVLTRRRQLLEMLVAEKNRLGFAPKPLHRGIQAHVRWLERQLDDVTKELAGLIEASPVWRAKDDLLQSVPGVGPIVSSTLLGELPELGTLSHKQIAALVGVAPLARDSGTLRGKRLVWGGRASVRTALFMAAMCGRRWNPALKRFYDRLKAAGKPTKVALIACARKLLTILNAMVRDNKRWAVPAPSVQYSC

SEQ ID NO: 187428 - protein, 411 aa, unidentified
MGQARKVWHLRRFPHQPTRFSMSQPNDTKKSVTPLEQDNTMIAVIEMGQASWLVAGIVPGLERQPLKKLGSGEQALFQLLQRWRNEAVHAGRTIRRLVVAYEAGRDGFWLARWLRARDIEAYVIHPNSVAVSREHRRAKTDRLDTELLKRAFLGWLRGEAGHCSMAAIPTIEEEDARRPNRERENLVGERTRIMNRMKSTLARFGIRSFKFTLRHADEWLNDLRTAEAASLPANTHAELRRDIARLRVVREQIREIEQQRLQRIEQAAPSEKGPHAMVRLLARVIGIGVETADMLVNEILSRQLRDRKWVARYAGLTGSPDESGKRRRDKGLSRAGNARVRRGMIQLAWRFLMFQKNSALAQWYRARTADGRGGARKTMIVALARKLLIALWRMVTTGEIPEGVSLRPAVA

SEQ ID NO: 187429 - protein, 337 aa, unidentified
MAKRSVKSQYVGIDVSARTLQVAIGGPDGVRDLEFSNDAEGHKKLCKVLTKKGVSVRVCLEATGNYSLDVAIALTATEGVEVMIVNPRSARHFADAQFRRAKTDRVDARALLDYAQRMDFIVWQRPSQERMHLRQYARRIASLIEDTTAEKNRLVASKATGETPRLVLSDIEKGIQQLESRVGELEAAALELIDSAPDLKRLMGFATSIKGIAERSAIRILGELLLLPTDMSPRELVAHAGLDPRPRQSGAKDAKRQISRLGNTRLRAALFLPALVAARYEPAVREVYERLVARNKLKMVATVAIMRRLLVALWVMILREQPFDPAKFGPKAVLVTE

SEQ ID NO: 187430 - protein, 456 aa, unidentified
MEKYYLGIDVSKGYADFVILDGKKHRVEENFQLDDTFDGHCRLYEILCRFCEDHPKSTIYAAVESTGGYEDNWLNSLVTFQGTLNLRSARLNPLGVNANSKADLKRNVTDKISAQNVAEYMIAHPEKISYHQQDHMASLRKQWGFIKMLTKQSTQLFNQLEPLLYTASPELLGYCKDGVPGWLLKLLTRYPTASDLSMARVASVARIPHISFARAQELVVSAKKSVASTTDKVTGQLIVATVKQIIHLKQIITSQIQMMAKQCSVPEVGLLKTFNGVNDFSAIGLMLEIQTVERFLSVKKLASFFGLHPVYKISGDGIGGFHMSKKGRKEPRQILFMVTLTAIRSNPLIRSIYLERIQKGMEKMAAIGLCMHKILRIIYGMLKHNRAFDPEIDCKNREKMSHCRTRVHKDKYRRYQDFDSKAPISRRQNIKRKERRRSHSDNDTKNGIIAPVPIST

SEQ ID NO: 187431 - protein, 359 aa, unidentified
MGHEPTFVGLDVHARSVVACGIDGDTGEVVRARLTPDHEEIWSWLAGLEGPVAVAYEAGPTGFGLARFLGQRGVRCVVAAPGKISRAPGDRVKTDARDAMLLARLLKLDDLTAVSVPSVEAEAARDLVRAREDCRGDLMSARHRLSKLLLRQGIVWSGGHAWTGAHDAWLRRQRFDQSARQLAFESAYESVAMTLARRDRLDDAIAAMAADSAFTPVVVRLGCLRGISTLTGFGLAVEIGDWHRFTGSTIGSYVGLVPSESSSGQSRSQGSITKTGNTHVRRLLVEAAWHHRRRNYAGAEMHRRWNLAPVEARQRGQDGNKRLHARWQRFDARGKRVTVANVAVARELAGWCWSLAVMD

SEQ ID NO: 187432 - protein, 351 aa, unidentified
MPHKSTVHAVTAIGIDMGKNTLHMIGLDLRGAIVLREKVSRGRIASRLANLPPCLIGIEVGMATHYVARELAALGHDVKQVPPTYAKPFRQGHKNDFRDAHAVAEAVQRPTTRFVPAKTNEQLDLQALHRVRSRLVSERTAVINQIRGFLLERGIIVRQGLRFLRQQLPDILAKRTDVLSPRMVRIVADLAGDWRQLDERIETVTNEIETLAKSDDNCRRVMTVPGIGPIISSAMVAAIGSGAAFARGRDYSAWLGLVPKQMSTGDRTILGRISKRGNGYLRTLFMQAARVILLRPANWPKHGFGAWLIRAAQRLHPNVLAAALANKLARIAWTVLAQERSYEARVTKAAA

SEQ ID NO: 187433 - protein, 461 aa, unidentified
MPGRQEIESSENSRRQLQGLPLMRRNVAGIDLGSERHWVCAPTREGNGREIASFGATTPELMRMAEWLKARQVESVAMESTGVYWIAPHEVLEAQGLAVLLVDTRQLARVPGRDNKSDPTDCEWIQRLHSCGLLRGSFRPEEAVCMLRTLVRDKAKLVAERGDWLRRMQKSLDQMNVRVHRAVSDLDGVTGMAILRAIAGGEREAQKLAQLRDPRCNKTESEIAEQLSGHWREDHLFSLQQALKMYDAVQERIAAYEKEILRKLGEMEGDEQRGQTAPSLKNTNKAKMIKKRGQEPMRQALYRMSGVDATHIDAIGGETVEVVLSEYGPDLSRFPGEKQFVRHVTLAPHVATSGGKPVKKKKRSSSSTRVATALRMAALSLRHSRTALGAYYRRIARRLGGDVAVFAARKLATLIYRLLRWGQPYVDEGAEAYEKRYRQQRIGRLAATAKDLGYQLTPVNA

SEQ ID NO: 187434 - protein, 390 aa, unidentified
MACVRLAGPGGVQQEVRKFGATSAELLTLSEWLSECRCTHVAMEATGVYWKPVWHVLDGDFELVLGNAAHIKNVPGRKTDVNDATWIADLLAHGLIRSSFVPPRPIQELRDLTRTRKQLVREVAQHTLRIQKTLEDANVKLSSVISDVLGQSGRAILDAIVAGEDEPKALAARASSRVKASKEVLAEALQGRIRDHHRFMIRSHLRLIDAIREEVAGIDERIGEHLKPFRGAVELLTTIPGISDIAAHVLLGEIGDDMSRFPSAGHLVSWAGLCPRNDESAGRRRSTRLRAGAPWLKTVLVQAAWAASRKKDSYFKAQFHRISMRRGPKKAVVAVAASILTAAYHMLQRGVLFEDLGANHFDRRDKDKVAKRLIRRLEDLGLQVEVKAAS

SEQ ID NO: 187435 - protein, 489 aa, unidentified
MSTARKQRQGEKGSDAQRSASKRKARGSHRQQGEDNRRRSKLTITHPDAAGIDVGARVHYVAVPEGRTGMPVRSFGSYTAQLEELVHWLKDCGIKTVAMESTGVYWIPLFQKLEEAGLEVLLVDARQAKHVPGRKSDVQDCQWLQQLHSYGLLRAAFRPEDSICRLRTLQRHRKNLVECAAMWIQHMQKALNEMNLHLHHVLSDISGRSGLAILDAILAGERDPKKLASLADRRVEKSQAQIGAALTGDYRPELLFVLGQSLYNYRQMQQLMAQCDLSIEKQLAKIADCTNPSQDSELTRQSQDSVACKPRKRKPKDGLEVSLAAHLKRIVGVDLTAIPGLNLLAVLNLLSEIGANMTKWRNEKAFVSWLGLSPNNKISGQRVLSARTPKVVNRAATTLRLAVLILGKTNTPLGSFYRRKRAQLGAPKAITATARKLGCLIYRLIKNGQGYKEPDLLTYELKYKGQILNSLRKRANSFGFDLVEVPRPA

SEQ ID NO: 187436 - protein, 419 aa, unidentified
MTQKNNSKVIGVVHPICCGLDVHKESISACVIFSDKDGVDQFAVEEFGTFTDELMRLRNWLLDHECPVVAMESTGIYWRPVHNVLEGSFQIVLVNARDIKNVPGRKTDIGDSKWLAGLLRHGLLKGSFIPPQAVRQWRDLTRLRKKYVQTVGDYRKRTHKLFESANIKIDSVVSDLFGVTGRNLMRLLIKEGEPLKLSDIESCVRGKLRGKEAELFRSIQGFFTGHHRMILKMLLETITGLESQIEAFDRQIRSDMAEHRPLLDRMKKAPGISDVSSCDILAEIGPTLDTFKTDTALVSWSGLCPGNNESAGKRKSGRSHVRKHHLKTIMIEVAWAAIKKKGSYFKDKYYRLKARRGAKKAIVAIAHRILLGIYHVIKDGAEFKDLGEDYLKHRNQSRKILNLRKQAQSLGYDLVPQTK

SEQ ID NO: 187437 - protein, 405 aa, unidentified
MHFIGVDWADAEHAVWVEDEAGHCVLNRGVAQTVEEFATWGRWLDERRAAGIELWAAIEKPDGRVVDFLLDHGVVVFPVNPKTLDRARDRFRLSGAKSDPFDARVLAGFLRTDHGHLRPLQPSSEATQELKGLTRDYVRQVRQQTRLLNQVTITLKEYYPRALEVCDDLKRAWVRAFLQAYPTPASLQTLTERRWQRWARAQRLSADRATALWALLQRPQLPVPAHVVRVKSRLLAVLLEQLQVTSAAVHAYREAVEAFFAALPAAKWAASLPAGQTGTTVPVLWAELGDAPGRWQSAPHLQGQAGAVPVTARSGKSHVVMFRFACNTHLRYAIHQLAFLSLRHSEWARAYYDRCRRRGHTHHHAVRALGAKWLKIIFAMWSRHTPYSEEHHLASIARHQLRQPV

SEQ ID NO: 187438 - protein, 417 aa, unidentified
MDELRWFVGIDWARKSHCVCLLDSEGNRVREREVSHEGTALNELCVWLEQTTGASPGEIAVAIETPRGPLVELLLERGFKVFALNPKQLDRFRDRFTVAGAKDDSRDAQVLGHSLHTDRAAFRHLSVDDPLVIQLREWVGMHEDLVQERTRLANRLRSQLWRYYPQAEELTQDVTDNWFLDLWELVPTPAKAERASEKAVARILKNHRIRRLDAAQVLSVLRKPPLTVAPGTVDAATAHIRTLVARLRLINQQVKESEQRLDQFCEAIEAAAEQTPGQICEQRDVAILRSCPGLGRITIATLLAEAGEPLQRRDYHVLRTLSGVAPVTRRSGRTRIVVRRHACNNRLRTAMYHWARVAMQHDPVSTRRYKDLRHRGHTHARALRGVGDRLLQLLCTLLERQTLFDPDQRKDQALKAA

SEQ ID NO: 187439 - protein, 355 aa, unidentified
MNSLGIDVGKKKCRAALKDERGDIIREFFFSNNNEGISALIQSASHYGKCTAVVESTGNMWIRIHDTLEENGIDTILANPYKTKIIAEAKIKSDKLDARILADLLRADLVYESYVPTKEFREKRSLVRHRISLVRNRTMLENKVHSLLDKYDYKSGLADIFGKSGIIWLKTLDVSNIDRLIMNTTLAAIENINVQIDTISKELAKYGWDSYDVKILLSMTGIDVFSAMLIATEIVDVKRFCTPWKLVSYAGLAPSTRESSGKTKTGRISKQGSPWLRWILVQCAMTAVRYDQRLKSFYERLKSKKGSAKAIVATAKEILVIIWYMLTRREFYRDMNKKRYEQKLSKIKKIKESAV

SEQ ID NO: 187440 - protein, 472 aa, unidentified
MARAARRQGASQHHKRRSRRARSAPFKQMNLNAAGIDVGADAHWVAVPPDRDEEPVQRFGTFTADLYALAEWLRQCQIDTVVLESTGVYWITLFEVLEERGFDVKLVDAHQARQVPGRKTDVRDCQWLQELHTYGLLRGAFRPEDQVCILRSSLRQRSMLVAMASRAVQHMQKALEQMNLKLTEVVSDINGKTGMAILRAILAGERDPQRLARHRDPRCKHDQATLAKALEGHWRAEHLFALQQALEQYEFLQQQLQACEQQIDACLQTFVTHVEVKPPQPTPARKRRTRQRQAPSFDVHGYLNAMTGVDLTQIDGIDALTALKVISEIGLDMTHWPTSKHFASWLGLCPGNKLSGGKRYRMRSKPTANRAASALRLAAQGLVHSHSALGAYYRRMRTRLGAPKAMTATAHKLARLVYSMLRYGTAYVDAGQQAYEQKYRDRVLTNLQRKAKTFGYQLVHIEDIDGGVASTL

SEQ ID NO: 187441 - protein, 362 aa, unidentified
MTFFIGVDLHKTQFTVHVRTDEMTETLKQIRQYKTDKSGYAEFIERIQAYRESGACVKIGVESTGNTRFFKHQVEKAGAEVTVINTLKFKVINESAKKTDKHDAATISEFLAKDMLPESYLCSKETENIRRLLKSRERLVRSIVGQKNEVHALLVSMGLKDEQRSLQSKKGRQKILDVLESNVDYVLEAQSVKLMVEIISQMEAAVKVIEKQLSELTKDDQMVNRLLTIRGCGKITAWTIRAYTEDISRFSSAKKYAAFCGLVPWVSDSNETIRHGKITKRGPQELRVSFVQMVMGIRRCKDTANWRIMQRYDYMKTHKGSGKSIIAAARKLAEIVWAMLSNNNDFDREKMYGKYKPTPLAV

SEQ ID NO: 187442 - protein, 354 aa, unidentified
MDIKYIGMDVHKETISIAVMKGDGKLVMESIIETKASTILQFIEGVRGDLHVTFEEGTWAAWLYDLLKPHVTELVVCDPRKNALMKEGNKSDKIDARKLADLLRGGYLRSVYHGENGLRTVKELARSYLTISKDLTRVMNRVKALYRSWGICCAGQQVYAPRHRSEWLNKIGETGVRRRAEFFYQQLDALRVLHKAVRRDLLAESRKHSATKLLREIPSIGAIRAALLLALIQTPQRFRTKRQLWTYSGLAIDTRNSAQHRFVDGQLQRSKKPQQLRGLNQNHNHDMKAVFKSAATMASGGEGPFHDFYQGLLTKGMEPAMARLTLARKIAAITLTIWKKGAHFDAKQLKPQAA

SEQ ID NO: 187443 - protein, 397 aa, unidentified
MYIVGIDIAKRKHEAAVIDGEGTVIIKPFSFTNNCSGYNRLLAMLAKAKLPLDEVSFAMEATGHYWLALFTRLQKEGFRVQVINPVQTNSIRSFYIRQAKTDPRDALLIAEVIRFGHFSESTLHPENIYELRELCRGRHAIVSMQADVKRKVVALLDQVFPEYETAFTNMFSDTSMAILQTCPTPKELSEMPLEELCHLIEVSSHKRFRMAKAQELQALARNSFGFAMAGDVFSTMIRLYAKHLDFLKQQVREMDRKIAEIMDTLDTPITTITGIGPTLGAYILSEIGDISRFSSAAKLAAYAGIDPTMRQSGEYNGVRNRMSKRGSPYLRHAIWLATSSAVLHDPALKLYFQKKRDEGKPYMASVGHACRKMVSIIYAVMRDNKAYTPCIPNEISA

SEQ ID NO: 187444 - protein, 370 aa, unidentified
MGNRSMFVGLDVHKETIDVSIAEEEREGEVRHYGVIKSDLEPLDKVVRALRAPDRRLRFVYEAGPCGFGIHRHLTACGEDCVVVSPSMIPKRSGDRVKTDRRDSQMLARLHRAGELRAIYIPDATDEAMRDLVRARADAVGVGTQAKYRLKAFLLRQGRRYPGREGWTLPHRRWLTDLSFPSAAQHIALQEYRDAIDETERRIDRLTEQLRQLAPTWRWAPVVDALQALRGVSFLTAVSLVAELGDLTRFGHPRQLMTYLGLVPSEYSSGPTVRRGAITKAGNPQARHLLAEAAWAYQGIPRIGRQHAYRQEGLPKVVCDIAWKAQLRLTTRFRRLVARGKAKPKVATAIARELTGFIWAIAREVSPAPR

SEQ ID NO: 187445 - protein, 408 aa, unidentified
MEVVWRRCCGIDVHKKIIVACLNINGKREVREYGTMTGEIKELAGWLLEAKCEMVAMESTGVYWKPLFNLFEIMGLEAMIVNAAHMKALPGRKTDVKDAEWIADLLRHGLLKASFIPDREQRELREVARYRKSLIEERSREINRLQKILEGANIKLSAVAKDINGKSSRALLGRIVANDLPNEAETAAIIHRSMLPKLSQIMASIDGITTPLQRKLIGQIIDHIDDMARRIAEMDEIIKGYMARFETAIAAISEVTGIGRRSAEVIISEIGMDMSRFPSARHLCSWAGVCPGNYQSAGKQRHGRTTKGNRAIKSILTQCAKSANNVKDSFFSAQYQRIAARRGKNRATVAVAHSMLIAIYHILKHGVPFHDLGASYYDTFNRERKINSCLKRLNALGWSPPESATAVV

SEQ ID NO: 187446 - protein, 315 aa, unidentified
MSKVHYFAADVSKRELVIAAYPAAVDGVRVSNMAAAITAWLNTLPANSVLAMEATGTYHRRLAALAYERGLVVYVLNPRDVYYYARAMGARGKTDPSDARLLARYVAHEQAHLHRYVPPTPRSEQLTTLLERRAVLVRTRQTLKQSLAELPALDSEKQAALAALDALLKAIDRELARLNDSDPPTAQLVTRLKTISGVGPLGATLLAALFQRFAFRHADALIAYVGLDPRPDQSGQHQGRRRLSKRGHPEWRRLLVAAAMSAARSYAWRDYVAHQRSKALPATAIHVILARKILRVALALYKNGQAFAAPQTRAA

SEQ ID NO: 187447 - protein, 339 aa, unidentified
MKFAGCDLHKQTITICVVDQLRRVLERRTVRCGEERTILAFFERLGDFEAVVEATASYEWFVRLIEPVAHRVLLAHPKKLRVIAESTRKSDRLDAQILAEFLALDMIPTSYRATPRQHEHRRLVRQRGGVQRRLTSVKNRLRRILCDYNADRPSLFTVDGLAYLAQVPLLGADRFAVDQIVEELHFGRRQLLAVNARLKEFAEAAPLCEQEARTLLRTIPGVGFVTTEVVLAELADIDRFGSQKRVVAYAGLSPGQRESAGKSRELHLEKNGSTLLRSTLVEAAWRLVQHSLRWRRIYERLKLRVRAKKAIVAVARRLLCLMTAILKTGQPYSLSQQPT

SEQ ID NO: 187448 - protein, 312 aa, unidentified
MTDITIGVDVSKDTLDVHVHPDGDHCQFSNDQKGFKAILRWLAARPVVRLVFEATGAYLRAFERAMGEAGLPLCKVNPRQAKRFGEAIGQLAKTDRMDAAMLARFGALIEPEVRPAPARVISDLKDLHVAQTALIKDRTAAKNREKTLTSTLLRRQSRQQLCAIQSHLKEIESAIRAIIKADDGLCRKFAILVSIPGIAERSAFALLIDMPELGELEAQQAAALSGTAPMTRQSGKRTGKAFVSGGRVKVRQALYMPALVATRFNPDMKAKYIELRERGKPPKVAITALMRKLIVLANALIRDDREWSPRLT

SEQ ID NO: 187449 - protein, 435 aa, unidentified
MSKRLQVGFDISRKYNDVCFMTQAGEVLIPHLRFDNNWPGLQQLLNLLLLTLRQGDFDGVDIAGEATGLLWFHPFYHLAQSNDLALFDPHLYLFNARIVKHFRKVLAERDKCDPKDAQVVTECLRFGRLPHELTFDERYLPLQRLTRYRYHVAHTLAREKVYFITVALYLKASDYTRFKPFSDPLGATSSHILTEYATIDELASLPLDDLAAELDLVGKGRFDDPTDNAHRLQQVAQTSYPLAPCLVKPVNLILASLLQHIRFLEDLLQTLNEPIEVTLQDTPGAPYLRSVDGLGLVYTSGILAEIQDPQRFFAGLKRDKHGHPHPKTKHDAQAALAKFTGLWWPRGDSGDFQAEDRRLPHTGNCYLRYYFIEGANSLRRHNAEYGAYYDHKYRESLKHKHWRATVLTARKLVRLVFTLLHEEQTYQPPEVRYRR

SEQ ID NO: 187450 - protein, 331 aa, unidentified
MTRQPNRTSDAALTVGIDVAKATVQIGFSADDSTLTLGNDEPGHQSVIGHLAALRSKGATIGLVVLEATGGLEVDIAAALQLAGYPVVVVNPRQARDFARSMGYLAKTDHIDARVLAHMGQTLLQRDDLHKLVKPMPDERQRLLQAMVTRRRQLVNMRIAEQQRAGAPDKRMRRSLNTIMKALDREIARLDKEMQAFIGEHHAELATLLDSVKGVGKATITTLLAEVPELGKLNGREISALVGVAPINRDSGAMRGKRTIFGGRSQVRKVLYMAGFVAARFNPVIKAFYQRLLAAGKPRKVALTACARKLLVILNAMARTRKPFDVARHAS

SEQ ID NO: 187451 - protein, 405 aa, unidentified
MYQACVGIDWATTEHVVCALDGNGRRLSRFRVAHTEDGLDDLVARLGSFGDRADVAVGIERPDGLVVDRLLEAGHPVVAVKPAAIRAYASAEIPSGAKSDPADAETIAEYLRLKAERLEPLQPYSPQTRALRETSRTRVRLVRRRVRATNQLETTLQVWWPGALTAFPDLDTDIAMAFLTRYPTPEAAAHLGPKRMERFLDVAGYSGYGWRRSGQEMIDLIRKAPRGAGTGQLADACQAVIGAQVNTLIALRNAIKDLGRAIKTQLDEHPDAEIFLSLPHSGMINAAQMLAEWGDVRQAYPDPDSVAAQAGVSPVTRQSGKYRNIVFRRACNKWFRQAMTTYADNSRHGNQWANDVYRQARTRGFDHPHAIRVLARAWIRVIWRCWTDHTPYNPDRHGNLQALTG

SEQ ID NO: 187452 - protein, 315 aa, unidentified
MQVGKLIVGADVAKAELVIHHDDRDEIIKVKNTKPEIKKWLKQQPLNTAIAVEATNVYHLDLVELAHSLGFEVYVIDGFQLSNYRKSVGVRVKTDPTDARLLSRFLKNEGEDLRPWTPPPAVYGKLQSLLRRRAALVTARTAMTQSWANEALLKAAFQTFVKSIDRLDLLIQKKIKEVLREAGLHEQVARCQAVEGIGFLTATALVMAFMRGEFKSSDSYIAFLGMDLRVIDSGQKNGRRRLTKRGCSEIRRLLHNAAMSASRTATWKGIYEQHRNAGKATTQALVILARKLARVAFALMKNQDEYVSKGGKPAC

SEQ ID NO: 187453 - protein, 316 aa, unidentified
MSTPQLFVGIDVAKAHLDVALRPTGERWTVPNEETSITALVARLQAVAPTLIVLEATGGYQRAVVAALAAADLPVVVANPRQTRDFAKATGQLAKTDALDARALAHFAEAVRPQPRPLPDAQSEALRALLTRRRQLVAMRTAEVNRVANAPVPVQADLHAHIAWLDQRVAALDDTLDTTLRASPVWREREALYRSVPGIGPGCARTLLLDLPELGTLSRQRIAALAGVAPFNRDSGTLRGYRTIWGGRAPLRATLYMGTLVAVRHNPVLKAFYERLLAAGKAKKVALTACMRKLLTILNAMVKHQTLWQPREVVIA

SEQ ID NO: 187454 - protein, 315 aa, unidentified
MRYIGMDAHREFAQVAVVEDGLVRDEGRIGVTPEALTQWAASLSAEDQVALEATGNSDAIAVLLTRRVARVVVSNPSKTRAIAEAKVKTDKVDARILAQLLAADFLPPVWLPDPRTRALRWQVVRRAHMVRVRTRIKNQVHAILARNLCPTPPVSDLFGRTGRHWLSRQDLPADEVATVQALLRQLDFHAGELAVVDRELAVEALADSVVARLMTIPGIDAIAGISIVAAVGEFTRFPDPDKLVAYVGLNPKVRQSGNSAPVHGRIAKAGRAHVRGVLVETAWSAVRALDRCGRSIDASPPVAAPRRRSWPPRGR

SEQ ID NO: 187455 - protein, 347 aa, unidentified
MKEVSTIGLDLAKKVFQVHGVDGVGGVVLRRALRRSQVLVWFAKLPRCLVGMEACATAHYWARELEKLGHEVRLIAPADAKAYVRRNTNDPADAAAICEAVGRPSMRFVAIKSTAQQAAAGIHRVRDLLMKQHTMLRNQLRGLMAEFGLVAAKGQRGLSELIAILVDPEDRRLPSPLREGLVAIVETLRGIDRKLAAIDRQLVQAGRENATYRHLITAPGYGPILASAMVAMVVDPGAFRRGDDFAAALGPCSSQGQALVPRQEGTGGKTWLGPISKRGNGYLRRLLVNGPTAVLKSKRGKEDPWLAKLLTSKPRKLVAVALANKMARIGWALMTRQEDFRGSLAVA

SEQ ID NO: 187456 - protein, 316 aa, unidentified
MFIGIDVGSQFLDAAASDPAPSLPRRVANADDGISTLIGALTSLRPALVVLEATGNYHRPLLAALLVAALPVAVANPAQVAAFRASRLGRHKTDRQDAKLLARFAELHHDELRRATPDEPDLARLRALVGYRDDLVAQITAARNRRHAATWSAATEVVAWLEGDLAALEARRAEVEQAMATLMAERPETAVLTTQAGVGLLTAAAVLAYLPPGVLGDAKKAAAYAGVHPRQQQSGAQASSRLSKQGCPALRRYLYLAAMTAIRWDPEIAQWYHRLRGRGKAAQSALCAVAHKLLRRMMGRIRELRQEEHVIVPAAA

SEQ ID NO: 187457 - protein, 336 aa, unidentified
MKYSGIDLHSNNSVVTVTDEDDRVMAEKRLPNDLATILRFLLPWRDELVGVVVESTYNWYWLVDGLQEAGYRVHLAHCSAIKKYEGLKHSGDEADARHLAHLLRLGILPTGTILPREQRALRDLGRKRMQLVRSRTQHILAVENITARERGARISSNQVKRLSVETIDQMPIPEDVALAVKANVAVIHTLSVQIDLLEKRLQEAAPRTEYALVTTIPGIGRILATTILLETGPIDRFASPGNFASYARCVDSQHTSNGKKKGEGNTKNGNKYLSWAFIEAAHFAMRYCVEAKRFYERKKSRTNNVVAIKALAHKLARACFHILKERKPFDVTRCFA

SEQ ID NO: 187458 - protein, 438 aa, unidentified
MSNLDQAAVNREFAAHIGIDWADQKHFWTMRTADGKTQRGELDNTPEAVQVWAAELEQRFGGRPVAVALEQARGAVIAMLCKYAHLVLFPIHPNTLANYRKAFRPSGAKSDPRDADLALELLVSHADKLRRLEPDTVETRKLQFLTEERRRLVNQQTSETQRLIGWLKQVFPQILPWFEDPACAMVGELLLRWPTLPALQKATPKTLRTFFHRQNCRSAERIEERIAQIRQAVAATHDAALLETGILCIQNSVHLLEQMREGIARFDHQIAETYRQHPDRAIMESFPGAGPALEPRLIAAVGSRRERFESAQSVACFVGIAPVKEASGQQRWVHWRWACPKFFRQTFHEWAGCSIRTCQWAREHYDQQRDKGKGHHAAIRSVAFKWIRIFYRCWRDRVPYSEQTYLKAKAARAPKPHPAVSMQWESCGGFAKLSKLPS

SEQ ID NO: 187459 - protein, 400 aa, unidentified
MISVGIDVSKGKSTVCILKPYGEIVSKPFNITHTHKDLSELSSMLFRLNDEVKIVMEATGIYHLPVLTYLQEKGFFVSVINPYLMKSYRNESLRKAKTDKIDSRIIANYGIDHWFKMKEFQISGVIYEELKLLGQQYRHYMKLHLLSLAELTHLLDLTMPGIKNLLASWNETNRKDKRSDFVERFWHYDVITSMSEQEFTEKYILWAKEKKYVPSQEKAKVIYTLAQESIPTLPSETSSVKMLVTEAVRVLKEVDATLGLILSRMQEIAKTLPEYSVVREMGGVGNTLAPKLIAEIGDVRRFRNGKALVAFAGIDPPPYESGQFVGCNRKISKRGSASLRKVGYETMRSLKMRSRPEDPVYRYVVKKESEGKSKKSAKIAGLNKFLRIYYARVTELYKNI

SEQ ID NO: 187460 - protein, 344 aa, unidentified
MPSIVGGLDIHRKQITFDYLDAVTGEVRCGQVGPADRAHFRSWLARFENPAGVAFAVEACTGWRYVAEELQRAGMEAHLAEPADTAAARGRKRRAKTDRADARLQRDLLMQGRLPECWIPPEHILECRALLELYHGLRTEHTAWVQRIHAVLFHQGAPAFHDLSRADAPAQLAELARGHLSPAGQVQIGIYLRMLAVLEAELAAVRHRLLAAARQLRGAKVLAESIYGVGPMTGLALTCWLGGAGRFSSARKAVRFAGLDITVYSSDGKRSPGHLSRQGPPVLRWAAYEAGKTHARLVAPDHGYYAAVKDRKDGKRAALSEARKIIRRACHILSELGDDALAAA

SEQ ID NO: 187461 - protein, 394 aa, unidentified
MRLWVGFDVGKAFHWVCVLDDEGEVLLSRRVEATERDIERCCEQIAALGGPGERRAATDLLGGPAALLEAVLLGRGERLFHLPGMAVNRARDGYRGESKSDARDARVIADQLRMRWRSLQEVRPREDEAAELRALVAYRRGLVEDQARVITRLRALLLEVFPGLEATLDLSTDRALLATTRVATPSAARRLGTSRLARWLKDRGVRRSEELAGKVIVAAKEQRRELPAAQAKAALVSEMAAEVLRARGRVAAVDARLEELMAARPEAEVVRSMPGMGPLFTAEFLSEVGDPSRFASADALAATAGLVPATRQSGGASFQRRARRGNRTLKNLLYRSAFSCTVHHAPSRAYYLRKRAEGKPHHRAVIALARRRVNVLWAMLRDGKLYQEPILDAA

SEQ ID NO: 187462 - protein, 319 aa, unidentified
MTKVEIFTGFDVSKDQLDFCTLGGAEKSGSDKVAFNAQGLKSLLRKIPSGSHCVMEATGPYHVKLATWLFKNGYAVSVVNPLVIKHFSRMNLRRAKTDKADAKIIASYGQKEKPALWQPLAPYLMTLQQMESLLELQIKNLTAHKNQLHSFEATGLADPFVRAELKRSIQHAEKVIEKTEAKILEIIDNEHKSMLKNLTSIPGIGKKTAIALIVATGGFTRFDSHKKLSSYLGLCPRIFESGSSVRGRSRICKLGMVRIRKFLYMCTWSAIKANEACKEMYERLVENGKPKMVALIAVANKLVRMAFAIAKSGEKYQPV

SEQ ID NO: 187463 - protein, 337 aa, unidentified
MMFSTNTTAPNLSALPCVLGIDVAKDTLAATLLDAHTRKPRWHKEVPNSAKGWNELLRSTPKEAPWIVEPTGRYSHNVARAARKKGRDVRLAPPKKAQMFLKSVQSRAKTDKLDATGLALYGASCSLAPYPLKSPMQDQLDQLLCARKGLSLSVCRLEAQKRELPHASQALTPAIVALKTQIKAVDAQVKALCQTPELAVIGQLQKVPGIGPVTATTIASRLSGRSFERADQFVAYCGLDVRVRQSGKKSGQIGLSKQGEAELRRVLYMAAMASVKAKDSPFAAQYEREKAKGLSATAALCSVARKMARLCWSLVTHGTTYNPDRVYAPSAPSFEEN

SEQ ID NO: 187464 - protein, 351 aa, unidentified
MSHKTAATVALTIGIDTGKNTLHLIGLDDKGAIVLREKVARGRITARLANVPGCLIGIEAGMATHYVARELSALGHDVKQVPPAYAKPFRQGHKNDFRDAHAIAEAVQRPSTRCVPVKTDDQLDLQALHRVRSRLVGQRTAVINQIRGFLLEHGIAVRQGLRFLRQQLPDILAKRSDVLSPRMIRIMEDLSGDWRRLDERIEHVTEEIEVLAHGSEGCRQLMTVPGIGPLIASAMVAAIGNGAAFAKGRDFAAWLGLVPKQMSTGDRTILGRISKRGNRYLRTMIMQGARVILLRPANWAKHSFGPWLTAAANRLHHNVLATALANKLARIAWTVLMQARSYEARVEPRTA

SEQ ID NO: 187465 - protein, 320 aa, unidentified
MLSFCGIDVSKDRLDVMVLPDEYSSSVPNDPAGWAILVEQLRGFSITAIGIEASGGYERGAVRSLQAAGMPVRQVNPFKLRQFAKASGVLAKNDPLDARMIASFVGIMPTRPVQRTTPAAEQLVEMLAVRRQLSAEKTAAENASRLLEDLMLQRLSRRRIARLAADIELLDKRLVEIVATDATLAHRYRLLTSMPGVGPVLACTLIALLPELGGMSRKQVAALVGVAPYAFESGTLKGRRCIWGGRANVRQVLYMAAMSASNWNPVLKLFHDRLKGAGKLPKVVIVAVMRKMITTLNAMVRDDIAWADRLSGRHSVTTAR

SEQ ID NO: 187466 - protein, 355 aa, unidentified
MISTKYIGMDVHKESISIAIRNSAGKVVMESVIETKASMILQFIDGLRGDVQVTFEEGTWAAWLYDLLKPHVTKLVVCDPRKNKSMREGNQSDKIDARRLAELLRLDHLTPVYHGEHGLRTLKELVRSYLTITKDLARVKSRVKAIYRSWAIPCSGKQVYARCHRAEWLGKINEPGVRRRAECYYQQLDALRVLRLGVRRDLLVESKKQKAWKRLCEIPSLGPIRAAVLLGILQTPHRFRTKRQLWTYGGLAIEMHSSADHRSVDGHLQRSRKNVLVRGLNRNCNHDLKNLFKGAAAVASSKPGPFEQFYAALVAKGMRPEMARLTLARKIATIVLIVWKRGVCFDAQYLKPQTA

SEQ ID NO: 187467 - protein, 349 aa, unidentified
MKDLMAGIDLHSNNIMVGIVDGKGKRLAHQKLPCELKRVLEFLAPYRKGLKCLAVESTYNWYWLVDGLRAANYPAVLANPARIQQYSGLKHADDKSDAFFLAELLRLNILPTGYVYDAELRPVRDLLRRRMSLVHQRTALMLSFKSLYTRTTGASMSLSQLKTMEVAQAQALYEHPANQLIAGLQVRHIEQLDASIGKLEKAVLGVARQLPCYPRLKTLPGVGIILGLTITMEIGEIGRFGGPGQFASYCRTVAARSTSNGKVKGENNRKCGNKYLAWAFVEAANFAKRYDETCRKWYDRKAARTNSIIATKALACKLAKAAWHVVAQDADYDEGRVFGQQPAKGAMKQ

SEQ ID NO: 187468 - protein, 352 aa, unidentified
MMEFRCTIKKREKTVSKVTTIGLDLAKNVFHMVCCDARGKVVSKRMLKRPRVLAFFGNLERCLVGMEACAGAHYWGRELEALGFEVKLIPARYVKAYVRGNKNDYNDALAIAEAVVRPEMRFVATKSPEQQDIQALHRMRKGCIGGRTALCNQMRGLVGEYGLVAPKGVAALRRRIPEWLEDGDNGLSEFFRRLLHEGLERLYELDSHIAFYTRELERLSEGNEACQRLQTLPGFGPIVASAFHGQLGHGEAFRRGRDASASLGLVPRQHSTGGKDTLLGISKRGDRYVRSLLVHGARAVVSRAAHKDDRLSRWVNKIRARRGFNKAVVALANKMARMGWAVLANKTVYQRA

SEQ ID NO: 187469 - protein, 325 aa, unidentified
MIISNQAKKIKSDTIIGVDISQDKFDIAITSKEGPVHTFANDPKGHQNFIKLIKPLKPKLILMEATGKCETRLALALQKAKLPFRIENPAKMRSFSRSMGMIEKTDKIDARMIALAGERLDISAKSSKLNHLIIKLKEHVRTRFTLIEELIRLENIMDRMLDADLKMELLKLHARISESKEIVENKIKKLIDGNEELSSRYKLLTSVPGIGFVTAVTMIAECEELGETGRSQLAKLAGLAPLANDSGKMQGRRHIRGGRKNLRNALYMAMLATVKYNPKIKAFYERLKSKGKPPKVAMVACARKMLGLLNAMIKHKKEWNEFAVC

SEQ ID NO: 187470 - protein, 407 aa, unidentified
MDLLKTVFGIDVSSRKSNVCIMVNGQKVNDYAISNDMVGFNRLLGDLKQVTKPQIIFEATGVYSRRLQAFLDMHELRYVMMNPLEAKRKTKDDLHQNKTDKLDALYLAKLQSEHPQRLAYVQNKEYQELMANNRIYEQASHDLITNKNRLHKAVQLTFPEIEHLLANPRGKNYWSIVLRFPHPDIVLETKEADIIDFLKGLSGIGKKRANDITQNLIRLAKVACPAVKKNSAHIRGLKMAINNILSAEEECQTALQEMAKLAPKRDLEILTSIPGIGENTALRIISELGDIRRFNNPSQLNAFVGVDPQVYESGNLTAHLSISKRGTAIGRKVLYLAINQIQSAKKAGNPCHIADYYEKRKRSSETASHKKAAIASIHKLLRTIFALIKNDQLYSYDVAKHNQRLLS

SEQ ID NO: 187471 - protein, 316 aa, unidentified
MSELVYVGIDIAKNSFEVAVTGELQTLNLANDEAGHAQLCQWLAPLAPRLILMEATGGYEQDLALALAGAGLRVSVVNPRQARDFARCVGKLAKTDRIDAQALRSFASMLDAQGHQPRALADDERRELTALVVRRRQLLTMLVSERQRLGVAHRKAKPSILAIMDAIAAQLHDVDDELKAHVQTHHADLAKLLTSVKGVGPTTACTLLAQLPELGQLNRKQITALVGLAPMNRDSGTLRGQRHIFGGRADVRRVLYVAALVGTRFNPVLKVFYAKLLAAGKAKKVALVACMHKLLVILNAIARTRSPWRDDFAERL

SEQ ID NO: 187472 - protein, 493 aa, unidentified
MGACGLESGDVVLAAIPIRKMTIGIAQTLLLVIERRIAMPKRTTGDRPELKTVSVGAAAIDIGSKMHMAAVNPACTDVPVRSFGTFTQDLHDLADWFKACGVTSVAMESTGIYWIPVYEILEQRGFDVILVNARYAKNVPGRKTDVSDAAWLRQLHSYGLLRGSFRPDAEIATLRAYLRQRERLVEYAAAHIQHMQKALMEMNLQLHHVVSDITGATGMRIIRAIVAGERSPDVLATYRDVRCHSSPETIRAALVGNDRDEHIFALTQSLELYDIYQAKMLDCDRKLEVLIAALSNKGGKPVGKLSKPRIKTKQVNTPTFDVRTALYGVLGVDLTEIHGLGPSLALKLVGECGTDLRAWPSAKHFTSWLCLAPGNKISGGKVLSSRTRRSSSRAAALLRLAATTVGRTDTALGAFYRRLSSRAGKSKAVTATARKIAVLFYNTLRHGMSYRDPGADHYEQQYRNRVLANLQRRAKSLGFVLQAIPGDADPAVS

SEQ ID NO: 187473 - protein, 415 aa, unidentified
MQVFEVIHACCCGLDVHKDTVVACVRRTAANGTVEQQVETFPTTTAGLLGLGDWLVERGVRIAAMESTGVYWKPVWNLLEGRVELMLVNSRDVKQVPGRKTDVKDSEWIAQLLACGLLRPSFVPPLPQRELRDLTRTRTSLQQDKSRTANRLQKILEDANIKLASVASDVLGASGRDMLRALIQGESSPAQMADLSRRRLRLKIPKLTEALSGKVSEHHRFMLKLLLEQVEQYETQVAKLDQRIEEVMSPLEKTALGILDEIPGVDRRAAQNVLAEIGSDMSRFPTSGHLAAWAGICPGNNQSAGKRRSGRLRQGNRCLKGTLNQCAWAASRKKDSYFAAQHRRIASRRGVKRATMAVAHSQLCVCWELLKNGQAYQDLGPDFFEKLNEDRVKRHLVHRLEKLGYTVKLEKKEAA

SEQ ID NO: 187474 - protein, 316 aa, unidentified
MEMVAKVFIGVDVSKKHLDFYLHPLNKTLHIENSEVGMKLLLSELSSHKECIKTVVCEATGGYEALMLRTLKSAGYKTWMVEPKRIKSFIASEGKRAKTDKGDAKMIALFASQKERSYEDVERSVAATFLHELCKRKADLKKNIVVEKLRLEHQQIPFCKKQIAHHIVYMEKQVAAIEQEIDKTLETDEFLQQKIDIAISVPGVGKTTAVAVVACLPELGKIEGRQIAALVGVAPFTRESGMLKGVARTAAGRQLVRQALFMAAMTAVKHNKQLKVFFDRLVEKGKRRIIALVAVMRKLIVMINAMVRDNQVWRIA

SEQ ID NO: 187475 - protein, 373 aa, unidentified
MPRYSTAFGMDVHLRSTTVCALDAETGEAVARRFRGNPWGEVAEWMSGFPGPSLAAYESGYLGFAPQRELSALGVDCVVAAVSKVPRSAADLSSKNDRNDAARMAKAILSHDITPVWVPSPEIEGLRDLAGAHDAATARLAAAKQRLLAFLARRGYVYGGTTPAGNPRKYWTYGFLRWLDKVRPADDGSIRALAALRNEVEAADEAREALLAEYRAAVAAGPLSAEVEALQSIKGCGFVLAAAFASEVGDFSRFRSGRQVTAYFGLAPKQRSSADSVRLGGISGAGNALVRRLAVEGSWRYAQAGHQPKLMPKGSGVPLEIRMHGRKGSERLLRRREEMLERGMPQAKANAATAAELVRWLWALGMMCREAGE

SEQ ID NO: 187476 - protein, 358 aa, unidentified
MRIIGCDLHARQQTIAMLDSDTGELEEKTLEHEGDTVREFYSALPGPILVGIEATGSMQWFLEMMEELGIECRVGHPAKIRQAETRKQKHDRRDARLLLTLLTENRFPTIWMPSTEQRDLRTLLRHRHQWVRLRSRVQHTLQSMALNHGLRRGHSLWSRAGQHALRALPLAPHASERRKALMTLYPCLQESIDELDRQVSEQVDQHPPARRLMTHPGVGPITALATEVFLGDPLRFIDGKAVASYIGMIPSEHSSGGRQRLGAMSKQGNTLLRYLWCEAAMHAVERDPELKRFYRRKLVQKGLGKARVAAARKLGIRLWIMLRDQIDYQEFCRRGKARQESGSVRAGMPDLNSGPAEA

SEQ ID NO: 187477 - protein, 359 aa, unidentified
MQSQNQELDFNGKDIYAGIDAHLKSWRVSIMTNGIMCKTFSQNAKAEDLKKYLENKYPNGTYYSAYEAGFCGFGPHRKLREMGITNIVVNPADIPTTDKEKKQKEDSRDSKKIVRSLYNRELEAIYVPNMEIEGLRSLVRYRRTLVKEISRYKNRTKSFLYYHNIEIPTELATGSTHWSKRYSNWLDSLELGTIHGRETLTHIKHTVEHLRAKLLEINRSFRGLELDSQYSALISLLRTVPGIGLITAMTIITELDNIGRFKSIDRLCSYVGFVPRTNSSGENEKTGGITPRSNRYLRSMLIESAWIAIRHDPALMMKYGELVKRMDAPKAIVNIAKKLLSRIKHVLVNETPYVKGVVK

SEQ ID NO: 187478 - protein, 438 aa, unidentified
MRITYERVAGMDVHKKSVVVTRMRVTAEERIEWETRTFGTTTPELLQLHDWLQEWACSHVALESTGDYWKPVYNLLEEEFEVWVVNAQHVKRVPGRKTDATDSEWLAELLLHGLLKASFIPPKPQRALRELTRYRTRLIDERSRTVNRIQKLLEGANIKLASVVTDMQGVSARAMLRELAAGNADAEALAELARGRLRHKIPELEQALTGRVEAHHRFLLSQQLEHIDFLDEQVAEIAAEIERQLGMMSKPLDSSVAEGEEVAPPDDGALPPWLAAVSLLDTIPGINPAAAQIILAEIGIDMAQFPTEGHLSRWAGVAPGNNESGGKRYSGRTTKGNRTLKSILVQCAYAAIRTKDSFFKARYQRLVARRGKKRAIMAIAHSMLKAIWHMLSTGEVYHELGGEYYNQRNKDVKVAYHTRQLEKLTGATVQIALGGAAA

SEQ ID NO: 187479 - protein, 410 aa, unidentified
MTVITIAQNTPVLVAIDIAKARHEVLIAVPGKKRRRRLTVLNELADFTRLIAALKDYGHPVRAAFEATGNYHRALAYHLANAGFEVKLVSSVALARTREALHNSWDKNDPKDAQVILHMMEIGNEQFYHDPLVRGTNDIQELSKTHDIVSKSKTELWHRILTHYLPLYFPEADRFHRSSRSDWFFAFLERYPSPHFISAMSKDAFIADAWDVVGRKVAKERLLADIYETSKVSVGLPVGLDSDAISMFRLVLGEGRSLIAQRNQIEDRAVALLKDLPDYQLLTSIPGIGPINALTILAEAGDLRRFGHHRQFLKFCGMDLATIQSGTFRGQTKLSKYGNARLRRTLWMAGQVAILQRANSFRDKFERYIAKDRHNTHLRRKAYTAIAAKMARTVHGIIKNGEPYRPFFEG

SEQ ID NO: 187480 - protein, 402 aa, unidentified
MKEDSKGQTRGKARKAGIGSRQQGQDIRTILKALEQRFAGSGNGDRGRRSPVGWFIGIDLGDKKSVCCFLDGEGKIVAEGKLSTTREDFAELFSKIPKSRIALEVGTHSPWVSEQLESYGHEVIVANPRKMESIHKNKRKNDKVDARTLARLVRADPELLYPIRHRGAEARNDLVMIRARAALVSVRTKLITCVRGLVKSSGSRLPTCSAESFHKQAKDKLPEVLRPALAPLLIQIGSLTTRIHKYDQAVSRLAQKKYPETRSLQQVKGVGDLTSVAYVLTLEKPERFAKSRDVGPYLGLIPKQDDSGDSSKQLGITKTGDKMLRRLMVGSAHYILGPFGEDCDLRQFGLKLAARGGKNAKKRAVVAVARKLGVLLHRLWLTGETYEPLRQKTPETIGLSNK

SEQ ID NO: 187481 - protein, 475 aa, unidentified
MLDSVYSRTASAVRWALGLRPLVTRRPEEDCPMPTSIMARRTINRELQDNYQYKAIAAKPRESHIMLLIGIDWADDHHDAALMAESGEILDEFRFSHDQAGFDLLHERIDKCDVSASDVLVALETKHGLLVHDLLHSGYMVYALNPKAVNRYKDRLRASSSKDDKFDAKTMANILRTDRHLHRPLQLCADDYRLLERLCKDLKDVVYDITRLDNRLLDCLKEWYPAVLGVFGHDSGIFLELITEYPTSADIEQLTQEQFNHFLKKHKYSVPAKAQEAYNQLTRRTPKADPVAIAAGKLKVKALVEQLRVLYATRKEYERQIKNLLDTLPEADIISSLPGVGKRLTPEITAMFGPNMKDAPKRFEQAKEILDLAGISPVTKQSGKFKVVLFRFSCDRNMRCITRNWAGASIKESRWAKAFYDWHRKQLESHETILRKLAGKWIKIAFHLWKTGESYSEELHIAILKSRNVVWAASL

SEQ ID NO: 187482 - protein, 365 aa, unidentified
MKKIAYVGIDYHLNSLSIAVMLEGRKDFYETIRLKNNDKVICKYMKKLSKNFEIKACYEASCNGYTFQRKMTSWGYLCDVIAPSLIPKKRGERRKNDFRDAKDLTRLYAHGLLTVVYPPTEYEESVRSLIRCRLAFKESEKRVKHQINSLLLAQDFHWPHSKWTKHHLHWLSQLQMPNEYLQQVLEEYLGHLEYISTRRRYLDEQIEQIARSDIYAPSVKKLKAFKGISTLTAMVLIAEITDFRRFPNPQALMAFVGLIPSENSSGDVQKGGSITKSGNTRCRKLLIESVQHYMKRPRISLQMKDDLAQVDAHSANNAIKCLKRLHKRYWSLTMKGKIHQVAITAIAREFVGFIWAMMQPQAATQ

SEQ ID NO: 187483 - protein, 390 aa, unidentified
MDVLYQSCAGIDVHQANIVVCILHGPLTSTRPKREMATFDTTTKGLRACHDFLSQFHVEAVGMESTGVYWRPVWHALCDDFELILAQPAHMKAIPGQKTDKKDAHWIAKLTRIGLLPRSFVPDETIQELRELTRQRKHYVESRNRETNRIHKILQSGGIKLTTYIEDIMGLSGRNLLQLLVDGTPITPRIVHQSVYTSLKKKVPQLLEALDGYFSDHHRFMLKQSLEIYDFYQKQIELLEERMNVYLSQYENHVEILDSIPGIDVITASVIISEVGVDMSQFPTSGHLASWAGLCPGNNESAGKKRSTKIRHGNSYLKKCLCQAAFAIKKQKGSPLADRFYQIQSRRGSQKATIALAHQLLKIAYILLKEQITYPEFLAQKKTTRDKLVA

SEQ ID NO: 187484 - protein, 387 aa, unidentified
MREDIDRFVETLTAFGVPVQVGFEPTGDYHRPLAWRLHQAGFELKLISSLSLARTREAMHNSWDKNDPKDAQVMLHMMQTGLTQIWHDPLVHGVNDIQELSKTHAVISQTKTEFWHRLRTHYLPLYFPEAERFMGNSRSDWFLAFLEQFPTPGSITCMSEDAFIEAAWDVVGKKVSKARLLADIYATAADSIGLPVDPETPAIRMFRLVLGQGRHLIAQRDQIEQQASDLLGTHPDFVRLRTIPGIGPINALTILAEAGDLRRFGHHRQFLKFCGFNLSTQQSGIFRGQTKLSKFGNARLRRTFWMAGQVAIRQRENGFRDKYERYIARDHSDPHLKRKALTAVAAKIARTAHSVIKTETDYRPFFEGRGPRRKDPALQVPLRHASS

SEQ ID NO: 187485 - protein, 499 aa, unidentified
MSGHNRKSPPSQRHPRPTPRAPCPGQTDDLRRAARSAAHDRRCVEECAKIVALPVQHEHAAGIDAGDASHWVCVDATPDGSDTVREFPAHTPGLRKLVAWLRQCGVTTIAIEATGAYGHVLFLMLLEAGFTAILTPPQFARQVKGRPKTDRRDCQWIQRLHKHGMLPSVFQPDETTQTLRDYVRQRGNLVRLSGQHIQRMQKALELMNLKLTKVLGDITGVTGLKIIRAILKGRRDPKELAALRDRRCHHSVAEIATALDGRYRPEHLLELRCSLEMWEKYLEMIAEVDQAIAAQLRLMQRKTELPPLPPQPRARGRKPHDPRFDVRTALYFATGVDLTAIEGIDELNALTLVSELGCDYTKWPTVKQFTCWLGLCPNWKKTGGKVQSSHTRRGKNRAARALRLAAWSLVRSKSYLGAYMRRQRGRLGKPQAITATAHKLARILYNLMRYGVEYTKQSEAAYAEQVHERLEKQLRRRAQELGFELTPITPPPMPVATQQ

SEQ ID NO: 187486 - protein, 344 aa, unidentified
MKITTIGLDLAKSIFQVHGVDATGQVVVRKSLRRSQMLPFFAKLPPCLVGIEACGTSHHWARELLKLGHEVRLMPPAYVKPYVKRGKTDAADAEAVCEAVTRPTMRFVPVKSPEQQAALSMHRTRDLLVKQRTQLINMIRGLLAEFGIDIPKGLERALLMARQIVDGKPPEVPFEAAKIVSTLSQQVLDTHVRLREIDRDLAIWLRSNDVARRLMTIPGIGPIGASALAASVTDPHQFRSGRQFAAWLGLTPLQKSSGGKERLGRVTKMGDKYLRKLLIVGMTSLVRRAKYSPGKVDRRLADLLARKPTRVATVAMANKTARVIWAIMSRGETYRAGHRPTLAA

SEQ ID NO: 187487 - protein, 375 aa, unidentified
MTETTRMTECNAPGATLYLAFELGSTKWVLAFTTSPAQRPRHRQVAAGDLAGLLREVLTAKVRFGLALDAPVRSCYEAGRDGFWLHRWLVAQGLDNVVVDSSSIEVNRRARRAKTDRLDAGKLVYLLMRWAQGERAVWSVVHVPTPEAEAERQLTREIATVREDRTRTRNRIQALLATQGIRRPLTRGFAAQLATLQTGDGRPLAVAWQARLAREWAQLETIEGRLTVLHAARRAQIAEGVTRVAQVARQLTQLRGVADTSAALYSAELFGTRTFSNGRQLGALTGLVPVPYRSDQRVQDQGISKAGRAELRRVSIQVAWCWLRWQPDSALAQWFTRRFATAGGRSRRIGIVAVARKLVIALVSWNMASSPRARS

SEQ ID NO: 187488 - protein, 349 aa, unidentified
MKINKTTNNLQLMDLYDYYIAIDWSIDGASIARMRSNSMKVIINNIASNVKSIKEYLKALKGKKILTIEETTGAQWLYVELKDSVDKLIICNPSRNRLLEEGSKTDKIDAGKLCQLLRAGMLKEVYHTDNENSYRIRKLVSAYDDLTSARVRVKNQYSAIYRSIGLKKTEKGQYDKKDKAMNFILEHQIAVMKTLDEEREKFEALFRETVRNNHIIKQIKQISGFGDIQSVRAYGIIIDASRFKNKYRLWCYSGLAKNKRESGKKSFNKRDKRYSRKLKCVFKMATHAALGGKNDIREYYEYLLTEGYTEKDARNTITRYLATSVYAVMKNKTKYEPYHWRKKLEIKAA

SEQ ID NO: 187489 - protein, 509 aa, unidentified
MTTATARGKPASSSPPSAQRDQAQAQRQAYHRRKTRAKGKSEALRQQEAAHVEALPVQHPHAAGIDVGSRSHWVCVGFTTEAASCLIQEFPAHTDGLKAIAAFLREHQVNTVALESTGIYWIPLYELLQAEGFEVLLVDPSYSQQLRGRPKTDRRDCQWIYRLHSVGLLAAAFRPDEKTCQLRAYLRQRANVVRQASRHVQHMQKALEQMNLKLTEILSDITGVTGRSIIRAILRGTRAPEKLARYRDKQCKASEAEIAQALTGTYREEHLFELRLAYEAWQFSLGQIEKVGGQIALQLGRMKCDRALPPLRPKARPKRRVNSPGFDVRTALYYVVGLDLTEIEGISELTALTVISEIGPGVSQFATVKQFCSWLGLCPNWQKSGGRVKSSRTRRGVNRAAQALRLAAQSLHHSQGALGGFLRRMKGRLGTQAALTATAHKIARIVYLALKHGMTYVRQSQEQYEAQMKEKQIKALKRKARQLGLEVIEKTSSGVATVVAVPVEGYRSE

SEQ ID NO: 187490 - protein, 334 aa, unidentified
MVARTQGSFDKDGATKMSNPTTLTAGIDTGKATLDVAIHGHKRGKAFPNDPAGWQGAQAFLSEHGVGRVGIEATGGYERGVIRQLRQAGFTVVLLQPLQVKAFGQLHLRRAKNDRIDAMLIAACTDMIDAHNKMPPDPRFEPLGDHLTYIEQIEEDIVRDKTRLEHIGDKRLQRTVNADIRRLERRREAELKRLLAAVRTHDDLARRLDLVLSVPGIGVRTALSIVLRMPELGQVSREQAASLAGLAPFVHQSGKRQGETHIGGGRGRLRRALYAAALPAAFRWNPALKAFYARLTARGTPHTSALVACARKLLIYANTVVARGTPWQDQPATA

SEQ ID NO: 187491 - protein, 427 aa, unidentified
MNLTQDAKICQVTESTIVIGVDIASETHYARAFDWRGIELGTVYIFGNSAEGFHSFSNWISDLARKKNKNHFLIGAEPTGHYWFSLGVYLRDNGIKMVLVNPYHVKQSKELDDNHPSMTDRKDPKTIAKLVIDGRYNEPYIPEGVYAELRVAMNCRWRIIRELTASQNRIQRWQKIYFPEHKRVFGSFDCISSLMILRTAPLPADVISLGAEGINAIWRKAKLRAVGLKRASRLVEAATESIGCRDGGTAARMELMILLDDYETKLQQYDAVMTVVEELCNQIPEVAELIKIKGIGLVTVAGFFAEVGDIKRFDSPRQIQKLAGLAIRENSSGKHKGRTSISKRGRARLRAILFRAAISLAAKNPEFKEIHRYFTTRANNPLKKKQSIIAMSCKLIRVFHTIATKRCAYNPTKLLADIHRNGLTNAA

SEQ ID NO: 187492 - protein, 397 aa, unidentified
MLAVAIDVGKRTAAALVCDFWGELVGEPFEFGLNEHGFKAMSAEIARASAARNATWVRVGVEQAGHYHQTLIARLQADSYDIVLFNPLQVKENRSQDLVAALKSDARDLGAMADLLTRGKGRAPFHADAAMATQAALAVHRARKVKARTALKNQILASLDVVFPGLGDCFEDIFKSRLGLLILREGLEPRRVRRLGPERLRSFARHRGLRTRGATVERVVQAARQALLLPEERASVHARVLAADVSLLGRLDAEVSETEAGLAEVLPRTPSGILVTMPRVGVVRASGYGAAIGDPHRFQSASQVYRFSGLVPRLYESAGRRRPGTHISKDGKVDLRQALLQLGLALRTGHEPSAHYARQLQARGKATGVVACALANRANRIAFAMVRDQSPFDSRKW

SEQ ID NO: 187493 - protein, 406 aa, unidentified
MEVYLGIDSSQAKHDIVFMNPQGVDLARACIPHSPEGFLQLEALRQELGLSPSDCLVGLESAHSLLVDFLWDQGYVHVYVIPPHVVKASRGRYGHSGARTDASDASLQADLLRTDRARLQPWFPDSLATRQIRAWVSLIDHLTLSIVRQANRLRAVLFRYYPAALELFSDLTSQISLQFIQAYPTPQAAAEVDWPQFEAFARAHHYPHPKHLRSIFSRLQTPQPQPAASTILAYQQEASLLAALLLNLVRAKAAALRELEVLFHQHPDSAIFASLPGAGDYLAPALLAKFGDDRQRFPTPASAQALAGTCPVTDSSGKRRRVMFRRACDRQFRRIAQQWARCSLVQSTWANAYWHQVRPRCSSDSHAFRCLANRWLAVAWKLWQTRQPYDESYHLRQRKLHARLQA

SEQ ID NO: 187494 - protein, 459 aa, unidentified
MQDNIETQENRRRQLAGLPVIRRGVAGIDLGSEHHWVCAPTEDGAGREITDFGSTTSELVRMAKWLKDRKVESIAMESTGVYWIAPHEVLEAAGLEILLVDTRQLAQVPGRDKKTDPTDCEWIQRLHSCGLLRGSFRPPEQVCMLRTLVRDKANLVAESGDWLRRMQKSLDQMNVRVHRAVSDIDGVTGLAILRAIANGERDARQLAKLRDKRCRKTEEEIAEQLNGHWREDHLFSLKQALKMYDDIQQRIGDYEQEIIRQLGAMQRTEFREQAAPKPQNRQKAKTIRQRGQEPMREALYRMSGVDLTSIDAIGVETVEVVLSEYGPDLSRFPTEKQFVSHVKLAPYTPRSGGKPLKKKRRNTASTRVAAALRMAAVSLRNSATALGAYYRKIARSVAGDVAVFATARKLAILIYRLLRWGQPYVDEGEEAFEKRYHERRINTLKSKAKELGYALVQKA

SEQ ID NO: 187495 - protein, 378 aa, unidentified
MNRIIKIGMDVHTTNYTLCIFEPSFEHDGTVHCITQVKPEVKNIIRVIETFKKKHENEELNIVCGYEAGCLGYSLYHELKEKGVECVILAPTTMKTEKGGRKLKNDYRDAKMIAECLAYGGYSAVHVPTELDNSVKEFIRMRDDIKENLKSIKQQIIAFLTRNGKQFNGKSYWTRKHIDWINTISFSEPLLQDTLKEYMIEYNHLCDRIEILDKQIEEISLKEEYVEKVQQLQCLIGIKTHTALSLIVQTSDFNRFKKGNMYSAYLGLIPGDDSSAGHENKLGITKAGNSHLRKLLVEAAQGYTRGKVGFKSKDLKSRQEKCSSEVVAYADRANERLRRKYYRMTLRGKRYNVAKTAIARELACFVWGIMTNHIDLCS

SEQ ID NO: 187496 - protein, 379 aa, unidentified
MNQDTIWIGIDDHKLSLSVAVLDGTSEADPVIKKLANEDGALRRWVRRLERHHRDREIRICYEAGPNGFSLKRRLESFGSVTVEVMAPSLTPRRTGQRVKTDKRDASKLAHLYRAGELVAIATPDESDESARDLGRTFQQVKQEILRKRHHLLKFMTRRGRVYRDGQNWTLKHRQWLKSQTWDEWADEVSFGELLTGLRELEDRRLRLEQSLQRLAEEESRSLLVGVLRCFHGIDTTAAVILVNEIFEIERFETPRRLMSYLGLTSGVDQSGDRERRGGITKTGNRFARFTLGQIAWHYRHKPSVGMKLKKRREGQPLWAVAIADRAHQRLCRRYWALVNRGKPTHKAVTAVARELVGFIWEALVEAKRQSLTVRRVAA

SEQ ID NO: 187497 - protein, 349 aa, unidentified
MTASHYIGFDVHKKTISFCVKTAAGEIVEEGRTLAERGALRQWAAARPQPWRGAMEATLFSGWIYDTLKPYGEQLEMAHPAKMKAISAGKKKSDSIDARTIADLVRCNLLPACYVAPPRIRELRRLLRYRNLVVSEAVRMKNKMAGLLMETGAVYVKEKLHRKKYFASLLEKLEEVPESVIELLRLSRGALEMFENTQKRLVRELLADPELAERIERLMTIPAVGEITALTWALEVGDPHRFRSNSDAMSYCGLTAALKSSADKPQRGPISKQRNHWLQTTLIEAAKLAPRWNLQLAALHARELERGNRNRATLAVARKLVAYLLAVDKSRQPFQVRAPSEEPTPKASS

SEQ ID NO: 187498 - protein, 372 aa, unidentified
MDQVTTTFVAMDTHKQTISVAMAEGGRRGETRFLGEIPSRPEAVAKLVERLSKKHTKLAFCYEAGPCGYGLYRQIVALGHECVVVAPSLVPTRPGDRVKTDRRDAVTQASLFRSGELTSVWVPDEAHEAMRDLCRAREAAVETLRRARQQVTSFLLRHGRIYSDGKHWTGKYRKWLASQRFDHPARQIAFEELVQAMEEALARRDRLAGQMHELLPSWSLAKVVAAIQALRGVAAMSAMTLVAEIGDFHRFSNPRHLMAYLGLCPSERSSGAKTARGGITKAGNRRGRRMLVEGAWTYRLPARVGLAILERNKLLPPPIREIDWKAQVRLCARYRRLAKMGKPINIVCVAIARELAAFVWAIATNDAVSAIA

SEQ ID NO: 187499 - protein, 371 aa, unidentified
MFSQQTANGQAAIQALIARAGKAGGEVCWALDMTSGTAGLLLALLWQTGQPVRYVPGRLVNRMAGAFAGEGKTDAKDAKTIAETARLRTDLVTVTAADPIVADLQVLTAQREDLMGDWVRGVNRLRALLASIFPSLERAFDYSTRSALVLLTGFQTPTSLRDAGRDGVQAYLTEHGAWPRGIPVMADKALDAAGEQTVVLPTEKVTAPLIARLAADLLDLDRRIKDLDKQLTDRFEEHGHAKAITSIPGFGPILGAQFLADTGGDLQRVFGTPGRLAAYAGLAPVPRDSGRVKNNLHRPKRYHRGLRRVFYLAAFSSIRADGPSKTFYQRKRSEGKVHTQALIALARRLVDVIWALIRDNREFQPTVAAAA

SEQ ID NO: 187500 - protein, 419 aa, unidentified
MSFKILKFNCCGLDVHKTWIYACIGITDSNNRTEYKQARFSSFTKGLNELCDWLAKYNCTDVCMESTGKYWIPVFNILEQHNLWVTLSHPKYTKPMKGNKTDRKDAKWICDLYMCGMVKPSFIPPADIRELRDLVRYRYKLTCMITGEKNRAQNCLTVSNLKLDDVFSDVFGKSSRSITEQILQHPGETFDVSPFVDGRCKTPIEEIQAAVDGAISKEQAVKLRQCLDHIDELNRHISEIEQEILRLSDKYEAALNLIRTVPGFDKNPMTAVQVLSEIGGDMSVFPTAKHLVSWAGCCPRNDQSNQKIKSTRISRAGSYFKPVLVQVANALIKSKKHSEFTNRYKRIKARRGHKKAIIAVCRMILTAIWHILSDLKPYTPEGFLESRPVKEEKVLSTSQALNLLKQRGYIIKDKPLAVS

SEQ ID NO: 187501 - protein, 385 aa, unidentified
MLAPPSGEGGAGGTSWSRKVLTTVLIWRPAGFFGVRSTNGRRGFTPGDNQVRGPDLIKMMEVGMNGKGLRVIGVDIGKQTLDVAREGVRTVERRTNDAAGIARFVRGLDPQHDIVVFERSGGYERLLEAQLAAAGVCWAVVDSKRVKAFRIVKGIKAKTDAIDCRLLRDFGRDQFNADKLRLGRLEDVTLAALVARRRQLNAMLHAERCRHETAASELVRTSIARTIAVLEAELATIEGEIAQHIAADPELGLKEEVMCERIGVAQTTARALLAVLPQLGRATAKEISALGGAAPRVHQSGVTQIRRGLDPGRAAVKVILFNPARCAMRLDPEIKAFAQRLRQRGKPGKVIMVAVMRKMLVKLNAAVRDALSSKEVSRLAARAAA

SEQ ID NO: 187502 - protein, 405 aa, unidentified
MDVIVERGAGLDVHKHSVVTCIMGTGIKKEIRTYSTMTNDLLRLKAWLKEHGITHVAMESTGVYWKRVFNILEDSFEVLLVNARHVKNVPGRKTDVQDSEWLCKLLRSGLIRGSFIPPKEVRELRDLTRYKRKLIQTITAEKQRVEKILEDANIKLSSIASDTFGKSGARIIQELLKGELRPDEMAELSKGKLRRRKEELKEALVGNVEEHHKRMIRTSLEHIDAMEEIFVTVEEKIQEKIELHFKEAFELLKTIPPIKDAASVIIAEIGINMDLFPTEGHLSSWAGMSPGNNESAGKKKSGATTHGNIYLKTILTEFAWIASKMKGTYLWSKYQSLIGRKGKKKTLVAVGHKILISCYQVLKYKLPYKELGANYLTERKRDRIARSYVKRLSNLGYAVTLKEVA

SEQ ID NO: 187503 - protein, 387 aa, unidentified
MTGQAQVSRFIPGEYDIFAGLDVDKRSIAMTFSDHKTLIKSQRLPYSSVQLLNYVRKHFPGQRVAFVYEAGPTGFGLHDDLTANHHTCLVVAPSMVPTAPGQRVKTNRIDSKKLSLGLRGGELRSIHVPSRSYRELRHLVQLRDTQVQQLKATKLRIKALLLCEGIPFPEAPPSSQWSARVVAELRVLPCTSEVRFKLDHLIGTLYFHFNSAAVVQKRIRRFCQNDPELRQSISLLKSLPGIGWIVAAHTVARLGDWREIENVRSIAGFLGLVSSEHSTGDKVNRGSITRSGDSRLRNKLIQSAWVAIAKDPELRAFYRSIFERQPKKVAARKAIVAVARKLTTRMYAVLKQQRPYVIRPDISTAPLTTEETVGPRERLDSAQSDQP

SEQ ID NO: 187504 - protein, 340 aa, unidentified
MTVIIGIDPHKASHTAVAIGCDEHPLAEIRVRATCQQTEKLLAWAEPLGPRTWAVESAGGMGYLLSQQLVSAGEDVLDVPATLASRIRVLGTGRSNKNDPNDALSVAIAALRSPGLRSVRVADHGEVLRLLAKRNHEIGRLRSLIVSRLHAALQNLSPGGIAKELNASDAVALLGAYEPVTPVEHTRYELALELLEDVKRLDVQLKASHKRIRTAVQASGTTLTDLYGVGPILACELIGYSGDIRRFTSRDQFASYAGVAPIELSSGGRTVHRLSRRGNRQLNHAIHMVAICQIRQTNSDGRAYFEKKVAEGKTKREAIRSLKRHIANAVYRQLLLDATK

SEQ ID NO: 187505 - protein, 414 aa, unidentified
MKFARNTLPPEPVNGLTCGINWARDDHALSIVNASGRETTRNAISHDAAGLRDMLTTLDQAGAREVAIERPDGPVVAALLEAGITVVIISPHQLQNLRGRYGSAGNKDDRFDAFVLADTLRTDRARLRPLLPDSPATVALRQTCRGRKDLVAHRVAVANHQLRAHLMIVFPGAVGLFAEIDSPIKLAFLNRFDCQERADWLSVTRWANWLASVRYSGRTHPRELHRRLTNATRGATGLNGTTITAAYVATLTTLNDQIKTLDDSIAEQLSTHADAHIFTSLPRSGTFRAARIVAIGDCHARFPTPESLACLAGVAPSTRQSGKGKHVGFRWAADKQLRDTVCDFAGDSRRANPWAADLYNRARARGHDHPHAVRILARAWLYIIWHCWQDNTTYDPAHHRALQQLLNRPQPGAA

SEQ ID NO: 187506 - protein, 340 aa, unidentified
MVVIGIDAHKRTHTAVIIDDNGRKRATKTCETTSKDHLALLRWAAGHGQERVWAIEDCRNMTRRLERDLLAAGERIVRVPPKLMAHARDAARTYGKSDPIDALAVARAALREDDLPTAHLDGPDRDLRLLVDHREDLIAERTRAVNRLRWHLHELDPEWDPPARSLDRVSNLDRILDRLTQLTGVVARLAAAITQRCRNLSQEINAIEAEIDDLAEKLVPTLIALPGCGALTAAKILGETAGITRFHSAAAYARHNGTAPLPVWSSNRARHRLSRTGNRQLNAALHRIAMTQARCHPPAKDLITRRKAGGDGGLEALRVLKRRLSDVVYQALRIDCTLTG

SEQ ID NO: 187507 - protein, 317 aa, unidentified
MERVKSNTAVAGVDVGKGWLDAAVHGRDDEVRVANTAVGILELMSWLAARDVGRVGMEATGGYEKDLRAAGDAAGLEVVVHQPLEVRLYGKLKRRRAKNDRQDAQLIAAATAQVDAVRAAQDPRLQELAERLTAYEQVTDQAAEMKTFLETVRLKDVAALIRSQIRALERAKAKLAADLMARVRGQPDLLERLRLLISLPGVGPIVALSLLIRMPELGAMKRGQAASLIGVAPFDRDSGQLKGMRFIAGGRARPRRMLYLAALAARRCDPALKAFAERLVARGKPAKLAIVAVMRKLVEAANLVLTRQQPWLKTRTT

SEQ ID NO: 187508 - protein, 398 aa, unidentified
MNNTVTSRLMVGIDIGKRFHQATVIDDSGRIIGGSVRFANNTPGGEMLLSRVDSVNPSRLPVFFCLEATGHYWLPLYSFLTSRGYPVAVINPYQSDAWRKVHLSSTKTDKEDSYLIADLFRFGAVSSTVLPSEELVSLRNLTRFRMALSQQITDTKRRIVTILDQIFPEFETFFSAIFGKTAKAILEEYPTPDSLEKVSLRKLANLVSRLSQGRFKTEKAREIKDAAASSFGVTFAMDSFTLELRLLLGQLEFLAGQIQTVEKEIATVMAKTPTTLTTIPGVSLLLAATIIAEIGDIKRFKTSSQLVAYAGINPTVRQSGQFSSNQNRMAKKGSPYLRLALWQAAVVAIRFNPVLKDYYQKRLAEGKNKMVVIGAVARKLTGIIFALLRDNKDFVVLK

SEQ ID NO: 187509 - protein, 355 aa, unidentified
MTIAKYIGMDVHKESISIAVMNSTGKFVMECVIETKASMLLQFIDGLRGDVRVTFEEGTWAAWLYDLLKPHVSEVVVCNPRKNALLKDGSKSDRIDARKLAELLRGNQLKPVYHGEQGLRTLKELARSYLTISKDVTRVMNRLKALYRSWGIACAGTQVYAPRHRSEWLGRISEAGVRRRAEHCYQQLDVLRLLRQHVRRDLLLESKKHQTWRLLGRIPGIGPIRAALLIALIQTPHRFRTKRQLWTYSGLGLETHDSAQYRVVEGQLRSKKSVTLRGLNQNHNHDLKDIFKGAATRVSSSSSGPLHDFYEHLLAQGRKPTMARLTLARKIAAITLIVWKKEVHFDASHLTSQAA

SEQ ID NO: 187510 - protein, 367 aa, unidentified
MDAPCTGVECAKMEVLLTPQQGTPMSEITVIGLDLAKHVFQVHGADPDGRPVLRKRLRRGQVLEFFASLSPCLIGMEACAGSHYWGRELQALGHEVRLIPPQYVKPYVKTNKNDATDAEAISEALTRPTMRFTAVKSAEQQSVLMLHRTRELLVRQRTMLVNALRGHCGEFGIVAAQGLSRAGDLIKRIEDPADTALPDLARQALQCLTSQIRAIQEQIALIEKKLLAWHSSCEASRRLAEIPGVGLITATAVVASVGNATQFRSARQFAAWLGLVPQQHSSGGKERLGHISKRGDGYIRRLLVHGARAHLSWSRRKKQIRSAWLTGLLARRPTNVVLLAMANKTARIAWAMLSRGERYQEMIAAAA

SEQ ID NO: 187511 - protein, 415 aa, unidentified
MDVVHPRCAGVDISKRDAKVCVRIQGAGRARARSTVTTWEAVTNRILALRDHLIAEEVTLVVMEATSDYWKPFYYLLEDASFEVMLVNARHTKGIPGRKTDVSDAAWLAELGAHGLVRGSFVPPEPIRQLRDLTRTRTAITRERGREVQRLEKLLEDAGIKLSSVASDITGVSGRAMLEALIAGNRDPAGLADLAKRRMRSKIPELTEALTGRFGDHHSFLARLHLDLIDGHSRAIEELDERIEEAMQPFRATRDLIVTIPGISTVVADVIIAETGGDMSRFPSAGHLASWAGTCPGSNESAGRVKSTQTRPGNPYLKGALGAAAMSVAHSKNTYFAAKFRRIASRRGPVKALVALEHAMLIAIWNMCSTGAYYADPGEDFFTRLHPDRARDRALEQLHRMGYSVRLEPLPAQAG

SEQ ID NO: 187512 - protein, 327 aa, unidentified
MTMNPTQKQFNHVVAFEVSKHTLVVHELPGDEQCCIANEPKAVRRLLRAKIKRHHARLGALLVVCEATGGYERHVLEACVALGLTCHKAHGARVRHFAKYLGLIAKTDPIDARILALYGLRTEGLRLYRPPSPEELALKELKARRDDLIGMLIAEGNRLEHARQASVIQSIKAHVASLRKALKALEAEIALLLRSNETFARKARLMRSLKGVGPVTATTVLADMPELGTLDKGEAACLAGLAPINRDSGKTSGPRHIQAGRAAVRRCLYMAALAALQANPVIKAYAATLKARGKPFKVVIVAVMRKLLIILNGILRSGEPWRHAKIA

SEQ ID NO: 187513 - protein, 449 aa, unidentified
MSKRQGKPEGLPIVHDRAAGIDVGSRFHVVAVGPELSDEPVQSFQAFTGDIERMADWLIATGVKTAAMESTGVYWVPVYEILESRGIEVILANAREARAVPGRKSDVNDAQWLQRLHACGLLRASFRPGRDIAALRAYLRLRERHLDYAAAHIQHMQKALTFMNLQLHHVVSDITGETGMRIVRAIIGGQRDPKVLATLRDPRCKASTETICASLVGNYQPEHVFALTQALMLYDFYQARVAECDAQIEGVLTALTAERARPSMPMPKVRHGTRQPNAVCFDVRPLLYQLTGTDATQVHGVGPYLALRLVAECGTDLSRWPTAKHFTSWLTLAPGCKISGGKVLSAHTRKTTNRVAALLRLAAVTVGRTNTALGAFYRRLAARVGKAKAVTATARKIAVLFYNAMRFGMQYQDPGADHYERKYRERVIKQLHRRAAEFGFTLQQAASVS

SEQ ID NO: 187514 - protein, 362 aa, unidentified
MSMNAVGIDVSKRKSTVAILRPGGEVVASPFDVPHLSGCFQPLIQHIRALNGQTRIVMECTGRYYEPVARQLSQAGFFVCAVNPQIIHGFQGQGNPLRRVKTDKADSIKIARYTLDNWANLKQYTLMDELRTQLKTMNRQFDFYMKHKTAMKNNLIGLIDLAYPGANTYFDSPAREDGSQKWVDFLDTYWHVDCVRKMSCNAFTLHYQKWCCRKKYNFSRLKAEEIYETAKELIPVLPKDDFTKRIIKQAIQQLNAASQTVEQLRILMNETAAKLPEYPIVMAMKGVGPSLGPQLMAEIGDVARFTHKGAITAFAGADPGVNDSGDYSQKSVHVSKHGSPALRKTLYQVMDVLIKTKPDDPR

SEQ ID NO: 187515 - protein, 342 aa, unidentified
MEGSITWVGIDAHKKTLAVAVLPPGSRVPEEFTVDNTESAIRKLGRRLTKAAKGREVRACYEAGTCGFTLQRRLDAAGVICEVIAPSLIPKKAGERFKTDRRDALKLAELSRAGVLTAVSPPTLEQEAMRDLCRCREAARADLHRVRHRLVKMLVRRGLVFDPHQRLWSVAHRRWIDGLFFENPVVRTVVAEYRLAIEQTERRLRALDKEIEKAAELPLYREHVAWLRCFRGIDTTVAMIIVAELHGVDRFESPRALAAYLGLVPTLHASGDSARHGKITKTGNGHIRRALVQASWQYRHRPAVGVALRKRREGQPERVLVRATSRRSTIMRPYSVRAATRE

SEQ ID NO: 187516 - protein, 422 aa, unidentified
MLQETAETEEIIERVAALDIGKAELVCCVRVPDEGRPGRRLQEVAAYPTMTGSLLRLADRLRCLGVTRVVMEATSDYWKPVFYILEAHGFETWLVNAKDVKHLPGRPKTDKLDAVWLCKVAERQMIRPSFVPPAEIRRLRDVTRYRIDLVAARTAEKQRAEKLLEDACIKLSVVASDIFGVSGRDMLNALACGERNPKVLAQLARASMRGKISVLEEAFTGQFTGHHAFLLRKMLARVDALDADITELNERIEAMVAPFSSAVERLDEIPGVGPVAAAIIIAEVGLDMSRFPTAGHLASWAKFTPGVKESAGKKKGKGATGHGNSYLARVLGEAAVGAARTDTFLGERYRRIARRRGAKKAVVAVGRSILIIVWHLLSDPQARYTDLGSDFFDRRINPERRKRAHIHQLEALGYKVTLEPAA

SEQ ID NO: 187517 - protein, 343 aa, unidentified
MKLIRVGVDLAKNVFQVHGVDRKEKAIWRRRLTRGNWLEVLQATVEPGCEIGMESCGGAHHWARRLQAKGFKVKLIAPQFVKPYVKSNKNDANDAEAICEAMGRPGMRFVAVKTVEQQDIQAVHRVRSELNKQRKAKANQIRGLVAEYGLVAPREIVHLRRALPRWLEDAENGLSARFRRVLAGLWGDLRALDDRMAELDREIVLIAQGDPVAKRLQQLRGVGPIIATALVAAVGNGEQFANGRQMSAAFGLTPGQHSSGGKERMLGISKRGDVYLRSLLIHGARAVIRTAKGKDDRLSQWATRLAARRHPNVAAAALANKTVRMACAMLKNGTDYQPELTRG

SEQ ID NO: 187518 - protein, 322 aa, unidentified
MDAAQEAPRFAGVDVAADRLDVHVRPGDVAWAAANDPDGQAAVAARLAELGAALVVVEASGGYERPLVAEVAAAGVAVAVVNPRQVRAFAKAIGQLAKTDALDAAVLARYGEAIRPSPRPLADAAAQELRDLVARRADLVAIQAGEKQRLGRASGAVRASIAEHLAWLKERVGALDRRIAALIAADATWRATATLLLTAPGVGAVTAATLVAALPELGKLDHGQIAALVGVAPRNRDSGKTRGVRTCWGGRAEVRRVLYPAAGTAVQHDPALRAFRARLLAGGKRKKVALVACMHKLLTILNAMLRDGAPWAAPDPAAPPRH

SEQ ID NO: 187519 - protein, 457 aa, unidentified
MSEAKRSRSPRELSPVHPAAAAIDIGATIHVAAVGLDRDTEPVRTFQTFTDDLHRLGDWFARCGIKTVVMESTGVYWIPIYEILEQRGFKVMVVNARDAKHVPGRKTDVSDAQWLQRLHEYGLLRASFRPQAEMAGLRAYLRQRERLLDYAAAHIQHMQKALTQMNLQLHHVVSDITGVTGMLIIRAIVAGERDPGILASYRDPRCHASVETVRQALVGNVREEHIFALTQALELYDVYQAKVVACDKQIEAILKRLQKGAPAPLKELPPVRQRTRQPNAPAFDAREALHAILGVDLTQIHGLGPYLALKLVGECGTDLSAWPSAKHFTSWLALAPHNKISGGKVLSSKTRRTSNRAASLLRLAAVTVGRTDTALGAFFRRLSARVGKAKAVTATARKIAVLFYNTLRHGMSYADPGATYYEDRYRQRVLSNLQRRAKSLGFVLQQVDQGAPQAGVS

SEQ ID NO: 187520 - protein, 402 aa, unidentified
MNAVGIDVSKGKSMVAIMRPFGEIVSAPFEIKHTASDIHSLVELINSVEGESRIVMEHTGRYYEVLAHQLSKANLFVSAINPKLIKDFDNDSLRKVKSDKADAVKIARYALDKWQNLKQYNVMDELRNQLKTMNRQFGFYMKHKTAMKNNLIGILDQTYPGVNTYFDSPARSDGSQKWVDFASTYWHVDCVRKMSLNAFIDHYQNWCKRKKYNFSQSKAEEIYGKAKELVPVLPKDAITKLIIKQAVDQLNSASTTVESLRTLMNETASKLPEYPIVMAMKGVGASLGPQLMAEIGDVSRFTHKGAITAFAGVDPGVNESGTYEQKSVPTSKRGSSDLRKTLFQVMDVLIKTHPQDDPVYQFLDKKRAQGKPYYVYMTAGANKFLRIYYGRVKEYLSSLPES

SEQ ID NO: 187521 - protein, 305 aa, unidentified
MISWVGIDISKSNLVVWVQPQKDGFEVPNTVEGFDVLVARLAQYTVGRVLLEATGGYERRVMAALQQASFSVLRINPRRARAFAVAMGKNAKTDPIDAAVLADFAEALHASREKPISPEREALRELIQLREHFVQQRDDNKRRLQQAQLPAVVEAIKDHIRYLQTQIKQFTKAIDQNMRKLDAEKADRLISVKGIGTVATASLMVYLPELGELDRREIAALAGIAPYNDDSGNHSGKRQIFGGRARVRRALYMSCWVVIRHQADFKARYESLRERGKSAKVALIACMRILLIRLNAMLRDGTEWR

SEQ ID NO: 187522 - protein, 338 aa, unidentified
MSKITTIGLDLAKNVLHVVCCDVRGKVVRKRKLKRSQVLAFFGNLERCLVGMEACAGSHYWGRELEALGFEVKLIAARYVKAYVRGNKNDYNDGLAIAEAVVRPEMRFVRSKSPEQQDIQALHRMRKGCVGARTSLCNRMRGLAGEYGLVAPKGIATLRRRIPEWLEDGENGLSALFRRLLCEGMEQLQELDSHIAFYTREVARLSAHNEACQRLQTLPGFGPIVASAFHGQIGHGEAFRRGRDASASLGLVPRQHSSGGKDTLLGISKRGDRYVRSLLVHGARAVVSRAEHKDDRLSLWINHIRVKRGYNKAVVALANKMARMGWAVLANKTVYRAA

SEQ ID NO: 187523 - protein, 345 aa, unidentified
MDHFAGLDVSVKETSVCVVDDTGKIVREVKVASEPEALLPVLTNPLYRFKRIGLEAGPLSQWLFSALAEAGLPVICVETRHMRAVLQAQINKTDRNDARGMAQMMRAGLYRPVHVKTLRRQKLRMLLTHRKLLQSKAIAIDNDLRGTLRNFGLKVGVAGASKFEARIQALVENLPDLAELVEPLLIVRRTLREQIGVLHGRLLAIVRTDDVCRRLMTVPGVGPVVALTYRATVDVAARFRNSKAVGAVFGLTPARYQSGEIDRSGTISRCGDEMMRAMLYEAAHIMLVRVAKWSWLKAWAMKIARHRGMKKATVALARRLAVILHRIWVDGTEFRWTREQAAAAA

SEQ ID NO: 187524 - protein, 435 aa, unidentified
MTTLGIDLAVRAAHVATLTDERGKVVWAKRRFRNCCDDLMALSAAAGATDDLTVVMEPTRNSWVLVAAHFKAAGAKVVLVAPEQSADLRRYYKKHVKNDRLDSMLLARLPLLHPDGLDELADLGPADALKRAVRRRVKLVEQHLACRQRLDTMLDLLGPGYVEVLGIRASKTSLLVLERYGDPRSLRRLGLNRLTAVLRRTSGGKWNAEHAQRLLDAANEAIAMWSGGGLDFTELAWDLASEVRVLRQLEHEITRLDDRITELYTNADPKKIVLSAPGIGPVLAAGIRGRLGDADRFANLAAVRSFSGMVPRVNQSGNTDTRPGITKQGDPGLRRDMWFAADLARHQDPQLAAKYYRLIVERRLHHSSALCHVSTTLLTRIAACWRTGQPYVVRDVDGRAVTPSEARAMIAARYTVPPEARRHSRVPDAKSEPTK

SEQ ID NO: 187525 - protein, 305 aa, unidentified
MKQISKIGITKKVIKKTTFRKDHFKGMCVYAGIDVHKKSWFITLYVEKIFIKSFTVSPPSSEKLISYLTEHYPGGEYHVVYEAGFSGYSLYDDLTAVGIDCKVVSPADVPMGNKNKKFKTDKNDSKNLAQQLKSESLYGIHVPDPIIREYRALVRLRNKLVKDRTRIKNYTKSNLMFFGKEIKDEEGKAKKSWSKEFYRLLSEVNYNTDEGKKVMERQINMIKYLDGQVKEVDKEIEALSKLPRFKEDVEILTSVPGIGILSAMVLLVEIGDFSRFYDTGQLKSYVGIIPNEHSSGEKEVKTEIT

SEQ ID NO: 187526 - protein, 354 aa, unidentified
MSQTSNTAIAVIGIDIGKNSFHVVGHDARGAIVLRQKWSRGQVEARLANIPPCLIGMEACVGAHHLSRKLASLGHDARLMPAKYVRPYSKGQKNDFNDAEAIAEAVQRPTMKFVATKTAEQLDLQALHRVRERLVSQRTGIINQIRAFMLERGIAVRQGIGFLRMELPTILATRTDALSPRMLRVIEELAGDWRRLDQRIDGLSGEIEALARQDQACSRLMTVPGIGPIISSAMVAAIGTGDVFSKGRDFGAWLGLVPKQISTGDRTILGKISRRGNRYLRVLFVQAAWVVLVRIKNWERYGLKSWIEAAKRRLHHNVLAIALANKLARIAWAVLAKGRAFELTRTDDAGVRPA

SEQ ID NO: 187527 - protein, 341 aa, unidentified
MNVKTIGIDLAKNVFQIHGVDEHGKRLFNKQLRRAQMASFFANIPPCLIGMEACASAHFWANKLISMGHNVKLMAPQFVKPYVKTNKHDAADAEAICEAVTRPNMRFVPVKTAEQQAVLALHRSRQSFIKQRTAQANQIRGLLAEFGIVVPRGIQQLQRRLPELVEDADNPLPVLFRTQLSLLQHHMAYLFDVIATLDKQIEQCYRQNALCQRIGKIPGIGPVTASALIATIGKANNFENGRQLAAWLGLVPRQHSSGGKQVLLGISKRGDTYLRTLLTHGARAVLQSAKHKQDAVSSWANQLMARRNNNIASVALANKNARTVWALLAKEREYCAPIISA

SEQ ID NO: 187528 - protein, 423 aa, unidentified
MTTKILKQCVGIDCSKDNNEVCFGHLTKQLDVVYKATASFPNNEKGFKALVEWVKKLADESLKVHVVIEATGVYHEHLANFLVDEQYLVSVVLPNKVNKYANTLPWRTQNDKTAAKVLCSMGLEKKLDLWHKPDPVFVHLKQLTRERERLQKECTASKNQLHAQEYSAYKNDATIKRSKARIKFLRAQIKEIEKEIQQIVNNHPELKNKISKICKIPGVGLITAVIVVAETNGFHYVRNRKQLASYAGYDVQEKTSGTSVHKKPRISKKGNSHIRKAMHFPALSAIHSVQYHHPLKDVFQRIVAKHPDIPMKAYVAIQRKILLLMYTLWKKEEEYIPDYEEKKKSTANKETIVAKENTNQTQPESPTEKAEKTSIIVEKKDVLSNIVSKKGMTMKKNPEELANTHSPKKSRAAINICPTRAGS

SEQ ID NO: 187529 - protein, 348 aa, unidentified
MFNPKLVVGIDVSKSDLDFADFCKTDHKITKEGDTKNEIKKIEKLLKGYDPLTTLIVFEPTGSYSDKLLHSCEKMGFKFSLVSPRASNYYTKALGISTKTDAQAARTLALMGATQSLALYQPSSKENKERKRLMNHLCYLEKEKQALLNKIHAEEQLVKTSKTLLKSLNRRLKQTIKEIGEVEQSLKTIKDADFEAKKKKAKTVVGVGDKVADWVLTFSDGLTNFHTSGSLKKFFGLAPNTHTSGSSVRKNQGISKAGPGKVRGCLYMAALSAIKHNKVCKDLYYRLRERGKCHFKAIVAVMAKLLVQIFAVVKSDIDFDNDYLENKAKAKKAAQEERVDQTKVELAA

SEQ ID NO: 187530 - protein, 403 aa, unidentified
MGVDWGDRLHQVYVGDEEGKKVREVKVPETVEGLAEMGRWLDEKRAEEIELWAAIEKPAGRIVDFLLDHGVVVYPVNPKAVDRVRDRYRMSGSKSDPFDAYVLAEFLRTDQVHLRALQPNSEKAQELKLLSRDQRRVGRQKTRLLNQLTITLKEYYPRVLEAFNDLETQIVLDFIKQYPTPAHLSVLKRKEFNRFATKQHHLGKARCEELWEELKKPQLAVPEHVVRAKAQLVEVLIEQLQASIKAVKIYHERVESFFASTPAAEIAKTLPGGKSGVVVAGIWAELGDARGRWKSSRHLQAEAGAVPVTKASGKSRVVQFRFACNKHLRHTMYWFSFGSLKHCEWARHYYRGQKAKGRTHPQTLRALAAKWLKIIFVMWRDHKPYDENYHLANIARQKIRQEA

SEQ ID NO: 187531 - protein, 444 aa, unidentified
MKRTRRRPPRAPEVAEERRESVGFRRRRERRERAAAFLAGSPLIVGLDLAKRRHAVWLGRPDLTPIRRLMVEHSPDGMERLLGLVEEERSKAGADRALFFMEATSYFWQNVANALEAGGQAYRLVSALSVDRLREIEHQTYAKGDHRDAELIARLGQQGQYLDRQLEHDRLWLDLRALAREHDVLLVAEGSERLRIRSLLGLALPEFLDSFKDPLGKTAIAVLRKLSRPPQEIPSSLADLRERLDAVEGVRLQRAKLRDLAARLDAAVSFGVETALGTTLARIGLALERFEFLADQRAQVRARLVPLYEATPYAAVLSTIPAVGPESHALLLGIIGDPKRYDRATCLVKLAGIEPRENHSGDAEGSHSISRRGQAPLRHLLYRIVCGLALQNDEFAAYVKRLTTRETQPLKWQQAVVAAGNKYLRVFHHLCVRGEVYRPDALKS

SEQ ID NO: 187532 - protein, 332 aa, unidentified
MPFIEGEVIVGVDTHTDTHTAVVIDLLGRQLGVLEITTTSAGYQQLLCWARSHGIVNCAGVEGTGAYGAGLARFLAEHAVTVFEIDRPNRQHRRRHGKSDPADAHAAAKAVLAGDAGFAKSTTGTVEAIRCLHLVRRSAVKAKTQAGNQIKDLIVTAPEPVRDELRRLKTPARVRTAARWQITQIDDPATASRHAIATLARRWLQLHAEVRELEKKIWPLLRQLAPTLLAEPGVALDVAAKLIIAAGENPHRLHSDGAFAALCGTSPVEATSGKRQNRHRLNRGGNRQANNALHTVVLHRSRHHAETRAYIERRRQEKLTDPEIWRCLIGRV

SEQ ID NO: 187533 - protein, 346 aa, unidentified
MQDTTIAVDVAKNVFEVAVSGRPGQVSERQRLSRGQFVRFLAKRSPATVVMEACGTAHYWGRRAEAEGHRVVLLPPHAVRPYVLGNKTDAADAKGLLEALRNEDLRSVPVKSIEQHELASLHRLRSGWLATRTSRINTVRGLLRELGFTIPLGARRVVPAVVVLVSDADSGLPEALRPMLTEAAQEIEALEGRVRAVEQSLAALARTSVVVSRLQTIPGVGLLTATALVAFVGDATRFASGRHFASYLGLTPRESSSGFKRRLGGISKRGDPYLRMLLVHGARSVLCNAKRTSKKNDHLRTWALEREQARGHNKAAVALANKLARIVWAVWSHDQGYGGSPTLSKN

SEQ ID NO: 187534 - protein, 407 aa, unidentified
MIFVGVDWAEAHHDVHVQDENGRRLAGGRLSEGIEGIARFHDLVAAHAEDPGEVVIGTETDRGLFAAALVNAGYQVFTVNPMSASRYRDRYSSSGAKSDPGDAKVLADLVRTDRHNHRRSVPDSDLAEAVKVLARAHQSMIWNRRRQLNQLRSALREFYPGALAAFDDLASGDAAEVLKLAPEPRLGAALSKTQITAALRRGGRTRRLTERATAIQAALRAPQLQPSPVVAAAMGAAVASLAAVTSEMTRQIAVLEQQLAADFEQHPDAEIVRSLPGLGTVLGARVLGEFGDVPDRYPDAKSRRNYAGTSPITRASGTRRLVLARHVRNKRLADAIYLWAFSALSTSPGARQFYDQRRAAGDTHHQALRALGNRLVGYLHGCLASHTPYDETTAWAHRPGIGLTNAA

SEQ ID NO: 187535 - protein, 410 aa, unidentified
MNIVCERVCGLDVHRDTVVACVRVPGEGRARQQTIATFRSKTADLLALRDWLEQWQVTEVAMESTGEYWKPVYWILEEGFKVLLVNAAHVKNVPGRKTDAKDGSWIAQLLECGLLRGSFVPPRPIREIRDLTRYRKKLIEQRTEEVLRLHGVLQRAGIKLSSVASNIMGVSGRAILDALVEGKQEATAISELARGKLRGKIPLLQKALQGQFTPHHGMMVSHMLGHIDYLDETIVSLSEEVEKRLEPFRRERELLKTIPGFQDRTVEMVIGEIGVDMEQFPTCGHLASLMGLSPGNNRSAGKRKPEKIRRGGRWLKPALQEAAWAAVKRNDSYLAARYHRLVPHKGKKKAIIAVCHTMLIAVYYVLKKHVPYQDLGADYFARRNQNAIERRCLRQLNQLGYEVQLSRKAA

SEQ ID NO: 187536 - protein, 360 aa, unidentified
MGKRVSKKESWFKENNFTAEDEIYVGVDVHKRNYHVAIWHNGRIGCAYSMTSDNNKLLRDIQQVRSSLKNIVYEAGPTGYSLVRLLRSANLPAEVVAVSKTPRMTDTSAKTDRLDCQQLAEYAAKGLLTFVAIPTEQQEADRQVVRLRDQLTSKRKRIMHQVKSFLLQHSISWPGGNWSKILIERLRQLDISSELRFTLAQYLDEYEFFCSKIAETETKLRQIFSSERHSAAIEIFKSHPGVGNIVAWEYRAEMFNITRFSESKQISKYTGLCPRISRSGQTCHQGPITKTGRRQLRAMLVQAAWAWYRRDPHARQIYNRLLHNTGNGKKAIVGLAKRIAIHLWRMLCDGCLYDAKVVKV

SEQ ID NO: 187537 - protein, 345 aa, unidentified
MEKSTVIGIDLSKRFMQVCTIDGEGNAIEEVRVPRDRLAETVSVHRGAVVAMEACGGAHHWGRTFERLGHEVRLIAPYVAKAYRDPACKDDRRDARAIAEAGSRPHARAIPVKDAQTQALQSLERIEALYARQRTQLGNALRGLLTEFGIVLPKGPGHLTRRVPELMASGAWAAVPSTLQDALAELFAQFLAIGERLAEAKKRLVSAAAADPRARLLTSVPGIGPLTAAGFVAAVADAARFECGRDLAAWLGLTPKLYQSGDTCLLLGISKRGNPRLRSLMVIGAQSMLRRYAEGRHHDDPLAQWARALLKRKPRNVVAVALANKLARIAWRVAVSGHPYHPRAV

SEQ ID NO: 187538 - protein, 317 aa, unidentified
MKRVKTSTKCAGIDVGKRWLDVAVHGREETIRVANGAEGWAELTGWLGEQEVRRVGLEASGGYERQVRAALEGAGFEVVVHQPLEVRLFARLKRLRAKNDRIDAVLIAAATAQADAVKAAGDPRLQELAERLTAYEQVADQLAELKAFMEHVRLKDVAAALRAQIRSLKALKERLAAKVVAGIKAHPDLLERFSLLTSLTGMGPIVSAGLVVRMPELGHMKRGQAAALLGVAPFDRDSGQYKGLRFISGGRRRPRRLVYLAALNAKRWDPTFKAVAERLAARGKPPKLILVAIMRRLIEAANLVLARRQPWVRAAQT

SEQ ID NO: 187539 - protein, 433 aa, unidentified
MLKLNYMSTLFVGIDVSSKTNAVYAMDFEENKYISSSFGNNQPGADKLVNMIAECMHKHKNLNTILIVLESTSVYSVHISNFLSTSEVLMPYKPYVFCVNPKATSNYRKSYIGMEKTDPTDAYLIADFGRVGRTKKLEPWRGGQFIALKRLTRHRMHLSECITREKTYMVSNLYLKFSELQLLEGDDKPFGSLYGATSSAVLTEFLSPQEIIDMPEEELLTFLAGKSRNRISDLSKTSELLRKAARDSYRLDKCMYEPLNISLASSFNCIHAYQKEIKLIEQAIEKCINGMNPNALLILQSIPGIGPIWASGILSEIGDITVFHSSDALAKYAGLYWPKGDSGDFTSEDNKMSKAGNPYLRCYLGEAANSVRKHIPEYADFYARKYAEVTKHQHKRALALTSRKLVRLVFGLLVKNQLYTGEKLDTEYNIESN

SEQ ID NO: 187540 - protein, 420 aa, unidentified
MQIIYRRCAGLDVHEKSVSACIRIVKGKQVETVEATFPTFTEDLEQLRDWLIRNRIQRVAMESTGVYWRPVWNILERQPAKLDLLLLNPQHVKALPGHKTDRVDAARIAELTQYGLVRASFVPPQEIRELRDLVRRRVHLQQDRSRVSSRIHRLLELQNIKISSVLKKMTSATARSILEGLATATTIKPEALALLATHKKVRGKREQLKKALRCHPTDHFRFLLRELLEELDRLTAKMKLMEERIGGRMAPYSELIERLCGIPGVKELTAWTLIAEIGVDMARFPTAGHLASWCGLCPGNADSGGKRRSGRTSKGNRYIRRALLQAAWGVERITSRRTFLTSFFFRVSRKAGRRKAAVAVAHKILTLAYVMIRDGSAYYEQGVDYFDKVHPERTKKRLTARLEQLGFTVRLEPKLSPETS

SEQ ID NO: 187541 - protein, 327 aa, unidentified
MDPTTTAARLFAGVDVSKDRLDVCLRWSEPQSHEREEAFFVAYDDSGIDALLSRLLKECTVLVVLEATGGFERTVVGALAAAGLPVVVVNPRQVRDFARAMGRLAKTDRIDAAILARFAEAVRPAPKPLPDRELRALQAIVARRRQLLGMLTAENNRLSSATKPVAKRIKAHIRWLEKELSRTERDLEAAIENSPTLGENEALLRSVPGVGPVLARTLLSGVPELGTLTHKRVAALVGVAPLNRDSGTLRGHRSVWGGRADVRAALYMGALVAARRNPVVKEFYERLLAAGKPKKVALVACMRKLLSILNAVLKHRTPWRPPHYLST

SEQ ID NO: 187542 - protein, 350 aa, unidentified
MLIIGADYHPGFQQIAYVDTESGDLQERRLQHGEEAEKFYCDLAAQEMKVRVGMEASGQARWFERRLGELQFELWIGDAAEIRTRRVRKQKTDRQDAQLILKLMLKDDFPRIWVPSWENRDLRQLLWHRHRIVQMRTRVMNQLQAVALNEGVRRKKALWRPAGRIQLESLGLAPWASRRRHDLLELLDRLNPSIAQLTKAVEQEAEKCSEAQRLMTHPGVGPLTALAFVLVIGTAKRFRCGKQIASYLGLVPSEDSSGDRRRLGHISKQGNSLLRFLLVEAAQVTVRSNQEWRSKFFHLAMRRGRKIAKVAMARRLAIRLYWMWRKGWNYEQLTQFGSHAGQPGNPHGVQ

SEQ ID NO: 187543 - protein, 312 aa, unidentified
MDNLSHGRIIGIDVSRDWLDLHCRIPNIPEGRTAVADLAHDRDAVVCFESTGGQEWQLWAKLEAESVVARQVPPAQVKAFAQSRGTRAKTDRIDAELIARFFAFRPDAGRSLPAEKLRFLRALTSKRAQMVEMRKRLLAQIRAHQKLGTAEMFDSIDTELKVRLDSLIKELEDRIVAAISSDDLLSETVGVLRSIPGIGPVASTMLVAEMPELGTITGEQAAALVGLAPVAHDSGTMRGKRSIAGGRRALRHVMFQAALVAAHHNPTMKAFADRLQKAGKPHKVIVTAVARKLVNLANALCKKRQKWVLPKP

SEQ ID NO: 187544 - protein, 347 aa, unidentified
MNQIIRIGMDTSKHFFQLHGVDTAERPVLRRKLRRKEMAGFFAKLPPTEIGMEACGAAHYWGRVLRELGHTVKLIAPQHVKPYIKRNKNDGRDAEGICEAMSRPTMQFVAVKTEEQQAALMLVGMRERLVARRTQLSNAIRGYAAEFGLAAAKGLDKIEPLLAKIAADEALPVLARDLFAMHGREYVQLQAELKKIEARLMAWHRANTDSRRLAQIPGIGPVVATTLVMKAPDPRLFPSGRHFAAWIGLTPKDHSTAGKTRLGTITRAGDEMLRSVLVAGATAVIQQARRGRGRASPWLLALLARKSSPKLAAIALANKIARIAWKLLVTGESYHAGGKPIASAHAA

SEQ ID NO: 187545 - protein, 363 aa, unidentified
MNATAALPVVGVDLAKSVFQLAVADGAWRVVEQQRLTRLQFERWFINRAVGLVVMEACGSAHHWARWLNGLGIEVRLLPAAYVRAYVKRNKTDAADACALLEAARCAEIVPVRIKSVEQQALQAMHRTRSLWMATRTSRINALRGFCREFGIGIAQGSRLGVEQIGRVLADPHSAVPLLLRRSMSLLVEEIRLLEVRIAQLERELTAQARQSPACTTLLSIPGVGLLTATAMVAATSGEVGHFHDARHFASWFGLTPKEHSSGGTRHLGRISKRGDRYLRMLLTHGARSVLRAASTAVRAGKTVDGLRQWALAVQGRSNHNKATCALANKLARICYATLRDGEPYGVTRLNKKVARTAFALPA

SEQ ID NO: 187546 - protein, 391 aa, unidentified
MIYVGIDVAKDKHDCFITNSDGEVLFKSFTIANNREGFETLFQRIQSVSDDLTKVKVGLEATGHYSYNLLGFLLDNGLPTFVINPLHTNLYRKSLSLRKTKTDKVDAHTIASMMMSDVNLKSYSDTSYHNEELKSLTRYRFDKVKERAKLKSSVSRLVCILFPELEKLVPQLHIASVYALLSEFPSAHAVASAHLTRLTNLLSESSRGRYGKETAIIFRDAARNSIGSNMPAKSLELKHTVRLIQELTSEIDEIENEIKIIMDEINSPILSIPGINYRMGAMILAEIGDFSRFDSADKILAYAGMSPSTYQSGQLDNCYSHMEKRGSRYLRYALYNATKYVCHWDESFGAYLTRKRAEGKHYNVALSHAAKKLVRTIYAMEKSGQAYKHVA

SEQ ID NO: 187547 - protein, 349 aa, unidentified
MSRILALDLGKFKTVACVFTPADGSSRFITVETTVDHLTGLITREAPTLVVFETCTIAGWVHDLCLKLGTVCQVANPNGEAWRWRNVKRKTDRDDAVKLARLAAAGELPTVAMPSPAERQKRSLLHHRQGIVRQRVGTQNALRALVEAQGLRLASGHRAWTAVGLTLLRSWAKPLAECGPDELWRGQADLLISELAQSREREAEVDAALERMAVADERVRRVRTVPGIGRVTAEAIVNYLGDGRRFRTAGQVGSYAGLVPTQYQSGQSDRRGRVSKRGPGLLRKLLVEASWVMLRYNEWAAAFVKRVSRGQKTRRKQAVVALARKVLIRCWAMLRDGTDWQTPTPSMAA

SEQ ID NO: 187548 - protein, 358 aa, unidentified
MVDKVTEAAVVGGVDTHKDLHVAAVVDQNNKVLGTQYFSTTRQGYRQMLAWMTSFGTLKRIGVECTGTYGSGLLRYFQNAGLEVLEVTAPDRMERRKRGKSDTIDAECAAHAAFSGIRTVTPKTRDGMIESLRVLKTCRKTAISARRVALQIIHSNIISAPDELREQLRNMTRMQLIRTLSSWRPDASEYRNVTNVYRISLKSLARRYLELHDEIADLDVMIAAIVDELAPELIKRNAIGYESASQLLITAGDNPQRLRSESGFAALCGVSPVPVSSGKTNRYRLNRGGDRAANSALHIIAIGRLRTDAKTKEYVARRVAEGHTKMEAIRCLKRYISREVYTLLRNQNRRINSIPITA

SEQ ID NO: 187549 - protein, 418 aa, unidentified
MKVVFPTCCGVDVHKSFLVATIIKTQQDSLQPSYQKKRFSTFNSDLNRFADWLHENDCLDVCMESTGKYWVPVFNILEKRGIRVVIANPKWVKAVKGNKDDTKDSKWIGDLFRIGLVKSSFIPDKDIRILRELTRYRYKLTSMRSSEKNRFQNAFTVCNVALDSVVSDMFGKSATAITDYLTSGEDFDAQHCISLLQRSLKKKADDVLQSIEGYEITAEQKTRIGIIRDHLHYIDTLIERVDICINTMIDKYEGYIVLLRTIPGVDRSSAITILSEVGVDMTQFGSSKRLCCWAGLTPGNNESAGKKKSVRISRAGVYLKPALVQVAHAAVKDKLSPYYALKYERISKRRGKKRAIIAIARMILTAVFVMLSNLEEWNPVDLYRVDMPEHLKEKQLSKAVKQAIHFLIAQGLTVLDSA

SEQ ID NO: 187550 - protein, 326 aa, unidentified
MSKQVLYVGIDVGCEELWVSVPGMKPKKFEHSKRGIRSLYNWAEKTAGDDQLHFCMEATGVYSISVASQMVSECQALVSIVNPAQIAAYGRVQMKRSKTDQLDAEVIRAYAESQKPVVWKPAPKSLQQLSALVTQSDAIKDCLGQWHNRHHAQEFMLDLPDEVKKTQRAIERSLKTQLKKIETAIANLCAQESTLAQQVALLCTIPGVADKSAVKLLAYGQNWLTETSAKALTAYAGLAPHHYQSGTSVRGKSRIDKRGNSKLRKTLYMPALVAVSHNPILKKFYQRLLNNGKPKKLALVAAMRKLLLISRAMLIAKKPFNPQYSH

SEQ ID NO: 187551 - protein, 350 aa, unidentified
MDRYIGLDAHASSCTVAVEGPSGRRLNSQVVETNAGALIRVLRGIPGTRHLCLEEGTHASWLYEVLSPHVEEIVVAGVSESRGPKSDKLDAFGLAEQLRIGAVKRKVYKKRGEFGALGHRAKAYTLLVSDSVRVQNRIKGLFRSRGVAVAGKSVFSVAEREAWLKKLPATARSLAELLMQEQDGLLDLRKKAEKAMLAEARRHRAWRLVKSCPGLGEIRTAQLLPIVVTPYRFKNKRSFWAYCGLGIVMRSSSDWVRTQSGEWVKVPVKQTRGLNRNSNRTLKGIFKGAATTVIGQAKDEPLYRHYLHLLDGGTKPNLAKLTLARQVASILLAVWRNEEVYDPARVGQAV

SEQ ID NO: 187552 - protein, 341 aa, unidentified
MKKFIRIGVDLAKNYFQVHALESENGRAVTRKLKRSKMHEFFSQIEPCLIGMEACGSAHYWGRELKAMGHEVLLMPPAYTKPYVKRGKNDAVDADAICEAMSRPGMRFVPIKSPEQQATLMLHKTRELLVKQRTMSVNALRGHLSEFGIVAAKGIGRIDELLDLAESDATLPNAARASVKVLAQALEGLDKAIDDLEKEISSAHAQNEMSRLLDKVSGIGKLIASVIAASVPDPSVFKSGRDFAAWLGLTPRQNSSGGKQTLGGITKQGNRYIRKMLVLGATSLLNVLAKRKGALRDWIVGLLAKKPARLVTVARANKLARILWAMMKTGECFRTEMFAKA

SEQ ID NO: 187553 - protein, 335 aa, unidentified
MELNYFIGCDVSKNELDFAVMQGKQFLYHEEIANEPGAIQSFLSKLKKLPEFNLATVVFCMEHTGIYNNHLLICLHKKKANICLEAATQIKNSLGNIRGKNDKVDAKRIAEYAYKNREEIKLWQPKREVLQHLSQLAGTRTRLISARKMLKTAINENNGFVKKSIAGQQEQFCARTLNSIDADLEKVENQMQHIIDNDAELKRLFGLITSINGIGKVTATQIIITTNEFKDIDDPKKFACYAGVAPFTKESGLFKGKARVSHMANKTVKTLLHMSAISAISCNEDLKAYYERKVSGENKNKMLVINAVRNKLILRIFACVNKNRKYEKNYKKLVA

SEQ ID NO: 187554 - protein, 346 aa, unidentified
MLYAGLDLSRQRIDVHVLDASGRTVEMIAVRPDADALRMLVERLAGHGHAVRAAIESMNGARFIHDQLEQAGWDVLIADAQRIKGLAPLACKTDRIDARVLAELGRRDLVPAIWLPDPRVRAERERARFRLHLVRHRTALKNRIHATLITFGRPNPMADLFGVGGRRLLARLDLPEPWASNLVASLRLIDELETEIEACEAELRRLGADHQYVPLLRTVPGIGWVLAFTIASEIGDIGRFPSPTKLAGYTGLCPRVYQSGERDRRGALAKNGPAYLRWALIEAATHAGHHPVYRARYERTKRRLGRQRGTKVARVAIARELTTAIWHMLSRNQVFCPAGPTQRLVA

SEQ ID NO: 187555 - protein, 345 aa, unidentified
MPIVGGLDIHRKQITFDYLDTGTGQVQRGQVSPADREHLRAWLARFAGREDAEFAVEACTGWRYVAEELAVAGVTVHLAEPADTAFARGRKRHAKTDKTDSRHLRMLLAEGRLPECWIPPGHILECRALLEAYHDLRAEHTAWVQRIHAVLFHQGAPALGPGALRGEQGLAALRAAAAAHLSPAGQLQVATALDMTGALEARLDMLRHQLLDAARQLAGAKVLAARLYGVGPFAALALTCWLGGAGRFSSSRQAVRFAGLDVTVHSSDGKRSAGRLSRQGPPVLRWALYEAGKTHARAPAPDHAYYAQVKDRCGGKRAALSEARKILRQACHILAGLGDDALAPA

SEQ ID NO: 187556 - protein, 373 aa, unidentified
MKQVIFVGLDVDDNSFHGCAFLKESGEIIEFKTRPHIDGLSKKLREIAKKFPNYELRCCYEATYIGFSLARDLAKHEFACDVIAPGSIPRVHGNQVKTDRIDAAKLAQFHANGILSTVTIPDESLERDRDLLRSREFVLRELSEVRTHIQSLLRRNGRNFKSETGAKSHWTKTHLSWIDRVINESSGSFKLNLSLLLQQLRWHEQTLEKYDEAVEQLATSPTYEKKVQALTAYRGIRNTFAMVMITEIGPVERFKHPSQLVSWMGLDIREYSSGGNQRRFGITRHGNRYLRTAFVEANQRSYQSSFAGKDVNDRRRKLPPNFVAIAQRCQARLYRKGNRLRMAGKHVNKIKVACAREMAGFVWESLRAVNQAS

SEQ ID NO: 187557 - protein, 308 aa, unidentified
MPQPVVGCDLSRAFIDICQLPSGKTGRIANTPDDIGVWLDTLDHDVRVVFEATSGCDGELIGALATRGHPFSRVNPRQAREFARATGTLAKTDRVDARVLAQMGAALDLPATIPLSPARSRLADFLRRRRQLVDMRKAEKLHRHSAGQPEIAQAIETMIALLGQQIAALDRRIAGFIAEDQALAEQARLLTAVPGIGPTVLATLLGELPELGTLCRRKIASLAGLAPHARESGTWRGARRIWGGRRKVREVLYIAALNASRRIPVLTAMRDRMRAKGKAPKTILIAVARQLLVILNAMIRKRQPIALG

SEQ ID NO: 187558 - protein, 412 aa, unidentified
MNRKARRCCGIDVHKASLSACIRLHGKGRKVSEEIRTFGTTGDELLALHDWLKEHEVTEVAMEATGVYWKPVYYVLEDGLRVILVNPAEIKRMPGRKTDVSDCAWLAQLLDHGMLRPSFIPPREIRELRDLVRYRVSLKHDHTRIANRLHKVLQDADLKLSSVMSDILGVSGRQILSQLAKGNCDPVALADLARANLRGKLPQLRQALSGRFNAHHAFLLSRLLADLDNTEEAMAQVAERIEAQLVPFAAELERLCTIPGVKQVAAAAILAEIGTEMSQFPSTADLDSWAGMAPGNNQSGGKRRRAKARKGNRWLRTILVESGNAAGRTRNTALSALYRRMIVRGGRKHAAFVVGRHILNIAYHLLREHTTYRELGPTYFEQRRVEQLKRRCLDQLRNLGFEANLVPLPKAA

SEQ ID NO: 187559 - protein, 352 aa, unidentified
MKHYIGTDAHKKYSMFVTVNETGKASSPERVGHDKGLYRKYLATLPLGSPIAIESVGNWYWMIEAMELAGHQPILVNPRKAKLLLGNYNKTDKLDAKGLAMLNLNGSLPAVWIPPAALRDQRELSRMRMSMVAVRTKFKNRIQATLAKYAIVIEEVSDIFGKKGRLLLEKAIQELPPETKQSVEEQLKLLDQVSEQIERIEKHIRQIVQVTPMMQLIKTLPGVGDILAIVIALEIGTVERFSSAEHLASYSGTVPRVNSSGGKTYYGKVRPDINHYLKWAYVEAASVIAAQAKRLEGRHVVTLLRRIQEHKGHPKAIVAVARHLAEATYCMLKRNEPYQEPGLKRLVSSSQG

SEQ ID NO: 187560 - protein, 318 aa, unidentified
MSEATFIGIDVSRDTLEVASSTQTASWQRTNDTAGIEALCDELVALVPALIVLEATGGYEFEAACALQAVGLAVAVVNPRQARDFARAMGALAKTDSLDARMLAAFARVLHQHPERERFVKPLADAELQGLQALVLRRRQIVGMLTSERQRLRMSHASARLSIEQTIAFLKTQLDGIEGQCATHVQAHHGALAQALYSVKGIGAATVATLLAELPELGSLCRRRIAALVGVAPINRDSGQMRGQRSIWGGRAEVRRTLYMATLVAVRHNPVFKTFYQRLLAAGKLKKVALVAAMRKMLTVLNAIAKSGKHWEDSLHNA

SEQ ID NO: 187561 - protein, 333 aa, unidentified
MHYVGIDVSKRSLDVCLLAEGSKGSRKTKTLSNGQDSAQNLAKWLILQKCELSQTHVIMEATGIYHEYLACGLHQMGILTSVINPCRSREFAKAMGIFTKTDAVDAYVLAFYGCLKQPEAWTPPEEEVRKLRALLQHRDSLLNDKLRIDNRLNTLKSTEAVQEVMDSLSLVNQYLKSEVARIERLISSHIAQHPGLKRDLKLLMSVDGIGKQIGWNMLAVLRGNNFKSAEQLAAYLGVVPVERRSGTSVHGRARLSKIGSSNIRANLYMGALTAISKNSHIKALYERLLAKGKMKMSALGAAMRKLVYLCYGVLHTQQPYDEKYKAKIINFSS

SEQ ID NO: 187562 - protein, 344 aa, unidentified
MSNRPITLKIEYHHSRANRLNHKENEMNVIGFDISKDTIDVTLLRNSGQVDYIKIANACEGFEKLNDWIRSKRIRKISISMEATGIYYEEAADYFSAIYQVFVINPLKIKEYSKSQFSHTKTDKADSRLIAEYTKRHLDKLTPFRPSENPTLYKLINLLQQLKEQQKETQNRLHTAKDIYIKSTHEAIIELLEEKIDQTSKRIEGMIKQKESLNIEYQNLQTIPAIGKETAVILLRHLTDKNFETANKFVAFAGLSPKIEQSGTSVNKKGRLSRYGHRQLKRALFMPALVAYRMGAFPQLVRNLEAAKKPKMIIIVALMRKLAKIAFYIHKTKKPFDKALHQTV

SEQ ID NO: 187563 - protein, 421 aa, unidentified
MNQLSGEPYTAYIGIDWASSKHDICLQLAGSEERVFERIKHTPEAIEEWAQALYQRLGGPIAVALELSEGPIVSALQKYDFLVLFPIDPKRLAKYREAFVPSGAKDDPTDAEFAMDYLMRHPEKLKALKPESAAMRKLRYLVEARDRIRGDQSRCVNRLIQALKQYYPQAVDWFNDHNTLVFCDFLKQWPTLATVQRARKARLERFFKEHNVRFARLIEDRIQAIKAATPLTRDEAVIEAHQLQVEILVEQLRLTIQAMKCFDEKIVAIAAQFPDYELLYTALPGAGKVIAPRLLAAFGEDRDRYNCAAQLQKRSGIAPITKRSGNSTWVHWRFQCPKFLRQTFIDFAAQTINKSAWAGAYYRQQRAKGASHHMAVRALAYKWIRVLYRCWQERTPYDESKYLETLRRRGSPLLKQLAEAA

SEQ ID NO: 187564 - protein, 360 aa, unidentified
MDKDKYVGMDVHKAMTVVAVLDGSGRLVAEAIIETRSETIKDFVRGLSGKIHLTFEEGTQSAWLYELIKPLVAELIVCDPRRNKLMAMGNKSDKVDAKKLAELLRAGSLNGVYHGDAGTKKLKEVVRLYLTLMSDAIRVMNRIKAIYRGRGIATTGASVYRAESRLAWIAHILDEGSRVRLEALYRQLDFLSEQRKHARREVVTEVRRHAAYRILNQIPSLGPIRIAIIIAVVVSPHRFRTKRQFWPYCGFGVVTVTSSEYVTINGKICRSKKPAGTRGLNHNYNRHLKSVFKDAAQYASRKPPFKQHYDRLIAKNMRKQMAMLTLARKISAITLAVWKAEDCFDSDRLSNPDKVKEVVA

SEQ ID NO: 187565 - protein, 324 aa, unidentified
MASNENTLVFVGIDVSKANLDVAIRPTGESWQMSNELEGIGRLVEQLGQVSPALIILEATGGYEAACASALAVAGLPVAVINPRQARDFAKSLGRLAKTDRIDAAVLAHFGEAVRPEVRKLADEQTVQLQALIVRRRQLIEMLVAEKNRVALAHRTVRPHLLEHVNWLEKELDQIDKGLREQLQKSPIWRENDDLLRSVPGVGLVTSTTLLAELPELGKLNRKKIAALVGVAPYNCDSGQMHGKRAIWGGRATVRSALYMATLSGIRYNPVIRAHYQHLRHLGKSAKVALVACMRKLLTILNAIIFSKSTWKETLAAPKSMNTP

SEQ ID NO: 187566 - protein, 316 aa, unidentified
MLSPVPVAGIDAGKFFLDLGFQPAARGLRCENSAAGIESVIDALRQRGVVRVALEAIGPYAQPLVTALVAAGFSVALIDPRRIKAFRTAEGLIAKTDRLDAGLIARFAARMSEHLRPAPEPEQIALKALSTRRRQLTELIAMEKTRLKQALDPLVADSHRAVIATLEAACAEVETALERRIAADPALARKRAILTSIPGIGARIAGVLITDMPELGRLDRKAAASLAGMAPHPSQSGAGPGRHAIAGGRPCLRAAFYMAGLVAARACPTFRGPYKAMREAGKPAKVAIVATGRRLVVLANALIREDKTFPESIIAA

SEQ ID NO: 187567 - protein, 416 aa, unidentified
MNAVGIDVSSRKSTVAVLRPLGEVVCLPFDVTHDIAGLASLVEKLKALDGETRVVMEHTGRYYEAVEKALHEAGFFVCAVNPLLIKEYGANSLRRVKTDKADAVKIARYALDNWADLRDFTPMDAIRYDLKTLNRQFQLASKQRTASANNLIALLEQSFPGIRKCFDSPVRSDGTQKWVDFAHSFWHVDCVRKQPFAAFCERYRKWCKRHAYLFKLSNAEEVYALAKRAVVLTPKSKVVKVLVQEAANQLSSISRSVEVYRAEMDRLAAMLPEYPVVMAMYGVGKSYGPQLMAEIGDVRRFERKQALVAFAGIDPMPNQSGDKNVRSNKSSKRGSPYLRKTLFNVIRTYLQCAPQDEPVFQFLNRKRAEGKPFYVYMLAAANKFLRRYYAKLRDYFASLNPLQPVDPIPTILKATL

SEQ ID NO: 187568 - protein, 333 aa, unidentified
MEHWIGIDVSSATLDFALLDGKGTHVESVQIGNDRKAVMKLMSQWRKRHGVDVGKSLICLEPTGHYTLMLLSLVVEQQWPTWLAHPLDIHQAMGIKRVKNDKVDALRIAQYARTFHEKARLFTAQNLKLDKLKHLLTRRLHLVRSRARHKAHITDLNRYMDRPVQAEFDRMDKRQITLEDKLVSHVDELIMAQIKADPQTERQYSLLRTIPGVGPQLAAHLVAITDGFTRFTTPRELSCHAGVAPFERSSGSSVRGRTQVSHQANKTLKTLLHMSALVSVREPGELRQYYERKRAEGKKPILVVNAVRNKLVHRVCAVIRNNRPYEQRPITAN

SEQ ID NO: 187569 - protein, 343 aa, unidentified
MEHYVGLDVSLKQTSICVVDQTGSVVREGVVDSDPEAITAFVRSKAPGAVRIGLETGPTATWLWTELKRLGLPVVCIDARHAKAVLKMQINKSDRNDAAGIARIVQTGWFKEVRVKDLDSHSVRALLASRALLVKIKRDLENQIRGLLKNLGLVIGRAKFNVFAVRAEELIEDRPELVAAVGPLLNARQAIEQQVGDLDRKVLKLARHDVQARRFMTVPGVGPITALCFKATIDDPTRFKRSRSVGAYVGLTTRRHASGEIDWSGRISKCGDGMLRMYLFEAAGVLLTRVPKWSALKAWGTKLAKRNGLRKAKVAVARKLAVILHRMWIDGTEFNWSTKKAVA

SEQ ID NO: 187570 - protein, 337 aa, unidentified
MARIICGVDVASRTLQASIRPGGAQAVFANNPEGIQHLAAFCQQHHVELVAMEATGGYEQQALLLLSEQHLPVAILNPRAVRQFAQSMGALEKTDAIDAALIAHFAQVKHARPTPPPAPDQQHRRALVTRLRQLTQVRTAQLNQRRLITDPIVLASFDELLALLQQQIQSLEQHIAQLIAKDPLWQHLDRDFRSIKGVANRTVARLMAEMPEIGTLSGKTISKLAGVAPIANDSGKHQGKRAVRGGRAPVREILFIVASVAGRYEPDFVAFQQRLRAAGKPPKVVRIALAHKLLIRLNAKARDIRRQLHEQARSNLTNLAAARSADSITNGHLAATA

SEQ ID NO: 187571 - protein, 469 aa, unidentified
MTARQEKPLRTSERDAPAGSLAVQHPHAAGIDVHADVHFVAVAPGDVPAGFVNPEPRLPRGVRKFGATTGELEALAAWLKDCHVTTVAMEATGVYWIPLFELLERQGFAVLLVDPRQTKHAPGRPKSDVLDCQWIRRLHSYGLLTASFRPGDAVVVWRGYQRQREMLLRYAAQHVQHLQKALEQMNVKLTEVVADITGLTGLGIIRDIVRGERDPRQLARHRHPRCQASEAEIAAALHGTWRAEHLFALRQALALYDFYQGQLQECDAQIEACLRGFADRSGGRALPPRPRKRPGKKNRTTFDARALLFRLAGTDLTAVEGIDDATALVLLSEIGTDLSRFPTAKHFVSWLGLCPQHRGSNGRLLSRRVRKGANRAARALRLAAQGCHHAKNALGAFYRRLQARCGGPKAVVATARKIAERVYRLLRYGEAYERQAEAAYEAQYRRRTLQALARKAATLGYQLVPAEGG

SEQ ID NO: 187572 - protein, 487 aa, unidentified
MAKPKKSTFERLRGGQMNRQQRRDLGRRLAGNDPGLTIVHSNAGGIDVGNESHFVAVPPDRDTNPVQEFGCWTADLKRMAAWLSACRIDTVAMQATGVYSIPLYDILTGHGIRVVLVNAQHTKNVPGRKSDVQECQWLMKLHTYGLLRDSFRLEERMESVRTIWRLRDRHVKDASRAVQHMQKALTKMNIQLANVISDITGVSGQAIIAAILKGERDPWKLADLKHGMVKASRDEVARSLEGNWRHDLLFELRQAVDSYAFAHQQMRECDRQLESFLASLPARTLERPSQSAEARTAATPPEKKARKKPKARRNEPTIDLKAELKRICGVDLTSIDGIDVITAQTVLSEVGADMSGFPTENHFASWLGLTPSKDISGGKIIGTGKRKVQNRVAMAFRMAATTLLNSKTYLGSRYRHLRKQLPSYASAIKAMARYLAVLVYRLLTHGEAWVDRGAAKFEQRRSERELASLNSKARAKGFKLVPIAPAS

SEQ ID NO: 187573 - protein, 338 aa, unidentified
MDHYVGIDLHSNNSYIGIIDTDNKRIFKKKARNDLSTIIKLLAPFSTQTKGIVVESTYNWYWLVDGLIDNGYRLHLANPSAIKQYEGLKHSDDITDAFHLANLLRLGILPEGYIYPKEQRPVRDLLRKRMQLVHQRTAQILSFQNLVARNLGRRIHVKTINNLNEEDLENLFEEQHLILSSKACIATIHFLRTRIIQLEKAIQRAAKLKNEFKLLKTAPGIWNILALTIMLETGPIERFEKVGNYASYCRCVQSNRFSNSKSKGKGNRKNGNKYLSWAYVEAANHALWNYEYVKRYYQKKTAKTNNVVAIKAIAHKLARACYYIMRDQKEFNPGKAFA

SEQ ID NO: 187574 - protein, 406 aa, unidentified
MNMNAVGIDVSKRKSTVAVLRPGGKVVVKPFDVPHLSADFQSLEKLIRELDGETRIVMECTGRYYEPVARKLSKAGFFVSAVNPQIIRNFQGQDNPLRKVKTDKADSVKIARYTLDSWANLKQYSLMDELRSQLKTMNRQFDFYMKHKTAMKNNLIGLIDQTYPGANTYFDSPAREDGSQKWVDFIGTYWHVDCVRKMSLSAFTDHYQKWCSRRKYNFSKSKAEEIYGKAKELIPVLPKDSFTKRIIKQAIDQLNAVSQTVEQLRALMNETASKLPEYPVVMAMKGVGPSLGPQLMAEIGDVTRFTHKGAITAFAGVDPGVNDSGDYSQKSVHASKHGSPVLRKTLFQIMEVLIKTKPDDAVYRFMDKKRSEGKPYYVYMTAGANKFLRIYYGRVKEYLSSLPESE

SEQ ID NO: 187575 - protein, 353 aa, unidentified
MVLHVGLDLSRSRVDVCVLDAASGVVVYVAATPDERGLRGLVGRVQEMGQPPVAVRAVIESMTGARFVRDVLTEHGWDVLVADAAKVKGLAPLACKTDKIDAAVLAELSARDLVPAIWLPPVPVRQQREQTRYRAHLVKHRSMYKHRIHSTLMTLGVPVAGSDAFGPGGRARLARLELPEPWAGHITSSLALIDELSVAIDDCDTAIAAWAGADPAVRRLRTLPGVGQVLGATIATEIGDITRFATPGRLVSYTGLCPRVYQSGGTDRRGSITKTGPAQLRWALIEATIHACRHPAFATGYQRTKTRLGRHRGTRIARVQLARELAHATWYMLTRDQDFTPHPAAGAANDLAA

SEQ ID NO: 187576 - protein, 335 aa, unidentified
MNNIALIGIDLGKHSFHVHCQDNSGRALIRKKYTRAKLFEFLANTPSAKVVMEACAGSHFMARRISSLGHEAKLISPQFVRPFVKTNKNDYVDAEAICEAASRPSMRFVQPKTENQQAMQAMHCIRDSLIRDKVKTTNQMHAFLLEFGIGLPKGSAVIKRLSTVLTENELPPYLVQMLTRLHAHYCYLESQIKELDQLLQQELKHDDTGQRLLTMPGIGPITASILSSQLSDGKQFASSKDFAASTGLVPRQYSTGGKNTLLGISKRGNKNLRRLLVQCARSIMIHLDKYSGSLANWIRNQLCRKHSCVVACALANKLARIAWAITTSKTDFKFS

SEQ ID NO: 187577 - protein, 352 aa, unidentified
MFHQPGEATEMKVTTIGIDLAKNVIQVHGVDERGKTVLKKQLKRNQVAAFFASLPPCLIGLEACASAHHWARKLEAFGHTVKLMAPQFVKPYVKTNKNDVADAEAICEAVSRPNMRFVPIKNGEQQAVLALHRARQGFVKARTAQANQIRGLLAEYGIVIPQGIGHIAKRLPEILEDGENELPGVFRQLLQRLGDHLKELDRQAGELEVQIQSWHRESEASKKLAQIPGIGPITASALVASIGDAKIFENARQLAAWLGLVPRQHSSGGKQVLLGISKRGDTYLRTLLIHGARAVIRVAENKVGHADSWLARLMGRRNQNVAAVALANKNARTVWALLAHGRDYEANYGVAA

SEQ ID NO: 187578 - protein, 419 aa, unidentified
MARIHSIAQDAVLVAIDISKKRNDVLIQMPGSPRRRRLVVLNQRAEHDRFIQRLKAFDRPVVTGFEATGNYHRALAWRLVDAGIKTRLISSMALARQREAIHNGWDKNDPKDAQVILHMLATGLSQVYLDPLVAGLADIQELSKTHEAVSRARTQTIHRILTHYLPLYFPEIEKFLGSSRRDWFFALLETFPPPASITALSPEAFSAAAWDIVGKKVSKARLIVDICETAKESIGLPVPVDSRAIAMFRMVLAEARSLNRQRNTIEAEAEALLGGTPDFEALKQIPGIGPIIALTILAEAGDARRFGHHRQFLKFCGLDLSTHQSGTFRGQTKLSKYGNARLRRALWMAGLVAIRQKENNFRDKYTRYIARDPDNPDLRRKALTAVTAKMARTAHAIIKSGKAYRPFYEGAVPGGRISL

SEQ ID NO: 187579 - protein, 327 aa, unidentified
MFCLGIDVSKNKLDLCLFPGNGKKKTKSIKNQVGVERDICDWLQKQKCPPEQVMVVMEATSVYHENVAYGLHGNTPVTVCIGNPQRVREFARGMGILTKNDAVDAWVLARYGELKQPDAWVPPPPEVRKLKDLLRLRDAIVEDVQRATNRLEKANSTQTAGEVTDSLERTKKSHEKELKRINALIDDHMDKNDGLKDDLKLLESIKGIGGVVGTTMLSVLRTCQFRNAGQVAAWLGVVPVEKTSGSSVRGLARMSKTGPADVRAKLYMAAIVAARWNRPVRALYERLMAKGKPAKVALGAVMRKLVHLCFGVLKTREPWNENYVATA

SEQ ID NO: 187580 - protein, 311 aa, unidentified
MQEQCVGVDVSKQHLDWVLGGEGSVSRVNNTPAGVRSLTTKLRRCDMGLIVVESTGGYERALVEALAKASLPVVLVNPWRVRRFSEGMGVLAKTDPVDARILALFGERARPPRRPLPGPTQRQLADLIRRRRQLIAMVTAEKNRLGTATAVIKRDIHALVKILERRVAKIDERIDTAIASDPEKAENWERLQTTPSVGPGVARALIIDLPELGSLGRKQIASLVGLAPFAKDSGRKTGQRRIRAGRSAPRTALYLAAMNAARFNPTLKPVYDRMIAAGKPPKVAFIALARKLLTILNAMVRDGTTWQQATR

SEQ ID NO: 187581 - protein, 392 aa, unidentified
MSQHCHFDASRSLTALEQDSTIIAVIEMSQTKWLVAALIPGVERQPLKKFDAHEKTLLKLLHRWRREAGQAGRNIKRIVVAFEAGRDGFWLARWLRARDIEVYVIHPTSIAVSREHRRAKTDRLDTELLMRVFLGWLRGERRHCSMVAIPTIEEEDARRPNRERQTLVTEQTRIINQMKAIFTRFGIRTLRPTMRKVAEKLEDLRTAEGTPLPQNTLAELRRHLARLRIVRDQIRAVEQERLRKLAVAPAAEKKSPHAMVRLIARVLGVGVETADMLVNEIFSRHWRDRKAVARYAGLTGSPDESGSRRRERGLARAGNVRVRSGMIQLAWRFVRFQKNSALAQWFAARTADGRASTRKTMIVALARKLLIALWRLVTRGEVPQGVALRPAS

SEQ ID NO: 187582 - protein, 379 aa, unidentified
MDHANTDTPAETILHGALELSKNSWLLALQFPDRVQPSLYPISGGDTVGLMTKLMAARDRWAKVSGKAPSIVLCYEAGYDAFWLARFLKARGIECLVVDAASMQVNRRARRAKTDRIDVGMLLRALIAWGQGDRHVWSVVRVPSVDEEDLRRSHRERDRLVRERTAHINRIKGLLFGQGIRGINVKTKYKTLQIDKLVTGDGGLLPPRLASEITREIARLALIQEQIATLERERDQAPTPCKATEKKRLQLMCLTGIGPAIAAVMTREVYYRQFDNRRQVAGFLGLATSPHDSGDVERSQGISRAGRGQVRGTMIQAAWLWLKHQPKSAITRWFVQRTAGQSARIRRIMIVAVARKLAIALWRFLEQGLVPQGAMLANR

SEQ ID NO: 187583 - protein, 347 aa, unidentified
MRFYNRQHRHYCGIDLHVKTMYVCILDAAGQVLVHRNVKSTPEAFLETIAPYRADLVVAAECMFTWYWLADVCAAEGIAFVLGHALAMKAIHGGKAKNDKIDSHKIVSLLRGGLLPQAYVYPAAMRSTRDLLRRRLHLVRKRGQLLAHIQNTRAQYNLPAFERRLAYPANRDGVSAHFADPSVRKSIDVDLALIDQYDTLIVELELTIVREAKRHDADAFHRLRSVPGIGKILALTILYEVHDITRFDRVQEFASYARLVKCVKQSGGKKLGTGGAKMGNVHLKWAFSEAAVLFLRHTANGKKILTPIEHKHGKGKALSILAHKIGRAVFYMLSRGTVFSMEKFLAA

SEQ ID NO: 187584 - protein, 363 aa, unidentified
MRILALDLGKSKSVAYAVDTDTGACGFKTVRTEPAVLGRLFAEGRPDRLVFEIGPLAGWVHDAAREAGVRQIEVANVAHEAWRWRHTRRKTDRVDAVRLADLSAAGQLPTVHVPQAATRQWRGLIAYRARLVARRTAVKNRIRAILASVGETMPRGAGGWTHQTLASLEVLARPLADVGPEDLWRGELALELEALAHLEAQVATVEAKLDTLAEADERVARLRTIPGVGPRLAELLVALFDDPHRFRSGRQVGSYLGLVPRQFQSGAMDRHGRITRHGNPLARALLVEVAWLGLRWNGRLRAIYERVHRGSRARRKVAIVAVARRLAVFAWAMLRDGTTWRPYRPAETPAQPRRAGAEAAVLA

SEQ ID NO: 187585 - protein, 316 aa, unidentified
MTSKRFLGIDVSKDWLDIAVDGQDRPVRIANAPHPIAAFLAGLCRDEIGLIAFEPTGGYEQTLRQALVAAGLPFARVHPNQLAAFRTRSGVQAKTDARDARLLADFAATDLARRGLRPLVESDEVLRELAVRRRQLVDLLQAERCRAALARTDTVRASLASVIDALEASLEALEAAIAQRIAAQTELAQRAALLQSLKGVGPVTVATLMAELPELGQLSGKEIAALVGLAPRTRESGKRRARATTGHGRPGVRRVLFNVARTAIRWNPILRAFYQRLVHERQRPGKVALTAVMRKVLVILNAIARDNQPWNHAAAA

SEQ ID NO: 187586 - protein, 381 aa, unidentified
MKTNSDAPARLYIGLDVHKAETVIAILEGERDAQPRHYGAVGTSQHAIERAVRRIAKSQKCALSELHVCYEASGCGFWIARRLLQMGVRCDVIAPSLIPTCSGDRVKTDKRDAARLARMLRSNDLVAVHVPDAVDEAIRDLCRARTDAVDDMRRAKTRLLALLRRLGYRYGGKTHWTQAHRNYLRGLTLPDAAHNRVLEDNIATIDFHEERIARLEAEMLQLLDGWQRKPLVEALMAFKGFQLVAAMVTVSEIGTFSRFEHPKKLMAFLGLVPSEHSSGGSRRQGGISKCGNPHARWLLVEQATHYRVPPKVSPQLSERQRGAPRWVRELSWKTQTRLSHRFSVLRRRGMHHNKIKAAIARELTAFVWELGTRFESRQHQP

SEQ ID NO: 187587 - protein, 465 aa, unidentified
MNTDKKLWRNRKAKKELARRLQSENPGLEVVHPHAAGIDVGNGAHDVAVRPDRDPQPVRRFECFTADLYRLANWLQSCGVQTVALQSTGVYWIPLYDILEQRGFEVYLVNARHTKNLPGRKSDVQESQWLLKLHTYGLLNNSFQPPCKIRILRTYWRQRLQHVTGAATCVQRMQKALTQMNIQLANVISDLSGVTGQLIVRAIVAGERDPQKLAELSHPRIQASRAEIAKSLEGNWRRELIFVLQQEMEMYDTYQRRVAECDKELQKHLRAFSDSIPAPVKEALPTKKKKKQNKNNPRFHLADELQRITGVDLTRIDGVDVMVAQTVISEVGLDMSPWRTEAHFASWLGVCPDNRISGDKVLARGTRHVLNRAATALRLGASTLLRSQTYLGAQYRRLRSKLGAPKAITAMAHRLARLVYRMLKYGQQYVDKGAEYYERRNRQQQIEFLRKKAAHLGLQLAPAHP

SEQ ID NO: 187588 - protein, 443 aa, unidentified
MSHKANTHLKGERGQAFADQIRNIPPERILCVSLDIGKYFHVVMIHNALGEIVTPTFEIDIFQSGFTALCAAIDEASARCRAKVVLTGLEPTGHYFENLARHLRARPQPVTLVNSYAVKQNRSQQMMRREKTDEIDVAAVGDLLRRGEGTAYRPASGPYLQLQQLDRTRIAKLKMQTMLKNQILGHLDRIFPGLVLQGEEALDRYTPLFATSFWRCQTLQHLVRLCPDPCRLVALSPSELVALFHGHHYRLGKQNAAKIIAYAQKTLLPDPELSTIRSDLLQADLTLLEHLQLQIDHLEQRLGELLAPLPAAAWAKLKGLSVVQAASLAAAMGDPAHYTYAAQIFRRAGLVSGRNDSGNRQRKGKGQGVLKVGDVYLRRALMTATESLILHQPALHTYYTTLKKTKHPGVTRVATARRAMGILWATLRDQRSTLLILKKGKTM

SEQ ID NO: 187589 - protein, 372 aa, unidentified
MNYNTVYVGMDVHKESYTLCAYTIEAEKGSYFRKTSSDYKEVLKYIEFLRTIYGIDTHFICGYEAGCLGYTLYHQLTRHNINCVIMAPTTMLEQRSRKRIKTDKRDAELIGKCLAQHNYSAVHVPTAIDEETKEFLRMRTDHKLALKKIKQQILAFCLRHNYRYDGNSHWTVAHLKWLRSLNTTAVYREILDEYLLTYNTLSDKLERLDARIEELANKDEYSVSVKKLCCFMGVKTHTALSVMVEVGDFNRFATAEKFAAYIGLVPGENSSGDDQTRLAITKAGNRQVRMLLTEACQHYSRGQVGYKSKALKARQAGNTPQVIAYADKANERLKRKYYRMVLNKGKRHNVAKTAIARELACFMWGMMTDHIA

SEQ ID NO: 187590 - protein, 343 aa, unidentified
MDQVIIGVDPHKLSVTIEARDSQEILRATGRFGTDTAGYRQLLRAARQWPARVWAVEGANGIGRPVAQRLLADGKRVPGVPAKLAARARVFDTGQGRKTDATDAHAIVMVALRDKGLRELRSDPELMALRLLCDRRDEISRARAQALNRMHRLFLELLPGGAPVKKSTSQYKALLARVRPRDLAGKTRRRMAAEELADLDRHDAKLKAMKAELKAAVLDSGSNLMDIHGIGPAGAARILADVGDVARFPDRNHFASWTGTAPIDASSGEHTRHRLSRAGNRRLNHVLYMAGIAGSAMTPPAGPTTGASSPAGRPRWKPCAACAGACPTSSTASSSPTPPPGHQ

SEQ ID NO: 187591 - protein, 524 aa, unidentified
MKLLVRLRRLAVAINPERRLKIESPGSRCQPSQSKTTMATTRKQPHRKNGSDARCSALKRKASSHCHPGKGNRQRSKLTISNPDAAGIDVGAEVHYVAVPEDRAEAPVRSFGAYSAQLDELVQWLKECGIKTVAMESTGVYWIPLFQKLEEAGLEVLLVDARQAKHVPGRKSDVQDCQWLQQLHSYGLLRAAFRPEDSICRLRTLQRHRKDLVECAAMWIQHMQKALNEMNLHLHHVLSDISGQSGLAILDAIVAGERDPSKLASLAHYRVQKSQAEIEAALRGDYRPELLFVLSQSLENYRQLQQQLLKCDLSIEKKMATLAGRATISQGAEPTQQSQDSDGKPPKRKPKDALELSLASHLKRILGVDLTTIPGLNVLAVLTLLSEIGTNMTKWRNEKAFASWLGLNPNNKISGQRVLSSRTRKVANRAATTLRLAAMLSGKTNTPLGSFYRRKRAQLGAPKAITATARKLACLVYRLIKNGQAYKPTDLRTYELKYKQQTLDSLRKRAKNLGFDLVQLPKAA

SEQ ID NO: 187592 - protein, 355 aa, unidentified
MNSEKYIGLDVHQATISVAVLDSSGKLVMESILETKAATILDFFAGLRGTLSVTFEEGTWAAWLYDVLKPHVATLVVCNPRKNALVKDGNKSDRIDAHKLAELLYLNKLSSVYHGETDVRMLRELARSYLTIVKDTTRVMSRLKAVYRSWAIPCAGRDVYYRRHRGEWLGKITEAGVRRRAEQLYLQLDMLQHLRQRARRELLAESRRHPITTKLRQIPSFGPIRSALAVALIQTPNRFRTKRQLWAYSGLALETRTSAEYRYVKGQLQRSKKQISIRGLNKDHNHDLKGLFKGAATTASVRPGPFQDFYDRSLAKGIKPAMVRLTLARKIAAITLTLWKKGENFHADKLKSQAA

SEQ ID NO: 187593 - protein, 339 aa, unidentified
MKKVFIGIDFSKLKFDAAIYSVDTKAIVATEVFDNEQSGYVDFLQWVKENTRCQKSGVLFCGEHTGYYSGNLSVFLFESGYDMWLVSGLEMKLTQGIKRTKTDRVDACKIAEHAYRYQDKVVLFQPVSKALEEIRELLSYRERLVETRKVLTTSAKEMKRVKDNASCDYIYQDSIEYIKTLNASVRDCEKRIEALLKQDISLKTNYKLVSSVVGIGLVNAALILVATDNFTKFENPRKFGCYCGVVPFEHSSGTSVRGKTRVSKMANRHLKTKLTLAAQNAVRFDPELKEYYQRKRSEGKNNWLVLNNVKNKLIHRIFAVVRDGQMYEKQYVHPLKQAA

SEQ ID NO: 187594 - protein, 350 aa, unidentified
MLIATVAIDLAKTVFELAAADESGKIVERRRLSRIQLERYFQNCGSVHVVMEACGTAHHWARVFASRDLRVSLLPPHYVRAYVRRNKTDSADATALLEAARASDITPVRVKSLEQQGLQGLHRIRSAWRATCTARINTLRGLCREFGIAAPLGAKRGLLALRRALAEEDCVIPAFLRTTMQRLLDELRELDERLMEVEAQLGEIARQSEICQRLQTIPGIGLIASTAFAGAVGDIGAFRSPRRFASWLGLTPREHSSGTVRRLGSISKRGDGYLRMLLVHGARAVLYSADAAVRAGRPLDALRAWGIRVRARTTHNKAAVAIANKLARIIWASWRRQRDFEFRSPQAIAA

SEQ ID NO: 187595 - protein, 324 aa, unidentified
MPRTSSVHAVTTIGMDMGKNTLHMIGLDSRGAIVLREKVSRGRITSRLANLPSCLIGIEAGLATHYVARELAALGHDVKQVPPTYAKPFRQAHKNDFRDAYSVAEAVQRPTTRFVPAKTDEQLDLQALHRVRSRLVSERTAVINQIRGFLLERGIIVRQGLRFLRQALPDILAKRTDVLSPRMVRIVADLASDWRQLDERIEPVTDEIETLAKSDDGCRRVMTVPGIGPIISSAMVAAIGNGAAFARGRDFSAWIGLVPKQMSTGDRTILGRITKRGNGYLRTLFVQAAQHSVAAGELAEAQLRGLARSRCSAPAPKRFGRGSR

SEQ ID NO: 187596 - protein, 436 aa, unidentified
MEVRMVNTPSAGMNNEPVDCFIAIELSKSGWVVGFQTPLSDKTSRYQVKAGDANGLLELIERVRTRVARQLSRPIEMMSCYEAGYDGFWLHRVLEAHGIHNHVLDPGSLQVNRRARQPKTDRIDADRMVRALIRHLRGEPEACSVVRVPSIELEDAKRLHRERRRLIAERVQHVNRIKGLCATQGIYDYSPLRKDRLTRLDDLHTGDGRVLPPQLKAEIVRELKRLELVLEMIATVETERDAILTNPASTHVNAGKIKMLAKLKAIGPEFATTLVGEVFCREFVNRRKLGSYVGLGSSPFRSGSLDRDQGISKAGNPTARSVMIELAWTWLRYQPDSALSIWFRERVGTLKGRPRRIAIVAMARKLLVALWRYLETGLVPTGAVLKASSCATWVARAQWAPALDASSTVNQKHIALKIGVAMRSMPHYAPPLREIS

SEQ ID NO: 187597 - protein, 348 aa, unidentified
MAHFVGLDVSVRETSVCVVDDVGKVILEQKVLTEPDAIIALLASLGATYGRIGIEAGPLSQWLFNAVTAAELPVICVETRHMKALLTAQQINKTDRNDARGIAQMMRVGLFKPVHVKTLVAQEQRMLLTSRKLLQRKLLDLESDLRGTLRNFGLKVGVVSGSRYEARVRELVAGFPRLAAIAEPLLNVRRVMRQQLAVLHKMLLDTVRGDPVCRRLMTAPGVGAVVALTYRATVDQPQRFVHSRAVGAHIGLTPKRYQSGEIDYDGRVSKCGDALLRTMLYEAAQVLLTQSRKWSWLKAWGVRVAQRRGMRRAIVAVARRLAVVLHRMWVDGSEFRWRKDSAAVPAAA

SEQ ID NO: 187598 - protein, 345 aa, unidentified
MNVIMIGLDLAKSVFQVHAIDGSGQVIIRRQLRRGEMEKFFGKLAPSVVGMEACGGAHYWGRLLSSLGHEVRLMPAAYVKPYVKRNKTDSRDAEAICEAMQRPTMRFVAVKQPWQQAITAVHRTRSLLVRQRTMLANALRAAFAEFGVVAPEGRKGLQNLITLLPRPEAVPDAAHAALAMLAKQWQALDGDIRLLEQQIVSAARNNEAARRIMAIPGVGPLTASAITTAVTDMRQFRSGRGLAAWLGLTPRQNNSAASRRSGGISKQGQSDIRRLLILGASSHLRQERIRQARGARSDPWIDGLLSRRPFKVAAVARAAKTARIIWAVLARNCDYRSPQPRQLAA

SEQ ID NO: 187599 - protein, 326 aa, unidentified
MTLSHLTDNTFVGIDVGGAGLDVAWHRGDSAHYANRPDAIAALVERLRTGPEVTRIVLEPTGGYEKALVKALRQAQLPVEIIHTTRFNAYRALVGVKAKSDTSDAKLLASYAAAPDEVRGRKAGHVELPEDAVREELSELASRRDQLKHMIHAETCRLGTVRKNELRQMITTHLEALRAEDKQVHRMMQELVRQRDDLRRDQRLLKTIKGIGAKSALVLLASVPELGRIDNKAAAALIGVAPFVRKSGTMNAPARIHGGRAPVRSILYMAAVTASTHNPLLSPFYDRLIAKGKPPKVALIAVLRRLVVFANAVLRSGQPWKGANAT

SEQ ID NO: 187600 - protein, 351 aa, unidentified
MYTLGIDLHKKSSLWILIDEQRTELFKESVLVHPKDISIALKKIHVPLEKIQVAIEPVCGFRWVTQLLEEAGMNVHIAHPRKVQLIAESTKKNDTEDAKTLANLLQSGFFPEARKASEEIYKLRLLLRERTFIVRLRTSVKNQLHGIATTQGLHHIKSGNPLHKKGKEGIMASDNFVLKELHHLNETLETRIMPFDEKLQEEVKKYPTASILMTIPGVGIVTALTIVAEVDDFKRFPTGEKLTRFAGLVPRERSSGGVIKHGSITREGSAPLRTALVESAMRIRKDNAPELYAFVARLTPITGAKKARVALARKLLVIMWKMVTTNTVYNPKILSFPNTTKVSELEARTDA

SEQ ID NO: 187601 - protein, 362 aa, unidentified
MEKHIMVGCDLHDKSMLLKVAVGREKPTVETWATDPDSVLLMIQQLRRRAARLGGARILFAYEACGFGFRLHDELSDAGIECYVLAPSKMHKSSKHRKRKTDERDAQLILDILKSHVLAGVEMPSVWIPDPQTRDDRELVRRRLAIAEDAAAAMVRIRWLLKGHGMKLAPAKAWTDAYWQWLEKLAGGGLPSGAGAALGSLMRQVKWLWSERDILDEQVFALAKSDRYAPVVAALCEHKGVGTLTAMVYLTEMGDLSRFSNRRQVGSFLGLVPSSYESGESADRKGHITHQGPARVRKVLCQAVWSRLRCDKHEREAYDRIASRNPKHKKKAAVARMRTLAVILWHTGLEVQTAMRAEALVG

SEQ ID NO: 187602 - protein, 341 aa, unidentified
MKKKELVVRQNVGLDTGKNSFAACFTVLTDAYKVTHKFSKVFTNNAKGFEEFQLWWQSKTIDSVPLSFTMEATGVYYENIAYFLYEKKQTVYVVLPNKAKRFLNSLDTKSKTDKLDAKGLGCMGVERQLITWEPISGQLKPIKSLTRERERLLKQRTMAKNHLHALKHAHQADEGSIRREVQFIDFIDMQIDEIDFELHELVKNDEKLNAKIEILDSIPGIGWLTAIIIAAETNGFASFKNVRQLTSYAGYDVQLRESGSWKGKSRISKKGNSHIRSALYFPALNAVRRNNNFTTFYKRIKEKKGGKSLIACTALQRKLLILCFTLWRNDTVYTESYLSVA

SEQ ID NO: 187603 - protein, 410 aa, unidentified
MSKLYVGIDVSLRKNNVHCMAASGDTLKKFKVPNTFDGALALVDNVVELSTRHSLQEVILGLEATSNYGYHLAALFKNSERLAPLLPKIHVLNAKAVHNFKRSYSDLPKNDDVDAWVIADKLRFGRLPQEVFMDERFLALQRLTRNRFHLVNTIKREKTYFLNNLFLKFSSLRQEKIFSNNFGATAMAVVEEFLSPDEIAALSLEELVAFLEQKSKNRLVDAEGIAKALQKAARSSYRLSKSLADPVNACLASSISVVKALQSEVKKLDRLIEEHMKALPQTLTSIKGIGPVYSAGILAEVGDVKRFKNHKPLAKFAGLVWNDQQSGDWKAEDIKRIRSGNKYLRYYLVEAANLIRLHDREYAEFYRAKYDEAHTHKHKRALVLTARKLVRLVYALLRTNQLYIPRKRGD

SEQ ID NO: 187604 - protein, 340 aa, unidentified
MEDVSIIGLDIAKNSFQAHGASAAGVVVFRKKLPRGKVLEFLSRQPTCVVALEACATSHYWGREIIRLGHEVRMIPPIYVKPFVKRQKNDAADAEAIAEAAARPTMRSVAVKSEQKQALGVAFRARDLLVRQRTQTINALRGHLAEFGVIAPIGTAHLKRLRASIEDPDGVLVPEVLEIANIFLRQIDAQQTEIDALGARLRARAPADNTASRLMTIPGIGPIGAAAIIAFAAPMEGFRKGRDFAAWLGLPPRQYSTGGKTVLGRMSRMGQRDIRRLLITGAMAVVRWAGIRGTNEPWLQRMLDRKPRMLVAVALANKMARIVWALMTQGGEYRVPAPAA

SEQ ID NO: 187605 - protein, 310 aa, unidentified
MEPVFVGIDVSKDRLDVHVRPGGEVFVVSRDGSGLEELVGRLQALDPTLVAVEATGGFETIVAAAVAGAALPLAVVNPAQVRHFAQAVGKRAKTDPIDAGVIAHFAEAVRPVPRTLPDEAARLLAELVGRRRQIIDMIVAERQREKRATNVRVRKSLARHLAMLEKELDAIDQDINTLVRGSPLWRVKEDLLASVPGIGKTLARTLLAELPELGSLDRRHIASLAGLAPYTRQSGRWRGRSMIAGGRSAVRSASFMAALVASRHNPPLKDFYLRLICAGKPKMVALIAVARKLLTILNAILRDNQPWQSA

SEQ ID NO: 187606 - protein, 345 aa, unidentified
MEITTVGLDIAKRVFQLHGVDAAGKAVLRRKLQRSEVLAFFKALPPCLVGIEACGTAHYWAREIRQLGHEVRLMPPSYVSPYVKRGKTDAADAAAICEAVTRPTMRFVPIKTAEQQAVLMLHRTRDLLVRQRTMLVNALRGHMAELGIIAPQGIARVADLMAVLLGEDTTKVPALAREALRGLAAELEALDRRVKEIEVAIVRWHKDNEASRRLAAIPGVGPITASAIVATIADPFQFHSARHLAAWIGLVPRQHSSGGKQRQGGISKQGDRYLRRLLVLGATAVIRHSRNKSTAEAGWLKSLLERRPARLVSVAQANKTARIVWALLVRGEAYRRPAAVPSGAA

SEQ ID NO: 187607 - protein, 380 aa, unidentified
MITTKQKKISKKPTALQSQPATSDSPEPAPGKVKTIKLGIDVHLGNYVVVRIIDGGTPQPAQRFKPEEFLVWCAKQLTLAEKVYTCYEAGPFGYTLHRRLKEMGITNYVIRPRDWDEYGKKVKTDKRDALAMALCLDRYVSGNHAAFCVVRVPTEAEEQQRSVSRQRESLQQEKQRLAAQGRSHALYYGGHLQGEWWREAAWQKTSAKLPAIVVNLLEPLRRLLAALEAELKVRTQELEAAAPESLPVGLGALTSQILEREVADWNRFHNRRQVASYTGLCPREDTSSDRRFQGAINKHGNARLRPVLVEGTWRLTVFQPEYRPVKKWRAVLLDKKTSSGRRKKIIIAIARTFAVDWWRIRTGRCTAEALGLKLQPAPGA

SEQ ID NO: 187608 - protein, 388 aa, unidentified
MYLVGIDIAKYNHQCSIATGAGEVINEFSFDNNLSGFNELLNALKSLDKAKKIKIGLEATGHYANTLKQFLSIKGYTFIEFNPYLAKQFFKSTTIRKTKTDKIDARLLSSMLASVDYKALHTKSYHINELKALTRARDSLITDRSNYLVQITNALDNVFPEFKSFFSNRLGQTPLYILNRYDSLEKISKITRKQYDKLHNLSRGRFTYNRLLQLKQLAKDSIGIKSKSYFSLIKRYISLINNLNKELDLIENDIYSIMSMVDTKLTTIPGVSLMSAAIIIGEIGDINRFSNSAKLTAYAGFDIAIYQSGEQEFYGRLVKRGSPLLRKTIWNLVFGAIRLIPQITDYYYKKRSEGKHHKIAYSAICRKLIRLIYFIESTNTTFDIKQYR

SEQ ID NO: 187609 - protein, 387 aa, unidentified
MEISSRSAATAATQPATIYIALELSRASWVVAVHTPLADKIGLHKLKGGDGEGLLALIARLRARLERALGHPVAVVSCYEAGYDGFWLHRLLEAHGIRNCVLDPASLQVNRRARRAKTDRIDAASLLRALMAHARGEPKVVSVVRVPSVAEEDARRLHRERHRLVGERVQHVNRIKGLCATQGVYDFQPLRRNRWQRLAALRTGDGRALPPRLEAELARELKRLEQVLEMIAELEAERDAIAAAPAPAPAHPHAPKIQALARLKGIGPEFATVLVGEVLHRTFDNRRQVAAYVGLAPSPFRSGRIAREQGISKAGNPKARTTMVELAWMWLRHQPESALSQWFRERVGAARGRLRRIAAAALARKLLVALWRYLEAGLVPDGAVLKG

SEQ ID NO: 187610 - protein, 367 aa, unidentified
MKQQTSATTETTIEGRNIIDFTGKTICIGIDTHEKDYQVAKVINGMCLGNHRMKANHQELIEHLRSHYPGATFKCVYESCAWGFTLQRRLQQAGIECMVVHAADVSTTDKEKRRKTDKVDALKLARDLESNHLKAIYVPDEDLQKERNLVRFRKRLKGDLIRSKNRLKSLLKYQGINIPAQFGKGCWSYKFMNWVEQEAKKDILLQDTLLLMLEQIKSLRQLLLKTERALRKLMQTRYHEKATLLMSAPGIGRTLAMLFLLEVGDISRFKGFDPLNDLIGFCPDTDSSGDTVRDRGITTRRHKQLRSGLLQAAWRAIRIDPALMEAYQQLIKRMKPHQAIIRIARKLLRRMRAILISGIPYQKGLIA

SEQ ID NO: 187611 - protein, 400 aa, unidentified
MLSIGIDVSKGKSTVCGMKPGGEIVYTPFEVQHTREGMSGLVSLLRSSCEEVRAVLESTGSYHCPVVAALLENGIFVSVVNSLRMKRFCSQSIRKVKTDRIDAMQIALYGLAYWQELQPTKLPEDTYRELQLLARQYYQMTSLLIKAKVDFNAICDQVLPGMQELMSDHAGRHKLSDFVLRYHHTTHILEMGETRFRKDYCKWAEKKGYRNCERMAALIFATAQNGIPVLPNAPSTQIVITEAIRVLHTVEASRDAILTQMQALAKTLPEYSLVREMPCIGDTLAPRLIAEIGDVRRFHSKRALIAYAGIDAPPYQSGKFCANNRHISKRGNRYLRKTGYEVMQSYVMHKPTNDPIFTFIEKKRSEGKSGKLAMVAGLNKFLRVYYGKVTELYRSLPAIE

SEQ ID NO: 187612 - protein, 349 aa, unidentified
MSQNLNNAVAVIGIDIGKNSFHVVGLDDRGAIVLRQKWSRGQIEARLANMPPCLVGMEACVGAHHLSRKLRAFGHDARLMPAKYVRPYSKGQKNDFRDAEAIAEAVQRPTMKFVATKTAEQLDLQALHRVRERLVSQRTGIINQIRAFLLERGVAVRQGLRFLRAELPRILAAPPEVLSARMVRVIKDLAEDWRRLDQRIDNLSNEIAVLARQDAGCERLMSVPGIGPIISSATVAAIGTGEAFAKGRDFAAWLGLVPKQLSTGDRTILGKISKRGNRYLRVLFVQAAWVVLIKPMSWERHGLKHWIEAARKRLHRNVLAIALANKLARIAWGVLAGSRNFEASKLQAA

SEQ ID NO: 187613 - protein, 331 aa, unidentified
MNSNLQGGELMAAGAKRVGAGVDVSKDELEAAWGEQRLRVANDAGGWDALIAAFRAAGVEVVALEATGGYEAKLAYALQAAGFAVARLNPRQARHFAQALGYLAKTDRVDARMLAEFAQLIAQHPERERYVKALPDPQRQYMAVLITRRRQLVDMLTAEHNRLALSHERARKSIHSVMRVLERELTRIDHDIDDHVRTHFQDLAKLLDSVKGVGAVLIATLLGLLKELGQIPAGEISALVGVAALSRDSGKRRGKRSVWGGRAQLRAVLYMATLSAIQHNPVIRTFHQRLIAKGKLPKVAIVACMHKLLIILNAMVRDNQPWDDSKHLKTA

SEQ ID NO: 187614 - protein, 353 aa, unidentified
MNYVGLDWAYRTAQWCALAPGGEIAGEGRIAADRDGLARLVLELGDEVTACLEMMSGAVWVRDQLVDCGWQVEVADARKVKTVAPLAAKTDKVDARLLAELSRRELVPALWLPSLDERALRERLRRRMHLVRLRTSAKGRIFGLQTQWGVRVSLARLRRADGLTLLERAGVPEVWRRSVSECLALIDFLDARLEPLNAELRPFAKADPRAVLLDTIPGIAEPLALTIAVEIGEISRFASPAKLVSYGRLAPRVRQSGQARPRSGPLSKSGSRLLGWAAVEAAQQAWRESNPWHRLYLDVSARSGNRNSAKAAVARKILIAVWHMLSRNEPFNPAPRSTRGDSVPASSRLALAA

SEQ ID NO: 187615 - protein, 324 aa, unidentified
MSSVALGIDIAKLKFNVCLQRGDGKLKHKIFVNTAAGFHQLNEWLIKQHTTRVHACLEATGSYGEALALFLHDAGHAVSVTNPAAIKAYAASRLSRTKTDRVDAELIARFCATQQPALWTPPASEVRTLQALVRRLESLVEMRVAESNRAAAGGVEGLVQRSLEDHLGYLKTEIKRAEALISEHIATHPGLKQQHALLVSIPGIGEATAAKLLAEVVHIKNYASARQVAAYAGLVPRERQSGSSVRGRARLSKVGSSRLRHALYFPALTALRCNSLVGRWAEGLRARGKCKMVVIGAVMRKLMHLAYGVLKTGRPFDPEWAKTT

SEQ ID NO: 187616 - protein, 391 aa, unidentified
MINIGIDVGKFKHCATVLDDSTGEVLIKPFFLTNNRKGFDLLYSKTKQFIHRKHSVGMEDTGHYMINLTNYLLDKKFTVKYINSRATCLRRKGLGISAKNDRKDALLIAEMLSEKRFLRSVSARSIENSKFRDITRLYHQLQEQQNQDMNRLQRALDIVFPEVNSLSWTRYSKAYMKFLSTYPSASSIALEDIRILRKALKTEGRGRQCKVTAEEIRELAKNSVGEDNISIDLEVTSIIAIINTREEQIRMLEKKIEEFSHKLNSPIISIPGISHISGMTILAEIGDINQFQNTGNLISFAGMDPLVYQSGKYDAAHMPISKHGSRYMRKALYQAVFTVCKYSPTFHDYYTKKRNQGKSHRCAQGHCARKLLRVIYKLLSTNSPYDQNHIQ

SEQ ID NO: 187617 - protein, 349 aa, unidentified
MVVLGIDAHKRSHTVVAVDEAGRKLGERTIATTTVDHLSLLTWAEQFGGDRLWAIEDCRHLSRRLERDLLGAGQRIVRVPPKLMAHARDSARSYGKSDPIDALAVARAALREPDLPTARLDSPAREVRLLVSHREDLVAERTRIINRLRWHLHELDPSWQPPARSLWRPKHLATTTARLQGIDGLVARLARALIQRCRMLSDEISELDRELEPLVRRLAPALLELCGCATLSAAKILGETADIERFHSRHAYARHNGTAPVPVWSGNRTRHRLSRIGNRQLNTALHRIAITQARYHPPAREFLQRRRAGGDTKTESIRALKRRLSDVVYRALLADAARSAPLAAITAAA

SEQ ID NO: 187618 - protein, 363 aa, unidentified
MEHMFATLGGIHMLLCIGMDVHAKKLTCYGIPFDEGDVEAEEFCTEFNREFKVMSGEKKDMIRLSKWLKDVDHSILIESGSKTHEVFWTLTDNGCTVVVANANDLFRITMSVKKTDFHDCRELASYMRRRMLGEKEFSVCLMVDSVWLNRRQMCRLYAAAASDLSDLRRRIRSYMLVRGITIEDLGRDIVSEASLKKLEEVADVPMGFLIEEARWKTAEQKRILKAIEKEFADVPYYNLLKSIRGFGPVTSSYLTAMIIDIKRFDSPAAFAAYFGIVPKQRESAGHSKHCGITRRGDDVARQMLLTATMVHVGNDRDRVSSITNMYYRLRARGMPNKKAMTACTNKMTRIIYAILKDGREYRE

SEQ ID NO: 187619 - protein, 402 aa, unidentified
MNAVGIDVSKGKSMVAIMRPFGEIVSAPFEIKHTASDINSLVELINSVEGESRIVMEHTGRYYEALAHQLSEANLFVSAINPKLIKDFDNDSLRKVKSDKADAIKIARYALDKWQNLKQYNVMDELRNQLKTMNRQFGFYMKHKTAMKNNLIGILDQTYPGVNTYFDSPARSDGSQKWVDFASTYWHVDCVRKMSLNAFIVHYQNWCKRKKYNFSQSKAEEIYGKAKELVPVLPKDDITKLIIKQAVNQLNSASTTVESLRTLMNETASKLPEYPIVMAMKGVGASLGPQLMAEIGDVSRFTHKGAITAFAGVDPGVNESGSYEQKSVPTSKRGSSDLRKTLFQVMDVLIKTHPQDDPVYQFLDKKRAQGKPYYVYMTAGANKFLRIYYGRVKEYLSSLPES

SEQ ID NO: 187620 - protein, 341 aa, unidentified
MKKNIFFIGIDISKADFAASIYKTPKEPIVTKEAIPNNPKGFEMLLLWLKDHLIDRKNCRICMEATGVYSQAISYYLLFQGFPVSVEPPLKVKRAFDPVGHKTDPVDSKQIAEYAYRFQDELTSWKPRDETLEKIRQLLSVREQFTKQKVALKNAIQAYHKQRVQVTLIKKAQKETLSQIEKQIARIDKELAKLINQDPNTFQKASNLKSIPGYGMLLAAHLLVITENFTKIQNYKRLAAFIGIVPYKHQSGTSVCKRAKIRHFGPMPSRKLLRLAAQSVATHDTTFRRYYLRKVAQGKAKALVLNNISNKLLKIACTIIRNNTPYIKDYRSIHPMYLKSA

SEQ ID NO: 187621 - protein, 338 aa, unidentified
MRTYAGIDLHSSNCYLAVIDEQQRRLFSKRLPNSLDQVQAALQPFKDELSGVVVESTYNWYWLVDGLQEKGYRMHLANPSAIRQYEGLKHTDDKWDAFWLAQLLLLGILPQGYIYPKAERPTRDLLRRRLLFVRHRTAHILSLQSMVDRCCGRRISVNQVKQLTPAEATALFSDVHLGLTARFQVETIGFLSQQIRSIEKAVLPKVSLRPEFEILLTMPGIGKILGLTIMLEVGDIRRFAQAGNFASYCRCVKSQKLSDTKKKGEGNRKNGNRYLAWAYVEAANFAIRYSPRAKAFHQRKRAKTNNVIATKALANKLARASFYILRDQSAFDEKRLYG

SEQ ID NO: 187622 - protein, 413 aa, unidentified
MNAVGIDVSKKKSTVTIRQPGDVVLLPPRDYRHTQSSINELIATIKGLDGETKVCMEHTGRYYEPMASWLTNAGIFVSAVNPKLIRDFGDESLRAPKTDKADSKKIARYALDRWAKLQQYSPMDETRNQLKTMNRQFSFYTDQKTAMKNNLIALLDQTFPGANDFFDSPARSDGSQKWVDFVYTYWHVDCVRGKSLSAFTQHYRSWCKRKGYNFSADKAEEIYRIAADLIAVFPKNDNTKMLIRQAVTLLDTTSQMVESLRAQMDQIASMLPEYSVVMAMNGVGLTLGPQLMAEIGDPTRFTHREALTAFAGVDPGADQSGDHDRKSNRTSKKGSPYLRRTLFLIMDGLIQRSPADSPVYAFMDKKRTQGKPYLVYMTAGANKFLRIYYGTVRDYLKQKGLWPDPESDEVNPG

SEQ ID NO: 187623 - protein, 347 aa, unidentified
MRFYTRQHRHYCGVDLHARSMYVCVLDRDGNVLVSKNIPSAPEPFLELIAPYREDLAVAAECMFTWYWLADLCAREGIVFVLGHALYMRAIHGGKAKNDRIDAHKIAGLLRGGMLPQAYVYPQTMRATRDLMRRRNYLMRQRAELLAHITNTNHQYNLPALGVRPARPAERSGLLEHFAEPQVRRSVAVDLSFVEHYDRELPALERYLESNAQAHDPLALAIVRTVHGMGKVLGLSILYEIQDIGRFARVQQFLSYGRLVKPTKSSAGKVLGHSGKKIGNAHLKWAFSEAAVCFLRANKPAQALRARLMAKHGKGKSLAIIAAKLARAVYFMLKRGEAFDAERFFAH

SEQ ID NO: 187624 - protein, 364 aa, unidentified
MKDSTIWVGLDWHADSVVGSVFGAAGSEPLERIEAVPDARGLARLIRRLKGLGRDVRCVYEAGPCGYEPQRALARAGIGCAVAAPSLIPRRPGDRVKTDRRDADKLGRLYRAGELTLVTVPDERQEALRDLVRAREDAKADLLRRRHRLGKFLLRHGHRYREGSAWTQRHWSWIRSLHFEQPHSQAVFEEYQAAVAEGLEQVARFDRLLEEAARAPELAAKASRFQVLRGVATRTALTLIAEVGDPRRYAKASQFMGATGLIPSEHSSGGQRHQGAITKTGNAHLRRVLVEAAWHYRHRPGPSRDLARRRLGQPLPVLAIARKAELRLHRKYQRLILRGKQSTQAVVAVARELAGFIWAIAQVA

SEQ ID NO: 187625 - protein, 291 aa, unidentified
MSKAKTLVGLDVHATKIVAAVLDAETGELQTFAMSGETAGTAGFCAGLPRPVRVAYEAGPTGYGLARELVKRGVECVVAAPSKIPRASGDRVKTDRRDAEHLVRLLLAGKLHPVRVPGDEEEALRDLVRAREAVRVDLMRARHRLSKLLLRHGIRFDDGAAWTERHRQWLGTVKLDWPAAQATMLDARGAIDALVHRRDALEREIIAMLPASPWSVQIGRLRCLRGVDTLTAVGLCAEIGDFERFAKAEQLMSYIGLVPCENTTGQQRRLGAITKTGSGHARRLLIEAAWH

SEQ ID NO: 187626 - protein, 392 aa, unidentified
MGCPMPQRNDLSRSLVPFQQDGTLVAVIELSRSSWLVAGIVPGLERHPLKKLAPDEDALLRLLHRWRDEAAKAGCAITRLAVAFEAGRDGFWLARWLRAREVEAHVIHPTSIAVSREHRRAKTDRLDTGLLKRAFLGWLRGEPGHCSMAAVPTLEEEDARRPNREREGLVGERTRIVNRMRGCLARLGIRGFGPASRGAPDRLEALCTPEGVALPPNTLAELRRDMARLRFVSDQIAEIEAARRERLRQAPAEDRPHAMVRLLARVIGVGVETADMLVHEVLRRDLRDRRAVARYAGLTGSPEESGARRREKGLAKAGSARVRRGMVQLAWRFLRFQEGSGLAGWYRARTADARAGTRKTMIVALARKLLIALWRLVTTGEVPEGVVLRPAA

SEQ ID NO: 187627 - protein, 400 aa, unidentified
MRSIGMDVHRTFAQIAVVEDGLCRDVGRIGVRPEQLRAWAATLEPSDQVALEATTNSDAIAMLLEPLVAKVVVSNPRKTRAIAEAKVKTDKVDARILAQLLAADFLPGTWVADDRTRMRRRLVMRRTHLVKQRTRVKNQVHAILARNLAPTCPHADLFSGVGRRWLAAQVLPADEQRSVEALLRQLDFHNEEHASVEQDIAIEAIDDPVIARLMTVPGIDVTVAMAVVAAVGDFARFDTPDQLVCYLGLNPRVKQSGNAPASHGRITKAGPAQARGMLVEAAFSASRTPGPLRAFYRRVKDRRGFQIATVAVARKLAVLCWHLVTKGEDYAFGRPSLTAHKRRKLELAAGATPHPGPVAGPSHDYFIKQLRDQEKELVAQAERAYEVVVAHWQPKRPATA

SEQ ID NO: 187628 - protein, 419 aa, unidentified
MTRKDDSKIIRIVHPICCGLDVHKESVSACVIFPDDNGEEQYEIKVFGTFTDDLTRLRDWLMAHDCPVVAMESTGVYWRPVHNVLEDSVQVVLVNARDMRNVSGRKTDIGDSRWIAGLLRHGLLKSSLIPPQTVRQWRDLTRLRKKYVQSAGDYRKRTHKLFESANIKIDSVVSDLFGVTGRNLMQLLVEDRKALTLSDIQTCVRGKLKGKEAELFRSIQGFFTDHHRFILKMILETLTMLEAQIEALDHEIRRVMKGHEPLLDRMKKAPGISDVSSCDILAEIGPTLDSFPTDTALVSWSGLCPGNNESAGKRKSGRSPVRKHHLKSIMLEVAWAAVKKKGSYFKDKYYRLKARRGAKKAIVAIAHRILLGVYHVIKDGVEFRDLGEDYLTRRNKSQKVFHLRKQALSLGFDLVPQTV

SEQ ID NO: 187629 - protein, 343 aa, unidentified
MEYYVGLDVSLKQTSICVVDRTGSVVREGVVDSDPEAISVYVRSKAPDAVRIGLETGPTSTWLWTELKQLGLPVICIDARHAKAVLKMQINKSDRNDAIGIARIMQTGWFKEVHVKDIDSHSVRALLASRALLVKIKRDLENHVRGLLKNLGLVIGRAKFNVFAVRAEELIEGRPELIAAIRPLLEARTAVEQQVSELDRKVMKLVRRDAQVRRFMTVPGVGPITALAFKATIDDPARFARSRSVGAYVGLTSRRHASGEVDWSGRISKCGDGMLRSYLFEAAGVLLTRVPRWSAVKAWGVRLAKRNGLRKAKVAVARKLAVILHRMWIDGTEFNWSKQEIAA

SEQ ID NO: 187630 - protein, 505 aa, unidentified
MLNVASCMMRSPYTYGGLKEMKNKSIFTRQNQILINLFHDAKHPDKVLCVPIDYAKQTHMVLFCNGSERLLKKPFPVKNNPEGIAFLLEAVGKICRKCHIEREHVFFGGEDCGTFADNFIYALRKEGFAVMGVNAADAAKQRENLQASTDKLDLLGIAKMLLGKRGSIAGGQIGKERALRSLTRHRDSQIRMRTATSNRIHKIVDQLFPGFLDEKRSAIPPFSEASLYLMQDRFSPVQIAKRQDKALLKQFKVHGLQHAESSLGKLKAYARQVLGHPPELVGMLQTSLAGEINLYRCLGNNIDLIGREIAQQLAQTSGAMLTTIRGIGITLASGAASEIGPPETQPSLRRLCSYSGIVPRVKQTGGPEKGAKTGRVSRRCNHLLKNYIVQCGNHLGQHGPADLKEDHRRRSANGQHADFGMARRYLRMGMRLMRNGEAYVPPELREGATLEELQAYYLELWPKLLSKWIKSGAVQTAFDSENPLGQWRDRIEAIYEIKLPLPKKK

SEQ ID NO: 187631 - protein, 384 aa, unidentified
MSESSALSSSSSSASSSSMYYVGLDVHQKRSSICILDSAGKQVKRLEVKGSWAQVVQAVAQVPGPFSICYEASCGYGYLYEKLAPLPRARHVAVAHPGQLRLIYRSKRKNDRVDAAKLAKLLYLDLVPQVHVPRADVRAWRALITYRHKLISKRVAVKNQIRALLRGLGIIALPGKRLWSGKGLKWLKEQSLSESDALRRDMSIEELEEVNQKIRRVEKELNRRADAHPGVTLLRTIPGVGVRTAEAVVAHLDDVSRFSRTKQVGSYFGLVPCQDQSAGRERLGHITRDGPPAVRKLLCEAAWQGIRRSPALKEFFERVTRGEADRRKIALVATAHHLARVMAAMLRSGEVWREVARPGSTRDEEGRAAPGGCPASPPRKTTAA

SEQ ID NO: 187632 - protein, 311 aa, unidentified
MNDTIGIDISKDTLDTFWLSKRKHKQFANNKTGLRSLIRWVREAEVSLVVFEATGVYHRLLETSLAAHDFPFARVNPRQARRFAEGTGTLAKTDRVDAAMLARMGSLLEMEADKPKGEMLHNLKAMATARQALIKDRTAARARLATATYPLLRKQATLRLRQVERDIAQIDAAIETTISADKALSEKAEILISIPGIAKITAFAMLIEMPELGSLSGKQAASLAGLAPISRQSGKWQGKERIQGGRASLRKAIYLPAVVATRFNPDMKAKYHELIGNGKCKKLAITAVMRKLVVMANALLRDGRKWTETRA

SEQ ID NO: 187633 - protein, 403 aa, unidentified
MNAVGIDVSKGKSMVTILRPFGEIVSSPFEIKHTSSDILSLIKLIHSIEGESRIVMEHTGHYYEVLAQQFSAAGLFVSAVNPKLVKNFNNDSLRKVKSDKADSIKIARYALDKWQNLKPYSIVDELRTQLKAMNRQFHFYVKQKTAMKNNLINLIDQTCPNANTYFNSPPRSDGSQKWVDFVYTYWHVDCVRKMSLNSFVKHYQNWCKQKKYIFNKSKAEEIYTKATELVPVFPKNEITKRIIRQAIAQLNSTSATVETIRILMNETASKLPEYPIVMQFKGIGPSFGPQLMAEIGDITRFTHKGALTAFAGVDPGVNESGSYAQKSVPTSKRGSSNLRKTLFQVMDVLIKTMPQDDPVYQFMDRKRAQGKPYYVYMTAGANKFLRIYYGRVKEYLCILSESS

SEQ ID NO: 187634 - protein, 312 aa, unidentified
MHTTTPDPIEYVAIDVSKATLQVQNENCSLVVGNDPPGHRKLLKHLKCSKNPLVVFEASGGYERGLSAFLAKSSIPMAMVNPARVRDYARSEGVRAKTDPIDGRMILAFAKSKAVKAMTPPSEASVKLSALLDRRGHLVEQLAREKNRLQNSEAFIHGSIRKMIRILEKEILSLEKLIEGFVLADKELQPRSQIIQSVQGVGKVTAWTLLAFLTEMEHLNRNRLVALAGIAPFNRDSGKFSGKRSIIGGRAKVRKCLYMSAHTAASCNPVIAPYVQGLRDRGKPYKCAIVAAMRKLLIHIQSLLKNAHLQPA

SEQ ID NO: 187635 - protein, 363 aa, unidentified
MTSITTTTGPVTGGVDTHGETHHAAVLDQVGRELGDREFPTTPSGYRALLAWLAGHGQLDRVGVEGTGAYGAALARHLRAGGVTVVEVDRPDRKARRASGKSDPLDAYAAARAALSRRATGAGKSRDGRVEAIRALRIARCSAVKARAAATNQLKSLLVSGPAELREQLRHLSTTVLITTCANLRPTNDLADPVQATKAALRRLARRHQNLSKEITEADVDLKNLVTAAAPRLLALRGVGIEVAGQLLTTAGDNPDRLRSEAAFAHLCGVAPVPASSGRTHRHRLNRGGDRAANNALYIVVLSRLCYDARTREYVDRRTKEGLSKPEIIRCLKRYVAREIFTLLTARTASEQSHQVLPMSTVA

SEQ ID NO: 187636 - protein, 334 aa, unidentified
MVAGTLGSLDKEGATKMTHSSVITAGIDTAKDKLDIAIHGQPGGFTVQNNLAGWISLADRLTKAGVKRIGIEATGGYQRGVTRHLQSVGFTVVTLQPLQVKAFAMLHLKRAKTDRIDAALIAACTHLLDAANKMPPDPRFDALADHLTFIEQIEEDIARIKTRLEHIHDARMRRLDEGDIKRLAKRRDGELRRLIGVLRGHDDLSLRFDLVLSIPTIAERTALSIVVRMPELGQVSREEAAAIAGLAPFVRKSGKREGEAHIGGGRGRLRRALYMAALPGAFRWNPQLMALYARLTANGKCHTSALIACARKLLIFANAVVARGTPWEAKPALG

SEQ ID NO: 187637 - protein, 345 aa, unidentified
MQITTVGLDLAKSVFQVHAVDASGGVVVRKTLRRSQVLPFFTRVPPCLIGVEACGTSHHWARELTKLGHEVRIMPPAYVKPYVKRSKNDAVDAEAICEAVTRPTMRFVAMKSTDQQAALSLHRVRDLLVKQRTQLVNMIRGLLAEFGIDIPVGLERALGLARQIAVSEVEPDVPAVAKQMLDLLCAQVLDTHVRLQAIDRAIIALQRTDEVARRLSTIPGIGPVGATALAASVADPGQFRSGREFAAWLGLTPSQNSSGGKDRLGRITKMGDRYLRKLLVIGATSLVRRARHKPEAADPYLLALLARKPGRVASVAMANKMARVVSAVMARGEVYQARHAPSLAA

SEQ ID NO: 187638 - protein, 322 aa, unidentified
MAMLSFGGIDVSKDRLDVMVLPEERCSSVPNNTAGWAKLVEQLRGCSIAAIGIEASGGYERGVMRALLAADIPVRQVNPFKLRQFARASGVLAKSDPLDARMIASFVAIMPTRPAQRQTPAAERLVEMLAVRRQLSAEKVAAENSSRLLEDAMLQRLSRRRITRLAADIELLDERMAEIVVTDAVLVQRYRLLTSMPGVGPLLACTLIALLPELGSMNRKQVAALVGVAPYAFESGTLKGRRCIWGGRAHVRQVLYMAAMSASNWNPGFKAFHDRLRAAGKLPKIVIVAVMRKMITTLNAMVRDDVVWVDRHRGRHTVPIAR

SEQ ID NO: 187639 - protein, 346 aa, unidentified
MIIVGCDFHPGWQQVAVFDSATGEIREEKLENGNGEAKRFYASLPSPSRVGFEASGNTQWFEDLLDSLGHEVWIGDAAEIRASYVRKQQTDRRDAAHILKLLIENRFPRLWRPSQAERNLRQLLIHRHRLVGIRTRVKNGLQHLMLNRGVQLKQKLWNEAGQKVLSELPLEGWAAQRRQDLLKLLSELNPQITKLDQAVERTAYQHPGTRLLMTQPGVGPITALAYVITMGDVTRFQRGKQVASYLGLIPSERSSSNRRRLGSISKQGNPFLRMLLVESVQTVCRLDEGFRNQYKHRCHRMKKGVAKVAAARKLAVRLFWMLRTNTAYPEIARIEGSPRDGVVGGS

SEQ ID NO: 187640 - protein, 405 aa, unidentified
MPVHAAPVTPSTIVVAVDVGKTIASVSATDTCRHRLFGPVDIAMTRSDLRLLVDRLTQSFPPSPQVKIGIEAAGHYHRPMLDYPGWPAGWEILELNPARVGEQRRIHGRRRIKTDAIDLDAITDLLLTGQGQPVTRPDRVLGELTAWATHRMRRVTTRTATKNQLLGQLDRAFPGLTRALPDVLGTRIGRLVAAEFSDPARLATLGSSRLIRFAAHRGLRVQRPLAERLITAAREALPTSDAVIARRILTADLELLTDLDTQITAAEAELAALLPRTPFATLTTTPGWGVVRVANYGAALGDPGRWPGPRQIYRASGLSPMQYESAGHRRDGGISREGSVTLRRSLIDLGLGLWLTEPAARAYAAGLKARGKHGGIIACALAHRANRIAYAMTRDHNDYDTTCWS

SEQ ID NO: 187641 - protein, 418 aa, unidentified
MAKVQKVFDQLHERVAGLDVHKAQVTAAVRVPGRDGARVQEVAEFKTTVQGLLALRDWLCAHGITYVAMEATGVYWRPIWAILEDDFECILCNARDVKQVPGRKTDVSDSAWLAQLAEAGLLRASFVPPKPIRALRNLTRYRKTQIEERQREANRMHKILEDTGIKLDCVATDILGASGRAMLDALCAGTTDPEILAELAQGRMRSKIPALREALEGRFDAQHALIVSAILVHLDFLDEQITLLSDAIEEQIGPFEAAVELLCTIPGVQRRTAEVIIAETGADMSVFPSAKHLASWAGQCPGNDESAGKRRSGRTRKGSRWLGIALTEAALAATRQKNTYLGAQYRRLRGRRGHKKALGAVKHSIIAAAWHMLSTGELYNDPGADYFDRRVDPQKKIKRLITQLEGLGQRVVLEPAAA

SEQ ID NO: 187642 - protein, 369 aa, unidentified
MKDDIRVCREMTNPVPNEFALFPKSTLGIDLGDRFCHCCALDYRGEVVERFRFETTKAGLAKAFENRPPCRVVLEVGTHSPWVSRALGALGHEVIVANAREVQSITKSDRKNDANDAEQLARLGRADPKLLHPIAHRQEDTQRDRALLTVRDKLVQVRASLTVQARGIAKALGERLPKSTTPAMAKRVREEGFANLFPGMSSLLEVVELLSEQIRELDSEIEKVSKERYPETELVRQVKGVGPITSLAYVLTIEDPARFARSRSVGVYVGMRPRQRDSGDRNPHLSISKAGDPYLRNLLVECAQYILSRGPDSDLRRFGERIVERGGPGARQRAVVAIARKLAVLLHSLWRTAEVYDPLRQAQVTEATA

SEQ ID NO: 187643 - protein, 310 aa, unidentified
MDIIAVGIDVSKDRLDVAVHPGGEAFAMQRNGTGLERLAVRLTQLAPAIVALEATGGFETIAAAALGGAGLPVVVVNPAQVRAFAKALGQRAKTDPIDAAVIAHFAAATRPEPRPLPDEATRLLSDLVARRRQIVEMIGAERQREKRAISRHLKKSITRLVKALEKELVSVDTDIDDAMRGSSAWRETEDLLASVPGVGPVIARTLIAELPELGHLNRKQIAALAGLAPYTRQSGQWRGRSFIGGGRKVVRTVLFMGAMAARRHNPVLKAFFERLVAAGKPKMAALIAVGRKLLTILNAMLRTKTSWQAA

SEQ ID NO: 187644 - protein, 320 aa, unidentified
MLSFCGIDVSKDRLDVLVLPEGHRSWVPNNVAGWAELVEQLRDCSIAAIGIEASGGYERGAMRALLAADLPVRQVNPFKLRQFARASGVLAKSDPLDARMIASFVATMPTRPAPRQAPAAERLTEMLAVRRQLSAEKVAAENASRLLEDAMLQRLSRRRIARLAADIDVLDQRLVEIVATDVALAHRYRLLTSMPGVGSVLACTLIALLPELGRLSRKQVAALVGVAPYAFDSGALKGRRCIWGGRANVRQVLYMAAMSASNWNPVLKAFHDRLAAAGKLPKVVIVAVMRKMITMLNAMVRDDVLWADRLSGRHIVPTTR

SEQ ID NO: 187645 - protein, 368 aa, unidentified
MNKQDQSISSSGTSEASEDNDRKRVLRLGLDMHYRQVTVAMQEDGGRIKAVGKMSHGAFWSWVNKKLKEGWQIESCYEAGASGYWLHRQLEQMGVQNLVVVPKAMGQGGQKQKTDKRDSGMLCDALDRYLRGQDKALSVVAVPSVEQEQKRALIRNHLQIMADRGRFEARGKGLLCAQGIEVHGRWWKGKAWQELQTNPLVADWMREQLEDWRQKVLSAQEQQEGLRERIEALAPKSLPKGVGAYSAAVLEYEMKGFARFKNRRQVASYTGLCPGIHRSDSRGKEGSINRCGNPRVRWTLVEMVWRLSFWQPQYGPVRRLASGLAKRAKKRLVVAAARRLAIDLWRLATGQTTPEKLGLIMQNHTQSK

SEQ ID NO: 187646 - protein, 408 aa, unidentified
MKTLHQRCAGLDVHKQEVVACLRLGRRGRVEREVRRFPTTTRGLLELADWLEAARCTIVAMEATGVYWKPVWHLLEGRFELVLANAAHIKGVPGRKSDVNDATWIADLLAYGLIRASFVPPQPIHDLRDLTRTRKQLSREIVRHEQRLQAVLEEANVKLTSVITDILGASGRRILKAMIAGETDPSRLAELGSRRLGCSRETLVEALDGHVRDHHRFLLDQHLKTIEQLEETMAAFDARLEAALAPFRDTVECLTQVPGLSTTAAEVVIAEIGLDMRRFPTAGHLLSWAGLVPGLHESAGKRRSTRVTKGAPWLKPVLVQCAWAAARKKGSYFEAQFLRLRGRRGPKKAAIAVAASILTTVYHMLRDGTCYQDLGPNHFIRRDPARTAHKLADRIRSLGYVVEIRSAA

SEQ ID NO: 187647 - protein, 412 aa, unidentified
MNRKARRCCGIDVHKASLSACIRLHGKGRKVSEEIRTFGTTGDELLALHDWLKEHQVTEVAMEATGVYWKPVYYVLEDGFRVILVNPAELKRMPGRKTDVSDCAWLAQLLDHGMLRPSFIPPREIRELRDLVRYRVSLKHDHTRSANRLHKVLQDADLKLSSVMSDILGVSGRQILSQLAKGNCDPVALADLARANLRGKLPQLRQALSGRFNAHHAFLLSRLLADLDNTEEAMAQVAQRIEAQLVPFAAELERLCTIPGVKQVAAAAILAEIGAEMSWFPSTADLDSWAGMAPGNNQSGGKRRRAKARKGNRWLRTMLVESGNAAGRTRNTALSALYRRMIVRGGRKHAAFVVGRHILNIAYHLLRERTTYRELGPTYFEQRRVEQLKRRCLDQLRNLGFDANLVPLPKAA

SEQ ID NO: 187648 - protein, 317 aa, unidentified
MSALPVFVGIDVAKTEMVTGLRPSGEVWTVSNDETGIHELLQRLRPHGPVLVVIEATGGYERGVVAALAAAGMPLVVANPRQVRDFARATGQLAKTDRIDAQVLALFAERVRPEPRPLPDEATRTLTALLARRRQILEMLTAERNRLEHAVPAVRRDLIQHIRWLERRLRDVDHDLDRTVQSSPIWRAKENLLRSLPGVGPVTSRTLIGSLPELGFLNRKQLAALVGVAPLARDSGTLKGKRLVWGGRAPVRAALYMAALVASRRNPALRAFYARLVAAGKPKKLALTACMRKLLTILNAMVKTNSAWQRIDHPKTA

SEQ ID NO: 187649 - protein, 338 aa, unidentified
MKITTVGLDLAKNVFTLQGVDERGSIVLRKTVRRARLLELFAQLPPCVVGMEACSGAQHWARELRKLGHQPRIMAAEFVEPYRCGGKNDANDAAAICEAVSRPKMRFVAIKSVEQQAVLAVHRLRQGLVEERTALANRLRGLLTEYGVVVGVGLDRLRRALPEIVEDGANGIPGIARDVFADAGQQLRELDARVTAYDRRIAALARASEPVQRLMKIEGVGPVTATALVASVGNASVFNNGRQFAAWLGLTPRQHSTGGKQRLGAMTKHGDVYLRTLLIHGARAVLRVTANRNDAKSRWAESLRRRRPDNVAAVALAAKHARIIWALLARGQDYRPAA

SEQ ID NO: 187650 - protein, 431 aa, unidentified
MDDIERYDRFCKLRSEIRGSNKHLIVGIDVAKDKHHAFFGTAQGKTLWRRLIFTNDLVGYQRLIEQVETLMAQHELHEVVFGLEPTSNYHKPLAHWLTERDHLLVLVGGKAVKDNRELLDGRWDKNDTKDSANVADLVSQGKCLFYENPEDDIIALRNLLSVRRQLIKETHRLRMRMRNGLLAKYFPEMDNHWGSCIEENLAILKWYLDPRKICQTDFMVFVQNVTTTDRGARQISRLRKIYDAAKDSVGLPVDESGTYQAQMLVERFKAVREEKAQVMEQIETVCRNLPAYHLLLTIPGFGPYIAPLVLSTLANPLRFKSRKQVIRLAGLDLNASRSGKKSQESVPVISKKGDAELRYGLYQAGLIASCHNDYFRRLYNRMLEGRLGERGIKTKARVKLAAKMLVIAWTMLKNNEPFNPNQLLAEPEQQR

SEQ ID NO: 187651 - protein, 354 aa, unidentified
MKKIFIGIDFSKEKFDATLIKADGLKESAPSVHEVFDNKVSGYRRLVRWVKAHAETLMAEAWLFCGENTGGYSIGLSNYLYASGYDMWLESAYKIKHSSGIQRVKNDKADSRAIAEYAMRNYDKMIIHKPQSASLTCLREVFLYRHSLVRQKVSLQVRRDEKRLTQEKSDVRAFMSFTSKHLITEVNKAIAKCDQKIKEIIASDDELREIFDIITSMPGIGVQNATCLMVYTDNFQKFDLDSRKIACYYGIAPFGRQSGTSVNSRPQVSPFANRRIKSLLSQAALAAIKFDINVHSYYQRLIERGKHPLLIHNNIKNKMLHILVAMVRDRVKYNPDKVYRTSNEVSLAPQVLNI

SEQ ID NO: 187652 - protein, 356 aa, unidentified
MPTQVTKKIDFTGKQLFIGLDVHKKSWSVTILVDGTEHRTFTQPPDPESLNSYLQRMFPGGEYNSAYEAGFCGYAIHRRLNQLGIKNIVINAADIPTSQKDKLQKRDPVDSRKIARSLEKGSLHGIHIFDRELEELRSLNRTRFYLMRDLRRSKTRIKSFLQYYGEPIPMEFDNNQWTLKFVSWLKQVKMQTRSGQDAFSNLIGSYEYHRSQLLTLSRQIRERIREYDRELYTLLKSVSGIGPLTASALITELGDINRFKNIDQLGSYVGLIPRIRESGETTYTGGITFRCNSFLRTLLIESSWQAIRMDPAMMQYYHAHLINNKGHKVVIKVARKLLNRIRYVMKNRQPYITGVA

SEQ ID NO: 187653 - protein, 372 aa, unidentified
MSETIVACRSFIGVDLHKTTVTLVAVGPDGTEIARLTINTKCREKIRLWLLGLPGPSHMAVEAVGFVEWFIEYFRPYVDRIDIADATELSNRRGKRRKNDYKDALDVAQRLARGECPCGYIADDELMQLRKLGRHWRQLSKLLALNKQFMKSILLAANLRGPKFDGDSAQRWLLAHGHLLKPAQRMAFANFTRVVQLIELQREPLRYAIIMASRSERFAPMTKLLQSVPGIGEIWSCIITAEIGPFERFPNADALEFWAGMTADLKESAGRTQSGSITKSGSRTLRWALCNAALTLCHCDAGQEAIRQRLIRKTGGIKGKANTAMGRRLLRTLYAMVRDNKPYQAGTPRNRNAAANKARAAKRARKNGKEAA

SEQ ID NO: 187654 - protein, 350 aa, unidentified
MKIRNKPRNAPVYGVDIGKNVFHVVGTDTAGEIMQRAKFGRETVVRFFQRAAPAIIGMEACPGAQWLARKLQTLGHTVRIVPAQFVKPYVKSNKNDIIDAAAIAEAVTRPTMRFVEVKSSDQLDVQALHRIRDHMVRHRTGLICQMRAFCIEHGIAIRQGAGMFKLELPRIVADIENDLTPTMRRLLSELFEDLKRLEGRIKDVTTEIEALAAKDDRARRLMTVPGIGPLSATALIACAGDARQFKKARDLTAWLGLVPRQQSTGGKAILLGISKRGNGYMRRLLIHGARSCVMRLNRSNDRLGGWLDQLRTRMHVNKVIVALAAKLARIAWVILTKPGALYERRQPAAA

SEQ ID NO: 187655 - protein, 402 aa, unidentified
MNCVGIDISKGKSMIAVMRPFGEVVVSPFEVLHTDSELSKLARLLKSLDGETRVVMESTGNYHAPVAWLLHDAGLYVSVVNAMLVHDYGNNSLRRAKTDKKDAVKLANYGLDHWLTLPRYVPEEDTRLMLKSCYRQYQQYSKVRTMLKNNLISLLDTAFPDANRLFTSPPRADGSEKWVDFVAAFWHCECVCGLSEKAFTAKYQKWCKKHGYNFSEDKALDIYASACGHFGVMPKTDTAKLLVEQAISQLRATSAALAALKQEMQSLAASLPEYPVVMEMFGVGPALGPQLMAEIGDVRRFHSKKALVAFAGIDAPPYQSGQMDIRSRSISKRGSASLRRTLFLVMGVLLQCAPMDEPVYQFMNKKRSEGKPYRVYMMASANKFLRIYYASVKAYLDSLEHN

SEQ ID NO: 187656 - protein, 412 aa, unidentified
MQVLFPRCCGLDVHKKNLVACVLVPGADGKAARFLRTFGTMTADLLGLTDWLLAYGVTHVAMESTGVYWKPVYNLLESSFELLLVNAQHIKQVPGRKTDVKDCEWIADLLQHGLLRASFVPERPERELRELTRYRTSLIRQRASEVNRLQKTLEGANIKLGDVVSDIDGRSAREMLEALVAGESDVHQMAEMARGRMREKIPQLERALVGQFGEHQRFLVTRQLAHIDYLEILIGELDQQVRERLRPFEEALQRLDTVPGVGRRMAEVLVAEIGTDMSRFPTHRHLASWAGICPGNHRTAGKRKSGKCRKGSPWLRAALAEAAQAAGRTKETYESSLYHRMVSRRGKNRGAVAVGHSLLVTVYHLLKEGTPYRGLGAHHFDERDRAAVIRRAVRRLEALGCQVTLKQLKQAA

SEQ ID NO: 187657 - protein, 363 aa, unidentified
MIYVGIDIAKLNHFASAISSDGEELIKPFKFTNDNDGFQLLLSKLDPLDKNSLIIGLESTAHYGDNLVRYLVTKNYKVCVLNPIKTSAMRKNNIRKTKTDKVDTYIICKTLMMQESLRFVTFYDLDLMDLKALGRFRQKTIKQRTRLKIQLTSYVDEIFPELQYFFKSGLHQKSVYALLKEAPTPKAIASMHMTHLAHLLKVNSHGRFDKEMAQQLRVLAQKSVGASDSSLSIQVTHTIQQIELLDSQLERVEAEMTEIMKFNDSVIMTIPGIGYINGGMILGEIGDIHRFSSSNKLLAYAGLDPSVYQSGNFQAKKTRMSKRGSKVLRYALVNAAHNVVKNNATFKAYYEAKMADNVEFNLD

SEQ ID NO: 187658 - protein, 387 aa, unidentified
MQKPHDNSKASPAAFMQDYTLIAVIELSLSNWLVAGLIPGVSREPLKKLEPNPEDLLKLLHGWRGEAIKAGRPITRIAVAYETGRDSFWLARWLRERGIDAHVIHATSVTVSREHRRAKTDRLDTAMLKRGFLGWLRGERGHCTVAIVPTMEEEDAKRPHREREGLVHEQTRAVNRMKSALIQYGVRNFNPKLRKASVKLETVRTPEGKSLPPNTIAALRRDMERLKIIKEQIKAIEQARLQQFEQKPEALANRMVYLLVRIYGLGLETADLLAHELLSRTLRDRKAVARYAGLTGSPDESGSKRREKGLSRSGNARVRKIMIQLAWRMVKFQPDSALVQWFKQRTESTKGSRKPMIVALARKLIIALWRYANDGVIPEGFRLHSAA

SEQ ID NO: 187659 - protein, 458 aa, unidentified
METRIIGIDLSVRAAHKAAILDQASNTFISPVVSFHTDPAEMDRLLSIARSGAADDVRLIAVLEATGMAWYPVSVYLSDRGVEVYRVSGQQVADQRRVYQRRAKSDRIDARILARLPLTLSERIYPLILPTNPQMALQRACRELLRLRRQSTSIKLRLQAMDRLVWLELSDILPPDDPRMYWVREHWYDPWQVLEAGEAAIAQSWLQASEEPSADLAWVSALLRQAERATIVYGSRSRIMGDSLLASVLREQSRLEELESQAHWLCLNTIHPLYRQLHPQRYLETIPGIGQNSAAVYIAFIGDIRRFPSLSEFRGWTGMIPYSKQSGDARVSGLHITQAGPDPIKATAFLNAQVARRWDPQIAAVYHNQMTALGKHYLQAICACATHLLDRVYVILRDNRPYELRDVDGTPVDKDVAHRICQKRYLVPDSVRRHTAHRVRQARREMRLEYLYERRSQK

SEQ ID NO: 187660 - protein, 313 aa, unidentified
MPPCFVGLDIAKDHIDVSVRPTGEQWRVAQTDDGMAQLVAHLGALTPALVVVESTGGYETAAVTALAVAQLPVAVVNPRQVRDFAKAIGRLAKTDALDAAVLALFAERVRPAVRPLPDEAHQELIALVTRRRQLLDMLTAERNRLATARRSVRASVQQHVRWLERRIHDADADLTTTIQQSPLWRTQDDLLRSVPGIGPITSSLLIALLPELGVLSRREIASLVGVAPLNRDSGQQRGRRIVWGGRAAVRGPLYMATLVATRHNPVLRGFYRRLRDAGKPPLVALVAAMRKLLTILNAMVKHQQPWQPVHAKN

SEQ ID NO: 187661 - protein, 336 aa, unidentified
MAKWKWFVGIDIASATFTAAVGGSPWHVLVPPQEFSNNLEGFRAFMDWLAEHRIDRRKAIACMEATGVYGEALAYFLVAQKLALAMEPPLKVKRAFKTTGPKTDAVDSLQIAEYAYRFADELQLWQSHGEVFEQIQALLATREQLVRQRTANKNALATLERKWVKTPAADKAHHQIIESLNKEIKAIEKELHRLIDQDPDLRQRLGLLLTIPGVGLLLGAHMLLLTRDSQDPRELASHLGVAPHEHTSGSSVFRQTQSRHFGPSTPRKLLYLAACSLRTHNSMFQHYFRRKTEQGKASRLVLNNIQNRLLRIICAVLRDQQPFIPGYRSLSPLTRS

SEQ ID NO: 187662 - protein, 321 aa, unidentified
MKNSTNPIAVGIDVAKATLEVSFGTDGSTQSFANEVEGHDALLARLQGSTISLVVLEATGGYEAAVAGALQAAGLPVAVINPRQVRDFAKAMGVLAKTDSIDAQVLARFAQVLMQRDDLQRFIKPLADEPLKALQAQLLRRRQLCSMLIAERQRLSTSHSSTRPDIELSIRFIKDRLDKADAELSRLIQRDHAALNDLLRGVKGVGPKTLATLIAELPELGHLTRREIGALVGVVPLNRDSGQFRGRQSTWGGRATVRRALYMAALVASQHNPVIHRFYAHLIEQGKAPKIALVACMRKLLTILNAIARDHVPFNAALHQT

SEQ ID NO: 187663 - protein, 309 aa, unidentified
MCRNRCRQKPSRHCLHPGKARLRVTYDTAGLKALDAFLREHDVSRIGFEASGGCEWRLLAHLRAGKRPAARLQPAQLRFFAKSRLKRAKNDRLDAVLIALFTASLEQLPALPDARFDKLAAELTYLEQIEQQIALVKTFAETALSEAIKRRHLREVARLETCRKAHLLRLEKTVRDDCDLAQRLDLLISIKGIGLRSALCLIIRLPELGHASRAEIAALAGVAPYDDDSGKYHGRRRIQGGRERLRKSLFMCAFTATRHNPDLAAFYTRLRQSGKEHLCAVIAVARKLIVLANTILFRKTEWTPQHRKN

SEQ ID NO: 187664 - protein, 313 aa, unidentified
MSERYVGIDVSKARLDVACSEGGRWSVGNDTQGQAQLCEQLGRECAKLVVLEATGGLERGIAAELAAAGLEVRVVNARQVRDFAKASGRLAKTDQLDAQVLVRFAQAMKLESRALASEQVTAMQALVSRRCQLIEMLTMERNRLGTAHKGVKRSHLRIIHTLEKQLAETDKDLDQGLREGGVWQEKVELLESVPGIARVTSLSLLASLPELGTLNRRQISALAGLAPFNRDSGHWRGTRSIYGGRASARRALYMATLVGTRHNVVLRVFYQRLRAAGKPAKVALTACMRKMLTIVNRMLKEHRAWDPQLNLAS

SEQ ID NO: 187665 - protein, 465 aa, unidentified
MPKQSSKLKRSKSKKPPKQPVSINQPWSVLHPDAAGLDLGSREHWVAVPPDRDPQPVRRFDTTTPDLAALADWLKACRVTGVAMEATGVYWIPVFQYLEGRGLAVLLVNARQLKNVSGRKSDVLDCQWIQRLHTYGLLGGSFRPADPYCVVRSYLRYRDELVAARSVQIQHMQKALLQMNLQLHHVLSDLRGESGLAILGAILQGERDPVKLAALAHRRVRSSREQIARALVGDYRAEHLFVLRTAYELYHSYEAKIAACDEALATELARLPDRVPPQARPLPAKAPGKKLDETLRQGLYRKLGVDLTAIEGVGTTVALTVLTELGPELGAFPSEKHFSSWLGLCPDHRISGGKILSRHTRRVVNRLSDVLRLAATTLEHSASALGAYYRRMKAKLGAAQGITATAHKLARIIYRMLKHGEEYVRQGLQEYQKKHQERRLQSLRRAAAALGMQLIEQQPVPTPVS

SEQ ID NO: 187666 - protein, 388 aa, unidentified
MFFIGIDVAKRSHQAAVTDISGNVIVKPINFKNSSDGFTKFLSIVESNAIEKNDCTIGLESTGHYWYPLYFFLIENGFDVKVFNPIQTAAFREITIRKVKNDNLDSLLIADFTRFGRYSETYIPDKNLTRFRLSISDICGSLKKKVIAILDQVFPEYTGVFSDVFGKTSKQLLEQFSTPDEFMDISTTKLTNLLLKVSRGRNGREKAELIKTAAQSSIGISYALDAFSFELKQLLAQIEFMENQLSDVDAEMEKLLSQSEYAVITTISGIGPMLGSVIVSEIGDINRFENSSKLVAYAGLDASVKQSGEFNSSKNKISKRGSPYLRRALWMAAFMSLQCDPALYDYYSKLRARGKTHRCATTAVARKLCIIVWAIMKSKKPYSPVLKN

SEQ ID NO: 187667 - protein, 420 aa, unidentified
MTVTYPVCCGVDVHKRFLVATIITTTNGVTPTYQKRRFSTFNKSIREFRQWLLNNNCLDVCMESTGKYYIPIYNLLEDDFRVTVANPKWVAAVKGNKDDVKDSKRIGDLFRLGLVPGSFIPDKSIRILREYMRYRFKLVCCKSSEKNRFQNAFTVCNVALDSVVSDMFGKSASAITDYLVNADSFDRAHCISLLHRSMLKKADQVIDSIEGFQMAPEQKQRIRFVKSHLDSIMKLIAELDKRVDAMVAPLECLIVLLCTIPGVDRSSAITILSEIGTDMSQFDSSGRLCSWAGLTPGNNQSAGKKKSVRITRAGVYLKPALVQVAHAAVNAKETPYYRIKYERIAKRRGKKRAIIAIARMILTAIFHILSSGEVWNPCDLYQVDMPLELREKQKEKAVKQAVKLLIAQGVVLPEHIRSPA

SEQ ID NO: 187668 - protein, 341 aa, unidentified
MKNLFIGVDFSKEKVDVAIIFADGLAETASRVFNEFKTTVSGYKQLIKWVEQNSGGIEPSLWLFCGENTGDYSKGLCNFLYGKGYDMWLENAKSIKDSSGLRRLKSDRADASMIAEYAMRNYDRAIMYEPLSESLAQLRELFLYRQMVVHHRCSFQVRRGEKKLTMEKSPIKTMISQSGRHIVSELNKEVEKIDKRIAELIKSDEELTEVFTIVTSVPGIGTQNAVCLMVYTDNFRRFNYDSRKIACYYGIAPFGKDSGTSVHSDPRVHYMANRQIKSMLTQAALAAINFNPVIARYYMRLVERGKKKQVALNNVKNKLIRLVTAMVRNRQIFSPEYKISA

SEQ ID NO: 187669 - protein, 386 aa, unidentified
MMTMTRTEESTAVAAATAPTLLLAFELGERSWKLGFTTGLGQQPRIRQISARATDRVEEEIARAKARFRLPADAPVLSCYEAGREGFWLHRWLGAHGVSNHVIESSSIEVNRRARRAKTDRLDLGGLLNLLARHHQGDGRVWRMVRVPSVAEEDARQLHRTRETVQQDRNRLINRLKGLLTTQGLKLSVDATFPTQLETAQLWDGTPIPAGLKARLQRGWAQLEFLTRALTELDAERDALTADPQTAMGRYVEALPTLRGIGPIGTWTLATEIFGWRDIKNRRELAGLVGLVPAPYQSGESHHDQGITRAGNKHVRRLMVQLAWSWVRYQPDSALTKWYEGKFGHGSRRLRRIGIVALARKLLIALWHYVEHGEVPEGAIVKGQAA

SEQ ID NO: 187670 - protein, 341 aa, unidentified
MKQYVGLDVSQKETAVCVVDEIGRLIFEGRAKSDPGALAALLAKKAPHVERVGFETGAMSSWLWHELKRIGVPVVCIDARHAHAVLSVRMNKSDENDARGLAELVRIGWYREVAVKSEASQQVRSLLIARSRLVTMRRDLENQVRSMLKECGLIFPRAITGQFQRRVTELTGEGHVLWPVLLPLLSVHGHVCRELEGLDRQVRQMARSDETTQRLMTVPGIGVVTALTFRHTIDDPSRFRSATSVGAYLGLTPRRKQSGETDTVGHVSRWGDRLLRTYLFEAASVLLHRTRRWCALKAWGLRLAKRNGMKKAQVAVARKLAVILHCIWIDGTSFQWGKEPA

SEQ ID NO: 187671 - protein, 383 aa, unidentified
MKSVCGLDVHKDSVYLCILSEFGELIEKVFGVLTYQLEEMRDLMLHHHVVEVSMESTSVYWIPIWRVLSPHFKLNLANPYFIKQLPGRKSDVKDAQWIAECTMKELIRGSFVPPETIQQLRQYDRRIFDLNEEIVRKLSKLDAVLQRCNIRLSNYVSNVDSKSYKAVVRAISQGITAPEELVKLIHGRIINHHGIDVITASLKGVVSLAEIDMISQLRDELDMAEAHKEKCQARMLEICERKFHEELKRLQTIPGIKERAATSLIAEIGTDMNKFETANHLASWSGLKPRNDESNKKIKSRSITHGNVYLRKTIIECAWAASRTKNSFFSRFSYHQTQVRKKNKMKVLVAVARKMLIAVWHVLHDNTIYIDFTTDRKTSQTRG

SEQ ID NO: 187672 - protein, 402 aa, unidentified
MNAVGIDVSKGKSMVAIMRPFGEIVSAPFEIKHTASDINSLVELINSVEGESRIVMEHTGRYYEALAHQLSEANLFVSAINPKLIKDFDNDSLRKVKSDKADAVKIARYALDKWQNLKQYNVMDELRNQLKTMNRQFGFYMKHKTAMKNNLIGILDQTYPGVNTYFDSPARSDGSQKWVDFASTYWHVDCVRKMSLNAFIDHYQNWCKRKKYNFSQSKAEEIYGKAKELVPVLPKDDITKLIIKQAVNQLNSASTTVESLRTLMNETASKLPEYPIVMAMKGVGASLGPQLMAEIGDVSRFTHKGAITAFAGVDPGVNESGSYEQKSVPTSKRGSSDLRKTLFQVMDVLIKTHPQDDPVYQFLDKKRAQGKPYYVYMTAGANKFLRIYYGRVKEYLSSLPES

SEQ ID NO: 187673 - protein, 386 aa, unidentified
MQKLNDLSRSLAPLDPDGTLIAVIEMSQSSWLVAGIVPGVERQPLKKLAVAESALLKLLHRWREEAEKAGRRVKRIAVAFEAGRDGFWLARWLRARDIEAHVIHASSVAVSREHRRAKTDRLDTELLKRAFLGWLRGERDHCKMVAIPTIKDEDAKRPNRERESLVGEQNRIINRMKATLIRLGIRGFNPKLKKAAERLEGLRTAEGEPIPPNTLAELHRDMMRRRLVSDQIRQIEDARLERLKQAPSDGPHAMVRLLARVIGVGIETADMLVQEVLSRNIRDRRAVARYAGLTGSPDESGRKRREKGLARSGNARVRRGMIQLAWRFLMFQKDSALVQWFRTRTENARGTRKPMIVALARKLLIALWRLVREGVVPDGVVLRPGQ

SEQ ID NO: 187674 - protein, 341 aa, unidentified
MHISVLGIDLGKNSCSIVGLDEAGKVVARRRMRRETVIAFAANLPGCIVAMEACCGAHHMGRVLAAQGHKVRLMSPEYVRPYVKAQKNDDRDAEAIAEAATRPTMRFVELKSEEQLDMQTLHRVRDRLVRERTSLMNQIRSLLLERGHIVPQGRARLAVRLTELLDTGEPILRPRIHRLIADMRERWQALDERIAGLDAEFAEHAQSDDRARRLLTIPGIGALNATALVAAVGDANTFGRGRDLAAWLGLVPRQATTGGKPRLFGITKRGSRYLRKMLIQGARAAMPTLSKGDTRLGAWLRGLLARSHPNVVVVALAAKLARIVWALLRYGRTYQPVALAA

SEQ ID NO: 187675 - protein, 347 aa, unidentified
MLHAGLDLSRRKLDVCLLSESGEQLDQLAAPPDADALRTLARRIDEAYREPVAAVIESMTGARLVHDTLEQEGWDVEIADAQKVKGLAPLACKTDKIDSRVLAVLSHRDLVPAIWLPDPRIREERELARFRLHLVKHKSALKNRVHSTLINFGKPCPVTDLFGVEGRQLLARLQVPQPWRGNITASVELIDDLEGQIAEINRKLRERHADHPYIPLLLSAPGIGWVLAFTIAAEIGEIERFPSPEKLAGYTGLCPRVNQSGDKDRRGPLTKHGPTYLRWALLEATMHALKHPAYAQRYQRNKRRLGKQRGAKVAQVDIARRLAHAIWHMLSRNQQFAPRGAAVRLAA

SEQ ID NO: 187676 - protein, 400 aa, unidentified
MMTPDDIDVWVGLDVGKSAHHAHALDHDGNTLYDKPLKQDEKAIRTMLGKLSKHGRVLLVVDQPNTIGSLPLTVARNMGIAVAYLPGTAMRRTAQLLPGDAKTDRRDAHVIAWAALKLPETLRDAGPDDDTPAALTRLAGHDEHLAHESTRPVNRLRSLLLQTHPAFERALKGERITRDATLALLERYGGPMGVKRAGIEDVKDWAKSNGLRAGRIIDDMFKAIGEQTVTVPGTLMAETIIPSIAHDIKTIRDRRREVGRQVEKLLEDHPLLTVLTSMPGIGVRTASNILLGIGGDIANFKSSAHLAAYAGISPVTGQSGTSIKGERPSRRGNKRLKNALWQTAFVASTKHPPSVAYYKRKREQGKHHNAAIICLARRRCDVIYSMLKNGTLYQEPALVA

SEQ ID NO: 187677 - protein, 420 aa, unidentified
MLEQTQDQQEVIERIAALDIGKATLVCCARVPGKGARRAQEVTTYSTMTRSLQTMADRLLELGVTRVVMEATSDYWKPAFYLLEAHGFEVWLCNAKDVKHLPGRPKTDVLDAVWLCKIAERQMIRPSFVPPPPIRRLRDLTRYRVALVSDRTGEKNRVEKLLEDAQIKLSVVASDIFGVSGRDMMDQMIAGQRDPKVLAQLARRRMRSKIGQLEEAFVGHFTDHHAFLLKRMLARIDALSADITAMEVRIEEQIAPFAEAVERLDEIPGVGRTAAHVIIAEIGLDMSRFPTAGHLASWAKFAPGVKESAGRKKGTGATGHGDPYLARVLGEAAVSAGKTDTFLGERYRRIARRRGKKKAIVAVGRSILVIVWHLLSDPDAQFHDLGADFYDNRLGPERIKRNHVRQLEALGYTVTLEPAA

SEQ ID NO: 187678 - protein, 422 aa, unidentified
MVAQRDSPKAQISLIRRVSLDRYHVGVDVGKDHHHICIRDLSRDTYCRTFSVRNDREGFAELVFSLERLSTDKDDFVIGVESCPYGLNLSYFLMAVGFNLVEVNTFRAGQFRKAQGRKAKTDRIDARSVADILSLGDHKPLCIPDPILDNLKELTRFRSDLADKRAATIIHLKEALSVLFPEFNKVFRQLDSAGSLALLTAFPGPEHVIAAGEERVGEVLSAASPHRMGKGMARRIIEAAQDTVGVIQKQPALGIKVSILAKRIASLQSTILDLDKQITALFNTLPCRPKGFPVGRAPSLATIVAEIGDVRRFPTLKKFLSHLGWCPQSFQTGGYRLEHPKMSHAGNRYVRRLIWMLSVFAVRTVPSYRMYFQRRVAEGKAKMHILVAVGRKLLSVLYSMLKRGVAYDPNWEENRRLALARH

SEQ ID NO: 187679 - protein, 338 aa, unidentified
MYFAGIDLHSNNNRIGIIDGLGNKVCQRKVANDLILVSKVLDPFRAQLQGIVVESTYNWYWLVDGLQASGYPVHLANTTASQQYSGLKHADDGTDAFWLADLLRLGLLKEGHICPPRERAVRDLLRKRGHLVEQRSRNILSIENLVSRNCGVRLNGEGVKQLTTEEINQSYHDQNMALAITSTLSVIESLNRQIDIVEKRVKGQVKLSESYQLLKTVSGIGEILAMTVMLETGNIRRFPTVGDFSSYCRCVDSVRLSNGKKKGRGNRKNGNKYLAWAFIEAANYAIRYYPQIHRFYQRKRARCKNVVARKAVAHKLARGSYYVMRDQVPFDITKCFDS

SEQ ID NO: 187680 - protein, 360 aa, unidentified
MMETMTWVGLDVHARSTHAAALTLPTAELQRARFGAESEAIVAWLQRLPQPVHACYEAGPTGFVLYRTVRAAGIAIDVVAPTKTPRATGDRVKTDRKDAELLARLLPTGSLRPIAVPPPEVEGARDLARAREQLRVDLCRARHRVSKMLLRHGRVYPGKSTWTQAHHRWLAGQCFDNANSELAYLDYLAAVDGLVARRRALDERLSRLAAEGDWWPTVQRLRSFRGLDTLSALVLALEVGDFARFRSPRQLASWLGLVPSLSQSGESSTQGAITKTGSRYARRLLVEAAWHYGRPPRIGVTLRQRQDGQPAHVLQIAWRCQHRLYRLHQLLSQRHKPGNIVTVALARSLACYLWAAAVAP

SEQ ID NO: 187681 - protein, 343 aa, unidentified
MQVTTIGLDLAKHWFQMHGIDARGGVAVRRKLRRGELLTFFQSLQPCLIGMEACATAHHWARELSALGHEVKLMPPAYVKAYVKRNKNDAADAEAICEAVTRPSMRFVPVKDAEQQSVLMLHRARSLLVRQRTMLVNALRAHMAEFGIIAPAGLRNVELLTETVAREHERLPDLAREILQLIVEQMHDTMLRVREIEARLAKWHRQCQLSQLLATVPGIGIMGASAIAATVADPSLFRSGREFAAWLGMTPRQNSSGGKERLGRTSKRGDKYIRSLLIAGAVAVLRHARNRPTRDGEWVRAVLARKPTKVAAVALANKTARIAWAVMMRGSGYQAKEVLGQTA

SEQ ID NO: 187682 - protein, 317 aa, unidentified
MEQLQSSTRVGGVDVGKKHLDAHVHGLGDDVRVENTQAGISELIAWLRAREVGRVGLEASGGFERRARKALDLAGFEVVLHQPLEVHRFAQLKRWRAKNDRLDARLIAAATAQVDAVKAAQDPRLAELAERLTVYEHVTEQIASMKAFLVSVDLEDLLALLRAQICALEAVKAKLAADLLARIKAEPDLLARLRLLLSLPGVGPAVAAGLVIRMPELGVMRRGQAASLLGVAPFDRESGQWKGQRFIRGGRSRPRRLVYLAALAACRCSPTFKSFAQRLLEHGKPKKLVLVAVMRKLIEAANLVLARGQPWSAQPIS

SEQ ID NO: 187683 - protein, 334 aa, unidentified
MENIALIGIELGKNSFHIHCQDHRGKAVYRKKFTRPKLIEFLATCPATTIAMEACGGSHFMARKLEELGHFPKLISPQFVRPFVKSNKNDFVDAEAICEAASRPSMRFVQPRTESQQAMRALHRVRESLVQDKVKTTNQMHAFLLEFGISVPRGAAVISRLSTILEDSSLPQYLSQLLLKLQQHYHYLVEQIKELEFQLKRKLDENEVGQRLLSIPCVGTLTASTISTEIGDGKQYASSRDFAAATGLVPRQYSTGGRTTLLGISKRGNKKIRTLLVQCARVFIQKLEHQSGRLADWVRELLCRKSNFVVTCALANKLARIAWALTTRQQTYEA

SEQ ID NO: 187684 - protein, 343 aa, unidentified
MAGVAIGVDTHKDTLAACLVDGLGMAREERAFINDPAGHRAFAVWVTGLAEPGLRVGVEGSSSYGAALARHLVAAGLDVVEVPPQLSRRERGRTRRPGKSDPADAFAIARVTLVEPGLPPVRLADRTRDLQLLAEARETVVHAQTRARNRLHAHLLVLVPGYTTTAAHLVSGPELARARGLLRGRHGIETDLARAELAEVIRLGRRADALERQLRALVGPEDPLLAIAGLGVISAAVLRGEAGDVARFRSPDAFAMFAGIAPLPASSGRTSRVRYNRRGNRRVNRAFWTIAVWQAKFDPRARAYLARKRSEGKSWREALRCLKRHLVRPVFAALLAGQQPAAI

SEQ ID NO: 187685 - protein, 314 aa, unidentified
MAEEKVYVGIDVSKAKLDVVVEPQERFWQADNNGAGIASLIKRLGRLKPTMIVVEATGGYEAALVEALYLGNLPVARVNPGRVRKFAQGMNWLAKTDRIDARLLARFGEKANPRLTQLPSEQEKRLAALVKRRKQVLDILVAERNRLENADPDVLPYIQNSLTMLQSQLDELDDAIQSHINQTPDLRKKMDLLTTVPGVGKVTASTLTAQLPELGSCDRKQIAALVGVAPFSHDSGKMRGRRFIRGGRPPIRSVLYMAALSAIRFNPVIKTFYNRLISSGKQFKVALVACMRKLLAILNSMIRNNQAWKPCLSS

SEQ ID NO: 187686 - protein, 347 aa, unidentified
MTLVTDGLVVGVDTHKDVHVAVVLDRLGRRLAVREFPATDAGNTRMAKWLAGLGQVIDAGVEGTGSYGYRLARLLADRGMQVWEVNCPDRSRRRRKGKSDPVDAENAARAVLSGEATAVPKDRRGFVGDLRLLVLTRRSAVKARTQASNQIKAFLVEADDELRAQLHGLRKARFGRACAALEPADGLRRALAALGRRWLALDTEARELEAQITALISAHAPVLLARHGVGAVTAAQLLVTAGANADRLRGDAALAALCGASPVEASSGKTSRHRLNRGGDRAANNALWVIAHVRTISDPRTRAFVAKRTATGNSRREIMRMLQRYIARELYPLIIDALRAAAVDGLT

SEQ ID NO: 187687 - protein, 353 aa, unidentified
MKCDKYMGMDVHQATTVAVVLDVDGKVVLETIVATEAPAILRLVKSLAGPLHLTFEETTQAAWLYEVVRTCVSEVIVCDPRRNKLLSEGSKGDKPDALKLAELLRAGMLRSVYHGHTGTLKLKELVRGYETLSIDTKRTMTRIKAIFRGRGIRTPGRGVYQPKQRTQWLDQLSEPGVRERMTWLYDELDSLRGLRRRAKQAMLKESRTHRAVELLKTIPQLGPVRCALIVATVDTPHRFRTKHQLWSYSGLGIVTHMSAEYEMREGRIVRSRKPIATRGLNPNCNRRLKDAFIGAATGGSRTEPYERYLKNLQAKGMRAEMARLSLARKIAAIALRIWKKGETFDPKKLNCTT

SEQ ID NO: 187688 - protein, 395 aa, unidentified
MEFLKYGLGIDMAMEKFDACISIIDKQQHVMIRAQCSFNNNKKGFETFILWVTKNTKLPIPAVYLMEATGIYYEQLAWFLHNKKCSVSVVLPNKAKKYKEALGLKSKNDRIDAKGLAQMACEQNNTIWKPLSGNLYVLRLITRQIQSVSEQSTVLKNQLHALEYCMYRDKAIEKMYAGQIDLLQKNKKSLQLRVEQIVEKDEILKKKFKNIGKIKGLGLQNLAVIVAETNGFTAFENIAQLVSYAGYDVVENQSGKRSGKTKISKKGNNHIRRCLHFPAFNMITYDVAPFKNLYERVYKKSKIKMKAYTAVQKKLLAFIYILWKKDEAFDPNYQGKESGDEESVPSFASVPQEPLIACGNEEKKLNLIKQKITPAITRVTQDKHPSKYRRMPSFA

SEQ ID NO: 187689 - protein, 343 aa, unidentified
MKLTRVGIDLAKNVFQVHGVDEHGKLVWKRQLKRATWLQVLLDKAEPSCVIGMEACGGAHHWARELQSRGYTVKLIPAQFVKPYVKSQKNDAKDAEAICEAMSRPGMRFVSVKTVEQQDIQSIHRVRSLLMSERTAKANQIRGLVAEYGLVAPQHMSPLRQAIPGWLEDAENGLTDRFRSWLHELWNELLRLDQRRKALDAEIKRISDTHPGAKRLKQLRGVGPLVATALVARFGDGRHFQRGRQAAASVGLTPRHHGTGGKNRLYGITKQGDRYLRSILIHGARAVVWQSKRRDDRLSLWLTELAARSHPNVAAVALANKTVRIAWVMLRHGTDFDPELAVA

SEQ ID NO: 187690 - protein, 462 aa, unidentified
MAGKHERARDQGNRRQLQGLPVIRQNVAGIDLGSERHWVCAPTPDGSGREIASFGATTAELIGMAEWLKARRVESVAMESTGVYWIAPHEVLEAQALAVLLVDTRQLARVPGRDKKTDPTDCEWIQRLHSCGLLQGSFRPEEAVCMLRTLVRDKANLVAERGDWLRRMQKSLDQMNVRVHRAVSDLDGVTGMAILRAIAAGERDAQQLAKLRDPRCSKSELEIAEQLQGHWREDHLFSLQQALQMHEAVEERIAAYEKEILRKLGDMEREQQRGQTAPPLNNTNKARAIKQRGPEPMRQALYRMSGVDATHIDAIGVETLEVVFSEYGPDLSRFPTEKQFVSHLTLAPHVPTSGGKPLKKRKRYSASTRVAAALRMAALSLRHSQTALGAYYRKMAQRLGADIAEFATARKLATLIYRLLRWGQPYVDEGAAAYETRYRQQRIGRLAATAKQLGYQLAPLNA

SEQ ID NO: 187691 - protein, 318 aa, unidentified
MTNRIPTPPDARTVIVGVDTHKYVHVAVVIDSWGIRLRDQAFVADSGGYQALITWAETHGRIEAFGIEGTGSYGASLARAVRRAAGKSDTIDAEVAARSVLAGQSTAIHKTADGVVEMIRQLKITRDTAVKARTTAMNTLKQIIVHAPPKLREALHDLTDHGLLTRCAGLRPGPIDTPTASPKHTLRALASRWIALSEEMAIHDQHLARLTTETAPTLREGFGVGAHTVAELLIIFGDNPDRIRSEAAFAKLCGACPIPASSGMTTGRHRLNRGGHRHANAALYRAVIVRMRYHQPTVDYVARRTADGRTKREIIQGA

SEQ ID NO: 187692 - protein, 421 aa, unidentified
MTPPSHDTFAAFIGIDWADARHDGCLQAAGTAKRECFQLEHTPEAIDAWVTTLRIRFNGQPIAVCLELNKGPLVSALRKYDFLVLFPINPLTLARYREAFTPSRAKDDPTDAELQLELLLTHRDKLQPLQPQSPPMRALAQLVEHRRRVVGDKVRITNRLPSALKNYFPQVLHWFQEKDTRIFCDFLSRWPTLKAAQLARRSILERFFRDHHVRTADVLATRLHAIKTATPLTTDEGVIAPNVLLVQTLVSQLRVTLDAIEAFDQAIAQRAQHHPDFPLFQALPGAGPVFASRLLVAFGEQRERYASAAALQKYAGIAPVTERSGKKAWVHWRLQCPKFLRQTFVEWSAESMRHSFWAQVYYQQQRDKGNTHQAAVRALAFKWIRILYRCWQEHTPYDESTYLQALMRRNSSLIQNRAKVS

SEQ ID NO: 187693 - protein, 342 aa, unidentified
MEITTIGIDLAKHVFPLHGVDRAGKVVLRKQLRREQMAQFFVQLPACLIGMEACSGAHFWARKLQALGHRVRLMAPQFVKPYVKSNKNDAADAEAICEAVARPNMRFVAIKSPEQQAVLSLHRARQGFVRARTAQGNQIRGLLAEFGLIAPQGLSSLCQRVPELIEDASNELPGTLRILIQQLLEHLKALDQQINELQQRIQACNRSDEVSQRLQQIPGIGPLTASALVASVGDAAQFSSGRELSAWVGLVPRQHSSGGKDRLLGISKRGDVYLRTLLIHGARALVRLAQMHPERYAWLHGLIKRSNANVAAVALANKNARMAWALMAHGTSYRPQPAGAPA

SEQ ID NO: 187694 - protein, 361 aa, unidentified
MQSTPLIAFDQHAATTVAAVLLPGERTPALHTLTSDSPTILRFVKRLQRHGPVRCCYEAGPCGFELQRALSQHGIPCDVIAPALIPRRPGDRIKTDRRDAGQLAVLYRAGALTAIHIPTEHEEAARDLLRCREDIRADLLRARHRLSKFLLRHGRRFTVTKKAWSKRHEAWLRAQTWPLPALEQTHQAYLRTVDEAVARLRAVEEDLRGLLDLPPLRPRVERLRCFRGIDDLTALTIAAELGDARRFATAPSLMAFVGLIPSEHSSGLKQARGAITKTGNAHLRRVLVEAAWHYRHHPFVGDTLRARQRGAPPTVIAHAWTAQHRRHRRYARLAARGKPKQHVVTAVARELTGFVWAALTQ

SEQ ID NO: 187695 - protein, 483 aa, unidentified
MRKPAEILDADHELVIERVCAIDVAKASGMVCTRLPQAGAAGRRVSRVWEVAATTRAITELADHLVAVGIEQVTVESTSDYWRIWFYLLEARGLDVQLVNARDVKNLPGRPKTDKLDAVWLAKLTEKGLLRPSFVPPMEIRQLRDYTRLRVDLTRERTRHWQRLEKLLEDALIKVSSVASKLDTRSVRDMLEALIAGDRDPRRLAELARGRMKTKRAALVEALSGRFDEHHAEIARMLLDQIDGLSATIDQLTTRAELLLQTLLAARAGDPRTGGAGSAVHAQGSCDPRPAPTRATEVPVEAPTEASVRADGTPAHRGGNRLSAAQRLDEIAGIGPLAAQVIIAEIGLDMSRFPTAGHLVSWAKLCPRTIQSGATRRGGAAGKGNPYLKGVLGEAAAAAAKTNTFLGERYRRLVKRRGKLKALVAVARSILVIVWHLLSDPTTRFYDLGPDYHTHRIDTTRKIRNHVSGLTALGFRVTLEPAG

SEQ ID NO: 187696 - protein, 310 aa, unidentified
MEQFVGIDVSKAWLDGEAVPQSRPMRHGNDSAGIAALVSTLVAEQPALVVLEATGGFETEVASALAAAGVPTVVVNPKQVRDFAKAMGILAKSDRLDARVLALFGQRIRPQVRPLPSPEQRDLAELLDRRAQLVSMRAQERTRLATALAVAKPSLREHIQWLDARIGEFEIELTARLRSSAAWKVKVDLLKPVPGVGKVLLFTLLARLPELGHLNRCDIAALAGLAPFADDSGKRRGQRFIRGGRAEVRKALYMATLSATQHNPAIKPFFARLTAAGKPFKVAMTACMRKLLTILNAMLKTNQPWQPRVA

SEQ ID NO: 187697 - protein, 351 aa, unidentified
MQTQSKRIDFSGQNFYCGIDTHKKSWAVTIETDDIALKTFSQDADPELLAKHLRKNYPGGNFIAGYEAGYFGYGIQRKLESMGIDCVVLHPADIPTSDKDRDQKRDPRDSRKIAKAIKNHDVSPIWIPPVSLEQDRQLLRTREKLSRDKTRIKNRIKAFLQIYGIKYPLTFSQPGSHWSARFIKWLETIQLKESTGTESLRSLVRCLRFQRSEILTVSKQIRKLSQSDKYSPNYSKLIKKPGIGLITAMTILTETGDICRFRTADNYRAFFGIVPRAHDSGDKEHPGKITKRANTHLRYLLVEVTWTAIRYNPYYLNIYKKYRQHMKENKALVRTAGKLTNEIYYCLKNEA

SEQ ID NO: 187698 - protein, 412 aa, unidentified
MEGETVIAGVDTHKDVHVLCLLDGLGRKIWSGSFGADPEGYDRLAEAIGDPGSCMVVGVEGTASYGAGLTRRLVELGYNVVEVLRPKRDKVRPGEGKSDPLDAERAARKAASGKGCSVPKSQDGWVEAVRQLYVARRLAVATSTSCVACAKSMLTTAPSALRERFRGRERPRDLMPLLARGRKAGDALEESVLASLRSVAAVWKEARSQVESLDERIRALLEANAPALLGVEGCGTTTAAALVVAAGDNPGRLKGEAAFSMMCGASPIPASSGKTDRHRLNRGGNRQANWALYEIAIKRMAYDERTRRYVARRTSEGKSRREAVRCLKRYIAREVYRVLMDPNPDGAAPEGPELARMRKAMRVTQKKAAAELGLSAATLGHLERGKRRSTKLERRYYELLCELERALPQTAS

SEQ ID NO: 187699 - protein, 496 aa, unidentified
MKKARSSKRSVGLAKITAREARLVKKVKAPRADASALEPLETIHLHAAGIDVGGSENFVAVPAPAVKPGEPAVRSFGVFTAEQDALVEWLKACQITTVAMEATGIYWMALYDKLERQGLEVVLVEPRSVKQVPGRKSDVLDCQWLQKLHTYGLLSGSFRPDEAIRRLRTLTRHRLELVQDGARCLQHVEKALVQMNLQLHLVVSDIQGDTGMRILQAIINGQRDPKELVKLRDPRCKKSTVAQMEAGLHGHYREELLFVVGQALENWQHYQKQLAACDQQIDVALAALPTAKAATLPTPPKPVPPAPETKQQKKLAHKGNNDVNIDPAKLKAQLQRVCGADLMNVCGLGLSSVLMLIAEIGLDLNRWRSAKAFCSWLGLCPGSKISGGKVLRRRTRKVVNRASVILRLAALAVGKTDTWLGRFYRRKRAHLGAPKAITATARKLACVVYHLLKYQEDYVPLDIAVYELKAAEARQRRLRREAQEMGFELVELKQVA

SEQ ID NO: 187700 - protein, 460 aa, unidentified
MYICVILVGTWVGFYTITALTVLRRFLPQFFSNVDQLISTSMLYDSRVHMDRTFVEFLPSSAHLLGGVFMTYFIGIDIAKYKHDCFIMDQDGSVIRDSFSFSNDSAGFCLFLSVLDSLDPSYEKRIGFESTGHYGLNLKCFLEEHDISFMEINPILIKRFSSATTLRRTKTDKADAALIASYLTTVEYITYPTQSYHIRNLKSLTRSRDALVKLRSGQLVMITNVMDKIFPEFKPFFNKSLKSSTAMYLLRNYTVPSKMASMNSESYRKMSSKLKKTISYARFSKLRELAKNTVGREDPCLTFELNTYLDIYQSLDFKIKEMEAHIEEEFKKIHSHIQTIKGIGWMSAASIYSEYGGIENFQTPNQMLAYAGLDPSRSESGEHAYKGHMVKHGSSHLRYVLLNCAEMVILHNPVFYDYYRKKREEGKHHRVALSHVARKLVRIIFFLEKNNVDYDPKKMR

SEQ ID NO: 187701 - protein, 391 aa, unidentified
MIYVGIDVAKDKHDCFIMGTGGEVLQDVFVISNNMDGFNSLFQKIQVVSDSFDDVKVGLEATGHYSYNLLGFLIDKGFAPFVINPLHSTLFRKSLSLRKTKTDKVDARTIAAMLASDMNLKSYTDTAYHNEELKSLVRYRFDKVRERAQLKTSIARLVNILFPELEKLVPKLHLVSVYALLEEFPGAHQVANAHLTRLKKLLYDASKGHYGDETAVLFRDEARRSIGSKMPAKSLELRHTIKLIGELDIAIEEIESMIKIIMDEMNSPILTIPGIGYRMAAMILAEIGDMTRFDSPDKILAYAGMSPSTYQSGQLTSGSSHMEKRGSKYLRYAIFNATKFVCLWEPTFATYLAKKRAEGKHYNVAVSHAAKKLVRLIFALEKSRQPFTNAA

SEQ ID NO: 187702 - protein, 398 aa, unidentified
MYGLYVGIDVSKDSFSVAGIDSKGNVLFEGSYSMDAEGFSLFLETIVQHYKNLKQILAAMESTGCYHLNLFSFLNQQGLQVVVINPLLISNFAKLSLRKTKTDKKDALTIAQFIVQHQDAVSGLAVSQGLQDLRDLARERESLCHFISETKSEIKRVLRTTFPELEALCDISTKVMLQFLLQYSSARMVTSAKQKDIVKALERKGVGTRLTFSAQDILVAAKNSVGIVSPAKEIILQGKVSTLMHLQERVEHMTKLMTTLCKASMLQDLQIITSIKGIKTKTAVPFLAEVGDIKHYSCYKKLIAFAGLDPSVRQSGKYVGQSKISKRGNRHLRRSLYLMASSVVRSNNFFRLYFMKKKQEGVSAQKALFAVTHKLIRVIFAMLKNKTHFNLKEVSVNS

SEQ ID NO: 187703 - protein, 351 aa, unidentified
MMIIGVDYHPSFQTIAFFMEETGECGEQELNHSDGQAEKFYRDLQQRGIRVRVGMEATGYSRWFERLLAELGFEVWMGDPAEIKAKRVKKQKFDREDARLLRRLMMENNFPQIWVPGPENRDLRQLLWHRHRLVQMRTRIMNQLQALAMNEGYRWKRKLFSEQGRAQLEKLALAPWASRRRQELLELLDRMNPTIEELTAAVEQEARKRPEALRLMTHPGVGPLTALAYVLIIGTPSRFQRGKQIGTYVGMIPCEESSARKQRLGHISKQGNSLLRFLLVEAAQAATRIHPDWRRRYIHLAMRRHKSIAKVAMGRRLAVRLYWMWRNGCEYSPSLEFGSYAGQLGTGHGVK

SEQ ID NO: 187704 - protein, 379 aa, unidentified
MPRARIGICPSPSPSRHKVINMNICGIDIHKSFLQIAVIDSNGKIVYQERCRYSLIDIILLIAKLAKMRCMEVAMESTGCFWIPLYYEFAGRGFKTVLANPASTKSFGNKTDMLDAVRIARRHLAGALIKSHVPKNRVSITLRIISRLRRKLREDRNRVLNRIRRLLAISGVWLDKFAKPNTSRWFRMLEELASGKSLEEIFGLNIGYEYSCMRDRLDCYEASILGQLLSLARKIDEICGFLGYMAEALAEKLYGEEYSLIQTVPGIGKTLAYMILAEIDDVRRFPSARHFKSYCGLSPSLRESGGKARLNRCRHGNPYLRYAFYQAAVVAIRVDDRLKRFYERLRARGKHHKVALIAVAGKLAVRTWHILCNNEKYIA

SEQ ID NO: 187705 - protein, 323 aa, unidentified
METQNVEFKQVVSRGCGIDVHEKILVATIDGEGLKKETREFLAFTSSIIQLRDWIIENGVTHVAMESTGVYWKPVYNILENCALTVWVVNARHIKYVPGHKTDKRDSKWICKLLLAGLLKPSYIPSKEQRELRDLTRYRRKLTQQISAQKNRIVRVLEDCNVKLSSVLSDTCGAVASKLINMLCEGKKVTMEEIDQVYHKKLKCSKEELWEACNGNITPHNVYFLQMIQNNIDVIQGDIAKLNARIKDILLPYEAPCALLKSIPGLDTRTIEDLIAEIGLDMDKFPTEKNLASWVGIAPGNYESAGKKKTGEQCMEINMLNQQ

SEQ ID NO: 187706 - protein, 466 aa, unidentified
MSRLSDRRSGTEIIVRPFEGLNRLRADAAGMDIGAHEIMVCVPGQGETQVVRAFGTYTVDLYALADWLRQNGIGTVAMESTGVYWVPVFETLEERGFECCLISATAITRFPGRKTDVLDCQWIQTLHSYGLLADSFRTQADLVALRTLLRHREQLIAHRSPHVLHMQKALLQMNVQLSQVLSDVTGVTGMAIIRAIVGGERDPHALAALRNYRCKKDEEEIAKALTGTWRSEHLFVLAQALALYDFYTRQIEACDAEIERTYATIRPDWGDPQDQASLPPAKPESHSRNAPKGVQVRRHLKRIAGVDIVAVYGISASLAQIIIAEIGTDMSKFPTEKNFCSWLGLAPHNEITGGRVIRSSTLKNHNRAGQAFRLAAASVARSNCAYGAFYRRLKSRIGPGQANVATAHKIARTVYNMLKFQQEYQATSAAEYEQRFREREIKYLQRKAGQFGFVLSPSVASPLAVS

SEQ ID NO: 187707 - protein, 467 aa, unidentified
MKNNDYNLFVGIDVSKGKADAAVLAVPELRSVKPRFLRKKLSFKFIKADVVEFLNTVRKYSSDQHCLHTYFALEVTGIYSTNVYSFIKENCNSDEEIHQLNTDFVNKWRESHNISKSDPLDAQTISTIVGTDDDVRYISDSVFENKNGYQDLKALVHRHYQIKKLYSQETNRLIALCDCYFPELQYVFEPKSAAFLALLSQYPTSHDIINASKNEVFSLVYEASKHRCNMDKIDKLFNYAQDTLVPHVSDYIRCVIFNTVESIFNIRAQLKLIEKDIRKLASTFNVYSLLMTITGCGPLTAAVIIAETGDIFRFKNADHYVSYSGSSPRNKRSGKSVEIMGKISKKGSKYLRHALYMIAEFARRHNPVLKHLFERVKNGNKKRHKLAVIAVANRIARYIYSIMKSESSFIIMHENIMRLPEETRNTFFNSISLDFPKNTRKQIYQYSDVNGEIHRFVYKNETTESIA

SEQ ID NO: 187708 - protein, 346 aa, unidentified
MEHYVGLDVSLKQTAICVVDQTGSVIREGMVDSAPETIAEFVTSNAPSIVRIGLEAGPTSTWLWTELKQLGLPVICIDARHAKAVLKMQINKSDRNDAAGIARIMQTGWFKEVRVKDLDSHSVRALLASRALLVKIKRDLENQVRGLLKNLGLVIGRAKHNVFAVRAEELIERRPELMAAVKPLLDARNAIEHQVDDLDRKVMRLARNDAQVRRFMTAPGVGPITALCFLATIDDPTRFKRSRSVGAYVGLTTRRYASGETDWTGRISRWGDKMLRSYLYEAANVLLTRVAKWSTLKAWGIRLAKRSGLRKAKVAVARKLAVILHRMWIEGTEFKWSSKEAATQPA

SEQ ID NO: 187709 - protein, 449 aa, unidentified
MGNCAGIDWASEKHDVLIEDPSGEELFGATFAHDEDGVRALCDALVGFAVDVVAIERPEGLLVDRLLDAGIRVLALHPNQVKAARDRFRASGGKSDRFDRFVLCELARTDRHRFRILEPDSDQTKALRALVRAREDLVGARVALANQLRAELERFWPGPIGLFCDLDSPISLAFLARYPSPGDARGLGEQRMAAFLKGQHYPSRKPAAELLARLRSAPAGRAGEVETRARRQIVLRLVGTLQNMVGHIAESEAQIAQALDAHPDGEIFRSFFRRRESVICPATLLAEIGDCRGRYPHRDAIAADGGQAPVAVESGKRKHAKFRWACNKRLRDALGTLAHSSRQSNPWAADRYAHARQRGHNHRRALRTLGRAWSRIIWRCWQDHTPYDPARHTGLQQHATVTIPTSTGPRPDPAATQRMLGAAVTDTAARRAEREALDRKPTSATPLTA

SEQ ID NO: 187710 - protein, 463 aa, unidentified
MLGERPGTATVLCRQTASFSPAALDAPRPATGVRRMPHRGPNNEAPATALSPRVDQDDQRLEAALLFTGWDWASASHAVTILDSAGEVVDRCVFAHTEQDLDTMLARLASHGSPAELPVAIERADGLVVDRLLAAGHPVVAIDPGAFHAARPRWGAAGAKTDPGDSYKLADYLRTDGHRLRRLEPVDPVTRELQALVRLRDDHVAAKTAASNQLGALLDAHWPGAKQLFFRLASKIALAFLTEFPTPQAAAQLDQAELAAFCRRHAYRGGRHPSQLLERLWSAPRPPVGLDPAVLSQLVDAQTQLLATLLATIAELDQAIGNRLGKHPKVRLLARLPRVGQISHAQLLAELGPILDRASSAEHAAAQAGAAPVTRASGKTSSVHFRLAANHRARQALHIFADNTRHSSPWAAKLYADARARGKRHPQAVRVLGRAWLRVIWACWHTNTAYDPAKHRAEQRHAA

SEQ ID NO: 187711 - protein, 355 aa, unidentified
MSSVRYIGLDVHRDTISAAVLNESGRLIQQSVLMTRAAALLDFIAGMRGAVHVTFEEGTHSAWLYDLLWRRVDKLIVCNPRKNALLKSGNKSDAIDARKLAELLRAGMLSPVYHGERSALEVQHLTRSYLMLTEDTTRTMGRLKAVFRGQAMGCAGKKLYGQKHRSEYLAALGACALRRRAECLYQQLDALQQLRRQARHDLIVECRKHAAAQWLQTVPFLGPLRTAVLIGRVQTPHRFRTKRQFWTYCGLGIETRDSAEYRVVDGQVERKKKPALIRGLNWNHNHELKNVFKGAATAASVCQGVFREHYLGLLQKGMRPEMARLTLARKIAAIALKIWKKGEGFDAEHLKPQAA

SEQ ID NO: 187712 - protein, 401 aa, unidentified
MAAVRDNAWVGIDVGKTHHWVCAVDADGKTLLSVKVANDEAGILSLIAAVTALTQQLTWAVDIIGAPSALLLALLAQAGQPVRYASGRVVAAMSAAYVGEGKTDAKDARVIAETARLRRDLAIIDTDTDLVRNLAVLTGHRADLIADRVRMINRLRDLMTSVFPSLERAFDYSSHKGALVLLTGYARPDRIRRSGQTRLAAWLRTRHVRGFADVAARAIAAAKAQSVVLPGQDLTASIIAELAGNVLRLDERLKSLDDQIEELFQQHPQAAIIQSMPGFGPFLGASLLVGAGDLRAFPNAGHLAAAAGLVPVPNDSGRRTGNLHRPLRYSRPLRHVCYLSAQTSMMRAGPNRDYYLKKRANGRTHSQAVIALARRRIDVLWALLRENRTWTATPPQLAQAA

SEQ ID NO: 187713 - protein, 333 aa, unidentified
MTDTTTHAPLPVPPAPVYVGIDVAQDKLDLARTDADAVPAFANDPAGVAAVVDLLSSIRPAVIVVEATGGLERPLLDALLEAGLPAALVHPGRVRYFAKGLGILAKTDRIDARVLAQFARLAAPRLTQKRSANQAELAALVVCRRQLTLARAEQANRRRATASRAALRSIDAVLATLDKQVESLDKQIRELLDADDDFKHLDGLLRSVPGVGPVLSATLAAELRELGQTDRRQVGALVGVAPFNCDSGKLKGRRAIRGGRTAVRCVLYMATLAAMRSNPIIQTFARRLKQAGKLNKVVIVACMRKLLALLNAMLRDNLTWDELDVVKKLAPNP

SEQ ID NO: 187714 - protein, 342 aa, unidentified
MLKLKGRGVGGARGADGMDAPWGSQGKGSRQLTTTKGDRTRQVTRIGLDIAKSVFQVHGVDAHGKVAVRQQRSRSKELSFFAQLTACRMGMEACGSAHYWGRELQKLGHEGRLMAVELIKPYRTKQKNDRKDAAAICEAVSRPQRRLVPSKPVEQQAVLTVPRARELLVSARTAVANQIRGLVMESGIVIPPGIRRLRRELPGVLSAQDDGLPTLGRDVVTELPARLLELEERITGHDRQIAQGARHDEAAKRGMQVEGVGPLTATAVVATVGEAKAFHHGRQFAPWLGLVPKHFSTGGKPLLGRITKRGKVSLRTSSFMVREQSYKVQANGPTLSTERRKC

SEQ ID NO: 187715 - protein, 346 aa, unidentified
MRFYQQQHGFYCGIDLHARTMHVCVVDADGRTREHVNLPCDPGRFLMLIAPYREQLVVSCECLFAWYWLADLCRAEGIPFVLGHALYMRAIHGGKTKNDKIDSEKIARLLRGGMLPQAYVYPKEMRATRDLLRRRMKLVRLRGQALAHVTNTFTQYNVAAPEKKLSYHANRVGVAERFRDESVQRAVRSDLAFAEHLDEQLRGIELYLTQHAKIDDPQAFGRLQTVPGIGPILALVILYEVHDIGRFGRVQQFVSYCRLVKCSHESAGKKTTGRGNKIGNAHLKWAFSEAALLMLREHPAAKSYVARLEKKHGKGKAISILASRLGRTVYWMLKRKESFDEPRFLK

SEQ ID NO: 187716 - protein, 404 aa, unidentified
MHEQHHQVTGGVDTHGEVHVAAVIDATGRILGTESFPATLAGYRSLLRWLRRHGEVASVGVEGTGSYGAGLARFLASDDVAVVEVNRPDRQRRRRHGKSDTVDAEAAARAALNCDAAGTPKSGSGPVESVRVLRLARRSAIKARTQAANQIRDLIVTAPDQLRSRLRNLDTDERVAVCARFRAGQVSDPAEATKLALRTLARRHQELGREITELNNQITKLCAAVNPALLAASGVGPEVAATLLVTAGDNPHRMNSEAAFAALCGVSPVEASSGKVTRHRLNQGGDRQANNALWRIVLVRMSSDPRTKAYVTRRTLEGKSKKEIIRCLKRHVAREIFRLLTNPPPVITGDDLRTERLDAGLTLATAAEALGTWPTRISQLERGLYHDAELARRYQHWLHPEQAA

SEQ ID NO: 187717 - protein, 366 aa, unidentified
MASEYVGIDLHRRRSVIVRLTPDGEVLEQVRIDNDPVALALEIAKAGPNPDAVLEATYGWYWAVDVLEASGAHVRLAHPLAIKAYAHRRVKNDSIDARTLADLARMNRVPEAWIAPPEIRELRELVRYRAKLVALRSGLKAQVHSVLAKHGVRVPMTDLFGLAGNRLLDELSFPAPYAMRISSLRELIGIYDSQVARFDAEIRTLLAEHPGYRAIQAVPGVGPILGAVFVAEIGDVTRFSSAPQVCSWAGLTPRHRESDTVVHRGAITKQGPRLVRWAAVEAVQKLRTSTKQHRDFRRIARRRGKNIARVAVARKLLTLVYYGLRDEEVRCLPRPKEAARPASGSSQGARSRSRMTPDPRRGRHGD

SEQ ID NO: 187718 - protein, 355 aa, unidentified
MNKIKTNFEGQTINVGMDIHKASWNLGIHLNDMFIKNVHQKPNPSVMAQYLKENYPGAHYKAAYEAGKFGFWIQRQLTQLGIECLVVNPADIPKSQKDSLQKTDPRDARNIGFRLQSGVLHSIHIPNEQQEADRMFMRHRKRIWKDLCRCKNRIKGSLAFSGIDIPEQYDNASWSHNFILWLKALDCKQITRRQALNYMIAQLEFLRKELLRISVDIRKMMREQRYKTNYYLLRTIPGIGPLTAASLLVEIGDVKRFDTFYHLNSFIGLLPMEHSSGETENKGVLTVRKHRQLRSDLVESAWTAKRTDPAMSLYFQEQVKRKDSKIVIIKIARKLLNRIRYVLLKQTAYEYGIVK

SEQ ID NO: 187719 - protein, 343 aa, unidentified
MEGYAGKQFVGIDLHRRRTVLVRTTEGGEVLESVRIVNDVDRLASVMARAGECPEVVLEATYGWYWAVDALQAGGASVHLAHPLGVKAFEYRRVKNDFRDATDLADLLRMGRLPEAWIAPPPTRELRELVRHRAKLVGLRSHCKAEVHAVLAKCGVQVLMSDLFGVAGTQLLDGLDLPAPYAARIASLRRLMDDLDFEVDLFAGMIRGRMVREPGYTAVQIIPGIGPTLGAVFVAEIGDITRFASASKLTCWAGLTPKHHESDTHVHRGRITKQGSRLVRWAAIESVKAIPKDSPAGALRERVADRRGRNIGSVAAARRPLEFVFYALRDGHVRALEHHPRVA

SEQ ID NO: 187720 - protein, 369 aa, unidentified
MEKTIKYIGLDVHKKSISIGIADEGRDGDVRYYGKIDNDMNQLDKVIRKLISKGAVLKFVYEAGPCGYAIYRYLNNNDTDCVVIAPSKIPFQSGDRLKNDKRDCLSLARLHRAGELTVVYVPTEDDEALRDLVRAREDAVHALRVAKQQLGAFLLRHDTVFSGKSKWSKAHFNWLADIAMPHPAQQIVFQEYIDTVTSCGNRVQRLTEQVRQQSKQSRQHELIQSLQSMRGISLIVAATIAAELGDLTRFENPGKLMAFLGLIPSEHSSGERVKKGSITKTGNRHVRKALITAAHAYRFPARKSRAIRKRQEDLPEGVTEISWKAQCRLCTRYHYLTSKGKNVNVTKTAIAREIAGFSWAIAQELSKAA

SEQ ID NO: 187721 - protein, 398 aa, unidentified
MTRKNTLKSLPTDTEFRVVGLDLAKSDVSVAAIPVDDNTPSLVDRMTYADLLDWAGKISPTLFAMEPCNGYSLLCLQLENLGHEIKVISGSTVSMWINTHLSGQKTDLNDAIALARLAVSDAELTPIRHKSITEIRIQTVQAVRQQLMSQRSKSIVSFKALAQQWGIPCAAGHRNLKKLRESIEAKVDLITRPVANAMLFLLDAVKSLDRQIGQLNQTLQELVMSDERGRLLQSVLGVGTQISARVITVVGNIERFNSPRSLVAYVGVAPRNFITGHKNLTKKKHGNCPDLSHKGQGKISRRGDKLLRSLFIQGAACLYMQFCKDQLPECQLKRWILKQLARQKNYGKLIVSLAAKLIRIVWAVLTYREKFNIQKAGMTRSMWSEMALETPLNKEVPA

SEQ ID NO: 187722 - protein, 417 aa, unidentified
MIQAAIERCAGIDVGKTFIVVCVMTGPAQAEPSIQVRRFGTFNEELERLRLWLMAEGCTHAVMESTGSYWKPIFNILEESISVVLTSARDVKIRKGHKTDWKDSRWLAHLLRHGMIRPSFIPERGIRELRGLTRRRKQLTHEATGVKNRVSKVLEEANIKLGSVLTDIFGVSGRAILEALLEGSKSPSDMAQFARKSAKRKIPEITASMTNHRLTDAQKFLIRQCFLQLEFLGSCITDLEQEIRRRILANPEYREASSLLQTIPGIREDAAAVIIAEAGVRMDQFPSPKHFSSWVGLCPGNNKSADIEKAGQTTKGNAWLRAVMVESAWSASMKIGSYFRARYQRLLPRTGKKRAVVAVAHSLLTLIYQMLSNKTPYRKAAEEMSYERGKQKYIRHHLKALARLGYIVYGVVPESPA

SEQ ID NO: 187723 - protein, 404 aa, unidentified
MELTAIHKRVIGLDVHQSQITACAIIEGVDGSALVEQRQFGAFKRDRRALADWVASLAPDEVVMESTGIYWKSPYAALEEVGVRALVVNARHVKTVPGRKTDVGDAQWLATLARAGLLRRSFVPPALMRELRLISRQRQKLVGQLSSEKNRLHKVLTDSGIRLGVVVSDLHGQSARAMVKAIIAGHAPHDVLQFASRRLKARREELYDALQGEITGSHRFVLAELMQHIEEIEARIARFDARLLEGLSGHRNALALLQTLPGIDQIGAAMLLVEIGDDMSVFGQADRLASWVGVCPGNNESAGKRKTARVRKGNPYVRRLLCEFAHAARRTKSVFQSKFQALVVRRGFKRAVIALAHKLLRTIFFMLKRGEHYRDSAIDYEALSVQRNAPRWIKALTRFGYLSA

SEQ ID NO: 187724 - protein, 347 aa, unidentified
MKIIGCDYHPSYQQIAMVDTETGELVEGRLEHEHGEARRFYESLAGPVRVGMEAIGNAQWFERMLAELGHELWIGDAAQIRRLVVRQQKTDRRDAQHLLQLLLDERFPRIWVPSPEMRDVRQLLRHRQKLVEMRTQVKNQLQHLALNQGVRRKRRLWSQEGRAVLERLPLEGWTARRRGDLLAMLDRLDAQVEELDQAVRAEAEKRPAVRLLMTHPGVGPVVGLAYVLTIGPVARFPRGKRVASYLGLIPREHSSGGRQKLGAISKQGNTMMRTLLVEAGQNAARYDEELRRDYSRLKARKHSALAKVMVARKLAVRMYWMLRENKAYTPHPVARMQGSPSHSVVVG

SEQ ID NO: 187725 - protein, 338 aa, unidentified
MIVIGVDVHKQSLTAVAVDEAGRMLDEQTVAVTDGALVAWASTLCGERLWALEDCRQLTRTPERELLSVGEELVRVPPKLMAPERRAGRARGKSDPIDALAVARAALREPSLSRPREDEQPFRDLKLLVDHRDDLVDERRRAQQRLRWHLHQLDPAFAVPAKSLDRPTHLDRVRRWLARRPPEVQVRVARDLVVRCRSLTRAIVELDRELQQCTAQLAPALLELPGCGAITAAKLLAEIGPIGRFDTDAQLARHGGVAPLEASSGRVQRHRLDRGGNRQLNCALYRIAITQGRYYPEARAYLERKQAEGKSRREAIRCLKRQLARVVFNTLKASPALT

SEQ ID NO: 187726 - protein, 380 aa, unidentified
MDVHSTNYTLCAMEPTIGSEDRIFGEVQVAPDYKEVICFIESLKMKLGLYDDYSIECGYEAGCLGYTLYHQLTNAGLKCVILAPTTMLTQQGKRVKTDKRDARLIAQCLCYGGYHPVYIPTGEDDAVKEYLRMRDDHKLAHKKLKQQINAFVLRHGYQYVGTKWTIKHVAWLNNLELDPMYRETLNEYMASYEEQEAKIERYDKRIEEIAAEKQYQENTKKLGCFLGICTHTALSLIVETGDFQRFAKGNTYAAFLGLVPGEHSSSTNVNRLGISKAGNTHLRCLLIEAAKGICKGAIGHKSKELRSRQNGQAAAVIAYADKANTRLRSKYYKMIRHGKKKNVAVAAVARELACFIWGMMTGNINVAGNTGTTVPAVSQG

SEQ ID NO: 187727 - protein, 429 aa, unidentified
MKIIYPRVCGIDVHKKFIVAVICISESVEPIYLKKRFSTFHNDLIRFRDWLIQNDCQNVCMESTGKYYIPVYNVLESHISNIVVANPKWVCAVKGEKDDDKDAKWIADLFKFGIVRSSFIPQKDFRILRELTRYKYKLVNMRSSEKNRYQNALTSGNCKLDMVFTDVFGKSASNIIDLILSDNPYTDEDILSKVHKNCKASPDMILNSINGTDLTPVQKSRIELVNDHIKQLSSNIQRLDKLIDLMIEPYEDYISFLCQIPGVSRNSAIIILSEIGVDMNQFTSTRRLTSWAGLTPSSNQSAGKKKSVRISRAGVYLKPCLVEVAHAAVKDKNHPYYANKFNKISKRRGKKRAYIAIARKILVAAYHMLLTGEIWNPADLSEVETPVEQRIKYVKNNLKSDIKQLLDIGLTVEELTLMIQQNANTMTAQ

SEQ ID NO: 187728 - protein, 332 aa, unidentified
MATYFVGCDVSKKKLDLGLLVSMEPLKIRSKVVENHQPGWMTLIDWACRQVNCTPGELRVVMEATGAYHEAAVYALTQAGVQVSVVNPAQVRDFAKGLAIRTKTDAADRAVLARYGAIVKPPLWQSPAPEVVELRGLLGRLQVIEEELARERNRLEKAQVSVTPQVVLDSLHKSLAFLEQQKRDLERRINGHIDAHPQLKRDRELLESIPAIGPKTACRMLCVLHSRAFRAAASVAAYLGLVPVQYQSGTSVYKPPRLSKAGDGAMRAALYMPAIVASRVNPDVRAQYNRLVAGGKSKMSALGAAMRKLVHICFGVLKSQQPYRPSVSVQNA

SEQ ID NO: 187729 - protein, 352 aa, unidentified
MDVSLIASVGIDLGKTTFHLVALDCHAKVVLRKKFSRTQLLAYTAKLPWSIIGMEACSGAHFFAAKLRNQGHEVKLIPGQFVKPFVKTNKNDFNDAEAIAEAVTRQNMRFVPIKTDDQLDLQALHRVRDRLVHRRTALINQIRGFLLERGIVFRKGPANLRNQMPAILEDAEQNITPRMRSLLADLWQEWKQLEANITKISEEIEHISHEDQGCRRLRQIPGVGPLVSTAMVAAIGNGAAFRNGRDFAAWLGLVPRQHSTGGKPQTVRHQQAREHLLATHVRPRSAGGAASCEVRHRRSRSLGAPARGTHRPQQSDCGYCQQTGAHCLGGVVQPRRLSRYSGCCGCSLELKS

SEQ ID NO: 187730 - protein, 480 aa, unidentified
MSQQKKHCKPLGEEKTAAGTGKRGRKRKGMCLEDRPILEANAAGIDIGAREVFVAVPPDRDEHPVRVFSTFTEDLEKLAQWLVSCGITTVAMESTGVYWIPLYDVVEKYGVKACLVDARGMKNVPGRRTDWHECQWLQFLHSVGLLRAAFRPEGDVCAVRSMMRYRTELVEMTSQHIQHMHKALTQMNVQIHHVISDLTGVTGLAIVDAIIAGQRDPVVLAKLRDPRIKASEETIRKSLVGNWRAEHWFTLEQSRKSYQHYQGQISACDEAIEKLLVALVPRVDPTERPLPPDRKRKQRGRKKKNANPNTFDLRTESYKLFGVDLTQIPGLMAMVLMLFSEVGRDMSRWKTAGHFVSWLALCPDNDISGGRVLWRGMRRVHNRAGDLFRMAAYSLHHDATPLGDYLRRMKSKLGPAGATTATAHKIAIIFYTMVKKQVEYDATLWAQRDAEREKRFEAKLKRQALQLGYKLVPIEERPAA

SEQ ID NO: 187731 - protein, 420 aa, unidentified
MFERWRLREKRLLYVGNDWAEDHHDVEVQDQTGRRLARARLAEGVAGIARLHALIAEHAGQGMEPDQVLVGIELDRGPWVTALVAAGYRVYAINPRQVARFRERHSTSGAKSDPGDAHTLADMVRTDAHQLRPIAGDTALVEGLKVLARAHQSLVWDRTRHVLRLRSGLREYFPAAVEAFDDLAAADSLELLAKTPDPASAARLPKTQISAALKRAGRRGIQAKAGALQAALRAEQLAQPGELTAAYAATTRSLVGVIGALNTEIARLQEELAAHFHRHPEAQIYLSQPGLGEILGARVLGEFGDDPHRYTSAKARKNYAATSPITRQSGKKKTVHARFVHNDRLIDALHQQAQSALNGSPGARVYYDQQRARGLSHHAALRQLANRLVGILHGCLKTGTRYDEATAWAHQQLPDQQSAA

SEQ ID NO: 187732 - protein, 346 aa, unidentified
MEQITTIGLDLAKQVFQVHAADADGVPIFNRKLRRAEVLRFFEKTPACLVGMEACGSAHYWAREITALGHDVRLIPPVYVRPFVKRGKTDAADAEAISEAVTRKTMRFVPAKSADQQAAAIVLKTRALLVNQRTQVINALRAHLSEFGIIAAAGTTKVAGLISIVRDNTDLRLPKAARIALMEVASQVDALKTQIEKLEQAIVATVRRDDDARRLVTIPGVGAIIAASVKALVPDPGGFKSGRHFAAWLGLTPKPHSSGGKERLGRISKMGNPALRALLVLGATAVLRHARRNPNASRWLTTLLARRPYRIVAVALANKTARIIWALLVRGGTYQDKGARNQIVAA

SEQ ID NO: 187733 - protein, 416 aa, unidentified
MKEEQEIAVYIGVDWGDEWHSVHLQAEGGTKIEHFELEQKPDVLHDWVAQLRQRASGRKVAIAIEQRKGAVIHALMTYDFLVLYPVNPKALARYREAFRTSGAKDDPADSELLLDLLSKHRDKLRAWIPDTVQVRKLQLLCEQRRKMINQRVALTNRLTSLLKQYFPQALDWVGDIASIQCCEFLMNWPDLAAVQRVRKTTLEKFYRCHNCRKASVIEERIRQIASAHPLTRDPAIVEPLSLSVQTYATQLRSLIRAIEEFDKRIAHVFAQLPDHDLFDSFPGAGAVCAPRLAAAFGSDRSRWDSAVQIQSHSGIAPVTERSGKALWVHHRLACPKFIKQTFHEFADQSIRFSQWARAYYDQQRGRGNDHHAAVRALAYKWIRILFRCWKDRKPYDEEKYIQSLRRHGSALVEHFA

SEQ ID NO: 187734 - protein, 325 aa, unidentified
MESKKLCCGIDVSHTKLDVCYQNNLGELFHLQVGNNNKGYAKILEHTGTAYHFVMEATGVYYIRLAFYLHEQGCKLSVVNALSIKRYIQMQLERNKSDKKDAGWICRYAVEQCPGYWEMPDSAYFESKQLYNTIREYTEQIKRFNNQLHSLGLLPVPSKDTIRSLEKIKKQLEKEIELLEVKLETLLQSWQPAQLKCVGSIKGIGKRATAMLIVFTQGFKHTNNHRQLISFAGLSPTEYSSGSSIQGRPRIYKKGGKNLRDVLYMCSMNAIKTNPACKALYERLRAKGKTGKQALIAVCNKLLKQVFAVVKHNSLYQPNYCSAKP

SEQ ID NO: 187735 - protein, 355 aa, unidentified
MTATTIEVTGGVDTHRDTHHAAALDPVGRLLGTREFLAEPAGYQQLLAWLESFGTVTRVGVEGTGCYGAGLTRFLRRRRLRVLEVNRPDRRSRRLRGKSDPLDAESAARRALAGEDRVIPKDTTTIVEAIRVLRIARSGAVKSRTAAYNQLKDLLVTAPEGLRQTLRGKPLPRVAAEAARLRPDLTRLADPAHATKLALRCIAVRIDALNSEIAVMDKQLQQLVGRAAPRTLSLLGVGPDHAAQLLITAGGNPERLRSEAAFAALCAASPIPASSGKTNRHRLNPAGDRDANRALYMIIVTRLRYCPDTQAYIKRRIAEGLTKPEAIRCVKRYVARQTYHAIRADLAATTPLDDP

SEQ ID NO: 187736 - protein, 355 aa, unidentified
MNSVRYIGLDVHRDTISAAVLSESGRMIQQSILATRAAAILDFIGGVRGALHVTFEEGTHSAWLYDLLARRVARLVVCNPRKNALMKSGNKSDAIDARKLAELLRADMLSPVYHGEKSAMEVQHLARSYALLTEDTTRVMARIKAVFRGQAISCAGQKLYGRKHRDEYLAQLGACALRRRAELLYEELEAVQQLRRRAKREMIVECRKYPETKLLCSVPFLGPVRAAVLIGRVQTPHRFRSKRQFWAYCGLALEMRDSGEYRMVDGQVERRKKPAQIRGLNWNHNHELKNLFKAAATTASFSNGFFREFYLGLLNKNMQPEMARLTLARKIAAITLKIWKKGEAFDAEQVKLQAA

SEQ ID NO: 187737 - protein, 402 aa, unidentified
MQVDDIDVFIGIDVGKSEHWATALTTAGECLHDRPLPNDEARLREVYEHLGEHGRLLVVVDRPATIGALAVAVAQDMGITVGYLPGLSMRRIADLSPGSAKTDQRDAAVIASAARTMPHTLRSITSSDEDAAALSMLTGFDLDLARQVNQVSNRIRGLYTQIHPALEGVLGPWLEHDSVLEVIATWPTPAALRKAGRARIDAKLKANGCRRHAAWAQAIVEALSKQTVTVAGTDAAGVVLPHLARQLIALHTQRADIAAQVEALVEAHPLYPVLTSMPGVGVRTAAVFLAGTLGKTFTTGAHLASYAGLAPVTRRSGSSIRGEHVSHGGNKRLKRAMFLSAFASLRTDPVSRTYYERKRAQGKRHNQAILALAHRRILTLHAMIRNSTLYNPQPAQPLTTTA

SEQ ID NO: 187738 - protein, 351 aa, unidentified
MNTQITADTKLYIGIDIHKRSWKVHCSTDLFSGKSFSMPPDPLQLKAYVDRHFSGYDVSTAYEAGCCGYYAHRCFESYGWRSLVVNPADIHRKGKERFTKTDRIDAQLISRELKDGRLSSIYVPDEHREALRSLFRRRNDLVKDFRRIKSYIKMQLLYFGIKVPEQYDNDHWSHGFRGWLDDIIFEYPIAKASLESRMRYFRFVDEDLRLVSNQLRAYCRKHFKKDYYLLRSIPGIGGIVACGVISELGDLRRFNSVKHLAGYVGLAPGVYQSGDNYKTTGITPRAHRLMRSYFIEASWQAIRTDPVMQHYYRKHYGKDTKKIIIKIARKLLSRTLAVIKTGTPYEIGVIE

SEQ ID NO: 187739 - protein, 410 aa, unidentified
MEVIHPRCAGIDVSKRDAKVCVRIAGVGRRGATSTVTTWGAFTNQVLALRDHLIEAQVTLVVMEATGDYWKPFYFLLEDGLNVMLVNARHVKNMPGRKSDVSDAAWLADLGAHGLVRGSFVPPAPIRQLRDLTRTRTAITRERGREVQRLEKLLEDAGVKLSSVASDINGVSGRAMLEAMIAGQRDPAVLADLAKRRLRSKIPALTEALTGRFSEHHAFLARVHLDLIDRHTTAIQELTDRIEVVAGPFRGFRELIATIPGISTLVADVITAETGADMSRFPTASHLASWAGTCPGSNESAGRVKSTKTRPGNPYLKGALGVAAMSAARTKNTYLGAKYRRIASRRGPMKAIVAVEHAMLLAIWNMTATGALYDDPGSDFYTRRNPDKAKNRAIDQLRHMGYTVNLEPAG

SEQ ID NO: 187740 - protein, 341 aa, unidentified
MQVYGIDLSKDKFDVNFIDVDGKQKNKVVKNALVSISKFLSTIQPKAVLCAENTGTYGDLLVFLCNQYDISIALVPGYTIKHSLGLLKGKSDPIDAERLREYGERFQDKLSFKEYQNENILELKQLYTLRSQMVKARKELQTGAHSRALMPMQSIVANTLLKKVVDTLDTQIIEVENEMYNIIKNDVKLEQNYLLATSVKGIGPVIATDLIIKTGNFEVINTARKAASYAGVCPFPNTSGNMVGKSKTSPFADKDLKCLLYMGAKSAIKHNKEYNLYYQRKKMEGKHYYLIMNNIMNKLLRTIYSVVINKTIYSPEHVCIDPREKNNMESSRKSDENLVFY

SEQ ID NO: 187741 - protein, 323 aa, unidentified
MNKDINYFGLDISHLVFDVTDSDGNYYQFKNNGSGFKKFVKLLNFDSHCVMEATGYYHYQLAYYLLENGIKVSLENPLSVKRFIQMRLSKIKTDKSDSKLICEYAQQVDLKLWKGNSKNEIECLQITRTLSVYTKQSTMLKNKLHGEAVLGNPSKAVVSSLNRSLKQVKKELEILEAKLLILVKQTHQDLLTRIKTIPGIGSKTAIMLVVLTGGFERFTSASELCSYAGLTPVIRQSGSSVKGRPRISKIGNQKLRNLLFMCSFNACKYNKACRDLYERIVAKGKSKKLALIAVCNKLLKQAFAIAKSGLIYDDTYRSTLVKS

SEQ ID NO: 187742 - protein, 352 aa, unidentified
MSIIAFDSHKHYTFARVEDENGENPQEFRIEHRRGSIAGFLYSQQPGSPVAIETIGNWYWIVDEIEQAGMVPQLVHARKAKMMFGCINKTDKLDAKGLNVLQRAGTLPTVWIPPCDVRDKRELPRTRMVFAGQRTKFKNRIHSVLDKYGLQDAFGDISDIFGRKGMKVICFVLGQLPSHTHYTTELLLEQLDQTEQKIKAIELRMNKLFKETDQHRLLKTMPGIGFILAVVILQEIGDIGRFGSAERFASYSGVTPRVHASGGKVRYGRLRPDTNHYLKWAFSEAGNSVALNRNRFPARHVSQLYNRIRGRKNHAKAIGAVARHLAEATYWILTKNEVYRDRGVLKVSPTGA

SEQ ID NO: 187743 - protein, 358 aa, unidentified
MAVNEGTRRIVGGVDTHKDLHVAAVVDEQDRVIETRSFATTRQGYRQMLAWMRAFGDLQHIGVESTGSYGAGLLRFMQQAGIAVLEVTTPDKQDRRRRGKNDDLDAQNAAHAAFAGQRTVTPRSRDGMIESLRVLMACRKTAVSARRVALQMIHNTIVCAPDGLRDQLRSLTRMQLVRTLASWRPDLTAYRDLESAYRIGLKSLARRYLELHDEIADLDVMIAAIVDELAPNLVACNSIGHIGAAQLLLTAGDNPERLRSEASFASLCGVSPVPASSGKTVRHRLNRGGDRAANSALHIIAIGRLRTDQRTKDYVARRITEGHSKLDAIRALKRYLAREVFTLITQRRREINATRIAA

SEQ ID NO: 187744 - protein, 465 aa, unidentified
MPTSRVPPPPRRWAAVSPPPELHQVNRNAAGVDIGATSHYVAVPPGRDPGGCAFRAFGAFTADLHALAAWLTRCGIQTVAMESTGVYWIPLFELLSARGFEVRLVDPRQLKRVPGRKTDVLDCQWIQQLHSFGLLAAAFRPDDQICVLRSYLRQRATLVTYAARHIQHMQKALELMNLKLAHVVRDIVGRTGLAIIRAILDGQREPRALATLRDPHCKANAETIARALEGTWREEHLFELRQALELFEFYQRQIAACDREIEAHLTRLPDKPGGTLLSDAPHRPKARRSALSFDARQHLHRLTGVDLTHIDGIDTPTALTVVGEIGFDMTRWPTEKHFASWLGLAPGSHLSGGKQRSGRTKPSASRAAAALRLAASSLYHSRSALGAFHRRLKARLGAPKAITATAHKLACLIYRMLRFGTDYLDRGQDYYERRYQGRVVTNLSRRAQELGYTLTKNENPSSAVP

SEQ ID NO: 187745 - protein, 391 aa, unidentified
MTRHSIVRSLLLVGWKVTATSKGAWDVTMIAAGRPDSKVEVILGVDTHLDVHVGVAVDHLLGRSLGELSVPTTANGYERLLCWAESFGPVRCAGIEGASSYGAGIARHLKAQGVEVLEVERPKRRQRSSRRNVKSDPSDAESAARAVLAGETSGVPKSGDGCVEMIRALRAARRSAMKSRTQAANQLQGLRVTAPDELRHRLRGLSSKKLVSVAARFRLGDDPRDVPAATKFALRSVARRHEALSAEIAKLDAQLDRLVTQVAPELVSLPGIGTDHAATLLIVAGDNPQRLRSEASFASLCGVSPVEASSGKVVRHRLNRGANRDANRALHLICVVRMRIDERTRRYVARRTAEGKSRREIMRCLKRYIAREVYRVLVPATSPSPIGVSTR

SEQ ID NO: 187746 - protein, 400 aa, unidentified
MLSIGIDVSKGKSTVCGMKPGGEIVYAPFEVQHTREGMSELVSLLRSSGEEVRAVLESTGSYHCPVVAALLENGIFVSVVNSLRMKRFCSQSIRKVKTDRIDAMQIALYGLAYWQELQPTKLPEDTYRELQLLARQYYQMTSILIKAKVDFNAICDQVLPGMQELMNDHAGRHKLSEFVLRYRHTTHILEMGETRFRKDYCKWAEKKGYRNCERMAALIFATAQNGIPVLPNAPSTQIVITEAIRVLHTVEASRDAILTQMQALAKTLPEYSLVREMPCIGDTLAPRLIAEIGDVRRFHSKRALIAYAGIDAPPYQSGKFCANNRHISKRGNRYLRKTGYEVMQSYVMHKPANDPIFTFIEKKRSEGKCGKLAMVAGLNKFLRIYYGKVTELYRSLPTIE

SEQ ID NO: 187747 - protein, 323 aa, unidentified
MALELLAIDLGKRSFHLYGIDTDGVILSRKVSRAKLAEVVGNLAPTTIAMEACASAHYWGQRWLVAGSEVRLINPRFVKPFVKGSKNDAVDAEAIFEAAMRPTMRFVPVKSRDQQDLQSLHRARDRLICQRTALINHTRGLLAEYGIVLPQGPWRFTAQAPAAIADADLSDLARAIFGELLDQLDELDRRVKKLDATMVALCRTNETCRRLAKLPGVGPVVATAIVAAVNDGRQFRSGREMAAWIGLVPRQYTTGGKPRLGGIGRRANHYLRRQLIHGARAVVSRLPKHDDKHDDRRSTWLRALVARRGFNRTIVALANKTAR

SEQ ID NO: 187748 - protein, 392 aa, unidentified
MFDTFIGIDVSKDKFNFAVIDEKLQSIENGSFSMDLNGFQEFLNIVKKFNNPIVALESTGSYHINILSFLSANSVKTALVNPSLIKRFSASLSLRNTKTDIIDAIVIAKFIAKNNENSHYFTQHNINDITALARLREHISQEIAKVKTSLKQHLSVVFPEFLMEFNPFTNTALNLLQKFPTTELIKKAGIRKINKTIKDIKSKHKAHIDPEKLYDIAVNSIGQSSEIWANIIKHDIEMLIFLNEKLDNITDDFINKVNQFKKEDMEILSSIKGISDTTSAHFLAEIKDISKFQNSNKLSAYAGIDPSIKQSGSSINSKGKISKKGVKSLRRIIYLMAMGVMKFNPYFRAYYNKKRTQGMPHRKAMIALCNKLIRVIFAMLSKKQHFIEPLTC

SEQ ID NO: 187749 - protein, 421 aa, unidentified
MKVVYKTCCGVDVHKKFLVATIIKTTGNAQPSYQKERFSTFNSNILRFKQWLLDNDCLDVCFESTGKYWVPVFNLLEDKINVTIANPKWVKAVKGNKDDSKDSKWIGDLFRLGLVPGSFIPCKAIRILREYTRYRFKLMSCNRSEKNRFQNAFTVCNVALDSVVSDMFGKSASAITNYLITTKDFAPDICRSFLLRSLKKKADTVVESIVGYQMEDSQKERILFVRSHMEFIEKELQALDAKLDELVTPYENAISLLCTIPGVDRASAITIISEIGTDMSQFNSSKRLCCWAGLTPGNNESAGKKKSVRITRAGVYLKPALVQCAHAAVKSTTTPYYKTKYERIVKRRGKKRAIIAIARMILTAVYQMLSTGEEWNPCDLYKIDMPQGMQDKQKAKAIKQALKLLMSEGVITQPDPAPALS

SEQ ID NO: 187750 - protein, 315 aa, unidentified
MTSTQVFVGVDISKAQLDLALRPEGQFSVPNNEAGFAQVLEHLNAVHPTLVVLEATGGLELPLTGVLAAAGVPVVVVNPRQVRDFANATGRLAKTDALDAQMLAHFAEVMRPEPRPLPDEQTQALAAILARRRQLVEMLTAEKNRLGTAGKPVRKSLRTHIAWLERELSHTDRGLAQTIRESPVWREKEALVRSTPGVGPVVTTTLLATLPELGTLTGKQIAALVGGAPLNRDSGTWRGKRTVWGGRAQIRAVLYMAALVAARCNPVIRACYQRLRAAGKAKKVVLTACMRKLLIVLNAMLKHRTPWRAELVQCA

SEQ ID NO: 187751 - protein, 410 aa, unidentified
MLCVGDDWAEDHHDVELMDEAGRVLAKARLPEGAVGLARLHAMIGAQRGEDAHEAEVLVGIETDRGPWVAALVAAGYTVYTANPLQAARYRQRHAVSGAKSDAADAHSLADMVRTDAHQLRPVAADSPQAEAVKVVARAHKTLIWERTRHTQRLRHGLREYFPAALEAFDDLDAPDALELLGKAPDPASAAKLNRSQIQAALKHARRRDIDTKTTRIQSALRSEQLGRDQVITNAYAATTRSIVAVLTVLNEQVKILQGQVEQHFGRHPDAEIILSQPGMGTILGARVLAEFGDAPGRYADAKARKNYAGTSPITRASGKKKVVLARFVHNNRLIDALMSQAQSALQASPGARAYYDKQKDRGLDHQPALRQLANRLVGILHGCLKTRTLYNEATAWSHYNQDQDQQPAA

SEQ ID NO: 187752 - protein, 346 aa, unidentified
MKVLIGVDPHKASLAVAAVDEAEGEFLERASFPQNRAGLRALERWARRFPERRWAVENAGGLGRYLAGMLATSGESVVDVPPKLSARVRVLSTGNARKNDGVDALATALAASRNERLAAVDPQDSSEVLRLLSERREDLVAERTRALNRLHGLLRDLVPGGVTGTLSADRAARILRGIRPQSSSSRVRRRLASEVLRDVRTLDRKIADLNRRIEAELEASGTTLTEIFGIGPILAAKIIGTVGSVARFPSRGHFASYSGTAPVEASSGDVVRHRLSLAGNRHLNYALHMVAVCQARSDARGGTYYRKKLAEGKSRKEALRCLKRRISDAVFVSLVADSQVLSRSAA

SEQ ID NO: 187753 - protein, 349 aa, unidentified
MTMTTVEAVRGVTGGVDTHRDVHVAAALDPLGGLLGSESFSVDPAGYKALLKWLHSFGDVTKIGVEGTGSYGAGLARHLRRSGVTVIEVDRPNRDERRRSGKSDPLDAVEAARAALSGRATGSPKSRDGAVEAIRVLVVAKRSARQARVKALIQMRHLGYSAPDQLRCRLKGLSVPALVAEGVKLRPTRSADTVTAATKASLSSLANRISSLDEELAELDERIEALLVATVPELLDRFGVGPDTAAALVMAAGDNPERLHSEAAWAHLCGVSPIPTGSGQKSGKVRHHQGGDRQANSALWRIVMVRIAHDPDTRASFDRRVKEGRTKHEVLRILKRYVAREVYQYLPRG

SEQ ID NO: 187754 - protein, 326 aa, unidentified
MKLIVGIDVSKKKLDLSVYDGDHHKALFINNDRKSIEKMLKSFVSMKDDCLFAMEATGVYHLQLATLLHEQGFNVGVINPLIIKRFAQMKMIRAKTDAVDARLIAEYGYEQKVSLFQPRSIERQKIIKILRAIDALIETKESYHNRLEALAQDPLQVKSVTKSFKQLIRNAEREISKFEAELLQIVKEYYSDVYDRLLSINGVGVKTAVVIIGFFGKFEDFENSKQVASFIGINPSPSESGSSVRGRGRISKKGNSYLRKQLYMTSLSAMQHNKSCKEFYERLVLKGKEHKVCRVAVVNKLIKQIFAILKYERTYDQDYCKNCLAS

SEQ ID NO: 187755 - protein, 378 aa, unidentified
MPSETTIHVAIELSVSSWLVATRPPGAEKSRLHHIEGGDTTALLALIAELRTRASTKLGKPAEVVCCFEAGRDGFWLHRALTMHGVTAYVLEPTSILVNRRARRAKTDRLDAEGMLRVLAAWLAGDRQVCSMVRVPTPEEEDAKRPHREREHLVQERLRIENRIEALLFTQGIRKRPSLRSWERDLAKLRTGDGRALPSLLRVELDRLRRRLVLALELIREVEAERAEALAVTADDEMTQKIAALQRIRGIGTNFAAVLVREVLYRSFANRRQLASYVGIAPMPYQSGGMDRDRSISRAGNPRARTTLIQLAWLWLRYQPGSALAAWFRERVGTLQGRTRRIAIVAMARKLLIALWRYVETGVTPDGVEIRAQADVTA

SEQ ID NO: 187756 - protein, 315 aa, unidentified
MGTPIFVGIDISKKHLDIFLTPPDTSFTVPNTEAGVLKLVARLRRVTPQIILLEATGGYEFRVVAALREAELPACCINPRQVRDFARSLGILAKTDRIDARVLAHFAEKLRPEPRPLPEAQQQELKHLMARRRQLLEMILMEQNRLQISPFPRVQQSIQAALQALKEQLQQLDRDIDDFFRRYPVWLDQDQLLRSVPGIGPQTSLSIMAWLPELGHLNRREIAALVGVAPFNRDSGAWRGKRSIRGGRPQVRRSLYMATLAALRFNAVIRTFYQRLLLNGKAKKLALTACMRKLLTILNAIMKNHQPWLPQEQTP

SEQ ID NO: 187757 - protein, 344 aa, unidentified
MAIAVLGIDLGKNSCSVAGLDGTGRVVLRRRLTRESVVRLAGTLPACVVAMEACCGAHHLGRVLREQGHEVRLMPPEYVQPYVKAQKNDERDAEAIAEAATRPTMRFVELKSEAQLDAQILHRARSRLVGQRTALINQLRAVLLERGIVVAKGRRRLEEYLIGLLDGDRPATLSPRTCLLIEDMRLEWSELDRRIAALTAEFVARAREDQAARRLATIPGFGALNATALVAAIGTGETFRRGRDLAAWLGLVPRQATTGGKPRLLGITKRGNTYLRTLLIHGARAALPSLSASQSRMGEWLRGLIGRAHKNKVIVALAGKLARIAWAVLRSGETYVKEGRPVAA

SEQ ID NO: 187758 - protein, 400 aa, unidentified
MISVGIDVSKGKSTVCILKPYGEIVSKPFNITHTHKDLSELSSMLFRLNDEVKIVMEATGIYHLPVLTYLQEKGFFVSVINPYLMKSYRNESLRKAKTDKIDSRIIANYGIDHWFKMKEFQTSGEIYEELKLLGQQYRHYMKLHLLSLAELTHLLDLTMPGIKNLLASWNETNRKDKRSDFVERFWHYDVITSMSEQEFTEEYILWAKEKKYVPSQEKAKVIYTLAQESIPTLPSETSSIKMLVTEAVRVLKEVDATLGLILSRMQEIAKTLPEYSVVREMGGVGNTLAPKLIAEIGDVRRFRNGKALVAFAGIDPPPYESGQFVGCNRKISKRGSASLRKVGYETMRSLKMRSRPEDPVYRYVVKKESEGKSKKSAKIAGLNKFLRIYYARVTELYKNI

SEQ ID NO: 187759 - protein, 347 aa, unidentified
MRFYTKQHKFYCGIDLHTQRMFVCILDAGGNVRIHQNIHTDQEAFLRIIAPFREDVVVAVECMFTWYWIADLCIQENISFVLGHALYMKAIHGGKAKNDKIDSLKIATLLRGGMLPQAYVYPARMRATRDLLRRRNHLMRKRAELFAHIQNTRSQYNLPDPLGCIAKPKNREGIIERFDDPSVQKSMAVDLEMIEAYDHILTQLERDIIACAKEHDLRSYALLQTIPGVGRILALVLLYEIESIERFPQVQDFVSYCRLIKSIKESNGKKYGSSGKKIGNAHLKWAFSEAAVLFLKGNEPGKKYLQRLAHKHGKAKALSILAHKLGRAAYFMLKNKEAFNQKKFLGL

SEQ ID NO: 187760 - protein, 403 aa, unidentified
MFHLGIDVSKKSARYFIFDESGSKLKAFTLANDKESLESLPERFESLSITADNLLIGIEATGSFWENIYSFLKNKGFNIVLLNPYHTNKFREALAKKAKTDDIDALVIAQLLRTGEYVQSQVAEEDIQALRELTNLRYEFVKERKNLQRQVYSLLSIVFPEYEKTVIAKPFSQASMAILNEFPTARHLSEAKPKHIEKIVRKIVGNNFNIGEIQGLIDAAKNSIYSGRAKDARATTLRMLIGHIENLSSSIEELEKQMKAILSPSDEDDSSLGGNLLSIKGVGDKTLAALISYLGSDGSNFPDSKAAVGYVGFYPKIYESGQSKRDNKISKRGPKVLRWALYMAAVASVRHNKEMRTLYHKKLSQGKTEKQALICVGKKLLQIALSMLKSGEAYNPARVFVSL

SEQ ID NO: 187761 - protein, 331 aa, unidentified
MKKKPFIIGIDVSKSKLDIYIYQLEKHFVVSNDPKGYAQMLEIIITECKCKTKDLFFCFENTGRYSKPLCALFSSDGISFLMSPALDIKKSMGMVRGKNDKIDSKRIANYAYEKYDKLKPTTLPNNNILQIKSLLSLREKLVRQKTACKNGICDLTDCFKDGENQLIIDIQKRLINNLNIEIEIIEKKIKEIINDNDDLKKNFNLVKSVDGIGDIIAFYFIAFTNNFISFSNPRAFACYCGIAPFESSSGTVKGKSHVHNYGNKQLKSLLNLASMSASNRKGELAIYYQNRVSMGKNKMSTLNIIRNKLLYRVFAVVKRGTPYVDLYKFAS

SEQ ID NO: 187762 - protein, 402 aa, unidentified
MNCVGIDVSKGKSTIAVMRPFGEVVVSPFEVCHTASELSELARLLKSLDGETRVVMESTGNYHAPVAWLLHGAGLYVSVVNAMLVHDYGNNSLRRGKTDKKDAVKLANYGLDHWLTLPRYVPEEDARLMLKTCYRQYQQYSKVQTMLKNNLISLLDTAFPDANRLFTSPPRADGSEKWVDFVAAFWHCECVCGLSKKVFTTKYQKWCRKHGYNFSEDKALDIYASACGRFGVMPKTNTAKLLVEQAISQLQATSAALAALKQEMQSLAASLPEYPVVMGMFGVGPTLGPQLIAEIGDVRRFHSKKALVAFAGIDAPPYQSGQMDVRSRSISKRGSASLRRTLFLVMGVILQCAPTDEPVYQFMNKKRSEGKPYRVYMMASANKFLRIYYASVKAYLDSLEHN

SEQ ID NO: 187763 - protein, 343 aa, unidentified
MASIHYVGLDVHKKSIAFCIKTISGDIVRYGTVAAERKALRQWLTELPAPWAGAMEATIFTGWIYDFLKPHAVELKVAHPEMLKAITAAKKKNDLADAEKLADLLRVNLLPECTMLSEELRELRRILRYRNLVVRTATQMKNKMSGLLMEVGATYDKRRLHGRKYFSELLERVEDVPASVKDLLRLSRGNLELFTAVQKKLTKTLREQPLIRERVERLMSIAGVGEIMALTWVLEVGDPARFSSSRDAISYCGLCSAQRESAGKEKRGPISKKRNKHLQTMLIEAAKVAPYWNPQLAVLHEKELGKGNRNRATLAVARKLVEYLLAVDRRGTPFEAEAPPRVA

SEQ ID NO: 187764 - protein, 371 aa, unidentified
MTEAVKYVGLDVHKETIAVAVADGQRGGEVRFIGTVANEDDAVRKLVKRLTGPGVTLNVCYEAGPCGYGLHRLLTKLGQDCIVIAPSMMPRRPGDHVKTDRRDAMTLARLLRAGELTAIWVPDEAHEAVRDLIRARRSAQDDAIGAKQTVRSFLLRHDRRFGGKAAWTKMYWRWLSEQRFEFPHQQLAFEEMQKRVLEAQARVARLEAALAEAVDAWCFAPLVRNLQVLRGIRLVSAATLVAEVGDLTRFDNPKQLMAYVGLVPSEHSSGAKTKRGRITRAGNAQARTMLIEAGWSYRLSAREERRYRERVIDLPEDIQAIGWKAQVRLCQRYRRLAATGKPQPKVTTAIARELVGYAWDIARRVSPAIAG

SEQ ID NO: 187765 - protein, 392 aa, unidentified
MFYVGIDIGNYTHYASIIDQTGAPITKPFSFKNHTNGGQTLLAWMSQYIDSPANVIIGMEATGHYWLATYSFLLDQGFSVIVLNPLQTNAWRKGTEIRKRKTDATLIADVIRFGRFKETPLIDEKMFTLKQLSRFRHSLITNMGDLKRKAIVVLDQTFPEYQGVFSDIFGKTSSQILMDYTSPSDYEGVSVSDLTKLIETTSRKRLGEQKAKELITLASQSFGVAFCKDAFAFQLKMLMEQIRFLEEQVEKYEQQMNQFLIELDTPITTIPGIGPILGATILSEIGDIHRFDKPSKLVAYAGIDASVSQSGQYEASRTTMSKRGSSHLRRALFQAAISGYRNDPVLKAFYEKKRAQGKHYYVCIGAIARKLCYIIYTILKSNKPYQVPYHSE

SEQ ID NO: 187766 - protein, 443 aa, unidentified
MSFDRLKRTPKGKRLPGHKLKPSRATLFVQNSKPHLSMKPTYFLGIDAAKHKMRAALSNRSEHVLFEKDLSVQATGLRQLLAAIKRQVNDPEQLLVLIEATGLLHLNWSAALTKAGYAVAVINPLIARRLYTLQNSIRDNKSDPIDARGLCAIGLLHGEKLLAHYRFSLRPEQFTLQRAQSVRKALRSALTNLKKTYQSLMDLSFPELGGLLQLDGVGIRQLLIQAPTPAAIAGKRLCTLEKNWMVRPKAAALKALAADSMADPDLAAASGPALVALLQSVAAMEGRLHALDQQIAKLACTSVDPQTKALIETIPGFGPVNAVKTLAWLPTEILHSGSNRKVAARLQAFMGNDPRLRQSGQWKGHTKMSKRGVEMLRTAFFQSAFSAAHNDPELRAYYQCKRAQGKTHEVALSHLMRILTRRLVAVLRSGKPYQSHYNLKNAA

SEQ ID NO: 187767 - protein, 337 aa, unidentified
MNVTLIGIDLAKSVFQVCAVNQQGKTVFNRQVRRNRLMALLLDHPGAVVAMEACSGSNYWGRELEQRGYAVKLIPPQHVKPFVKGNKNDRNDAFAITEAARRPQLRYVQPRSLEQTDLIQVHRVLDRKVRQRTALINQIRGFLTEYGVVVKRGKEHLWHALADRLEEPNNGLTPSARGLICELQREWAQLDRAIAYLEKRIKAQSRSDEAAQRLMQIKGVGERIATAAVAFAGNGQGYHNGRHFSANLGLVPKEHSSGGKQRMGGMSKRGNRYLRRLLIQGAWSVVRYAERGQDRLSRWAVKLIERRGKHKAVIAVANKIARIIWSMLYHRTDYQPV

SEQ ID NO: 187768 - protein, 391 aa, unidentified
MATGQRVVIGMDPHKRSVTIEVMTADEGVLGGGRFATDVVGFMAMADYVKQWPDRVWAVEGCSGIGRHVAMRLIADGQDVVDVPPKLSAQARVFSTGQGRKTDATDAHSVALVGTRMAGLRPVVADDQLTVLRMLADRRRSLGEEHTRKVSQLHALLLELLPGGAKKDLSAAQAKALLAKVRPRDLVGKTRRRLAAELVGDLEQIYARKKAADKELKALVAATDTGLLDLHGIGPSGAARLLVEVGDITRFPDRNHFASWTGTAPIDASSGDNVRHRLSRGGNRQINRVLHIMATVQLRNPTEGRAYFDRKKAGGKSSNEAMRCLKRRLSDAVYRVMVDDLAKTMRTDPGGQPGNDSYSSATSSQPKASSSEKPLPGPVTTQPRTPLPAAS

SEQ ID NO: 187769 - protein, 351 aa, unidentified
MGKSNAVFVGCDLGDKFTEVAVLDDTGAVVETARVRTTRCALEKCLGKYKRARVVVEVGVHSRWVREVLSALGHEVIVANPRQVRLIWKRRTKTDRTDAMVLARLGRFDVSLLAPVQHRSRSSQLDLAAVRSRDLIVGVRTKLMNHVRGTLKQFGFRVPTCSANTFPRHAEAALPDELVPALAPALAIIRVMNDHIAAHDKQVTELATQVYRHTERMSQIPGVGDLSALTFALTLDDPTRLKKSRFVAAFLGLTPAKEQSGSSDPQRHITKAGDPLVRKYLVQCAQHVLGRTTADSDLRRWGLHLAARGGKNGKKRAVIAVARKLAVLMHRLWISGERYQPFGYAAPAMTP

SEQ ID NO: 187770 - protein, 335 aa, unidentified
MSVCIGIDVSKASLDIATDCGSHHLQVPNTPIGFDCLLKWLKNHNGVHQIALEASGRYGEAVAQILIDQGYAVSYLNPKQIHQFAKIKLHYNKTDKQDAKLIAEYCKLFKPSLYQPHDTQRQQLQQRSRRLDQLQKMRQQEVNRSKSGIQDPFTQDQIQSTIAYFDGLIAQTKQAIDDLIQRDGYLVQQHRLLVSIKGIGDKTASLILAELNIDDFDSARQLAAYIGITPQQFQSGTSVNKRASISKQGNARLRSGLYMPAIVAKRYNRPCQIFAQRLQDKQKQGKVIVIAVMRKLVHQIYAILKSGRPFDPNYGKTTWHPRRYLLSLNIAQFYL

SEQ ID NO: 187771 - protein, 424 aa, unidentified
MKSTQNEKILQIKNETLVIGIDIGKEIHYARAFDNRGIELAKLLRFSNTAQGYESLDEWMRQIMEQKAKTEAIVGFEPTGHYWFTLGDHLQNKGHRLGIVNPFHVKCTRELDDNSQTKNDRKDPKTIAMLVKDGRYRDVYIPADVYSELREAVAERERLQEQLIALSNQIIRWLDIRFPEFSTVFKDWRGKTALVTLKSLPTPARVIAAGADGVMNLWSEHLKKSSRKKAEQLASVAAKSIGRTDGSNGAEAALANLLVQYELISGQLETIEQLMYELLLKVPHAGNLLAIKGIGIVTAAIIISEIGDIKRFQDPRQILKMAGLSLRENSSGKHKGKTTISKRGRRRLRKALFQAIISMLATNAEFKVMHQNNLTREKNPLGKLQSVIALCGKLVRVLYALLTKGYEYDVDKMTDDMNRSLKAA

SEQ ID NO: 187772 - protein, 333 aa, unidentified
MLYVGVDAHKATAHITVLDESGTVLRRRQITSSNAAVHEALDDLEQPMKAVVEASYLWGPMYDWLAEIADEVVLAHPTKVRAIASARIKTDAIDSQILAHLLRTNLIPAAHAPSREVRAIKRVLRRRMFLVRLQTMIKNRIQALLTQHAVERPKLTDLYGVSGLRWLRQLTLPHPDGRLLHDDLALLDVIRQHIGVTEHLIATLATHDEVVTWLASLPGIGVFLSVLIRHEVDDMDRFPTAKQFASYTGLVPATYASGARVVHGPLTNHGNKWLRWAFIEAVTAAIRVSPELRRYYERIKARRGAQDAQAATARKLAELTWTVWTQRRCYEPR

SEQ ID NO: 187773 - protein, 344 aa, unidentified
MKCKLIAIDLAKSVFQVCGVNDNLKPMFNDKLSRRTFLKFMAKQPATNVFMEACYSSNYWARELSNLGHDVKLIPAQHVKPFVRGNKNDRNDAFAIAEASQRPYIRFVPIKTTHQQEIGCLHRIRERLIKQKTAVSNQTRGLLSEFGVIFMPGKAEFLAGLKWFVVDEKHSERLRSMMRNTLDEYQSILKRIADIEKELHLFIDLCPNGKILLSIPGIGFINASAILATIDKGQAFQNPREFAVWLGLTPQQYASGNSSRMGGITKRGDRYLRKQLIHGARTVVSHAKKKSDRLNIWATQLRERKSFNQTVVAMAHRLARLIWTLLQRQELYKPQQAQPLMGSC

SEQ ID NO: 187774 - protein, 410 aa, unidentified
MEVILGCCAGLDVHKESVQACVRRMGAGGKLEQEVRGWGTMTSALMEMAEWLAAAGVRHVAMESTGVYWKPIFNILEERFEILLVNARQFRNVPGRKTDIKDCQWIAQLLQHGLLKGSFIPPRPQRELRDLTRQRAQIMDERSRISNRIQKVLEDANVKLGSVASNVVGVSGRLMLEAIIGGQDDAEKLANLAQRSLRSKIPQLQQALYGRLTEHHRWMLGLLMDQLSSNEALVERLDERIAQCTRPLEPVLERLDEIPGIDVRVAQVLLAEIGPEMKPFPSDAHLASWAGICPGNNESAGKKRSGKTTKGSRWLRQALVQAAWAAARKKDSYFQAHARNLMHRRGRKRGLVAVAHSLLLVIYHMLKEGTRYRDRGPQFLDRLRATHLVRFHVRRLQQLGLQVELKPLTA

SEQ ID NO: 187775 - protein, 401 aa, unidentified
MPDSSPRFVALDVHKAYVVIGAVDATQTVVLPPRRVSLAQFADWVGQHLFPTDQVVLESTINAWTFYDQLVPLVSRVVVANPAQVKLIAASVVKTDKRDTLALARLLAANIIPAVWVPPPAVRELRALVAHRQRLLKQRTMAKNRLQSLLHQHNLTPPAAEAFAPNHQAWWELLEQQLPPSERLRAQQDRALVAYLTTLIQTVEAELARVSQEEPWKAQVPFLIQLPGIGLITAMTVLASVGEITRFSSAKHLVGYAGLGARIHASGQVHRSGSITRTGRSELRTILVEAAWTTIRVSAWWRARYEQLTARMPAAKAIVAIARKLLVVIWHVLTARTADQHADPVAVARRLFRWGAAHHLARLRGLSRSAFVRSHLDQIGVGPELTHLTINGSTFILRAPG

SEQ ID NO: 187776 - protein, 380 aa, unidentified
MPDVSSTAPAQVRMWVAIDQHKLSLVAATLPTSGGQPEVMRVENTERAIRRFLQRLGGAQGLAVAYEAGPGGYELHRLLSSMGVACDVIAPSLIPVRAGDRVKTDRRDAKKLVRLFRAGELSFVTPPSPMQEGLRDLVRCRDDLRCARTAARHRVAKALMRHGHIYRQGKAWTLRHRAWVESQRLADPLAQAALEHMLTHLGGLDAQIAALDQQLEQIATREPWADPVAWLCSFRGISTHTALGLLAEIGDFRRFAHPRELMSYLGLTPSEYSSGQQQHRGHITKTGNRHARRLLVEAAWHYRHRPRQSARAARLQGHVPPEVRTRAWQAQVRLQHRHRVLAEHGKRSTVANVAVARELTGFIWAAMTKAPLREQEAAAA

SEQ ID NO: 187777 - protein, 334 aa, unidentified
MNYNFFIGIDVSKKTLDFAVFKGKDLLFKWTGENDEPGIKKFWTQLTLQQEFCVNEAMFCMEHTGIYNQHLLNFLYSKKAFVCLEAAVHIKLSSGLQRGKTDQVDAIRIAQYAYKNRTELRLWQPKREVIQQLKHLSALRSRLINARKQLTVAINEIISFDKSSASECKKLCKASLKSLEEDIKRVELKMDQVIASDEELKRLFSIVTSVEGIGKVTATEMIITTNEFKDITDPAKFACYSGVAPFEYSSGSSIKGKSKVSHRANKTMKSLLHMAALVAINYNADMKAYYHRKVEQKKNKMSVINAVRNKLIWRIFACVKNNRPYQKNYQITLV

SEQ ID NO: 187778 - protein, 414 aa, unidentified
MKVALGIDISQKTANCCLFVNNESKECVHKVVIKNALSGVSQLSRWLTSKGYSLEGMSVIMEATGKLHLTLARELSQNKAIVGVMNPKAVSAYRESLGIMSKNDSIDSQVLGRMGCERKIKHSWHEPSSECQYLMELLTARASAVNACTREKNKLAMTLDSEKTAAKLHKQAIKFYTKQKKDIEAAITKHCSGFKYLSEDIALLSTIPGIGSLNAQMLTYYLRAKDFQSAEQLAAFVGLVPCEHDSGSSVHGKTALKHKGPCIFRSVLCQAAHTCIRKDVRNNESLRAFYDRLIAKGKTEQAAICAVMRKLLHVAYTIWKTRIPFNPDYAKQKAKPALQDAADSPCLERKRARRPSRTRSEEHKQDEGVKAARAKRAPLEEVALTPKALVLPQGKQGQGALKQKTRAKKVIQTA

SEQ ID NO: 187779 - protein, 325 aa, unidentified
MTYIGIDISKATFVAAFLHGKSYRTETFPNDAKGIRRFISKLDPAIHHCVMEATGNYCFLLLYLLDKSGIRASLINPKKIKNYARVMMSVTKTDSKDACLIADFGERFKPEPYKFPSEQIMILKQKKTVLRQLQKQLTATKNLLSSLEPLPVKDKKCVNSLKQTITFLEKQIKYMQQEMEAVVTEVFDRQLKLITSIKGIGVTLATALIIATGGFTYFDNAKQLSRFIGICPTIEQSGTSINIRGHINRNGDETLRSMLYVAAWSASQHNKACKECYQRLRGNGKSGKVAMIAVANKLVRQAFAVVTSNNSYIDGFVSTKPDTTV

SEQ ID NO: 187780 - protein, 366 aa, unidentified
MTNSINWIGIDDHAEKLTIAQYAGEEKAPAKEWEVDAGEQGRRHLVRWLRGLPGRVRCVYEAGPCGYELYRLLTSKGMDCAVAAPSLTPRKPGDRIKTNRRDARKLAELHRAGMLTTIMVPERRQESIRDLVRARDDARKNVMSARHRLSKFLLRHGLHYREASTWGARHWQWIRAIMMPEPYEHVVLNEYIRALEERQSELRRLDEVVLEAAKEPDYAPLVGQLCVLRGIDTLSAMTILSELGDLRRFASARQLMAAVGLVPSEYSTGDKTRRLSITKTGNAHVRHVLVQAAWHYRHAPRTGAAIGKRRAAQSGELVAIAKKADERLHRRYRRMTGRGKRSTVAVTAMARELAGFVWAIGQYGRE

SEQ ID NO: 187781 - protein, 331 aa, unidentified
MPTYYLGLDVHKVRTQYCVMDPAGGILKEGSVPTEEAAAVVPDDDTAVVLEATGSWRFAYDALVATGALVKLAHPARVKAIASARVKTDRSDARILAHLLRTDLIPEAWAPPQTTRELRDLVRLRWRFVSQRTTAKNRISNLLARECLRFAGSDMFGKSGRAWLATLDLAPHTRGMIDLLLVSIGEAGHHVEALTARLHERLDGDADMYLLMSIPGVGFITAATLVAELGDWRRFSRAKQVSACFGIVPSVRASASVAHYGHITRQGSSHARRALIEAAHVAKRLPGPVRHRYLSLVKRRGKKVAVVAAARVLLELSWTLLRKGEVYRAAA

SEQ ID NO: 187782 - protein, 351 aa, unidentified
MSRFSPSAAIATLGIDLGKNSFHLVGQDERGAIVLRIKLSRAQLTRRLANIPPCLIGLEACAGAHHIGRQLQALGHDVRLLPAQYVKPFLKGHKNDYRDAQAIAEAVQRPTMSFVAIKAPEQMDLLALHRVRARLVSQRTGVTNQLRGFLLERGIIVRQGLAPLRQALPGILASSSDMLSPRMVRLIADLMEDWHRLDERIAGVSAEIEALAAQDEHCQRLMSVPGVGPIISSAVVAAIGTGAGFKQGRDFGAWLGLVPKQESTGDRTILGKISKRGNKYLRTLFVQAAHVVLVRRPHGARLGLWPWIETAGRRLHRNMLVIALAHKLARIAWAVLARGHAYQPRSAFQAV

SEQ ID NO: 187783 - protein, 338 aa, unidentified
MPLYGGIDLHANNSVVVLLNEQDQRIYHKRLPNDLATIVEQLAPYHADIEGLVVESTYNWYWLVDGLMDAGYRLHLANPAAIQQYSGLKYTDDHSDARWLAHLLRLGVLPEGYIYPKAQRPVRDLLRKRAHLVEQQTANVLSVQNIILRNTGARLSANRIKSVSQAEVDTLLPNADPVLAVSSALAVLHCLAEQIKTVETRVRTRIQSTPLYELLQTVDGIGPILAQTILLETGDIGRFPSVGDYASYCRCVDSTKVSNGKRKGQGNVKNGNPYLAWAYAEAAHFARRFNLKVQRYYQRKQAQTNVTVAHKTVAHKLARACYHMMRHQAPFDAAKAFG

SEQ ID NO: 187784 - protein, 418 aa, unidentified
MKVVYPICCGVDVHKSFLVATIIKTEGITPSYQKKRFSTFNNSILQFKQWLIENNCYDVCMESTGKYWVPISNLLEDVIRVTVASPKWVKAVKGNKDDTKDSKWIGDLFRLGLVPGSYIPEKPIRILREYTRYRAKLTACKSSEKNRFQNAFTVCNVALDSVVSDMFGKSASSITDYLITSDSFDEEHCASLLKGTLKRKRDEVIQSIEGYEILPEQKFRMRLVRDHLDYVSKAIATLDAKLDELAAPYENILHLLCTIPGVDRNSAITIISEIGVNMAQFCSSKRLCCWAGLTPGNNESAGKKKSVRITRAGVYLKPALVQVAHASVKSNTSPYYKAKYERISKRRGKKRAIIAIARMILTAIYHMLTTGELWNPVDLYKVDMPQPLLEKQKQKATKQAIRLLLSQGITDLSRLNIA

SEQ ID NO: 187785 - protein, 412 aa, unidentified
MRRVIGIDTHRTFGEVVIWEGGRLRHVGRVDMTRTALEGFGKKLLATDEVVIEATGNCMAVSRVLTPFVKRVVIANPLQVKAIAHAHVKTDKVDAGTLASLYAAGYLPEIWTPDAATERRRRLVARRYQVVRHRTRIKNEVHSILYAHLIPRCPHADLFGHLGRTWLTSQPLPDDERAAIERHLRELDRLGDDLRVLDQEIAQSALDDAAIKRLITITGVNLTVAAGLVAAIGDIGRFSSPQKLVSYFGLNPRVRQSGLGAAHHGRISKVGRSHARAMLVEAAWATAKAPGPLHAFFVRIRARRGHQIAAVAVARKLAVLCWHMLTKQTDYHWARPALIANKRRAMELQAGRPQKKGNKRGSTYAYNVKALRDQEMRLAQQAEQSYENLVAHWQPRPAKKQARGRLKPAGLE

SEQ ID NO: 187786 - protein, 330 aa, unidentified
MMGSKSRMQGKVSPERSACDRVYVGVDVCKEWLDVYLHPVGLSLRVANTPTGLKRLKRELARHAIACVAVEATGKFHRLTQRHLHAAGIPVAVVNPLRSRLFCEASGQLAKTDAIDARLLAVMAESLNLRVTPPTPEIVEDLQELVRARAAAVADRTALINQRAAARLGAVKAELGRRIRALEGSIARLEQEIEATIARDLALARRFEILLSIPGVGPVAAAGLLADLAEMGTRSGKEIASLSGLAPVACDSGEAKGQRHIRGGRAHVRTAIYFAALSAARYNPHLARVYRRLLAAGKKPKVALTAVMRKLVVLANALLRDNRIWQANPA

SEQ ID NO: 187787 - protein, 490 aa, unidentified
MKSKKPHLGTRSKTSRRRKSKAQSWKVVHPHAAGIDVGATEHYAAVPPDSVTAGESTVRSYGTFSEDLDALVEWLKACGVDTVAMESTGVYWMPLFQKLEAAGLEVILVNAHMLKHVPGRKTDVQDCQWIQQLHSYGLLRASFRPEDPICRLRTLVRHRGTLVSAGAEHILHLQKALTQMNVQLHHVVSHVTGETGLRILRAILKGERNPDELVKLRDPKISRSTVEEMRKGLVGDWRPELLFVLGQSLRGWEFYQDQIKACDLQIEEQLKGIASAPPPKPAAGAAKLDPLASENGRRKSPQSRKRNDPVNDLAPELARISGVDLTAAHGLRVLSVLVILSEIGVDMSRWRNAKAFASWLGLCPNNKISGGRILSSRTRPVVNRAATALRLAAMGLAETDTWLGIFHRRMRSRLGPAAAITATAHKLATVVYHLLKNREGFVDRDPVRYANRIYANQVAGLKKRAKTMGFELIPISKQETQLSDQLTVAE

SEQ ID NO: 187788 - protein, 400 aa, unidentified
MVTHQTPEVFLGLDVGKTKHWACAITADGKVVWNKALPNDETKLIDVYTRLQKLGSLLVVVDQPATIGALAVAVAQHMGIPVAYLPGLTMRRIADLYPGDAKTDEKDAFIIADAARSLPHTLRDLSQTDLTEATLGMLTGFDLDLSRQVNQVSNRIRGLFTQIHPALEEVLGPRLKHDAILELLATWPTPDRIRKAGRARIDAKLKKHGARRHTAWTEEIIQALGKQTVTVTGTEAAGIVIPHLARQLTYLHAQRADVAQQIEEIVVNHPLYLVLTSMPGIGLRTASVLIAELTGKAFTSSAALASYAGLAPTTRQSGTSIKSERVSHSGNKRLKRALFLSAFAAIRTDPVSRAYYDRKRNQGKRHNQAIIALAHRRLTVLYAMLRDASLYDTPQQAQAA

SEQ ID NO: 187789 - protein, 456 aa, unidentified
MAKHKRKKSPAEQQLPAQLHAVNLHAAGIDVGAEAHWVAVPVEADPQPVRAFPAHTASLHALAAWLTLCGITTVALESTGVYWIPLFELLETQGFEVILVDPGTMPKNGRPKTDVHDCQWLQRLHTLGLLSAAFRPDDPVVVLRSYLRLRLTLLADAARHIQHMQKALTQMNIKLQHVVSDITGVTGLRIIKAILNGERDPRRLATLRDQRCKEDETTIAQALHGTWREEHLFALHQAVAAYAFCHQQIQEGDAKIAAQLQTFEDRSKGESLPPKPRKRHRNRLSFETRPLLYRMTGVDLTKIEGLDETTALIVLGEIGLDMSRWPSEKQFTSWLGLCPRVRVSGGRVLSSRTRPTANRAAAALRLAAASLHHAKSALGAFFRRMKARLGTPKAITATAHKLARLIYAMLKHGTAYVAGSMAEYEQKYRQRVVHNLSRKARELGYELHPVLGGPPA

SEQ ID NO: 187790 - protein, 343 aa, unidentified
MKEVSTIGLDLAKNVFQVHGVDGSGQAVVRRQLRRGQVLPFFRKLAPCLVGMEACATSHYWAREITALGHEVRMMPARYVKPYVKRNKNDMADAEAICEAVTRPTMRFVPIKTPAQQSILMLHRTRELFVRQRTMLVNALRAHLAEFGIVAGVGRNGLEKLLEVIADDQDERVPSEARNCLLALRDQLALVKQQILEADRRILAWHRASELSRRLDDIPGVGPLIATALVASIPDPRAFRSGRDLSAWIGLVPKQSSTGGKERLGHISKAGNRYLRKLLVVGALSVIRRAKQTGSTRRAWLVALMARRSTKVAAIALANKIARIAWAMMVRGTRYQEPLPQAA

SEQ ID NO: 187791 - protein, 442 aa, unidentified
MPHATSSAPLEPDWAAFVGLDWGDEKHYWKLRDAHSQQSQEGVLQNTPEALEAWAAELNVRFGGRPIAVCLEQSRGAVVYQLSKYPHLILYPVHPTTSARFREAFYPSGAKSDPQDGDVLLDLVEHHRDRLRRLDPDTPETRLLQMLVEQRRAWVDEKTRHSNRLTGWLKIYFPQVLDWIDDIDSPLGCDLLDRWPTLEELQKSHPGTLHTFFVQHNCRSEKRMQDRIQAIYQATPAIRDTAMLEAGPAIVKQIVAVIRTLRANIDELDKRIASLVSTHPERALFEALPGVGPALLPRLIVAFGTKRERYTCADQLEAYSGIAPVTQQSGKSKWVHFRWACPKFLRQTLHEFAAHSIAKSVWARAFYDMQIAKGKGHHAAVRSLAFKWIRVLFACWKNHTPYDEQIYLRALQNNGSRLSQILATQLTWKTVGGFQKLCSENA

SEQ ID NO: 187792 - protein, 328 aa, unidentified
MSASSEQIFIGIDVSKASLDLAIRAQSKARQFANTEEGIGALLASLEQQRQKIAVVLMEATGGLEHPAAVALCLAGYAVMVVNPRQAHDFSKSLGYLSKTDKIDAQALAQFAHTLYCSERRDKLLLKLATPEQEVLAAMVTRRSQLVGMRVAESNRLAGSHRTQRQSIETMIKAIDQQIQEVDGGIADGLGGHFKAKLELLKGMKGLGTTTKAVLMACLPELGQLNAPEIGKLVGVAPLNRDSGTMKGRRTTWGGRGNVRSALYMASLSAVRYDPVLKAFYQRLRAAGKPAKVALVACMHKLLTILNAVIKSGRPWQATFGCAQLANA

SEQ ID NO: 187793 - protein, 311 aa, unidentified
MNSDAYVGVDVSKVSLDVKVLPTNETLQISNDNGGINELIKRLTQIDPTLIVFESTGGLEMLAVSNLIENQLPVVVVNPRQVRDFAKATGRLAKTDAIDADTIARFARDIRPEVRPIKDEHTQLLSALNARRRQIVDMLVAEKNRLSRAPKPNKKSIQKHIQWLEKSLTDINKDIDKTIKKSPIWRENDRILQSFKGVGPVVSATLLCDLPELGTLNRKKIANLVGVAPLNCDSGHFRGRRRIKGGRANVRRKLYMAAVASLRHNPLMKDFYNRLVEAGKPPKVALTACMRKILTILNAMMRDRTYWNAIW

SEQ ID NO: 187794 - protein, 325 aa, unidentified
MVAVVGIDVAKHTFDIATLQPNGKYRTRSRLANDPSGFAQLCEWLEKHAGPDAWIVMEATGIYHEALATCLFERGYRVSVVNPAQTAAYAKTQLSRGKTDKTDAKLIAGFGQDQLAKSRLRLWQPEPPAQKRLRALVRRLADLREMEQMERNRLESADANIQDSIHTVLRHIEEEIRRTLKAIEDHIDNDPDLRQRKELLTSIKGFGDQTAALLLGELGDPLAFRSAKAVAAFAGLTPRPDQSGEYQGPTPISRIGSGFLRSRLYMPAISAMQHNPAIKALAERLRSRGKRGKQIVCAAMRKLLHIAYGVLKSGQPFEPKLALAR

SEQ ID NO: 187795 - protein, 421 aa, unidentified
MKANDPTNTNPSPQAWIGLDWGDQQHSFALQECGGQTQTGTLEHSAENLHRWLKELEQRFGGRTVRLGIETSRGAVIAALLHYPWLEIYPLNPVTSARYRRAFAPSGAKDDLPDALVCLELVRDHAAKLRPLQPQDPQTLKLSGLVHARRGLVDRRTALLNQLTSLLKSYYPQALTLLENLNTPMAVGFLRRWPEVISLKTARPATIKKFFYQHNVRSQELVKKRLALIERAVALTTEEARVSVAVLQLRALVDQLEVFQKHVARLDVEIKNAFSEHPEAYLFGDLPGAGQQLAPRLCAAFGTDRAAYAEPGSLQKYAGLAPVREKSGGQLWTHWRWNAPAFLRQSFVEWAGQTVRYSQWARVYYQRMTKQGKTHAVIIRALAFKWIRILWKCWQERTAYDEARYLKQLIHRKSPNAVTTA

SEQ ID NO: 187796 - protein, 410 aa, unidentified
MDAIRECCAGLDVHNKTVVACILNGPLDHTPQKQISTFGTTTRELLRLQDWLIANQCQAVAMESTGVLWKPVWNVLESTCDIVLANARTIKNIPGRKTDMNDAFWIAKLHRCGLVQASVVLPEQLRDLRDWTRYRVKMVQAITAEKNRIHKLLQDGNIKLSSFITDVFGVSGRLLLEQLMDGEVLDEEQLRGLVKTKLKKKVPELMEALNGRVRRHHREMMRLHWDHLLYLEKQIEQVEARIECKLAPYAEELEWLDSIPGIERNTAAAIFAELGPEVHQRFETEEQLTSWAGVSPGNKESAGRKSKTKCLPGNKFLKRALTQAAWANEKSSNRIGQHFRRVRKRRGDKKACVATAHLLIKIIYSLMKNRSGYEEKDVPESTSKEKALAYYLKQIEKLGLTVQVTSPETS

SEQ ID NO: 187797 - protein, 359 aa, unidentified
MATVATIGLDLAKNVFQVHGVDGRGIGVLRKQLKRDQVLPFFARLQPCVIGIEACGGAHYWAAKLGALGHRVRMMAPQFVKPYVKTNKNDALDAEAICEAVGRPNMRFVPAKSSDQQAVLSLHTAREGFVHARTAQANQIRGLLIEFGLTVPQGIRHIFERVPEMIEDGSNDLPGLFRLVIDRLLEHLKTLDKNVTELEREIEQWHRSSEPSRRLATIPGIGPITASALVATAGDPSNFKNARQFAAWLGLVPRQNSSGGRTQLLGISKRGNAYLRTLLIHGGRALVQLARTRVAWAGSWLSQLVGRRHHNVAAVAMANKNARLAWTLLSSGEAYEAVRAVGVGPRPVKRVATPSDGTP

SEQ ID NO: 187798 - protein, 390 aa, unidentified
MLRKNIVQTLDAATSWKVFGLDLAKHDLAVVAIPADGSEVQYVKRYSYADFLEFTAQILSATMVFEPGNGANHFALRLQAQGHTPKMVSGASVKSWITLHMSGQKTDLNDAYALARLSEDPDLKTVRIKSVDQNRLQSLQAMRKQLVEQRTKTIVSIKGIFQCWGILFKKDSRSLKKFKEAANNNKELLGEEVVEAMILQIDRIADLDKDIKHVEELLKKVTMQDPRAQPMLDIPCVGLQTVSRLCAIMGDIKDFETPRSFVAFIGLVPKNMISGNKTTTPSGYEQVGQGKVNRRGDKMARSLIIQCASSVYMNFHKDNFPECALKDWIQKQKDAHKPYGKIMVSLAAKLLRIIYAVLKHGEAFSYEKAGISRSALAALKAAQPAEVGNA

SEQ ID NO: 187799 - protein, 320 aa, unidentified
MNIEMNQNINVGVDTGKFQLDIYIRPLDIYFTVTNDDKGISDAIKEIKKHKPERIVIEATGRLEMPFIIACAKANLPFVIANPNPIHIKRFAGAIGQRAKTDKLDAQLIAHYAEAIKPKLSSLKPDTMQSMSDLVARRNQLLVMQTMEKNRMQILPKNLAMTIKPVLTVFKNQIDKIENKIVSLIESCSDYQAKNIILQSMKGIGKIASASIISNLPELGYISSKQASALVGVAPMNRESGRYKGHRKIQGGRHQVRTVLYMAMMSAIQSNPVFKETYQRLVAAGKPKKVAIIACIRKMVVILNSMLRDGVMWEAPKAIN

SEQ ID NO: 187800 - protein, 334 aa, unidentified
MHESTPIYVALDDSKRKVVVGILRPGQVDAELREMPKEPHLIRRLFQRLTREGSVRACYEAGVSGYDLYRQITACEVECQVIAPALTPRRAGQRIKTDWRDAGKLVRLFRAGELTPIHVPDEAEEAVRDLVRCREDAQRDVLRWRHRLLKFLDRHGRLYLTGKNWTHQHWVWIRSQHFDLPVLQRTFEATLFALEQALARVADLDKDVAAQAETERYRVAVGWLRCFRGIDTLSAMILVTEIVDFQRFHHPRELMAYLGLVPSEYSSGETSRRGAITKAGNSHARRALVEAAWHYRHHPSVSGVLRRRTADQPPHVVGQAPGAPNNGCIAATAI

SEQ ID NO: 187801 - protein, 325 aa, unidentified
MKNTQSQFTTVIGIDISKNKIDVADNQDSTVKTVGNNNKELTQWINSIADKTVTIVVMEATGGYESLLVELLHKHEIALAVVNPRRVCNFAIGIGRDAKTDPIDAGVLVRFGEVVKPSPQLVQSEEQIKLGVLVERRRQILDLISQEQNRSQQTRDIEIRKSIDTVLETLKKQLKTLDERIAQAVAADEANARKVEILNSVKGIGPVTISTIVAELPELGKLNRQKIAKLAGVAPINNDSGQSIGKRKTAGGRSGVRRTLYMATLVATRFNPRIKEFYQRLLAKGKVKKVALTAAMRKLLTILNTLVSTDQLWIDPVAGSTKTAL

SEQ ID NO: 187802 - protein, 415 aa, unidentified
MAANLKLIGQRGIKEMNAVGIDVSKGKSTVAIMRPFGEVVAEPFEVSHTDVELRKLACFLEKLPGETRIVMEYTGSYWQPIAKVLHDSGLFVSVVNALLIYKYGNNSIRKGKTDKLDAVKIANYCLDRWTDLERYAPADQIRQTLKTCRRQYDQYIRLKVNLKNNLIALLDGTFPGLNTLFKSAPRDTDGHEKWIDFAAKFWHIECIYGSSEKAFTNQYQKWCARAGYRFSEEKAASIYAYAGSQVNTLPMTDAVKCLVTLAVSQLNTIIETISVIQHKMLSLAAQLPEYPVVMRMFGVGPVLGPQLMAEIGDVRRFDRKQSLVAFAGVDAPPCQSGTFESKNRHISKRGSPRLRKTLFQVMSTIIQHAPADDPVFQFLDRKRQEGKHYYVYMTAAANKFLRIYYGTVMAYLEKL

SEQ ID NO: 187803 - protein, 302 aa, unidentified
MPLQNADVTKLFIGIDIHKKSWSVSIRTELFDHKTFSTPPDPEGLYDYVIAHFPRHDVSITYEAGCCGFSVGRYFLGLGWQVTIVNPADVPRMDKQNYQKTDKIDSRNLCKQLKKNNLRAIHIPTEEQEQFRSLLRQRTNITKELRRVKSHIKGMLLFHGIKIPTNYDNANWTIEFKTWLSDVKWSSTCGTESMQSKLRTLDFFHTEYLSIGNLLRAHCRKYHNTDYYLLMSIPGIGGFLAAAILSECGDVRRFTNEKQFSSYIGVVPGIFNSGGSENNLGVTPRANTILRPYIIERAWIAI

SEQ ID NO: 187804 - protein, 348 aa, unidentified
MPAEYDAQYDGRQVVGIDLHRRRSVIVRMDSAGQRLDTVRIDNDPLALAAQIAKAGEHPQVVLEATYGWYWAVDVLHEAGAQVHLAHPLGVKGFAYRRVKNDVRDAADLADLLRMGRLPEAWVAPPPVRELRELIRHRAKLVAWRSGLKASVHAVLAKQGLHLGVSDLFGVGGRQLLAKAPLDAAYRLRVNALCRLIDAIDFELRAVAGPLRVGLAGHPGFRTVQAVPGVGPVLAGIFVAEIGDVHRFASPAHLSSWAGLTPRHRESDTMVRRGPITKQGSTLVRWAAVEAAQGARNAGWLTEARTRIAARRGRNIATVAVARKLLTLVYYGLRDGHIRALDQARPAA

SEQ ID NO: 187805 - protein, 462 aa, unidentified
MRKTKTKRPATLDNLAIVHPNAAGLDIGSREIWACVPAGRDEETVKWFNTFTPDWQALADWLVACGVDTVAMESTGVYWIPVFELLEARGLKVYLVNAWHLKHVPGRKSDYLDCQWIQKLPALGLLNGSFRPDAEMVALRGYLRHRAQLLEHRAPHILHMQKALQQMNLQLHHVLRDVTGTTGLAILRAIVAGERDPVRLAQLRNPACKSSEETIAQALTGSWKAEHLFVLQQSLELYDFYSQQVAACDAAIEKQYSARKPRWAGPDEAPDVPRVKPDSHSKNQPQLNVRAEIIRLTGVDLVAVEGISASLAQIILSETGADMSPWENDKHFGSWLGLAPHSDISGGKVLRSRTLKTSNRAGQAFRQAAASVTRSQSAFGARFAYRRKRAQLGPMQALVATAYKIARTVYYMLKHRVQYQDIGAVAYEKKQQERELAQLKKKAAKLGFTLTPHEPAPAGAAV

SEQ ID NO: 187806 - protein, 434 aa, unidentified
MKVVRKLALFDTTNKMTVAFDVSKKSLNYYSETKGKLSATSCREVQSIEDSIQNRTDTIRDALEQLKKYSSAEGFDGLHVVCESTGVYSESLLRIAHKQQCSTAYVSGEHVYKAKVIESNDTGKDDIKDPRVIFMLSRMGKEQQYRQLPAEYQQLRELNRIYDETERRCTEMKCEIHPLIKRLFCDYPMAKDFIYDIAGQSLMKHFRFNPYRIAAVGFKTFSTTVRRNAPRVQEKTLRRLYEAAQMSSYHSQSPQYIEILEMRLRYLYDDYQAADRRRSTIVQLIEQATIRLHNAAELMPQPDPRVFKLFRIGRILGETGPLKDFSNYRLLFKYSGMNLRKRESGQFKGRLKMSKKGRSCMRGVLGKMVFGLIRKKELYGPYYHRRKTEKIPGQKLIAMIERKLLRLFFALGRRKEAFDQQRFQCCESQFKLAA

SEQ ID NO: 187807 - protein, 362 aa, unidentified
MREVHKMQTYIGVDYHRGYSYMTAMDEKGKIYKQGRVANQLEAVKEFINQASANGNSAAVLEATRNWTVMHDWLEELVEEVHLAHPLKVKAIAEARIKTDKIDARVLAHLLRCDLLPEAYVPEKATRSARNVLRQRMFFVRVRTMIKNRIWHLVDRYPELANSIPCKELFSKQGLEWLKTVSVKEQDRDILNEDLSLYHALEERIRRSNELIEKLSRGNTKVKLLKTIPGIGEFFAVLISNEVDDISRFSSEKKFFSYIGIIPSTYSSGGRTFHGRLTKQGNKYLRWALVEAVSTAARCDSELGAYYRRLKARKGPNPAKIATARLLATIIYRVLKQQRPYYPGKTIGSKLPSVSPGGLNLC

SEQ ID NO: 187808 - protein, 351 aa, unidentified
MGIDLHKETHTAVLLDCWNRKLGEITFDNKPSEFSKLTRKVSRFVTEEKTAVYGLENAYGYGRALAVWLLEKGNMVKDVNTSLSYAQRKSVPMYQKSDSYDAEAVALVLINMLDRLPDAIPDDKYWTLSQLVNRRDNICTHQSRLKNQLHEQLCAAYPSYKQFFSDISRATALYFFREYPSPEHLCGKAAEALAEELRPVSHNNCSIKRAEKILNLIQSDGETQREHQESRDSITRSLVSDLEHYRVQLEEVEKAIEMMLLQFHCTLMTMPGIDVITAANMLSEIGDINRFPNANKLAKFAGIAPVNFSSAGKGKDMCPKQGNRRLQAIFYFMAIQMIQISTNGVPRNKIF

SEQ ID NO: 187809 - protein, 421 aa, unidentified
MKFKAQEKQNQLIENITVHHLVVGVDIAQEVHVARAVSFRGIALGTSLKFGNHLEGFNFLKCWIRDLLKSYKLQKVIVGMEPTGHYWLSLARWLDSQGIETVLVNPHLVKKNKENRDNTPSKSDHKDALVIADMIKNGYYSPVRFLAESYEELRILMANRETVTKRLNSAVNQIHRWVDIVFPELRQVFKILTCTSAIATLRLFPLPKEISRLSTEQVLAGWKQYVKRHAGVKRAEQLITLAKCSVGATHALHAYKLHLEQLLEEYDLAQRQLEQIEQEVHMILGRIPYAQKLLEIPGVNATSLAGILGEAGDLSAYAHGNALLRHAGLNLAEASSGKWRGKMVLSKRGRPRLRHFLYLVTMCMVMTNSEFRALHHYNVKEKKVKKMKSIMKLIGKVARMLVCLAKSGKTYDSTRIFLQAA

SEQ ID NO: 187810 - protein, 384 aa, unidentified
MNKHSMIFIGLDTHKEFHEVAYCEEQRGAVPVHYGRISSSKVSVKKLIRQFESKYPGATVHVVYEAGPCGYWIYRLITSLGHCCYVVAPSLIPKKPGERVKTDRRDALKLVRSLKSEDLTPIYVPEPEDEAVRDLSRAREVAMKDLKEAKYQLKALLLRNNIRHEGTANWSKKHLRWLTELILPHPAQQIVLQEQLQTIEERIRRLERLDNELTHHVHQWRYYPVVKAIQAMRGVRLLVAVGVVAELGDLHRFDHPRKLMAYLGLVPSEQSSGGKRHLGAITKAGNGRARRLLIEGAHSYRYPANVSTELQLRQEGLPKDIVDIAWKAQLRLCKRYQRMSNKGKHYNLIITAIAREMSAYIWAIAKEVVLTPVNPKLRLSRVPA

SEQ ID NO: 187811 - protein, 309 aa, unidentified
MTLHRNYLGCDIAKRFVDLFDPRAGKPWRLANERAPLEAFAAALDRRRDVVVLEATGSHDRLLRHVLAAHAIAHVRLNPMAARRFAQARGRLAKTDAIDARSLAEYGAAFRPEPDAPPCPRRERLTALARRRDQLVQARANELKHRADAFDPDVIADIEAVIALLDARIRDIETVIDRQLRANPTLAEQAGRLMSAPGVGPVTALTILAHMPELGSLSPKAAAALAGLAPINDDSGQRHRRRVIRGGRPRVRKALYMAALGAIRANHRFNAFYKALAARSGSKKLAIVAVARKLLIALNAMIRDSKAFA

SEQ ID NO: 187812 - protein, 338 aa, unidentified
MRYFVGIDLHSDSNYTGVIDKKDSRIFGKKLPNDLGAILKELKPFKKEIQGIVVESTYNWYWLVDGLQEAKYKVHLANPAAMQQYSGMKYTDDKWDSYWLAHMLRLGILPEGYIYPKEIRPIRDLLRKRTMLVQHRTAHVLSLQNMVNRNTGRKLKVNDAKRLSEEEISKQLADEHHIMAVQSDKAVIDFFNEQIERIEKVVLKEVKLRYPYKELVTVPGIGEILGITIMLETGDINRFPTVSDYSSYCRCVSSKKVSNGKKKGEGNKKNGNKYLAWAYVEAANFMRRYSTPAKSWHQRKASKTNQIVAIKALSNKIAKACYFIIKDQKSFDPKKLFQ

SEQ ID NO: 187813 - protein, 413 aa, unidentified
MQTLVERGCGLDVHQATVVACLLIVRKDGKVQKQMRTFGTTTRELLSLREWLLSEGCTHVAMESTGVYWKPVYAILEGGEGGLEIVVANAQHVKKVPGRKTDVKDAEWIADLLCHGLLRSSFVPPKPIRELRDLTRYRRKLVESQSAERNRLLKLLETANIKLASVATDVFGVSGRLMLEALVEGKATPQEMAELAKGRLRQKIDELGPALEGKLEEHHRFLLRLQLDRLEAAEKDLAVLEHRLQEKLKPYEAQLTLLDEIPGVDWTLAAVIIAEMGVDMSVFGSVSQLASWAGVCPGNNESAGKRKSSRIPKGNVYLKTALVEAANAAAKAKGTYLRDKFYRLKARRGYKRAAVAVAHKILVAIYHMFSHQVCYNELGDAYLDKRNKHHLTRNLVHRLERLGYTVTLEQKAA

SEQ ID NO: 187814 - protein, 310 aa, unidentified
MCETLYDGKYSTNKQYENSLEGFQKLEDEISKGDTSETIITMEATGIYHLQAAYYFSEKGYTVSVVNPLIIKRYSEMKMLRAKTDSVDARTIAEYGFHEKPWYFIQKDDGRDHIVQLLKQIDALHTMRTENKNRLHALQRIPHADTKALKIYQEIDTMLKRKEQEAEQRIDTIANELYADVYKRLLAIPGVGKRLASLILGFFGEFENFSNAKQVSSFIGLNPSANQSGVSVHGRGVISKKGNRYMRKIFYMAALSAKEYNKTCREQYNRLISNGKCKKVALVAVANKLARQIFAIVKNGMIYDPWYQKI

SEQ ID NO: 187815 - protein, 442 aa, unidentified
MVMPKPVLAVGVDPAKRVHRAVAVLFPDDVVLDVELPNAVQAVESLDDRLADLAVAHGAELVYGLEDHRRYGRLFSQVLAGRGRDVRVVNPLWTNRQRAFYGQDKDDAIDGRSIAAVVLRRREELPHAAEFSEIAQAIREAERTIQDLAEKRTQLINRLHLQLSDVYTAVYEEYFGRFPLPQDLAGHDAAMLGGLLLDLAGGRVGPHKAGKRLVAMREKAQGILDTSTELRQAPRTLALELKAELIRQLCDELLAIHARVTRLERMLRDQLLPATGQTITTIPGIGDILAAVIIGEIGCIDRFRSPAAFAVYNGTAPARNSTGGRNRHKARYDCNHRLKRAFWLAARSAVLHDALAKAYFERCKQRGLDYTECLKRVARRMSDMVHALLKSGRIYDRKILEQAIERRREQVAQSTLGRPTKAFPAPAAKNLGRPHCEDKRCG

SEQ ID NO: 187816 - protein, 371 aa, unidentified
MKKNSTTTQSPKRAAARDAGPNTIGMDLGDKTSRYCMLGAGGEKVSEGSVATTRKAMAQKFSGMPRCRVAIEVGTHSPWLSRLLSSLGFEVIVANARQVRLISESSRKNDRLDAQLLARLARVDPQLLRPIRHRSEQAQSDLMRIRVRAALVEARTGLVNSARGFAKALGERLPVCDTDSMGVEKLEGLPAALREGLRPLLEQVKSMTEQIHELDSTIEQIARTKYPETELLRQVSGVGTLIALTFVLTVEDRDRFQKSRDVGCYVGLRPKQSESGQSQPQLGISKEGDMYLRKMLVQAAHCILSRRGPDTDLKRWGLKLAERGGKNAKKRAIVAVARKLAVLLHRLWVGGEVYEPLRNSQAAGSSKKKVA

SEQ ID NO: 187817 - protein, 432 aa, unidentified
MDVVFPRCAGLDVHKKRITACRIVPDPTGQKAEGITELQPFGTMTRDLLALADWLTEASITHVAMESTGEYWKPVYNLLEDTFTVFLVNAAHVKNVPGRKTDKADARWLAKLMRFGLLQASFIPPKGQRDLRDLTRYRTKLVQERVREVNRVQGVLERANIKLASVIADIMGVSGRAMLEALIAGRADPATMAALAKRRMRSKIPVLEQALTGIVHDHHRQLLAMQLAHIDFLDEQIEALNAAIETSLKALSPAEPSREAQPLPLTFSRAVELLDTIPGIDQRGAEVIVAEIGIDMSRFETAPRLAAWAGVAPGNDESAGKQRSGKTRKGNRPLRAILTQLAHAAVRTKDTYLSALYQRLAVRRGKKRAIIAVAHSIMCSVFHMLSRNEVYRELGANYFDERRRQFTVDRLTRRIERLGYRVHLEPVAASAA

SEQ ID NO: 187818 - protein, 455 aa, unidentified
MAPRSKSNQRKSRPTSTPPLLHPHAAGIDVGAREVYVAVPPGADARPVRRFATFTQELLAVRDWLGQCGVTSVALESTGVYWIPLFQILERAGLEVVLVNARHCKNLPGRKTDVQDCQWLQYLHSVGLLRGSFRPTDQVCAVRTILRHRESLVAGAARCVNHLHKALTQMNIQFQHVISDITGVTGLAILEAILNGERDPVALARWKDHRIKASRDTLAKSLRGDWREEHLFTLRHNFELWKVHQQLIAACDAQIESMLGEFDTRADQDAVLAPARTTHKKPQKNEPQFLAREECWRVLGVDLTAVPGFQTPTVLVLLCELGPTFADKFATAKHFGSWLGLCPDNRITGGRVYSVKTREVKSRVAKALRLAAQNLGRAQNYFGDLYRRWKARLGAPKAITAMAHKLARVLWHLLKFKQPFDWKAFEKEEQKMKRKKLLRLQNLAAALNYQLTPLP

SEQ ID NO: 187819 - protein, 361 aa, unidentified
MKKIAYVGIDYHSKTLTCAVLIENEKDFYNTIRFKNNDKIIKKYMNKLSDKYDIKTCYEASCNGYCFQRKMQSWGFHCDVIAPSLIPKKPGDRRKNDFRDAQNLAQHYAHGMLAIVHPPTEEEESVRHLIRCRIAMKKNEKSVKQQINSLLLTQDLRWPKTKWTAQHRVWLSKLRLRDKHSQQVLDELIGLLDYLGSRVQYLDKEIEELAQSEIYAPSVKKLKAFKGIQTLTAMLLIAEITNFGRFPNPGALMAFLGLIPSEDSSDDVKKPGAITKAGNSRCRTQLIESVIHYIKKPTISIRMKNDLKQVDSHSANIAIKCMKRLHKRYWFLVMRGKNSNKAKTAIAREFVGFIWAMMQPV

SEQ ID NO: 187820 - protein, 329 aa, unidentified
MVFLGIDVSKGRLDCAVLAAEGGRPPGRRSFRNDAEGAERAATWTTQVSGAAAADTHVILEATAAYHEPAAHRLAALGMRVSIVNPAQVRSFAKGIGVLGKTDRIDAQLLARYGQLARPRAWVPPARALLDLQGLVARLDDIEADLRREGNRLEQARTRGCPDLVEQFLLASLAALKSSRETLRRAIAAHVAAHGELQADLERLLTIPAVGPKTAVRMLAMLRARGFDSARQAAAYLGLVPVERQSGKSVRGRPQLSRAGNPRLRAALYMAAVVGIRRNPDLKAQYERLLGRGKCKMAALSAAMRKLVHLCFGVLKGEGGYRAGAATPA

SEQ ID NO: 187821 - protein, 344 aa, unidentified
MGEVITIGLDIAKSVFQVHGVDGLGVVVIRKRVSRAKMLEFFAGLPRCLIGIEACPAAHHWARELQAIGHTVRLMPPSYVKAYLKRSKNDANDAAAICEAVTRPSMRFVAVKTKEQQAALMLHRARQLLVRQRTMLSNAIRGHLSELGIVSAKGRNGTDELLEIIGKDADSRIPLAARSVLKVLASQYVAIGVEIASISKSILAWHRACEPSRRLEEIPGIGPIVATALVAEISDWMAFSSGRGLAAWIGLVPKQHTTGGKDKLGSITKQGNRYLRWLLVNGAMAVIRYAQKHGTKKHPWLGQLMARRPTKVAAVALANKIARLTWAIMVRGDRYREPALMPAA

SEQ ID NO: 187822 - protein, 416 aa, unidentified
MNAVGIDVSSRKSTVAVLRPLGEVVCLPFDVTHDIAGLASLAEKLKAIDGETRVVMEHTGRYYEAVAKALHEAGFFVCAVNPLLIKEYGANSLRRVKTDKADAIKIARYALDNWADLRDFTPMDAIRYDLKTLNRQFQLASKQRTASANNLIALLEQSFPGIRKCFDSPVRSDGTQKWVDFAHSFWHVDCVRKQPFAAFCERYRKWCKRHAYLFKLSNAEEVYALAKRAVVLTPKAKVVKVLVQEAANQLISISRSVEVYRAEMDRLAAMLPEYPVVMAMYGVGKSYGPQLMAEIGDVRRFERKQALVAFAGIDPMPNQSGDKNVRSNKSSKRGSPYLRKTLFNVIRTYLQCAPQDEPVFQFLNRKRAEGKPFYVYMLAAANKFLRRYYAKLRDYFASLNPLQPVDPISATLKASL

SEQ ID NO: 187823 - protein, 352 aa, unidentified
MVVVGADVHKRTHTFVAVDDAGRKLGQLTVPATGVGHEKAMRWAHQEYELTALVWAIEDCRHLSARLERDLLSAGAQVVRVPPKMMAEHRRTARTRGKSDPIDALAVARAAAREPDLPVASHDAVSRELKLLVDRRETLVGQRTATINSLLWRVHELDPEHEVKPRSLDLVKHQNGLWEWLGGQSGIVAELARDELDDVIAATERINRMARRIEKLTETVAPRLVAMPGCGALTAAKLVGESAGVSRFHTDAQFARHAGVAPIPVWSGNTAGRVRMTRSGNRQLNAALHRIAVTQIRLPDSLGKAYYEKKKAEAMSNREALRCLKRRLARIVFNHLQADHQARVETCVSAAA

SEQ ID NO: 187824 - protein, 317 aa, unidentified
MEIHTLGIDLGKTVFHLVGLNVRGEVVLRKKCSRTQLLRFTASRHVQLIGMEACGGAHFLGRALREQGHGVRLIPAQYVKPYVKTNKSDYIDAEAIAEAVARPTMRFVPIKSDDQLDLQSLHRVRDRWVMRRTAVVNQIRGLLLERGITLRKGRCHLEAALPEILEDATTKLSGALRLLLAQLKLELDQLALRLEETDGLMQTIAQESEVCRRLDAISGIAPVTATALIAAIGNGAAFHRGREFAAWVGLVPREHSTGGKQKLLGISKRGNSYLRRLFVQGARGVLQFREKQSSGLSACGTTNIAGTSQCCRRSPGQ

SEQ ID NO: 187825 - protein, 357 aa, unidentified
MVKVQERADFSGKKIFVGMDVHSKNWNNAIYYEGQFLRSFHQPPKAEALVKLLKRDYPGAEYVCAYEAGFCGFWIQRELEMQGVKCIVVHAADVPQTDKRKHSKTDPNDSKGIGSALQAGLLKGIYVPDVVTEGNRKLIRYRQQVRKDLTRCRSRIKGLLHNIGIPLPSQFSIKNWSRAFIKWLQELQIEHQYIRYTLNSLVAQEAKLRAEILLLNKELKNLLQTDRYRKEGELLMGIPGIGTTTAITMLVEIGNIKRFSSFSEFNSFVGFYPSEYSSGEHERKGSIMPRHHRELRSLIVEAAWISVRLDPALTLAFGELKKRMTPKRAVISIARKLLNRIWHVWNKQEVYEKGLVA

SEQ ID NO: 187826 - protein, 439 aa, unidentified
MLLLCQHGDTAPWLVSSLVPLNLFEPRIAKRFEAGAEEDRAVAQALKLGCRLAPPSHLRLVKPNRIQRKIYRRKSAHTSMSPTPGVLEKPDASKERPINQNEKTKGNQKMNSICSSTDRVTVAVPVLGLDVAKKSVQAELRNSSNKVRFGFANNAKGFAQLARILKEHDVPKVWAGLEASGPYSQALALWLYAQGHRVSLLNPRRVKHYARSAGNRNKTDLLDAAVIADFVCAHQPVAWQPPTLEVAQLQALVRRREELSLMLQAEKNRLEGIAPNVRSSLEHVIATLSTEKARLEKLITQHVLSHQQLSRDHQLLCTIKGIGSLTAAILLAEMARPGQVERARQAAAHAGLVPRREESGTSVRRNRGLGKEGNRYLRKALYMPALVAIKYNAPLRHFASRLRAAGKPKMSIVCAIMRKLIHIAFGVLKHQKPFNPSLA

SEQ ID NO: 187827 - protein, 391 aa, unidentified
MINIGIDVGKFKHCATVLDDSTGEVLIKPFFLTNNRKGFDLLYSKTKQFIHRKHSVGMEDTGHYMINLTNYLLDKKFTVKYINPRATCLRRKGLGISAKNDRKDALLIAEMLSEKRFWRSISVRSIENSKFRDITRLYHQLQEQQNQDMNRLQRALDIVFPEVNSLSWTRYSKAYMKFLSTYPSASSIALEDIRILRKSLKTEGRGRQCKVTAEEIRELAKNSVGEDNISIDLEVTSIIAIINTREEQIRMLEKKIEEFSHKLNSPIISIPGISHISGMTILAEIGDINQFQNTGNLISFAGMDPLVYQSGKYDAAHMPISKHGSRYMRKALYQAVFTVCKYSPTFHDYYTKKRNQGKSHRCAQGHCARKLLRVIYKLLSTNSLYDQNHIQ

SEQ ID NO: 187828 - protein, 329 aa, unidentified
MSDHPPTPTILGCDVSSTEIVMACANTTQAVQTIANNRKAITAWLRLLPKEALIGMEATGRYHDVLADCAAQHGHRVYVINPKQLALYAKGVGQRGKTDPLDARVIARYVAREGDRLHPYTVPTPTQRRLRDLLSQRAGVVKHCGAIQQCLRATQSKGCAPLKRAHRNALRGLHALIAEIDSQLKAGVQADAALEQKRARLQTITGIGLLNSLALTHRFHRTPFANSDAVVAAYGMDPRPKDSGNKVGQRRLTKQGNAEDRRLIYLAAQSAAKTKTFRPLYLALRAKGFATTEAIVILARKLLRIAFAVWTSNKPFDPTKIGFQGCMKP

SEQ ID NO: 187829 - protein, 466 aa, unidentified
MPHNRQRARAPRHASPSVIDRLQVDVAGIDCGATTHYVAVPPDRDAQPIQSFPTFTGDLQRLATWLTACRVKSVAMEATGVYWIPIYELLEARGFEVLLVNARHLKNVPGRKSDVADCEWLRELHSVGLLRGSFRPTAAIVALRAYLRHRQTLVDSAGVFTQRMQKALVQMNLQLPVVVSDITGVTGMRILRAIVAGERDAHRLAEHRDHRCRASKAEIAAALTGHYRPEHLLVLQQNLALFDACQQQIEACDETIQTHLAALTAAVTPPATPAPAPRVTQKPRDNTPPFEIRVPLHHLTGGCDLTQIDGIAPYTALKLVAELGTDMSRWPTDKHFTSWLTLAPHNKISGGRLLSARTPRSANRAAAALRLAVMGLSRTQTALGAFYRRLAARIGKPQAVTATARKLAILVYRALKGQLQYRDTGADTYDQQQRTRLLKSLRKRAATLGFDLVNQDTGEVLSRATT

SEQ ID NO: 187830 - protein, 310 aa, unidentified
MSQEQRIVIGGVDTHKDVHVAAVIDDRGKILDTSSFETTTAGYRQLLSWLRSYGDLQRVGVEGTGSYGAGLAHHLAAAGVEVVEVNRPNRQLRRRRGKSDPVDAEAAARAVLNGEATIVPKAGASLVESIRVLRVAFTSARNSRTRVALQIRDPIVTAPDQLRSVLGPLSTKERVTRCARYRVCGDLADPTEANRRALRTLARRYLALSEEMDELKRSLDDLTARANPALRAMKGVGPDVAAILLVAAGDNPERLRNEASFAAMCGVSPVEASSGMTVRHRLNHSGNRQANHALWRITTNRIITDAETRA

SEQ ID NO: 187831 - protein, 436 aa, unidentified
MWLLLEEHAQQNLRTLDTPSGPFPEGAVDVVHARCCGLDIHKKLVVACLITPGQGTTPQKEIRTFGTMTDDLLGLGDWLAGAGCTHVAMESTSVYWKPIYNLLEGSFELLLVNARHIKAVPGRKTDVRDCEWIADLLRHGLLRPSFVPDREQRELRDLTRYRLALVRERSSEINRLAKTLEGANIKLGSVATDILGKSGREILTELAAGATDPAALADLARGKLRAKLPELERALVGRFGAHHRFLVAQQLSHIDYLDEVIARLSAEIAERLRPFEDELARLDAINGVGRMTAEVIVAELGTDMSRFPSDRHAASWAALCPGNHESAGKRQSGKTRKGNRYLRTALVEAAQAAGRSRNTYLSAQYHRLAARRGKKKAAVAVAHTILVIAYHLLARSTTYTDLGPDHFDRRDAAATERQLVKRLERLGNKVSIEKVA

SEQ ID NO: 187832 - protein, 337 aa, unidentified
MDRRYVGIDLHRRRSVIYAMGAEGEKLFCERIDNDSLRLLEVVSAAGERAEVVIEATYGWYWAVDLLRDAGFSVHLAHPSGNDWGKRRVKNDERDARDLADLLRLGRLAEAWIAPPAVREARELVRYRARLVQLRSGLKAQVHAVMAKEGVLPGATDMFGPKGQALLDAMELADAYQVRVESLRDLIDGYDREVDMLERRIHELLRDDRGYQAIQALDGVGRTLGAIFVTEIGDIHRFRSPEALCSWAGLTPRHRESDTKVVRGKITKQGSKLVRWAALEAIVRYHGGPPLRDGFHRIAERRGTNKARIATARRLMTLIYYGLRDGEIRCLQQRAVA

SEQ ID NO: 187833 - protein, 342 aa, unidentified
MPVMIGVDPHKASHTAAALDEHGQLLDQLRIPATLDGYQALRQWAGRWPHRCWAVEGAHGIGRALAQRLVGDGEPVLDVPAKLAARVRVLSTGHGRKSDPDDAIAVAITARSVSSLRQVGVEDQVSVLHLLTKRRQDLVAMRTQTINRLHRLLMDLVPGGARRNLTAKRAAALLATVTPAGAPAVTRYQLAAELIADIRQLEQRIAAVEARIKAAVAQANTALVELFGVGPVLAATFLGEVGDIGRFPTKHHFAAHTGTAPLEASSGQVVRHRLSRAGDRKLNHALYMMAMVQVRRPSAGQTYYQRKLAEGKAPKEALRCLKRRLSDAVYRCLVADRQSHMD

SEQ ID NO: 187834 - protein, 420 aa, unidentified
MYKDTMPQELSAFRKEWRMWYAGIDWADTHHDALVIDESGQQVSSLRVSHTPEGVSHLISFLSSMVPTKEQMACIIETNHGLLIAALLEAGFAVYPVNPKTVDRRRGASGAKTDAIDAYVLAKTGRADLADLRQLKPDSPVVAELKALTRDQDALIQSQTRLVNQLTACLKAYYPVALQLFTKLHQACTLKFLHTYPTPQAAHAASVEQITSLLKAARHPTPVKTAQHIWHTLQQPQLQADAITTRTKARLMLALIAQLSPLIEQIAAYDKEISTLFLTHADQEVFRSLPGAGKRLAPRLLVAWGDDRERYSDANSVQALAGTSPVAYESGNYSKPHKRSACIKPLRNALQQFAWQSTKQEAWALAYYQRKRTEGKSHSMALRALANVWVRILYAMWLNHTCYDGATFEAAQRAHAQLAA

SEQ ID NO: 187835 - protein, 357 aa, unidentified
MKIVGCDLHARQQSIAMLDTESGELVEKILLHEGNGVRQFYAALEGPVLVGLEATGSMQWFLELLEELGIEYQVGHPAKIRAAETRKQKHDRRDARLILDMLSQDRFPAIWMPSTEQRDLRTLLRDRHQWVKMRSRLQHTLQAIALNHGLRKGTALWSHAGQTAMRAMPLPSYTSQRRDELLALYAQLQKRIQELDKKVEALARQRPQASRLMTHPGVGPVTALASEVFLGDPSRFATGRQVASYIGMIPCEHSSGKRQRLGKMTKQGNSLLRYLWTEATLHAVGKDAELKRLYRRKLIQKGMGKARIAAARKLGIRLWIMLRDQIDYEEFCRRGKLRQSGEAHAGMPDFNSGPAQQ

SEQ ID NO: 187836 - protein, 361 aa, unidentified
MLFDKALPNVEAKLRALIGKLKQHGQVLFVVDQPATIGALPIAVAQSEQVLVGYLPGLAMRRIADLHAGEAKTDARDAAIIAQAARTLPHALRSLQLADDQVAELSMLCGFDDDVVGQITATNNRIRGLLTQIHPALERVLGPHLDHPAVLDLLQRYPSPAAMKAAGTLRFGNRLTKLAPRMGRRLTDEITRALGEQTVVVTGTNAASTVLPRLAEQLAALRRQRAEIAVEVERLVEAHPLQPVLISMRGVGIRTAARLLTEVSGKDFATAGHLAAYAGLAPVTRRSGSFIRGEHPSRRGNKILKRALFLSAFAALRDPVSLAYYDRKIAQCKRHNQALIALARRRCDVLYAMLRDGDGAH

SEQ ID NO: 187837 - protein, 423 aa, unidentified
MKPQSNPSFTACVGIDWADKKHDFCLQAAGSDQRVFGTIDHSPESIMQWLCSLHERFGGPIAICLELAKGPLVYVLQRYDFIVIFPVHPSTLAKYRDAFVPSHAKDDPTDAEMALDIMLRHPDKLQPLKLQSVAMRTLTALVEERRDLIDSVVGLTNRLTSNLKQYYPQALDWFEHRDTLIFCDFLSHWPTLKHVKRARRSTLESFFREHKANRTYLVEERIQGIRAATALTEDESVIRPNQMAVQAMVEQLRVLLQAIGRFDAEIDAVGKAMPDYGLFAALPGAGHILAPRLLVAFGEDRDRYTNAAQIQSYSGVAPVVERSGNKCWVHWRIACPTFLRQTFVEWAGSTIPRSYWAEAYYRQQRAKGCSHRVAVRALAFKWIRIIYRCWKTRTPYDESVYLKSLKRRGSPLLASVAEAAKMI

SEQ ID NO: 187838 - protein, 402 aa, unidentified
MAAVMIGIDPHKSTHTAVAIDTAETQLGTIRIRASASQASTLVEWAADWPDRTWAVEGARGLGHLLAQQLLAAGEQVIDVQPKLGARVRLLTSGTPGKSDPNDARSVAVAALRSPACQPAVADDHAVVLRVWSRRHRQLSRLRSQAASRLHAVLCELIPGGVARNITANRAAAILAAHHGAGVIEQAWHDLAEEHVADLRRLDTQLKDARTNITAAVKASGTTLTEVFGVGPVVAATVIGDVADPARFTTADRFASCNGTAPVEVSSGPRKIYRLSTRGNRRLNHAIHMAAVTQIAHKHSDGHAYYQRKLKEGKTPAEARRALKRKISNAIYARLKADARRTSDAARKGPGGQPGNDTESSAAGSHPARQLFGPATPGPATTLRPPAPASRKKTPARPRQTT

SEQ ID NO: 187839 - protein, 391 aa, unidentified
MVCVGIDVAKDKHDCCILDSEGTTLVDCFTIPNNMDGFKSLLQTIQDCSQKSDKIKVGLEATGHYSYNILGFLLDNDLPVYVMNPLHTNLYRKSLSLRKTKTDRVDAKTIATMLLSDVDLKSYTDTAYHNEELKSLTRYRFDKVQERAKLKQSVSRLVTILFPELEQLVSSIHGTSIYALLSEYPGAKQISEAHLTRLANILVKTSRGHYRKDKATHIRDAARISIGSVMPAKSLELKHTIKLIQELTSEINEIEDAIRKIMDELKPPILSIPGMGFHSAAMILAEVGDFSNFNSPDKVLAYAGCSPSTYQSGKLTNCYAHMEKRGSRYLRYALYTATKYVCYWNPVFTECLTKKQAEGKHYNVALSHATKKLVRLIYALQKSGKAYLAVT

SEQ ID NO: 187840 - protein, 411 aa, unidentified
MSQMLVGVDVSLKSHHVHFMKGDGSTLADFSVSNDQNGAETLIKRILEAAEKSQANEIKIGMEATDLYSWHLAHYLQDQMKGYEPKYQAFIYVLNARKVARFKKGYDSLVKNDRIDAWVIADHLRFGRLPAQMKDAIQYEALQRLTRTRFHFMREIARNKTYFLNQLFLKFSGLRQDNPFSDKFGATSMAVMEELEPETIAEMSLEELVDFLQDKGKNRFEKPEEIAKYLQKLARSSYRLNKAMQDPVNISMSVTLSTIQHIESQVKRLDKEISKLMIGIPQTLTSVKGIGDVYAAGLIAEIDDIKRFKDHHALAKYAGLVWNQNQSGEFESQETARMRTGNKYLRYYLIQAADKIRKYDSEYKAFYTKKYDEVPKHKHKRALVLTARKLVRLVFSLLRTNQLYTPTERRD

SEQ ID NO: 187841 - protein, 310 aa, unidentified
MQKSAHSIIAIDISKETLEVLSEKRSFSVSNAKDGLSKLLKHIATIDNPITVFEATGGYERALMEALANKAMPFARLNPARIRYFAKSEGVKAKTDPIDTRMILRFAQEKDIRADSQANPTRQKIADLLDRRNHLTATLAQEKNRLQNSSKTIHASIKRLSKILEKEITAIAKQIRKLVKSDAKLNEQVNIAQSVIGVGEITAWTILCCLVEIETLSRNKIVALTGIAPFNNDSGKSKKKRRIQEGRAKVRKCLYMATKTAANHNPVIKEYVDALRARGKPYKCAIVAGMRKLLLHLQSLLKKHNLALAS

SEQ ID NO: 187842 - protein, 383 aa, unidentified
MQPTLKQDCTLDAAVLAVSLELAKGSWKVALHDGRRAKPAVHSVAHEQAAGRLVEVVQLVEATKHKWRLGAATRVVVIYEAGQDGFWIERALAALGYEVKVVDPASLPVTRRARRAKTDRLDAIGLVLSLLAWLRGERDRMQVVRVPAVAAEAQRHGVRERGALQKEIGQHRDRIRKLLRTVGCWEEVKSDFAQRLARGAVVCHDDSELPAQLRTRLERECERLALAVGQLKTLEAALMEALPEAVRERIGRLMQIKGVGQVGATRLVLELFWRDFANRRQVGACVGLVPQPYDSGESRVDQGISKQGNRRVRALLIEMAWLWLRYQPDSALTQWFAYRTQGSGPSKRGKRIAIVAVARKLVIALWRYLEQGVIPEGAALKAA

SEQ ID NO: 187843 - protein, 312 aa, unidentified
MITQPEVFIGIDVSKKTLDVCGYPDKYKAQFSNDAAGHQQLLEAMRKVQPTLIVMEATGGLEFEATALLVTGELPVAVINPRNARDFAKAVGLLAKTDQVDAWALARFASAVRPEQREIKSEALRGLEEVLTRRRQLVDMVTAESNRKGQASAKMAKEIEEHISWLKQRIKNADLDLGNAVKASPAWKAKADVLISVPGIGSVATFTLLAELPELGTLDRREICALVGVCPFNRDSGTLRGKRSIWGGRTSVRAVLYMAALVATRYNPVIKQFYQKLLDAGKLKKVALVACMRKLLVILNSMVRNNTLWASC

SEQ ID NO: 187844 - protein, 367 aa, unidentified
MVVLSQVVDLHTLTPWQVVCSGHYHLEELTVKLYCGIDLHSNNHYLTLIDEDDRRVIEKRLPNDLAVTLKTLEPYRADITGIAVESTFNWYWIVDGLMDAGYCLKLVNTAKARQYDGLKHTDDRHDAFWLAHQMRLGILPTAYIYPKAERAVRDLLRVRRRLVRQRTTHVLSTQSTFWRHTAAKLPCKVIVGEKKAPWPQLPNAHDELGVEAHRAAIEVLTKQIERIERTVLKALKPRTDYQMLRTVSGIGEVIAWTIVLESGDLKRFKNVGHFASYARCVDSKRTSNEKKKGEGNVKNGNPYLAWAFFEAAHFATQFLPVARRFYEKKAAQRNPILAMKALSHKLARASFYIMRDQVPFDPARLFG

SEQ ID NO: 187845 - protein, 340 aa, unidentified
MDKLTTIAVDIAKRVFSVYWVDAQTGEIGAKTMSRAKFEEFMRTREVSRVVLEAGGSAHHWGRWLERQGHEVRLIAAQHVRPFVRTNKTDTGDARAIWEAASRPEVRWVTVKTEASQAVLGLHRMRRQLIDMRRMQSNQLKALLYEFGVVAPARVTAAQLEGWVAAGRVPQLIAGRLGEQIERIAQLKGEELALTKAITEHNAEDALAKRLVAVPGIGPLGASALSAELSSGAKGYGNGRQYAVCKGIAPRLSGTGGKVRAGAISKRGDPYIRTLLIHGARSVIAHQRRAKRLSPWLSGLLERRPLNVAVVALANKMARTAWALAAHERTYQANYGAQAA

SEQ ID NO: 187846 - protein, 413 aa, unidentified
MSINPNADVERVTAGVDWAKDDHAVCVAGDQGEVLERFTVRHDAAGLRQLAARLLRAGALQVGIERGDGPVVDTLLEAGLTVFVIPPGQVKNLRSRYGSAGNKDDRFDAYVLADAVRTDARRLRPMERDSDQTTALRSAVRARRDVVGHRVAAANQLRAHLQIVFPGSAALFAEIDSEITLAFLSRFTTQEQADWLSPKRLAAWLKSVGYSGRTDPAVLHARLLAAPRGNAGPHAGALAAVTLALVAVLRVLNTQIQALAVSIEAQLAAHPDAAIFQSLPRSGTLRAARLLAEIGDARGRFPTRDSLTCLAGVAPSTRQSGKVKAVTFRWGADKQLRDALCDFAGDSRRASPWAADLYDRAIARGCDHPHAVRILARAWAHVIWRCWQDHTPYDPAAHNSLQAILKRDQPSPA

SEQ ID NO: 187847 - protein, 348 aa, unidentified
MKHYAGLDVSVKETSVCIVDESGKLCRERKVASQPEDLVAILSDPSFSLERVGVEAGPLSQWLFEGLARAGLPICCIETRHTKAFLDALQQNKSDRNDARGIAHMMRVGLFKDVHVKTLTSQKRRALLTARSLLQEKAIDLENEMRGLLRNFGLKVGHASGGTFERRILELVEHDSELAEIMEPLLAGRRKLREGLAKLEKKVLAEARRDEVCRRLMTVPGVGPIVSLAYVSTIDIPSRFRHSRSVGAILGLTPVLKQSGEVSRVGHVSLRGDAMMRRLLYEAAQSMMTRVVKWCWLKAWAMNIAKRHGSKKAKVALARRLAVVMHRMWVDGTEFRWTREDTVSTVAA

SEQ ID NO: 187848 - protein, 313 aa, unidentified
MYYIGIDMSKDNFHAAFSDERVLVFKNSGSGIKEFTEALTERDYGKHNTIIGTEATGVYHLLLSEMLRSEDWNIKVINPLVTHKVITSTLRRLKTDKHDAIAIRQSLMTGAGYTYTDTPEVLALKTLVQEREALVKIRSSIKQRIHVHKLKERASGLKIRGSFTQTLKIISYEIKELERQMVKYLPLIQKLLRTIPGVGVIAAGSLVAYIGDIKRFECAEKLVAYIGLDPRVHESGTSIKGKGFISKRGNRYLRHILFNASFVARYRNSEMKKYYLKKKAEGKHHFSVLCAIERKLIHLIYAIWKRGTPFEVR

SEQ ID NO: 187849 - protein, 360 aa, unidentified
MTTTTTQTATAADTILALDLGKYKSVACVYRAADDLRFTTVTSSRQELGRLIDTCQPAIVLFEACLLAGWVRDLCADKGVKCLVANTTSEAWKFKHLKRKTDRDDALRLAEVYRLGKFPAVALPEKEVREKRGLIEARQKLVGRRVALQNRVRAILVSQGLPAPRGARAWAAPGLAGIAAYARPIGECGPLELWRGRLHLALAELGHVKGLLGQAEKKLDDMGKADERMKLLDTIPGVGPRTAEAVVAFLPAPERFRTAKQVSAYGGLVPRQYQSADTDHRGRITKRGPRTLRKLLVECAWVMLRYNRWARSVYERLTHGGRSRKKQAIVAVARKLLVRCWAMLRDGTAWRAGPAGAVAR

SEQ ID NO: 187850 - protein, 301 aa, unidentified
MFFGIDVSKNSVDVASSCGILSMNRANPEQAAEKIASYEGPHLVVVEATGGYERPIVEALRRKNIPVSIVNPRRIHHFAEALGQPAKTDSLDAVVMAKFAQVMTPSPTPEPDPTTQKLKDLMTRRAQINGLLTAEKNRLKQAHDDDIINSVEQIIAVLTVQLKDLTKKAEALVKNRPVTKALKEIKGVGSICAAGILAFLPELGTYNRKQIAALAGVAPFTRQSGQWVGKSFCSGGRSQVRAFLYMAALVASRHNPDIKAFYTRLRTSGKPAKLALTACMRKLLTHLNSIARNFITTPKSS

SEQ ID NO: 187851 - protein, 373 aa, unidentified
MSDYSAFVGLDVHKDTIAVAVADAGRTGEVRFWGEIANTPDAVASMLRKLGGRHPLMHFVYEAGPCGYGLHRQIMATQHHCEVVSPAQTPRKPGDRIKTDRRDAIILARLSRAGELTSVWVPDTIHEAMRDLIRLRQAMVKDLRAARQRTKSFLLRHGRVFKGTSWKRSHRIWLGNQSFAHPAQQIAFQSYLNAVDQAQARRDEVDVQLHHFTADWSMAPVVEALQALRGVAFITAVTVVCEVGDIRRFAKPRQLMAFLGLVPGERSSGETRRQGGITKAGNVLARAVLIEAAWSYRTPAKIGAQMMLRQEGIPQAAKDIGWNAQVRLCGRYRRLMARGKKSALAVTAVARELVGFIWAIAHIAEPTGAEGVA

SEQ ID NO: 187852 - protein, 415 aa, unidentified
MIYVGIDWADESHRVFITDDSAQRLDSFSIENSRSGVEELFERVRHFAKDPKQVLFALETSKGLLISSILDAGYTVYPINPKSVDRYRDRYKVSGHKTDDFDAMVLANILRTDRHNHREILPDSPLTTELKILTREYSQLVRIKTIFINQLTSCLKEYYPVAVELFCKLDQHLTLAFLRTFPTVEDAKKASLQKLCKFLSKNHYPGVAEKANEIHQKLKEPQFQVEPYIANAKSQFMLTLVNQLQLLLPQIESFKKKIEQLLTQHPDREIFNSLPGAGVILSAKMISEFGDNRQRYKNVSSVQAEAGTAPVTESSGNTKFVHFRKGCRKSFRNTLHQFAVCSIKESSWAHQRYQQYIASGKKHTHAIRCLANAWLEIIFPMWKNHTPYSEQQHLLKYVKEQKSVEYRRDFNYLAA

SEQ ID NO: 187853 - protein, 326 aa, unidentified
MQGKKVPERMTDPESSVGIDVCKDWLDAHCLPADHGLRVANSPEGIRKLKRWLRRQPAGLVAVEATGKWHRALHRSLHDGGIRVAVVDPFRLRMFAKAHGILAKTDKLDARVLAMFAAMMDPAVRPPAPPSLQILQELVRGRASAVADRTALQNQRAAAQTPFLRRQLDRRIARLDKDIAAIEMEIEQYIADQPDLAWRQRILLSVPGIGPIVAATLLACLPEIGTISAKQVTALAGLAPVPDDSGERQGYRRIKGGRRIVRDTLYLAALSAARCNADLRAFYQRKLDEGKAKKVALIAVARKLLLLVGSLISDNRLWTPQSPKSA

SEQ ID NO: 187854 - protein, 391 aa, unidentified
MIYVGIDVAKDKHDCFITNSDGEVLFKPFTITNNLDGFNELYQKIESVTEDATKVKVGLEATGHYSYNLLGYLIDKGLAAYVINPLHTNLYRKSLSLRQTKTDKVDARTIASMLMSDVNLKSYSDISYHNEELKSLTRYRFDKAKERAKLKSSVSRLVCILFPELEKLVPTLHMASVYSMLSEFPGAKHVASAHLTRLTNLLSEASKGRYSKDTAITFREAARASIGSNMPAKSLELKHTIKLIQELDSEIDEIENEIKVIMDEINSPILSIPGINYRMGAMIIAEIGDFSRFDSPDKILAYAGFSPSTYQSGQLDGAYAHMEKRGSRYLRYALYNAAKYVCHWDPTFAGYLAKKRAEGKHYNVAISHAVKKLVRVIYHLEKTKQQYIKVA

SEQ ID NO: 187855 - protein, 457 aa, unidentified
MAERENQTRSTDELDGFPVVRRDVAAIDVGSEQHWVCAPTRSGAGREVAVFAATTPGVEQLIAWLHERRVMSVALESTGVYWIVPHEMLERAGFAVQLVDTRELSRVPGRPKSDRLDCEWIQRLHSCGLLRGAFRPGEQVCMLRTLVRDKGRLVAEQGDWLRRMQKSLDQMNVRVHRAVADLEGATGMAIVRAIGAGERNPQRLAQLRDVRCQKSEAEIAEQLTGHWREDHLFSLEQGLKMYDAIAERIQAYEREILRYLAAITPADRHDDQAPPPPGPKARTMRRRGQDPLRQALYRMSGADLTTIDAIGVETVSVVMSEYGPDLARFTEKQFVQHVGLAPHRPTSGGKPVKKRKKPASATARVGAALRMAATSMRRSQTALGAYYRRTAQRLGSDVAVFATARKLAQYIYRLLRWGHPYVDEGVAAYEKRYQAARLKGLAISAKRLGYALVSVET

SEQ ID NO: 187856 - protein, 411 aa, unidentified
MPKIVYPICCGIDVHKSFVVACIAVTDEKLVTTYSKTKRFSTFTNDLRRLADWLNQQNCRDVCMESTGKYWIPVWNVLEPTCNLVLAHPKYTKAIKGKKTDKRDAKWIADCFKHDLINGSFIPPEEIRQLRDLVRYHTKLTSYTTGEKNRAQNCLTVSNIKLDDVFSNVFGKAASAITARLLENNKPFDVTPYLTKNLKASPEEIQAAVDGVMCANQAEKLRIIRSHMDSLALCKANLESEILSVAEKFLPQINLVTTVPGIKTFAAVATIGEIGVDMSVFETSRHLCSWAGLTPQNDQSAGKKKTTRISRAGAYIKPLLVQCALAAIKSNMHPEVRNRYNAIKKRRGHKKAIIAIARMLLTAIYNILKKNEPYNAELYRLSDKPPVQREVSVEQAIFILQRQGYLVTAST

SEQ ID NO: 187857 - protein, 433 aa, unidentified
MSQQQESKPPSGGVEEPEFAAFIAIDWADQKHVWALQMAGSDQREQGEIEHGPEAVDAWMQTLLQRFGGRPLAVCLEQARGALLYLLMKYPNLVLYPIHPAAVKRFRAALYPSGTKNDPLDAALQLELLVHHRPRLRAWKPDTVETRMLQILVEYRRQLVDQRTAESNRLTQVLKLYYPQALDWFDHPASALVGAFLKRWPTLQSARKARAQTLRDFFHQHNCRNQELIQQRIQRIGQATPATSDPALLRTCVLQVKHLLQSLAGLRHSIAELDKEIRSVSRNHPDFPVFDSFPGAGEALGPRFIAAFGTQRERFSSATDVQSFSGIAPVTERSGKTERVHFRWACPKFVRQTFHEWASHSIGFCDWARAYYLQQRDKGAEHHAAVRSLAAKWIRIAYRCWKDRTLYNQQLYLDALRRHGSPLVAKIASSQRC

SEQ ID NO: 187858 - protein, 407 aa, unidentified
MSAVMIGIDPHKGSHTAVAIGAAEEPLGDLRVRASAAQAGLLVAWAAAWPERTWAVEGAGGLGHLLAQQLVAAGERVLDVPPKLAARVRLLQAGDTNKNDPNDALPVAVAALRSKARRPVAAEDHAAVLKVWAKRHRDLARARNQVACRLHAVLCDLLAGGVSKEITAAHAARILEQVTPSGPVAAARRELAGQFLEDLRGLDAQLRETKKKLAAAVRASGTSLTEVFGFGPASTGTVIGDVTDVTRFPSRDHFASYNGTAPAGVSSGNRKTCRLSLRGNRRINHALHMAAITQIRHRHSDGRGYYDRKIAEGKTRKEALRCLKRKISDAVFARLQADARQATATAAAKGPGGQPGNDSDSSAAGLHPEHRLFGQATPEPGPTLRPATQPREPRPPKPAAKKTRPNP

SEQ ID NO: 187859 - protein, 457 aa, unidentified
MNNFYLGIDVSKGYADFIIINHSKKPVMKRFQLDDSFDGHSQLYQIIKSFCNQNPGCRIMAGVESSGGYENNWYQTLFNFQNFFDLRVAHLNPLAVCHSRSADLKRTITDAVSAISIAEYLISHPEKVTYQKQLNPLQSHSKQLGFIIMLEKQYTLFRNQFESIIYGANPTIMAYCKDGMPEWVLKLLIKFPTAKQLSRVKPHTVAKIPYITKERALELISDAKKSIASSTDDMTGDLIKAYAQQMLNLKSTIKIQKKALEKSCDIPEVKLLQTVNGIGAFSAVALMIYIQNVERFQSAKKISSFYGLHPVFKQSGDGTSRIQMSKQGQKNVRRILFMVTLNAIQSNPLIHEIYESKVSGGMEKMAAIGLCMHKLLRIIYGMLKTNKPFDPEIDRCNRQKSIEADKGIKEDKNRRLQDYDPKAPISRRQYLKRVERKKSQSDNITKCRIIASVPETT

SEQ ID NO: 187860 - protein, 327 aa, unidentified
MSDRQVVYVGIDVSKDSLSVDAGALFKGDVPNTPASIRGLIRKIGKQAGDGSVPHFCFESTGPYSESLFIECCEAGAAASVLNPAKVRHYAQAMSESAKTDPIDARVIRLFAEARNPEPTPAPSAAAVTLRKLVLARDALTKSIVQLSGTLEGASSGDAGSVLKSSVFLLRKKIKTLDRLIAEALKGDARLSGLAGALTEIAGVGVLTAAKVVALVPELGTLGRRRSAAIAGLAPFTRDSGRCKGKTFISGGRAEVRRALFMPATVAIKHNPVLKAVYQNLMKEGKAYKVAITAIMRRLFAHMEAVAAKWLRETAAAASSTPSTALP

SEQ ID NO: 187861 - protein, 342 aa, unidentified
MYYVGIDYHLEIAVVCITDGHGKEWKLVELPATPEGMDVLINIMKGKKYRVLGEAFTFSIDLHNYLIGRGITSDLVRPTDLVAITKCNKKTDKHDSRTIAWYLRLMDKGEIDLTPSLILRDEQRVFRDLCRLREDVADNLSVISQRMRSHMRINSEYLPVEIFGDRPDLGTKRVQQFVITEFGDDFTFQELLRQQAFYVERGKAIEKELEKCQYDTKAVELLMTIPGIGKLSAMELMSMIVDIKRFPDADSMRSYFGMAPRVRDSGETIHHGRITKQGDPMMRKILERAVSSHMRWCKESKISKMYNSVKTRSAGGVAMMAAANKLLDIIHSILVNQRPFYS

SEQ ID NO: 187862 - protein, 412 aa, unidentified
MELYRERVCGIDIGKAAVAACVRIDKGLGVKPSLVTRTFSTTTAGLLLLLDWLKAQRVQLVGMESTGVYWKRPFYLLEDHFEVWLLNPKHIKIVPGRKSDVKDAQWLAELTAYGLVQPSFVPPRPIRGLRDTTRYRTALVRERTREIQRLHKVLEEAGIKLSLVASDINGASGTAMLQALIDGQSDPGVLADLAKGSLRDKIPQLVEALTGDFTKLHGLMCKRMMQRIRELDRAIADIEIQIQVQLLPYEQQARRLRTIPGVGEHVAPVIIAEMGIDMDQFPSAAHVASWAGLCPGLNESAGRRKSSATRKGSPHLRGALGEAAWAAAHTKNTYLADSHRRISKRRGPRKGVVATSRKIAEAAYYVLKNDVDYQDLGADYLAHRKNPQRRAKQLLHELTRLGYEVQAVPPAA

SEQ ID NO: 187863 - protein, 336 aa, unidentified
MSHYCGIDLHSNNHVVVVIDEEDKRVFEKRISNDLSLTLKALSPYQESLQGIAVESTFNWYWLVDGLQEHGYDLRLVNTAAVKQYDGLKYSGDHHDAFHLAHLMRLGILPTGYIYPKEQRAIRDLLRRRLALVRTASTQLISVQSQIWRSTGTRFSSAELRKPDFVPPQLDNYTLQAVHAGLAVYQTVQREIDALEKSAHQAVKLTDAFKILQTVTGIGKILGLTIMLETGTIERFAGPGNFASYCRCVDSKRTSNGKKKGEGNAKAGNKYLSWAFSEAAHFAVRFEPLAQRFYERKKARTNGIIAIRAVARKLARATWMMLKHQVPYDAKRMFPG

SEQ ID NO: 187864 - protein, 405 aa, unidentified
MEIFVGIDWAEAHHDICLLAETGTVLAKRRIAEGLEGVGQLHALLADHAAEPDQVAIGIETDRGLLVGALLAAGYQVYAINPLAASRYRERHATSGAKSDPGDAKMLADLVRTDRHNHRRVAGDSELAASLQVLARAHQNLIWSRQRLVNQLRNNLREYYPAALAAFGTDLAQPVPLGVLDAAPTPAMGRALSQSKLAAILRRAGRARGVEEKAAAIQAHLRAPQLAAPALVGAAYGKSVASTVRILREINAELASLEAALAPSFEKHPDAEIYRSLPGLGIVLGARVLSEFGDDRTRFAHPKARKNYAGSSPITKASGTRRVVLARLARNCRLADACHQWAFCALTRSTGARDYYRVLRLRGKTHHQALRALANRLVGILHGCLDHRQTYREDIAWPRSLTVAA

SEQ ID NO: 187865 - protein, 321 aa, unidentified
MSEFYLGIDVAKAKLDCALRFPDGKHRNKVVENNLKGFQILREWLLKHEAVMPHVCMEATGVYWEAVAEYLAGQGMKVSVMNPAQIKAFGHSRMVRTKTDKVDAQLIAAFCFERHPEPWQAPSPSEQALRAMVLRLEALQTMRTQETNRLEVAREAVKMDIAQHIEWLDAEIKRLGKKIRDHIHHDPDLRDKQVLLDSIPGMGERTIASFLAFYADINRFSNARQAAAFAGLDPRHHESGSSVKGKPRLSKVGHVFLRKMLYMPAIVTLYKTAWGKCFRERLEASAKAPKLIIGAMMRKLIHVAFGVLKSGQPFNPALHSA

SEQ ID NO: 187866 - protein, 352 aa, unidentified
MRTSQKAAGIIATIGIDIGKNTFHLVGLDKRGAIVLQQKVSRGQLERRLANIPRCLIGMEACSGAHHIGRQLAAVGHDVRLIPAQYVKPFLKGHKNDYRDAEAIAEAVQRPTMHFVAIKTPEQLDLLALHRVRSRLVGQRTGVINQIRGFLIERGITVRQGPMPLRKALAEILSSDTGVLSPRMVGLVTDLVQDWRRLDERIAAVSAEVEALAEQDDGCQRLMTVPGVGPIISSAVVAAIGNGTGFKQGRDFGAWLGLVPKQESTGDRTILGKISKRGNKYLRTLFVQAAHVVLARRPSAAMRGLWPWIEQASKRLHRNMLAIALANKLARIAWAVLARGRAYQPRITADAA

SEQ ID NO: 187867 - protein, 441 aa, unidentified
MSYATLATKRQFIEGKIIAGIDPAKKKHQVKILASNGVQIGKTFSFPHSYTGFHEILWKRMKKNLVDYNPGDIVFAVETSCDLWQNITSHLHGNGFIVLLVSPLTTYHARVMPNQDFSRSDPKDALVVASSAHSGYFNFYHELDEEVSARRALSIAYDKLRKDLNRNVQRVGSFVGRYFPEFLQILNLSTDTAKYLLSKYYLPHHFMDMDVETEARVIATISRSQHGMTTLKRLQELATNSIGIARAPEEEIADRLILDGWLAMINTVEEQMKTISHQLIHLAKKTPTFGILTSLRGVADTTASLFIAETNDPAGYDHYKQIEKLAGMNLTLRQSGQYKGARRISHLGNRRLSWIIYTMTKETAKYIPEVRIKYLKRQLKKPNYTKNVIASTSPLLQLIMALIKENRPYEYRKETQIVASRLGAEYQRAKARKKKRQVAVA

SEQ ID NO: 187868 - protein, 420 aa, unidentified
MIPAVTVRCAGIDVGRRFVDVCVMVGDAAAVPTEQQRKFSTLNEDLEKLRQWLHENGVTQAVMESTGSYWRPIHNVLDDGKLEVVLANPQHVKNLRGHKTDRNDARWLAHLLRHAMVRPSFIPDRETRQLRDLTRRRKQMVGCAADERNRVQRVLQEANVQLGVVLSDVFGESGLSMLDALMNPDASPEQIAELAVRQARKKIPELRKALEGHRMTDHHRKLIRHSMEHLAFLEEEIAELDGEIAEHVTAHQALREASELAQTVPGIRQTAAAAIIAETGPDMNQFPGPDKLASWLGTCPGNNITGGKRKSGHTRKGNPWARRILVECAWSATRKKDSEPKRFYERLKPRLKHKRALIATAHLLTVKLYQALATGKAYAADPQPELTETEAQRLVRHHTHRLKKLNRWLAGHRQRCVQTP

SEQ ID NO: 187869 - protein, 344 aa, unidentified
MNISRVGVDIAKSVFHVHGVNQHEKPQWRGKYSRAKWLEAISRRVPQGAVIGMEACASAHYWARELQTRGYQVKLIAAQFVKPYVKTNKNDRADAEAICEALGRPTMRFVAVKTVDQQDCQATHRIREELIHQRTAKANQIRGLVGEYGFIAPAGIQQLRRALPLWLEDATNGLSDRFRCLLAELANDLRYLDDRVEQLTTTIEEHANTDPVAKRLMTLRGIGPITASALSGVLGDGAIYKRGRDFAASLGLTPRQHSTGGRERLLGISKRGNSYLRKLLVHGARAVLRYAVKQDDGLSQWIKHLAVRKHRNVAIVALANKTARMAWAVTRYEAPYNPELAAAA

SEQ ID NO: 187870 - protein, 353 aa, unidentified
MTEYVGIDWAYRRAAWCAMSAGGVISAEGFTPADEDGLAKLVLRLGSDVKACLEMMSGAVWVRDRLRSAGWQVEVADARRVKGVAPLACKTDRVDARVLAELCRRDLVPALWIPSLEERELRERLRRRMHLVRLRTSAMNRIFGLGTQWGLRLSAERLRRRGALELLAQRGVPAVWQRSIQEALAVIDLLEARIAPLEAELAPIARADRDVALLVTIPGVGEMLALTLAAEIADVSRFPSPGKLVGYAGMAPGVKQSGQSSRSGLPLSKAGSRTLRWAAVEAAQHAWRESNPWHQLYSDVAKRSGKNAAKSAVARKVLIASWHMLSRCEPFKPSRPRGGARTVPASSISVLAA

SEQ ID NO: 187871 - protein, 409 aa, unidentified
MERLVDRVCGLDVHKQTVAACVRVPGRQGTREQQVRTFGTTAAELLVLRDWLEAHGVTDVAMESTGVYWKPIYYVLEERFACLLVNAAHIKQVPGRKTDVKDCMWIAQCLEHGLLRGSFVPPVPIRELRDLTRHRKVLIQDRTREANRLHKFLEDAGIKLASVATDVLGVSGRAMLEALIHGTTDPEVLAELARGKLRAKLPALRQALAGRFRPHHAFLVTQLLAHVDYLDNTIAALSERVEAAIAPFAEEVARLDTIHGVARRTAEVLIAELGIDMTQFPSERHLASWAGLCPGNNESAGKHKSGQTRRGNRWLRAALVEAALAAIRKPDSAFAARYRRVMRHRGHKKAVIAVAHAMLVTAYHLLARRTTYHELGADYFDRRHAERVTRRAIHMLEGQGYRVTLEPAA

SEQ ID NO: 187872 - protein, 350 aa, unidentified
MIIIGVDFHPEFQQIASVDTDTGEVQEKRLAHREEAEKFYRALAVQGRKVRVGMEASGHARWFERLVAELQFELWIGDATVIHAKRVRKQKTDRQDAQLILRLMLKDDFPQIWVPSWENRDLRQLLWHRHRMVQARTRIMNQLQAVALNEGLRCKKRLWREAGREQLEAFPLAPWASRRRRDLLALLDRLSPTIAELTQTIEQQAEKCPEAQRLRTHPGVGSLTALAFVLIIGQAERFQCGKQVASYLGLVPLEDSSGNRRRLGHITKQGSSILRFLLVEAAQVTVRSLPEWRSKYLHLMMRRGRKIAKVAMARRLAVQLFWMMRKGWDYEQVRKFGSHAGQPGNRHGVQ

SEQ ID NO: 187873 - protein, 336 aa, unidentified
MKFYAGIDLHSNNNYIGAIDEKGRVVFQKRNPNDLETIKSLEPFKKYIQGAVVESTFNWYWLVDGLMKEGYKIHLANTTAIQQYSGLKHGDDKSDALWLSEMLRLKILPEGYIYPKETRAVRDLIRRRMQLVQKRTAMLSLKGMINNCTGTRVSRAELRKLGNKDIEKLFERPCEVLSAQSLKEVTDVLNAQISKIEKAVLQKIKLKKEFKNILTVTGIGEILGLTIMLETGDMGRFRDVGDFSSYCRCVPSRRISNEKNKGKGNKKNGNRYLAWAFVEAAHYMQRFSPKAKSWFQRKAAKRGKIVATKALSNKIARACYYIMKNRIVYNPKKMFG

SEQ ID NO: 187874 - protein, 421 aa, unidentified
MTPPNEVVWAGIDTHTDTHTIALLDERGRPLGAETFTADPDGYDRLIGMPPGPGRVAAVGVEGTNSFGAALARRLTAAGYEVREVLRPRRSVRRRDGKSDPLDAVAAARSVMAGDGTSLPKSSDGWVEALRHLNAQRSQLVSAMTAISNSTNGLLAAAPEPIRERYRGLRSETRMNRLAECRPAGGLVERSVLAALKSAAKAWKALKRQAGLLEERMRLILEEHARPLLDMYCAGAVIAATLAIVAGDNPERIRSEAAFAKLCGVCPIPASSGRTNRHRLNKGGNRQGNMALHRIAIVRLRYHKPTRDYMAKKTREGKGKLEIIRCVKRFIAREAYRALISIRNGEVGRGTPAERGAKLRELRVSRNITQQQIGEALCVPSSRISEIERGARDLPELEQRAIQWIHSTTNPKQHTQTLDNV

SEQ ID NO: 187875 - protein, 427 aa, unidentified
MRSIALDVHRDFCEVAIKDESGLRLAGRVKSSVEQLERFAQSLAPDDEVALEATGPALAIARILEPHVGRVLIANTRKLSAIAESKVKTDKVDASTLCELLAAGFLPAVWSPDEFTRALRRRCQRRSKLVRSRTRSKNECHAVLQRNLKGRPPMSDVFGKGGREWLAALELPADESETLQCCLREVDFLDNEIGLIERELARQALSSEEIRRLMSVPGVSLVSAAAFVAATGDIHRFSSPKKLVSYLGLDPRVRQSGEGPARHGHISKQGSAEARHMLCEAAWVAVRTPGPLRAFHERVRARRGAQIALVASARKLGVLFWHLLTREEDYAFGRPSLTRRKLRALELKTREGWRRGRYSGPRVNESRKEREREAEFAEQMETAYRRLVADWQPKAPKSGAGATRGRASSKPSSGKQRGRASVPNSAL

SEQ ID NO: 187876 - protein, 467 aa, unidentified
MKNYDSAGWEPSSGHTCITRKAVVFIEMEWTPIRKEHQVMFEMFLSAGIDVGADFSYMSIALPNQSFVGKPVKITHADLKSLGRAAALIQESEEKYGLQTRIFLESTSIYHYSLANYFGVKGFHVSIINPIITKSSATVSIRKVENDKTASQKIALIGLKPDLKTSQLPGELVLNLRNLVREYYYLVDSRSAYITKLTAVLKIAFPRYIGIFSKMTVETSLVLLEKYTSPQAFLSARKSSVVKLIRTTSHSSQAYAEKQYDKIIQAAKDALIFGYPVPSNFELVRQYVSFIRKYNAEIDVMLMAIRKFVDDNPNEILVKQIHLIDSIRGAGLLSAATLMAEIGDFSVFGKPKQLFAYFGLDPSVKQSGNFIGTKNKMSKRGSAIARRAIHTIATASVRQTKSGAINPVLRQFYDEKCKSKPKLVALGAVSHKVCNIIFAILRDNKPFSVISKEEHITSYQAKLLSAK

SEQ ID NO: 187877 - protein, 423 aa, unidentified
MDAIFERCAGIDVHKKLIQVCLRVLQGREVRQESREFSTVTRALLELGDWLQSEGVTHVAMESTGVLWKPVYNLLEGRFTVLLCNAQHLKQVPGRKTDFKDCQWISQLLQCGLLRGSFVPSRPLRDLRDLTRERAQLVAEVTRVKNRVQKILQDANIKLSSVATDIFGASGRAILTAILQGSTDASDLANLARGRLRAKHNDLEDALWGAVSEHHRFMLETDLMHLRALERLVERLEHKIDETSASTALDEPASEGHPPIPFESSVELLDSIPGVNVTMAQTLLAEIGTNMKQFPTARHLASWAGMCPGNNESAGKRKSGKTTHGNPWLRRAITQAAWAASRQKGSYLRAQYHRIAKRRGNKRAIVAVANSMLVIIHHMLTNGTFYHELGDDYFEKRNREALTNYFVKRLQSLGHCVHIEAAA

SEQ ID NO: 187878 - protein, 378 aa, unidentified
MRKEPVVKQGTFVGLDTHAKKIVVAIRTPGAAKAIEFSSPTDGNSVRRLAKKLLRQAGGGELLCCYEAGPTGYALQRQLQSAGVPCIVVAPSLVPRKPGERIKTDRRDALKLAEYLEDGALTEVRPPTVEEESVRDLCRSREDAVEDRMRCRHRLGKFLLRRGIRWTEGKRAWSLAHRAWLRRLRFENEVDQVVLDDYLLALEQSEARVERLDESLETVAQGECYRERVGWLCCLRGVQTVTAMTILSELHGFERFTSPRQLMAYLGLVPSEQSSGERQSRGGITKTGNGHVRRMLIEAAWHSRHRPLISFHLRRRRHGQPAWAVALAEKAQTRLHDRYRKLTARGKNRNKVVVAIARELVGFVWAMLRPRARAAVAA

SEQ ID NO: 187879 - protein, 336 aa, unidentified
MLIIGCDLHTRFQQIAMVDTTTGEIVTRRLEHENCEARKFYAGLGQKARVGIEATGYTQWFERLMAELGHELWVGHPAEIRARAVRRQKTDTRDAEHLLDLLLSNRFPRIWIPSVEERDARQMLKHRDQLVRMRTSVKNQLHYLAMSQGVCRKRKLWTERGRQELESLRLGPWASRRRQELLELLDRLEPRLEELDQAVKAEAERHPAAVRLMEQKGVGPVTALAFVLTLGPVERFANSRKVVSYLGLNPSEHSSGGGQRLGHISKQGNQMLRWLLVEAGQSAVQHDPELRRRYQRLKFRRGANVAKVAMARRLAVLLYGKLRPGPDPAPAGSHAR

SEQ ID NO: 187880 - protein, 414 aa, unidentified
MEVVHPRCAGIDVSKRDAKVCIRVQGGNGRKSSSTVTTWGSMTNQILALRDHLAAQQVTVVIMESTSDYWRPFYYLLETDFQVLLVNAREVKNVPGRKSDVSDAAWLADLGAHGLLRASFVPPEPIRQLRDLTRTRTHIAAARTREVQRLEKLLESAGIKLSAVATDITGVSGRLMLQALIDSQGTADPAVMADLAKRRMRSKIPVLTEALNGYFTEHHAFMTRLFLDRIDAHTKDIELLSERIDGLMEPFLPARDLLESIPGFSQTVAEVFIAETGGDMTQFPTPEQLASWAGVSPGSNESAGRVKSTKTRPGNRYLKGALGVAALNQARSTSRKTYFSAKFRHLAPTRGPMKAIVAVEHGMLTAAWHMLTNGEFYRDPGADYYTRRDPARTKARAVRQLEALGYTVTIQQAG

SEQ ID NO: 187881 - protein, 344 aa, unidentified
MGRQLGEKTVKATTAGHATAIMWAREQFGLELIWGIEDCRNMSARLERDLLAAGQQVVRVPTKLMAQTRKSARSRGKSDPIDALAVARAVLRETDLPLATHDETSRELKLLTDRRDVLVAQRTSAINRLRWLVHELDPERAPAARSLDAAKHQQALRTWLDTQPGLVAELARAELTDIIRLTGEINTLAQRISARVHQVAPALLEIPGCAELTAAKIVGEAAGVTRFKSEAAFACHAAVAPIPVWSGNTAGQMRLSRSGNRQLNAALHRIALTQIRMTDSRGQAYYQRLQDAGKTKRAALRCLKRRLARTVFQALRTVHQPSSEHTQPAAACHRSYCSRSCLSG

SEQ ID NO: 187882 - protein, 352 aa, unidentified
MILGGFDVHRRQITFDWVDRATGEARRGQIAPATRQVLGDWLDQLPPGGGHVAVEGCTGWRFVAEELQAAGLTAHLAEPADTATLRGRKRRAKTDRADARHLRELLEQQRLPESWIPPAHLLDLRELVRLRKTLIDQRTQWKQRIHAVLFHHGLPKPEQALGTQAGRAWLAGVGLPPPSRLLVDLGLAELDTADARLEPISGWLRAYAAHQPGCRALRRQLFGVGSLCAPTILAELGDARRFRDGDAVVRYAGLDITVWSSDTKRSPGHLARQGPQVLRWALFEAAKSSARRTAPDHAYYAQVKDRLSANRATLSTARKLARHARHVLVELGEQALAPVGGELLPGPLPAAA

SEQ ID NO: 187883 - protein, 413 aa, unidentified
MNYEPITAVGIDVSKGKSTVAVRRPGGEVVLTPFQVTHDAAGLSGLIRTLRDVGGDIRIVMEHTGMYWRPIALALKEAGFFVSVVNAMLIHDFSDNSLRKVKTDKADSMKIANYALSFWAELRDYSPEDETRQMLKMQNRLYLRTKKSSVVLRNGLISLLDQTFPGVNTLFDSQPKRSNGHFKWVDFVKRFWHKDCVADVSLAAFSDAYRKWCTRSGYRFSQSDAERLHAAARNSVATFPKNDSTKLLITQAVDSLNAVYDALYILRGEMLRLASLLPEFDVVMEMQGAGEVTGPQLMAEIGDVRRFTHKGSLVAFAGMDAPPFQSGTFDSKSRRISKRGSPHLRKTLFMVASTILQHSDPDNPIFQFMDKKRAEGKHFYVYTVAGAAKFLRIYYARVKAHLMALDAGTSTAA

SEQ ID NO: 187884 - protein, 355 aa, unidentified
MSSEKYIGLDVHQATISVAVMDSQGKIVMESILETKASTILEFFAGLRGTLSVTFEEGTSAAWLYDLLKPHVAKLLVCNPRRNALLKQGNKSDKIDACKLADRLRLNDLKPVYHGETGVRMLRELARSYLTIVKDLIRVMSRVKALYRSWAIPCTGRDVYYTRHRSQWLDKIQEPGVRCRAEQLYQQLDMLQHLRQQARRALLAESRKHTITTKLRQIPALGPIRSALAVALIQTPNRFRSKRQLWTYSGLGLETRDSGEYYYVRGQVRRRKKQVTIRGLNKDYNHDLKGLFKAAAIRASVLPGPFQDFYQRSLAKGIKPTMVRLTLARKIAAITLTLWKKGENFDVEKLKSQAA

SEQ ID NO: 187885 - protein, 309 aa, unidentified
MKQSVVYIGIDVAKAHLDVAWAQTVRRLPNQRSGHAALIRWIKQSTTPVQLICEASGGYEQALLESLEKSAVKVTLVQAVRVRQYARATGILAKTDKIDAKVLAAFGSAIKPQPMSPRSVEQKRLRQYEAQRRHLSRILVAEENRLAQLSCAQLRTLSRSLMSKIKNQIETLDRRIGELIAQDQTLWEKAQKLTAISGVGARTAALLLAQMPELGQLNRRQAAALAGLAPFNHDSGSIRGKRAIFGGRRALRSGLYMAALSAARFNPILSSFYQRLRAKGKPHKLALTAVMRKLLLALNHSLKPEPILA

SEQ ID NO: 187886 - protein, 316 aa, unidentified
MTTRVTHFVGIDIAKHSLEVAVRPTGQQLALAYDEAGLQQLLRTLPAPQTCLIVVEATGGYQRRVVAELLTAGHLVAVVNPRQVRDFARAHNILAKTDSIDARIIAHFGEEVEVRLVSKRAGKHEELAQLVARRRQLVDLRASEKNRRETITSKSVKKSLQHVIDVLTKEITRLDKQLLAFVESDDDWNQTAAIVSSVPGVGPVVSATLVAELPELGELSRQEISALVGLAPFNRDSGRASGKRSIWGGRKSVRKVLYMAARTACNCNPVIKAFAHRLRKAGKPYKVMITACMRKLLVILNTMVHTQTHWTPAVVH

SEQ ID NO: 187887 - protein, 344 aa, unidentified
MTNIQHKETAQEAKPDLFAGIDVGAEELILVIRKNGKPFNPQKFANTPADRDRLVKKLVKLPGIIVCMEATGVYHFDLAIALHDAGVSLMVINPKASHNFAKVLMKNSKTDAVDANTLAEYAARMDFVAWTRPSDETIALRSFARRINALTGQKAAAKNHLHALNATSETPKAVLKDAKLAITQLEKRIDRLTAEALVLIGKHPKLERILALLIGIKGIGNTSAIALMGELLLLPPDLSHREWVKFAGLDPRAFDSGKSVHKKTRISKAGNRHIRAALYMPALSAKQHDPHVKAYFQHLVANGKKPLQAVCAVMRKLLHAIHGMLKHNEPFDNTRFYAIPTSAG

SEQ ID NO: 187888 - protein, 412 aa, unidentified
MDVGAASHYVAVPPDRDNEPARDFRVSPKIWNDWPTWLTACDVDTVAMESTGVYRIALFELLESRGFTAYLVNARHVKNVPGRKSDVLGCQWLQQLMSFGLLRGPFRPQGDFCALRCVARQREMLLKYQSRHVQHMQKALTQMNIQLGQVIPDVAGERDGATLAKLRNVRIRASEEEISKSLQGNWREEHLFALKQAVALYDAYAERLAECDRQLEGMLATLARHEGQLGPPKRLGKAKNAPRFDMRPYLFQLCGVDLTRIDGIDVTTVFKVLAEVGADLSRFKSAKHFASWLGLCPGTQITGGKVLSGATKRTANRAAQALRMAAANLRISQSALGAYYRRLCARMNKPRAVNACAHKLARLIYTLLKKGEEYVDQGQAQCEERYRQRVVKTLTKKAQQLGSQLVPVAEAA

SEQ ID NO: 187889 - protein, 348 aa, unidentified
MNLKRIGLDTSKAVFTLHGVGQDEKAVLRRDMRRAEMEAFFAKLPPTHVALEACGGSHHWGRRLAAMGHTVQLIPPQYVKPFVRRGKNDRNDAEAISEAAARPDMPSVPVRSAEQQAEAIVLSARELLVRQRTQLVNAVRGHAAEFGIVAAKGTSQLPALLEVVAAGEAVPDAAQQMLAFLGTQVAQLDGQIAELERRMKQQHKANPVSQLLAEVPGIGPVSALSLALTIDPGRFQSGRHFAAWLGLVPKQHSTGGRQRLGGISRAGDERLRQLLVVGAMAVIRFAKPGSKSASAWLLALLERKPRKVAAVALANKMARIVWAMMATGEAYRGSRKVATPAAEAAAAA

SEQ ID NO: 187890 - protein, 309 aa, unidentified
MPQNYIGVDVAKNWIDIFDAETGEHRRIETKQKDLRRFARTLGNRIVVLEASGGYERPLMDALSAAKVAFTRVNPRQARDFARATGLLAKTDKVDARMLARMGSALELAPSTAPDPVRDRLASLMARRDDLTATIGRERNRHAQATDAWIRRQITGLLRILARHLKRCDAEINAHIQQHDRLVEDHTRLQTIPGVGPVLAAVLMGSLPELGQLDRRKIAALAGLAPHACDSGMFKGKRRIWGGRANVRRALYLAAFIASRHDPTFKAYRKQLQDAGKPVKLAVTACARKLLTIINAMLKAGQNYRKIPA

SEQ ID NO: 187891 - protein, 330 aa, unidentified
MTMTIGIDISKDWLDVGRFPEAPGARFANSASGHAALIAWLEGLGAPGDETPARLVFEATGAYHRALSQALERAARPFCKVNPRQARRFAQAVGRLAKTDRAKTDRIAQNARFQRDAGMLARMGHVLALEPERPQGEKQGDLSALTSARQALVKDRNALLARRSTAAHRLVLSQLDRRRAVIEADIAEIDAALAELVRSDEGLRAREAILVSIPGLAATSATTILAEMPELGAMGNKQAAAMAGVAPITRSSGQWRGRAFIGGGRANLRRALYMPALVAARFNPDMRATYERLLAAGKPKKLALVAIMRKLIVLANALLRDGRKWAPHAA

SEQ ID NO: 187892 - protein, 362 aa, unidentified
MNYVGVDIHKRYSVLCAVDEQGCRLREGRVEGNAADGFARFFSGLSGPSKAVVEASWNWGVIHDELEELEQVEEVVLAHPYKTRLIADAQIKTDRLDAYALSTLLRGNLVARAHVPRRLTRARKNLLRQRLYWARLRTMLRNKIHALLDRQRDLELPQCSDIFGVRGLGFLRRLKLSEPDATLLQEQLALHDLIGQQMKAQEKRIAGEFASEAMHRRLMSVPGIGATLAAVIACEIDAIERFSNADRLCAYAGVVPTTHSSGGKVAHGRLLPFCNKWLRWALVEASWVAIGCSPYFGTLYKAHRARGKKANHVILIVARRMCRIIWQLLHHQRDFEKRSLSSRVNFPGCSALALTVNPATAP

SEQ ID NO: 187893 - protein, 408 aa, unidentified
MNAVGIDVSKGKSMVAALRPMGEVALLPQEFLHTEVGLEQMAYAIVALGEDTRVIMEATGRYHEPIAAALHEYGIYVCVLNPLFIKQSGGGSIRKVKTDKADAMKIAKYGLDNWVELREYTPMDTVRQQLKLCSRQYNLYMKTVVSLQNNLISLTDKTFPGVNELFSSPERADGHQKWVDFVMTFWHCDCICRVSEKAFTDRYQKWCKRKGYHFSTEKALDLYAGSCGHFTTLPKNDNTKLLITTAAQQLLAGKTTLAALRTEMTRLAKQLPEYDTVRAMYGVGETTAVQLMAEIGDVRRFPRRSSIVGFAGVDPAVDQSGKHSAKSVPTTKRGSPHLRKTLYQIVCTYLKRSPADEPVYQFLDKKRAEGKPYFVYMTAAQNKFLRIYYARVKECLEAFDERQDTVQN

SEQ ID NO: 187894 - protein, 320 aa, unidentified
MARRKMKSNIGIDVSKQQLEVAAYESHYFYRCANQPSAFPDLIAELITLQSERIVLEATGGLEIPLVSALHAAGLPVVVINPRQVRNFAKALGLLAKTDRLDAQVLAHFAAVVRPPLRPLKSVDEQELDALNGRRGQLVEILAAEKNRFKSATSPTVRGEIKVHIEWLEGRIAALDRQLEKLLKTSIVWQRRQQIYRSVPGIGPVVSFSLLAELPELGTLNRHQISKLVGVAPLNRDSGKQRGTRHIFGGRARVRSMLYMAVFNAVRSNPVIKAFYQRLRARHKLHKVAMTACIRKLVTILNVMVRDDTLWKVPPHPLSA

SEQ ID NO: 187895 - protein, 334 aa, unidentified
MGKVTTVGIDLAKNVFSVHAVDESGAVVLRKTVTRVRLLPLAAQWPACVIGMEACSGAHEWARRFQALGHTVRIMAARFVAPYRRSGKNDGNDAEAICEAVQRPSMRFVPVKSAEQQAILSLHRVRQGFVGERTATINRTRGLLAEFGLVLPNRAVEVRRGAAASAMHLPELAQRAVADLLAHLHVLDDRIAQYDRELEALARKSEAATRLMTVPGVGPLTALATVATVGRAHEFSNGRQFAAWLGLVPRQWSTGGKVRLGRITRRGDAYLRTLLILGARAALQMAARRNDKLSRWAISVKERRGYHKAVVALAAKNARILWALLVRGLTFHPG

SEQ ID NO: 187896 - protein, 395 aa, unidentified
MKEQFQRFVALDVHQNYIMAGAVDAQQHIVLPPEKVDIQALERWARKRLWPTDQVVIEASTNTWTVYDVLEPLVARVVVAHPYHIKLIASSLVKTDKRDTLALARLLAAHLIPEVWVPPIHVRELRALVSHRRRLMSQRTAAKNQLRAVVQRYHLIPPKGKLFSDQNRAWWFSLTLSPSEQLRVRHHLDTIARVSMQLEETERELTRLSADAQWIKQVTLLIQLPGIAMLNAMTILSAIGDIDRFPSAKKLVGYAGLGGKVHASGKTQRGGGITKQGRTELRQTMVEAAWTAVTFSPVWNARFEKLMSRLGKMKAITAIARKLLIVVWHVLAKQEADRQADPVTVERSLLRWASQFRLATALGSSRTAFAEQAMETLGLNQLVTPHDAPASMESG

SEQ ID NO: 187897 - protein, 376 aa, unidentified
MTWGCQAGVETANLITVMKNYKITNTESYESIKLGIDAHAKWYYVARQLDGATPQPVQKMNFEGLLHFVARQKRMAREVHTCYEAGAFGYHLHHRLTALGVTNYVVQPQDWDERGKGVKNDRIDAQALCQRLDRYVRGNLKAFSVVRVPTAEEERERAISRQRQQLVRERQRLQAMGRSLLAMHGIHVSGKWWQGKTWSKIRSEAPEWVIERLEVFSRLIAPLEVESTKLTSQIEAAATDQKIPKGVGPLTFEVLRREVGDWSRFTNRRQVSSYTGLCPREHSSGGKRRSGSVSKSGNPRVRAMLVEMVWRMTRWQPGYHGLQKWLPVLVDPARGGAARKKAVVAIARQLAVDLWRVFTGQTTAENLGLVYLPDAA

SEQ ID NO: 187898 - protein, 396 aa, unidentified
MPEIWAGVDIGKTHHHAVVINADGERLLSRRVENDESELLELIGDVLAISTDVLWAVDLNHGGAALLIGLLLSHDQPMTYLTGLAVHRASATYRGEGKTDERDAFVIADQARVRRDLGVLRPGDEVAVDLRTLTTRRLDVVFDRTRQINRLRAQLLEIFPALERSVDLMKKGHVTLLTGYQTPASIRRAGARRIETWLKNRKVRGAAAIAKMAVEAAQAQLTALPGETLAAAMVARLAKGVTSLDEEIAELDALIEARFREHPHAGVILSLPGMGPKLGAEFIAATGGDMDAFGSADRLAGFAGLAPQPRDSGRVSGNLRRPRRYHRGLLRAMYLSAMASLPACPASKAYYRRKRSEGKGHKQALLALARRRLNVLWAMIRDGACYHASPAVTAAV

SEQ ID NO: 187899 - protein, 354 aa, unidentified
MEATKYVGMDVHKDSISIAVLNVSGKLVMECVIETKATILEFVHGLRGSLHLTFEEGTWAAWLYDLLKPHVAKLVVCDPRRNGLLKQGSKSDRNDARKLAELLRSDMLRPVYHGEHGVRSLKELARSYLTITKDQARVMTRVKAIYRSWAIPCVGKHVYGLRHRQEWLDKIQDPGVRRRAEIYYAELDALRSLRVVALRELLLESKKHTVSTLLSQIPSIGPIRAALLIALLQTPNRFRSKRQLWAYSGLAIETHDSAENQFVNGQLQRSKKKQSIRGLNSNHNHDLKNIFKGASAVAAIKSGPFREFYAGQISKGIKPEMARLNLARKIAAITLIVWKKGVNFDTSYLTPQTA

SEQ ID NO: 187900 - protein, 468 aa, unidentified
MSLAEKLTSRLGLCRAAHQASLARSDGTFVWTGRKFFTRPADLDALWAAVGLTEADTLRVVMEPTRNAWAPVASWFRRRGAKVSMVPTTQSADLRAYYSKHTKNDHLDSKLLARLPLLHPEGLRDHTGDGPAEPLRRAVKIRSSIVKRRTAVFQRLDAQLELLGPAWYDALGSNYGKAALAILARYADPHALIRLGQARLTRFLIRHSRGAWRDAHAQALITAAKQSIELWGADGIDFAELAADIAVEAEQAQVLTEQIEDLDERIANLYDDADPTGIIASAPGVGPVTCGIIAGRIGDPHRFTSLAAIRAYSGLVPKVAQSGQSHHQHGLTKAGDPLLREALFTAADSARRTDPQLAAKYKRLMSTDRHHDSATCHIATVLLTRIATCWRTGQHYVLRDTDGRAITPEEGRNIVKTKHQVDQKTRDKAAHARMSQRRKGRTSRESQESPSAPTSRPANTSIRATQVA

SEQ ID NO: 187901 - protein, 350 aa, unidentified
MSIIGGLDVHRAQITYDWIDTDTGQTRQGRLAPASREHLRGWLERFAGQQASFALEGCTGWRYVVEELQLAGIAAHLAEPADTRALRGRKRHAKTDRADARHLRDLLLGGRLPESWIPPTHVLEARTQVRLYKALVDQRTAWQQRIHAVLFHHGVPAESDLLVAERRQRLTQGAGLTLPAHQAVLLALRMIDAIDAELDLLRTELAHLARRQPGCRALRELYGVGLITAVAIWAEFGDVRRFSSSRHAVRHTGLDVTVYASDDKRAPGHLARQGPAVLRWALFEAAQCAARAGAPDHAYYTQVKARLGGNRAALSVARKLARRAYHLLRGLGDDALAPVAGSHPSAAVVA

SEQ ID NO: 187902 - protein, 344 aa, unidentified
MDHFAGLDVSVKETSICIVDDTGRIVQEVKVASEPDALLKVLGSQAYCFKRIGLEAGPLSQWLFSALAEAELPVVCVETRHMQAVLKAQINKTDRNDARGIAQMMRVGLYRPVHVKTLRSQKLRMLLTHRKLLQSKAIAIENDLRGTLRNFGLKVGMVGTVNFEARIKELVENFSDLAVLVEPLLIVRRALREQIIILHRRLLAIVRDDEVCRRLMTTPGVGPVVALTYRATVDVPARFRKSKAVGAVFGLTCSRYQSGEIDWSGRISRCGDEMMRVMLYEAAQSMLRSKKWSWLKAWAMQIARRRGMKKAIVALARRLAVIMHRIWVDGTEFRWTREQAVAAT

SEQ ID NO: 187903 - protein, 302 aa, unidentified
MTDVHILAIDLAKRSFQVCATAAGGAVLFNRMVSRAKLETILREQTPCIVAMEACATSHFWGRFAQRLDHEVRLIPPIYVKPFVKRQKNDAADAAAIAEAALRPNLHYVAVKSAEHQARAVAFRTHQSFVGQRTQLINALRGHLGEFGLVVAQGLTGLKTVAGMIDDDATELPDAVRDIVRLYLDQIAGLTQKIDDLHFKLRAATKVDDAMRRLCTVPGVGPVTAGAIMAFAPDLRAFASGRNFAAWLGLHAILLSGVHSRVDAFMNWADDYFHHDRAPELELDGTATRIAWADNDADRPTI

SEQ ID NO: 187904 - protein, 344 aa, unidentified
MEEYVGFDVSKEETAFCVMDKAGKILSQGKALSDPRSLFEALRENTLCPDRIVLETGTMSAWLARELRGLGLAVDVIDARQAHAVMKLQHNKTDANDAVLLAEIARTGFCRPVSVSSEAAQVQRMLVKARTHLVRQRRDTENAIRGFLRALGIRFAKGSGKLAGRVREALEERPDLKVMIEPLLASVEALKTQIKRLDEDVVLKARGSPACRLLMTVGGVGPITALAFAATIDDAARFAKSRAVGAYLGLTSRRFQSGEMDYSGRISKHGDAMLRSLLYEAANSMLTVVRRAHPLKDWARRIRKRSSHKKACVALARKLAVIMHRMLVTGEPFRWPQIEAAATA

SEQ ID NO: 187905 - protein, 387 aa, unidentified
MIKNRGRVVGLDVHPDNFAGAVVEGRDPASAQVLSTSTRVELERLEEWALRYTNTEDTLVLEASGNAFAVAERLRTIGRKVEILDSHRAGKVGKVYCANDRVDAVKIARIYLSALSPIVWQPDQKTLERREIFSAYQAVVKESTRARQQLRSMLNEHCVRLEKGFRLCHPNAIRRLLALREWTSARTMLLQQLHSSLLAARARRTLLRRHMAQEIAAEEALLRLTRLCGINLVTLYGVVAAVGDVRRFSHSKKLVAYLGLNPSVSQSGNFEGSGALKRHGRGALRALLIQSGKKLLEVNNPLQKWGLAIAARRGRNKAAVAVARKLCVALWHVLMGHVIGALERLDTLETKLSKFATEMGPAALRAFGYNNKAEFVERKLYVLRSYP

SEQ ID NO: 187906 - protein, 338 aa, unidentified
MKLYGAIDLHSTNNVTVVINEQDQVVYQKRLPNDLSLIAQQLSSYRASLQGIVVESTYNWYWLVDGLMEKGYRLHLANTAAIQQYNGLKYTDDHSDARWLAHLLRLGVLPEGYIYPKQERVVRDLLRKRGQLVHQRTANLLSIQSLISRTTRNSISAKYIKALDIQHVDGVLPNPDLVLALKANLAVMNSADAQIEILEKTVQDRVKLRPQFRFLKTVPGIGPILALTIMLETGEIERFASVGNYASYCRCVGSRKISNGKRKGSGNTKNGNKYLAWAFVEAANFAIRFSSRIKSFYQKKKSKSHAIVAIKAVAHKLYRACYYIIKDQVVFDITKAFA

SEQ ID NO: 187907 - protein, 446 aa, unidentified
MSTLNSAEEKPFYAARIGLDWADQKHFWTMLTAEGKRTRGELKHTPEAIEIWAVELARSFGGRPIALALEQKRGALVAILSKYAHVHLFPLHPTNLSHYRSSVCASGAKSDPSDADLILDYLVKHPEWLRGLRPDTVETRSLQFLVEERRKLVNQHTSQLQILIYWLKQIFPQMLGWFDDMSTPLVGDLLLRWPQLPALKKASQNTLRKFFVQHNCRSEERIQQRLDEIGQAVPATTDTALLNTADLCIRLAVQVLAAQRAGIAEFDRQIEAIYKAHPDRFIMASLPGAGPALEPRLIAALGTNRERFESASGMACCFGIAPVTESSGKSCWVHWRWACSKFVRQTLHEWANCSIRSCGWAREHYDKQRGKGKGHHASVRSVAFKWIRILFRCWRDRVPYCEERYLKALRMHGGAVAAVVGQPMPVPPAVQWESCGGFSKIVELSS

SEQ ID NO: 187908 - protein, 360 aa, unidentified
MKKRLSKKANWFKENSFTDEDELYVGVDVHKEQYHVAIWHNGHIGCVYSMLSDNTKLLWDLQKIRSSLKNVVYEAGPTGYSLVRLLRSVGLPAEVVAASKTPRMTDSGAKTDRLDCQQLAEYAAKGLLTFVGVPTKQQEADRQVVRLRDQLMSKRKRVMQQIKSFLLQHGIAWPGGGWSKTVLKQLRQLNIGTELRFSLDQYLDEYEFLSQKMTVTKAKLCQVFSSERHSAAIAVFKSHPGVGDITAWEFRAEMFNITRFSQPKQVSKYIGFCPRISQSGNTCRHGPITKTGRRELRAILIQAAWAWHRKDPYARQIYNRLLRNTGNGKKAIVGLAKRIAIHLWRMLRDGCLYDIKVAKV

SEQ ID NO: 187909 - protein, 468 aa, unidentified
MTAQSKATGRPRSIAAGARAPAGGGLPVLRAEVAGIDVGSTEHWACCPPKPDGTANVQRMGTTTAELGRIADWLVAEGVKSVAMESTGVYWIPLYELLESRGIEVVLVNARQLSHVPGRKTDMLDCQWLQQLHSCGLLRGSFRPPEEICGLRALMRECANLIGERTRAVQRMQKALDQMNVQVHRAVTDITGVTGMGIIRAIVAGERDPLALAGLRDKRCRKSAAQFAEHLRGTWRQEHIFNLEMNLELHDKLNELIEAYGRKIAGLMEAMGPEQRRGQGPPEHPNPTKARAIGQAGEEPLRQTLWRMSGVDLTRIDGIGVDTATVALSEVGSNLGAFPTEGHFASWLRLAPHRAISGGKVLKKKRNAVGATRLANALRQGACSLQRSKTALGGQFRRLARRKGYSVAVFAMARRLAILIYRMLRFGQDYIDEGLAAYEQRFKQRRIKNITSVAKELGYQITPIQLVT

SEQ ID NO: 187910 - protein, 427 aa, unidentified
MEEAEDEPLFCERAAGIDIGKQSVMVTVRVPSETRKGGRSQETREFGTMRRQLLELADWLRSHGVERAGMESTSDYWKPVFFLLEQQGLECVLYQASKVKAQPGRPKTDKLDSVWLAKVTEQGSVAGSFVPPADIRRLRACTRYRRRLTQARSAEKQRVEKLLEDAHLKLSSVISDVHGVSGAEMLRALAAGERSPRVLAEMARGVMRRKLAALREALDCSFFTEEHAFVLSMMLDNIDHYSAQVAVLDEKIAVMCEPYARQLAQLDQIPGFGVKTAQDLIGEIGTDMTVFPTAGHLCSWARVAPRPKESGGRRKGGSATGKGSPYIGAALGEAAASVGRTQTFLGAKLRRLVRHMPKKKAQVAIMRTQLVAAHALLSDPEAEYADLGPGYYDQRAGTARQARGHVRSLERLGWKVTLEPLDPAPEN

SEQ ID NO: 187911 - protein, 425 aa, unidentified
MNGNTQDTHRLRTDDMHVVCPRAAGVDVHKTRITAALRVCEAGGGPARVVTQEFSALPDGLQAMTDWLLDHDVTAAALESTGVYWKAPFEALEDAGIRADLHHAEHVRQIRGRKTDGSDSLWLARVCQFGLVTPSFVPPRRFRQLRQLTRYRRTLVAERSRARNRIHKILDHDGLRLGGVLSDIFGMNGRRILDGLAAGRPARRILADVTGHIRGKLELLTRTLAATLDPVALVTLQMQLEAVDRTEAAIAALDGRIQAALANYRRPLLLLQTIPGIDLRSATAILVEIGPDVVAFRSARHLAAWAGVAPGNHVSAGKRRSGRVRPGNRTLRATLAECAHGAARSTSSQFHRYHQELAKRLGYQRAILATAHKLLRVIHAVLSNDRPYSDPRIDYERLVIESGAPRWIRMLKQNDLIEEVRSMRT

SEQ ID NO: 187912 - protein, 338 aa, unidentified
MIVIGLDVHKQSVTAVAVDEAGRPLEERVIPVGSDELLDWAAALDAERLWAVEDCRQLTRWLERQLLGAGEELVRVPPKLTVPERRAGRTRGKSDPIDALAIARAALREPDLSRPRPDERVYRELKLLVDHRDDLVDQRRRTQQRLRWHLHQLDPTFEVPLRMLGRASHLERVRRWLARQDKELQVRLARELVSTIAQPNRTIAALDQELEQRTAEIAPALLELPGCAAVTAAKLLAEIGPVDRFKTDAQLARHGGVAPLEASSGRTQRHRLDRGGNRQLNAALYRIAITQARYHAPARDYLERKRSEGKSKREALRRLKRQLVRVVFQTLKASPALT

SEQ ID NO: 187913 - protein, 427 aa, unidentified
MKHDNAIKYQQFCQFKAEIRGSREYLIVGIDVAKDKHHAFFGLATGRTLLRRLIFKNNREGFERLIERSRQLQAEHSLSKAVFVVEPTGNYHKPLAHWLLEKEEQLVLASNKSIADNRQSLDGRWDKNDNKDSANAADLASQGKCQYLEQPEEDIVELRTLLSLRKRLKKEAHRMRMQIRNGLVAKHFPEFDRLWGSCLTENLAIVRWCLDPRKIAAMPFNDFIRLVTTRDRGQRQVRRLRAIYAVAGVSIGCPMGQAAGFEARQLADRLAEKGVQLEDVMQRIEQVCRRFASYPHLRSIPGFGPYVAAVVLATIGDPNRFRGRRQVIRLAGLDLNAKRSGRHSESAVPVISKRGNADLRYALYQAAQIASYHNEHFRGLFIRYLKGREKERGIKTKVRVKLSAKMLVIAWTLMKDNTDFDPSLLIV

SEQ ID NO: 187914 - protein, 419 aa, unidentified
MFKIFRKNCCGLDVHKTWIYACIGITDTNGRTEYKQARFSSFSKGLRELACWLETYECKDVCMESSGKYWIPVFNILEKTCWVTLSHPKYTKPQKGNKTDRKDAKWICDLFMCDMIKPSFIPPPDIRHLRDLMRYRFKLTCCLIGEKNRAQNCLTVSNLKLDDVFSDVFGKSAMSITKYILEHPGEQFDVAPFVDKRCKSPIEEIQAAVDGSVSQEQAAKLREILGHIDELEAHKQNIEAEILRLAEPYAELLKLIRTVPGFSSAPMTAIAVISEIGADMSVFPTAKNLSSWAGCCPRSDQSGGKRKSTRISRAGVYIKPLLVQVANGVVTSDKYPECKERYRRLKARRGHKKAIIAICRMFLTAIWNILSKLEPYSADGYLADRPSDKALVITKSQALNLLRLRGYIIKDDLPSVVPE

SEQ ID NO: 187915 - protein, 344 aa, unidentified
MYIASVGIDLGKTTFHLVAMGERSKVLLRKKFSRAQLLAYTANLPACLIGLEACAGSHFLGAALREQGHQVRLIPGQFVKPYRKSNKNDFLDAEAIAEAVTKQNMRFVPIKTEEQLDLQAMHRVRDRLVQRRTALINEIRGFLLERGITFAAGPIHLRKHLPTVLEDAEQNLSPRLRWLLDRLGQEWKQIEIDITAITEAIERISNEDERCRRLRQIPGFGPLVSTATVAAIGNGAAFRRGRDFAAWLGVVPRQCSSGGKPKLLGISKRGNIYLRRMLIHGARAVLLRVKYDTAGFGQWVHRLAQRAPRNKVVVAIANKLARIAWAVLSSGNDYRHQPLQAVAA

SEQ ID NO: 187916 - protein, 311 aa, unidentified
MDNVFIGIDVSKGYCDVAVIPDGTRKRFTNDEEGQEAVAAFMLPLKPGRIVIEATGGYEMGVVRVLADNLLPVVAVNPRQVRDFAKATGRLAKTDTIDAEVLAQFARAIQPDIRPLPEKEAQVFRALVARRRQLVQMLTMEKNRLEKSPPAGSKDIRNHIYYLTEALKKIDRDISRTIRKSPLWKEKETILTSTPGIGPVISCTLIAALPELGTLNRKEIAALVGVAPFNRDSGKHRGKRTIWGGRSHVRATLYMGTLSAIRFNPVIRAFYKRLVDAGKVKKLAITACMRKLLTILNTMMKNKTTWAEVRS

SEQ ID NO: 187917 - protein, 352 aa, unidentified
MSNYKQFIPEGKTIYMGIDLHKKSWHVTAIVEDEVVFSGSMPPDPEHFFKFLKRFSHNPITVVYEAGCFGYWLHDLLMESGIECTVTPPSLVPVESGNRVKTDRRDSHKLAYLFSKGLLKEVWVPSPKQLAHRQVIRRRRQLIGDRVRVQHRITSELRFFGIPFSKPRGQWSTNFRRLLEAVRFEDPYQQQSFNHLLEEYDYLCQLLKQQTQLLEQLAATELYAKQVELLRTVSGIGTITAMEILLELGDITRFTRGEQLAAYVGLTPSQYSSADKIRMGRITKTGRASLRRTLTEASWRAIKKDLVLLTVFENLRLRCGKKRAIIAIARRLILRARRILLDQKSYKLIEAA

SEQ ID NO: 187918 - protein, 494 aa, unidentified
MKAIAGKAKAKHSNSSKRNAKMAARGEPKGMEIVNPHAGGIDCGAEEHYVAVPPQSVEPGQPAVRCFSAFTEGLDASVEWLKACGVTTVAIESTGVYWIALCQKLEAAGIEVFLVNARHVRHVPGRKTDVKDCQWLQRLHSFGLLSASFRPEDGICRLRSLQRHRLNLIWTAGAEIQHMQKALQQMNLHLHHVVSDITGLSGLRIIDAILAGQRDAVQLAKLRDYRVCKSTIAQMEAALVGDYRPEHLFVLGQSLQAYRFYQARIQECDVQIESHLQQLAQRYESSSALAAKLPEPEVLNDAQAQNPQPAKPKVKRKPQANEPKIDLADYLRRICGVDLTQVIGLNVLSVLLIVSEIGVDMSKWRSAKAFSAWLGLCPRNKISGRKVLDTRTCKVISRVATTLRLAAQSLGRTNTALGLFYRRKRAHLGPAKATTATARKLACLVYHLLKYKEQYREPDPTTYQLKVEKAILARIQKQAAVLGYKLLPTALVPA

SEQ ID NO: 187919 - protein, 430 aa, unidentified
MGFIVPTDMHPEQDDQPIPYQWFVGIDWGSQRHQVCVLDGERRRVGERAIDHDGASLAQLADWLWSVSTGQPQRVAVAIEVPRGAIVEGLLERGFHVFAMNPKQLDRFRDRHSMAGAKDDRRDAFVLADAVRTDQPSLRRLHLDAPQLLRLRELSRAEETLLEDFRRSANRFRDQLHRFYPQMLALCSAADEPWLWDLIDLAPTPAHVALLSEEQVQRVLKAHRIRRVTAKEVLTCLQALALPVAPGAAEAAQAHCQFLLPCLRVLAEQLQACSQQVSALLHTLAAEPGDGEGPSDVALVLSLPGVGRKITAWLFAEAAQPIAERDYQMLRTHSGIAPVTKQSGKRRLVVIRRGCNPRLRHALYHMARVAVQCDAHFNSVYAALRAKGQRHGQALRNIGGRLLRILMAMLRHRTCYDASRIRREPVVQMG

SEQ ID NO: 187920 - protein, 340 aa, unidentified
MTITTIGIDLAKNVFAVHGVDQNGKTVLVKSRVTRAALPGLIASLPPCVIGMEACSGAHYWARLFLQYGHEPRLMAAKFVSPYRMAGKSGKNDAADAQAICEAVRRPHMRFVPVKDESQQAMQCLHRTRQGFIEEKTATYNRLRGLISEFGVIAPQSTDALRHMVSAQKSSLPLQVQQCVDDLLEHVDRIEANITEYDRILSRIAKTDHRSQRLMKLKGVAPTTACALVACIGNAHDFKNGRQLAAWLGLTPSQYSSGGKSKLGRITKAGDSYLRTLLVQGARSVLIGAEKRTDSFSRRVCSLVERRGYWRAVVAIAAKNARLCWASLHYGDDFRLYSAS

SEQ ID NO: 187921 - protein, 457 aa, unidentified
MSTVKKVKKKASSKANTQLPTLHPHAAGMDIGATEIQVAVPCDADPDPVRTFATFTDDLHALRDWLLQCRVKTVALESTSVYWIPVFQILEAAGLEVCLVNARHCKNLPGRKTDISDCQWIQYLHSVGLLRASFRPPEQICAVRSLLRHRATLCLYADSHVQHLQKALTQMNLQIHNVISDLTGLTGLAILDAILAGERDPQKLAALKDHRIKASRDTLARSLHGDWRDEHLFVIQQALDTWRHYQKLMGQCDEHIQRQMAQFDSQVDLNQHPLAENRRGHKKPQRNEPKFDARTELYRLCGVDLTQVPGIQVSTALVLFTELGPNFVTRFPTAQCFSSWLGLCPDNRITGGKIISVKTRDVKSRAAMALRLAAQSLWHCKDYLGDCFRRWKARLGTPKAITAMAHKLARVIWHLIKYRRPYDPSVWQQAEAKLKQKKIKRLQQNAAALGFQLLCAS

SEQ ID NO: 187922 - protein, 462 aa, unidentified
MEKDLISVVFERCCGLDIHKKMIVACLLLRGANGHLKKETRTFSTMTTGLLELLDWLKGARCTHVAMESTGVFWKPIYNVLEGEMEVLLVNAQHIKAVPGRKTDVKDAEWIASLLQHGLLTASFIPPRPQRELRELTRTRKTLIEERARIVNRIQKVLEDANIKLSSVVTDITGKTARQILHAMLQGEQDLETLAGMARGKLRSKQLQLAQAVQGTLRAHHRFVLSQHLAHLDFLSQQIEAFDQQIAEQLGLGNGPEDPDPSPSSKQAAKEALQDAQSEEIVEEEEGQTRRLGEHRQDLRRAIERLDAITGISLRTAEVVVAEIGIQMDRFPTQEQLASWVGLCPGNKVSAGKRLSGKTTKGNRWLRTALIEAAQGAASSKGTFLGAYYRRLCQRMGRKKAIVAVAHRILLTIYHVLKEDEPFRELGEQYASEKERETTKRRALRRLEQLGYQVQLQQAETA

SEQ ID NO: 187923 - protein, 354 aa, unidentified
MVAHTHPFVIGVDAHARNHALAILACPTGEILDEGQFPATGAGLQRAVDWVARRTGGDLDTLWVVEGVGTYGARLARAAADAGYSVAEAARMNARANRGVGKSDPLDACRIAQAVLPLEVAQLRRPRTDDGVRAAVRVLIASRDHISVERTAAINALTALLRVAELGVDARRALTGGQIALVAAWRTREEALATRVARAEAVRLAKRVLAADQEIASNAKQMTALLNSSPARKLLDQPGIGPVTAAVTLAAWSHPGRVRSEAAFASLAGVNPIPASSGNTVRHRINRGGDRRLNRALHMAVVTRMRMDPATRAYVEKRTAEGRTLREIRRCLKRYLARQIYRHLNAASDTLLAA

SEQ ID NO: 187924 - protein, 350 aa, unidentified
MKVTTIGLDLAKNVFQVHGADAAGTPVLRKQLRRAQMAEFFAQQPPCVVAMEACGGAHHWGRKLRALGHQVRLIAPQYVKPYVKSQKNDAADAAAICEAATRGHMRFVSVKTVEQQSVLALHTARSGFVKQRTALSNQIRGQLAEFGVVLPQGLSKLNGQLPIALADQNNELTGTIRNLFLMLHAQLAHIDDLVARLERQIREWANQDPGARLLQQILGIGPITASALSAVIGDIRQFKNGRQLAAWLGLVPRQHSSGGKSVLLGITKRGDKYLRTLLIHGARAALKAYQRNPEKMPAHLAQLLARKHPNVVCVALASRNARVAWAMLSRGEDYKGWEVAKRPALPAQLN

SEQ ID NO: 187925 - protein, 339 aa, unidentified
MTKAMTLGLDIAKQVFQVHGADKSGRAVLRRKLRRSEVARFFSEQPPCLVGIEASGSAHYWARVLSGLGHTVRLMAPQFVKPYVKSQKNDANDAEAICEAVTRPNMRFVPQKTVEQQDLQCLHRVRSRLVANRTQLINQIRGLLAEYGIVLPQHPGQVRSGLPEVLEDAENQLTGFGRELFQCLYEELAQLDEKIGAADGRIQIAFQNTPDCRRIAAVEGVGPLIATAIVAAISNGHAFENGRQFSAWLGLVPRQNSSGGKSRLLGISKRGDPYLRTLLIHGARSVVYRAKAKTDRRSLWINDKQQRLGTSKACVAVANKNARIIWSLIAREQEYRRAA

SEQ ID NO: 187926 - protein, 325 aa, unidentified
MILGIDIAKDKFDIALYKGKKLVATGQFDNTPAGFKKLSKWLKKKAADQVWACMESTGRYGDALALYLHQQGYPVSMVNPARIKKYAESKLQRNKTDKMDAKTIADFCRTQEPGLWMPPAPEKRKLQEMVRRLSALVKEQTRETNRLKAGIESEVVKESIEANLEFLGAQIAGLEEQIQNHIEQYPDLKRDRELLTSIKGIGDKTAAIILGELPDVDNFDKAGQVVAYAGLSPSQHTSGSSIHKKSKLTKTGNQNIKTALYFPALSAMQHNPIVKALALRLEEKGKEKMVIVGAAMRKLLQLAYGVLKSGQPFDPNYATKMQDAV

SEQ ID NO: 187927 - protein, 431 aa, unidentified
MPTKTRTRRTRTTARARSAPNTLLKHRTSLARPQADPNDRPSPSPRLTRYIGLDVHAETIAVAIAEPTNVVHAYGTIPNTPDAVRALMKRLTRDGATLAVCYEAGPMGYGLYRQLHAMDIHCDVIAPSLIPKAVGDHIKTDRRDAQKLARWYRSGNLTPVWVPDEAHEALRDLVRAREGALEDRTRARHRLTKCLLRHRLHRPPGINAWTMRHRAWLVQVIKHPTLHVDALQITLHEYLHEIDRCTERLARYDTAIAAAVRQADPVTQALIAGLQCLRGVQLLTAVTLVTELGQLSRFPRPAQLMAYAGLVPREHSSGTKIRRSGITKCGNTHLRRILVEAAWSYRHPPALSAGLRLRQRGQPPTVIAIAWQAQQRLSVRYRALAQRKKPLPQIMTALARELLGFIWAIGVDIEGTFERTRERTTTRGARP

SEQ ID NO: 187928 - protein, 336 aa, unidentified
MKKIFVGIDISKMWIDVCVTLNGNITTHQQFENNKMGFKAMVKWIRQFSRVQQEWLLCMEHTGIYALPLWYFLTEEKISYCVVPGSVITSGLEIRRGKNDKIDAEDIARFTMHYADELKPHQLPTQVLQRLRMLFAYRERLVKASVLLKVPAKEAKEFAARESKEVRTDSSSLVQIIEARISKVEKLMLEVINSDEQTATCYQLIVSVKGFGIVTACYLLIITQCFTVLTKSRELANFGGVAPHPHKSGKSIKGKTRVSPIADKKLKALLSRGAGSLLQYNKEIQSYAARMMARGKHENLVKNNIKNKMLHTVCAVVKRGTPYIKNYVSPYAQHVA

SEQ ID NO: 187929 - protein, 286 aa, unidentified
MKQATTIGLDIAKHVFQVHGADGAGHVLFRKRITRVKLLGFLAAQAPCVVAMEACAGAHYWAREIGKLGHHVRLIAPAYVKPFIKRQKNDAADAEAICEAAQRPSMRFVPVKTEEQQANGIVFRARDLLVRQRTQCVNALRGHLLEYGYVFPKGITHVETLIALVEDLQSPLPSSVRIILKLLVDTFTALEAQIAVLDAEINQRSKSDPTARRLMTIPGVGPIASTAITALVPAAEGFPAGRDFAAWLGLTPLQKSTGGKQKLGAVSKRGERTPVDHRGERRGSTG

SEQ ID NO: 187930 - protein, 427 aa, unidentified
MPYTIAGIDVHKRMLHVVVSDVQVDGEYDFTRRVFGSLPEALRSLAAWLVEQQVEEVVMESTAQYWKPVWGTLERYWKPICQTREGTLATSGTLHLAQALSNRGRRGRKKDFRDAERLVKRLVAHELTLSFVPDVKQRLWRTVVRTKYQLTRNRVQLQNRLEALLEEAHIKLSSLVSDLLGASARRMLEAIADGETNRETLAALADRGLRATQEQLQDALGVCQELNPVYRRLIKMVLGEVASIDKRIDQLNQEMANLLRPHEDQVKRLAEVPGLGVDSAQQIIAEVGATVATFPSEKHLSSWVGACPGDEESAEVNYSRRSPQGNRHMRRILNQAANAAVKYKGSIFEILYRRYVPRMGHNQTIGIIAHKLCRLIWKILHRGIHYEERGPEVRKACKQKRTRKMIRELRRLGYRIEPSPSQSAIPA

SEQ ID NO: 187931 - protein, 339 aa, unidentified
MKGTIIGIDIAKNVFEVYVEDAKGQVVKRCRLSRKKMLPWLANRAPALVGMEACGGAHYWARELEKLGHEVRLIAPQYVKPWVQTNKSDAVDARAICRAVQEPGMRFVAIAGEAQQAVQAFHRVRSRLMGNRTALVNQIRGILLEYGVAIPQGVASVRKALPLLLAEERWAPLVRQFLVEQQAELLAWDTRIEVVTGHIQRESATQPVCQRLEQVRGIGPLSASALWLKAGGHPYVNGRHLAAGLGLVPKHTGTGGKIRLGGISKRGDRYLRWLLIHGARAVVAHLGEKQDRLSCWLRRLVARRGMNKAVVALANKNARVAFALIHGEQPYDVTKMCQE

SEQ ID NO: 187932 - protein, 352 aa, unidentified
MKQIQNNILNFFKQVFYIGIDTHKRQWTISIRTMGMELKKLRVEPRVEDLVNYMERNYPGGTYKFVYEAGFCGFWIVRKLKEMGYEAIIVNAADVPTMQKEKLTKTDKTDSGKLSREYENGSLKAIYIPTPAQQSLRSYSRLREQLVKQQTRLANRIKGFLNLHGIEILYKNLLSKKGRKWIDGLEFRERVNKFYLITLFEDLLSNYHQLLKVNKNIREMSKGIKEIEYIQTVPGIGYITAFTIYSELCDIKRFKNLDTIKSLVGFIPIVRSSDEKTTVGGLTHRGNRYLKRMLIQAAWQAIRRDPALTLAYSELKKRMIGQRAIIKIVKKLLNRIRYCWLNHQYYNMAVVQ

SEQ ID NO: 187933 - protein, 403 aa, unidentified
MERFAGIDWASEEHALCVVDEEGTSLVGEMFAHDECGIRDLIARMRRLRVARIAIERPDGLLVDRLAEAGFTVLPVHPNKLKATRSRYEAAGGKSDGFDAFVLAELARTDAHRLRVLRPDSDETKALRALTRTREDLVAARVRLANELRAQLEAFWPGAARIFADVDSPIGLAFCERYPSPADARGLGEKRMRGFLARNRYPGRRSPAELLDRLRSAPEGRGGALEVEARRAAVLGLVVALRPIVTQIRELTSQIAGAVRAHDAGEIFLPLFKDPKSVVTAAQLVAELGDDRARYPSSEALAADAGMAPVARESGKRKVAGFRWACDKRLRGAVACLADSTRHHHPWARQVYSRARSRGLAHPHAIRVLGRAWLRVLWRCWQDGAPYDSSKHGNLRQLELVGG

SEQ ID NO: 187934 - protein, 353 aa, unidentified
MHTHQQSTEPVATIGLDIGKNTFHLVGLDRRGAIAMRIKVSRNQLVRRLVNLPPCLIGLEAGSGSHHIARQIQSLGHDVRLIPAQYVKPFLKGHKNDYRDAEAIAEAVQRPTMNFVAIKTPEQSDLLSLHRVRSRLVRQRTAIINQIRGFLIERGITVRQGPGPLRKVLPEVLSSPPEALSPRLLRLISELDQDWRRLDDRLEVLSGEIESLSENDAACQRLMTVPGIGPIISSAVVAAIGTGSGFKQGRDFAAWLGLVPKQESTGDRTKLGRISKRGNKYLRTLFVQAAHVVLERRPAAAMRALWPWIAQASKRLAHRNLLAIALANKLARIAWAVLARGRDYEPRITPNAP

SEQ ID NO: 187935 - protein, 393 aa, unidentified
MICVGIDVAKDKHDCFILSSEGEVLADVFTIQNNAEGFDMLLQTIRRCARPEDKIKVGLEATGHYSYNILGFLLDKGLPTYVINPLHTNLYRKSLSLRKTKTDRVDARTIAAMLMSDVDLKSYTDTVYHNEELKSLTRYRFDKVRERAKLKQSVSRLVTILFPELEKLVSSLHSASVYALLSEFPGAKQISSTHMTHLKAVLKNASQGRYGQEMAETIRNAARSSVGSVMPAKSLELQHTIRLIRELDAEIEDIETAIQAIVDEMQSPITTIPGMGVRMGAVILAEIGDFSRFDSPDKILAYAGMSPSTYQSGQLSLSGAYSHMEKRGSRYLRYALYNATKHVCHWDPTFAAYLAKKRAEGKHHNVALSHAAKKLVRLIYAMEKSRQPYSSAA

SEQ ID NO: 187936 - protein, 338 aa, unidentified
MEFKRIAVDTSKAVFTLHGVDLAERPVLRRDLRRAGFEAFFAKLPPTEVALEACGASHHWGRRLTALGHRVRLIPPQYVKPFVKRGKNDRNDAQAISEAAARPDMQVVPVKSAEQQAEAMVLSARELLVRQRTQLVNAIRGHAAEFGVVAAQGIGRLEGLLAAVHSDDAIPQAARDMLAFLAAQVTQLDSQIAQLEKRMKRLHKANPLSRMLAAVPGIGPIGALSLALTVDATRFTSGRHFAAWLGLTPKDRSSGGKQRLGKISKAGNERLRQLLVVGAIAVIKVAKPGSRIASAWLLKLLERKPRKLAAVALANKMARIVWAMMTSGEAYRRQPVAG

SEQ ID NO: 187937 - protein, 378 aa, unidentified
MPSETTVYVAVELSVSSWLIAARSAGAEKSRLHRIQGGDTTTLLALITKLRSRASTKLGRAVDVACCFEAGRDGFWLHRLLTAHGIAAYVLEPTSILVNRRARRAKTDRLDAEGMLRVLATWLAGDRQVCSMVRVPTPEEEDAKRPHREREHLVQERVRIENRIEALLFTQGIRKRPSLRSWVRDVAELRTGDGRELPCLLRIELERLRRRLVLALELIHEVEADRAEALAATADDKMTQKIAALQRLRGIGPNFAAVLVREVLYRSFANRRQLASYVGIAPMPYQSGGMDRDRSISRAGNPRARTTLIQLAWLWLRYQPGSALATWFRERVGMLQGRTRRISIVAMARKLLIALWRYVETGVMPEGVEIRAEADATA

SEQ ID NO: 187938 - protein, 339 aa, unidentified
MITVGLDVHRSRTSVALLDETGELLGNRSVPTENVSELILSLPVPARVVMEAGTTSMVLARTLKSCIDDVTVVSCSEARRQLKSMATAKTDRLDAENLAIAHHKDKLEYGMIWVPDQATWELRGLTRTRIRLVRQRVSLQVQLRNVLEWINHPCQGAINSKAGRQWLQDLDLELAEATMVEALVASMDAVDAQIDLLAGCIRESSSECWQCKLLMTLPGVADVLAPTMRAEIGVIERFPSAPHLASYSGLPPATEQSGGRESGKGMQKDGNRWLRWAFIEAAQHFAYASATQELSPVKRFHRLAIRKHRNVAKVALANELTGIVYAMLRDREPFDPRRL

SEQ ID NO: 187939 - protein, 351 aa, unidentified
MAHKLNSGIAVIGIDIGKNSFHVVGHDKRGAILLRQKWSRGQVEARLANLPPCLIGMEACVGAHHLSRKLQMLGHDARLMSAKYVRPYSKGQKNDFRDAEAITEAVQRPTMKFVATKTTEQLDLQALHRVRERLVSQRTGIINQIRAFLLERGVAVRQGLRFLRAELPRILAAPCDALSPRMLRVIEDLAGDWRRLDERIEGLSSEIEALARQDKGCERLMTVPGIGPIISSATVAAIGTGDAFSKGRDFGAWLGLVPKQISTGDRTILGSISKRGNRYLRALFVQAAWVVLVKVGPKHWERYGLKSWIEAAKKRLHHNVLAVALANKLARIAWSVLAHGRTFETSKIQAA

SEQ ID NO: 187940 - protein, 344 aa, unidentified
MDIAVLGVDLGKNVCSVVGLDASGAVIMRRRMRRETLITLAEKLPACIVGMEACCGAHHLGRLFAAHGHGVRLMSPEYVRPYVKAQKNDDRDAEGIAEAATRPTMRFVELKSQDQLDMQTVHRSRDRLVGERTALINQLRAILLERGLVAPQGKRKLEQFLIALMDEQGGAGLSPRMIVLVADARTQWAELDRRISAFDAEFVRWVKENEEARRLITIPGIGAIVASALVAAVGQAESFDRGRDLAAWLGLVPRQFTTGGKAKLLGISKRGNKYLRRQLIHGARAALPYVVERDTPLGRWAKDLSSRAHRNVAIVAFANKLARIAWAVLRRKKRFAAAGLPMAA

SEQ ID NO: 187941 - protein, 363 aa, unidentified
MQAIGGVNGLGSADEVVLGVDTHLDLNVAVALDQLGRRLGELRVPTTTRGCERLLRWAEGFGPVGCAGVEGTSSYGAGLARDLKAAGISVVEVERPKRRHLRRNGKSDPIDAEAAARAVLAGEAVGEPKSGDGRVEMIRTLRSARQSAVKARSQAANQLQALLVTAPEDLRHRLRDLPTKDLVAACARFRPGNDLGDVQTATKFALRSVARRHEALSEEIAKLDVQLDHLVAEVAPGLIVRPAIGTHHAATLLVLGGDNPERLDNEASFASLCGVSPVEASSGKVVRHRLNRGGNRDANRALHMICVVRMGSDPRTRDYVSRRTAEGKSKREIMRCLKRYIAREVYRVLVPPTTASSSTGSGL

SEQ ID NO: 187942 - protein, 352 aa, unidentified
MKKGNKSEEWQRETGLVIGIDLGDKWSSVCVRGADGEVRQEDRVRTNTMDVSRLFSRVEQSLVVMEVGTHSPWASRLLESLGHAVIVANPRRLKLISASDGKSDRVDARLLAELGQCMPRLLQPVRHRSAEAHTDLLVIRARARLVEVRTRLWNSLRSMAKSLGHRLPRKVKEEHLDPWPALRPLWETVGELTDRIRDYDRRIEALVRDKYPAAIRLQQVAGVGPIIALTFVLTIEDALRFRKSRHVGSYAGLRPRQRDSGESQPQLRVTRAGDRYLRAMLVQGAQYILGRYAPDTDLRRWGLQLAARGGKNAKKRAVVAVARKLAVLLHKLWVSQEPYQPLRNSALTAVVS

SEQ ID NO: 187943 - protein, 344 aa, unidentified
MEITTIGLDLAKSVFQVHGVDATGQVVIRRSLRRAQMLPFFTRLPSCLIGMEACGTSHYWARELIKLGHQVRLMPPAYVKPYVKRGKTDAADAEAICEAVTRPTMRFVAVKSPEQQAALSMHRTRDLLVKQRTQLVNMIRGLLAEFGIDIPKGLERALLMARRIVDGEAPDVSMEAARIVSTLSQQALDIHIRLREIDRDLLVWQRGNDVARRLMTIPGIGPIGATALAASITDPRQFRSGRQFAAWLGLTPLQKSSGGKERLGRISKMGDKYLRKLLIVGMTSLVRRAKYNSKTVDLRLADLLARKPVRVATVAMANKTARIVWAVMARGETYCAGHRPALAT

SEQ ID NO: 187944 - protein, 355 aa, unidentified
MQKAITAGLQRTVGIDLGDRYSCYEIVEADGETVGQGRLSTTVHGLEQTFGACAPTRMVIETGTHVHWVKDVLAGLGHEVIVANARKVEVIWRNQRKSDETDAGLLARLGRSDPQLLSPVVLRDPAAQNDLALIRSRENVVRTRTQLINAVRGLVKSRGARLPRCSAASFHKKALGELPATLRAVLEPMVVTAGYVTGQIRGYNRQIAALIETKYPVAKHLSQVSGVGPLSALTYVLVIGDPRRFRRARQVGAYVGLVARRDQSGARDPQLGITKTGHALLRRLLVQAAHYILGPFGADSDLRRFGLKIAARGGKAAKKRAVIAVARKLAVLLHRLWLTGEVYEPLRHAESARPR

SEQ ID NO: 187945 - protein, 364 aa, unidentified
MKTLHYVGMDVHKETIDVVVFRGDEREPFLERTILNQVGVIRKLFKKLMEGGSVIACYEAGCMGFGLQRMLEEMGVASIVASPGRVPRRPTDRVKKDRRDARRLAEQLRARTLEAIHIPSRDDEAVRDYLRAREDVRFELVKTKQRLQKFLLRHGYVYESTRYWTGRHDRWLRGLEFDKGMLKEVFEEYYFMIGELTEKLRLMDRRIEEIALSEPYAVRVGRLRCFKGIDYLTALSIICEVGDFRRFSHAESFMAFLGLVPCEASSGEKRRQGGITKSGNTHLRKLLIESSWHYRYRSAPSKRLTERRKGQPAEIIAYADRAMRRLQWKFLRLIMKGKTKQAAVTAVARELAGFVWGMMVGQTA

SEQ ID NO: 187946 - protein, 386 aa, unidentified
MPQSNDLSRCLAALDQDGTLIGVIEMSQSSWLVAGIVPGIERHPLKKLPVDEEALLRLLRRWRDEAIKAGRTIVRITIAFEAGRDGFWLARWLRARDIEAYVIHATSIAVSREHRRAKTDRLDTELLKRALLGWLRGEPDHCSMAAIPTLEEEDAKRQNRERENLIGERTRIVNRMQSSLARLGIRTFKPTLRKASDLLATVRTPEGVLLPLNTLAEMRRDMARLRFVIEQIKEIEAARLERLEDAPEERCHAMVRLLARVIGVGIETADMLVHEVLSRNFRDRRGVARYAGLTGSPNESGSKRREKGLARAGNARVRRGMIQLAWRFLMFQKDSALAQWYRARTRDARQGTRKTMIVALARKLLVELWRFVTTGQPPVGVALRAA

SEQ ID NO: 187947 - protein, 349 aa, unidentified
MEHYVGIDVSLERSSVCVVDVGGKIVAEAKIESHPDAIINFLRKLGLSIERIGLEAGPLSQWLHAGLTKGSFETVLLETRHVKAALSAMTVKTDRRDARGIAQLLRMGWFRPVHCKSPGSQEVRALLVARKQLLGKLLDVEFSIRGILRGFGLKMGIVTRTGFEGRVRELCAGQAMLEQIAEAMLAARAALRKEYSKLHKAMLALVRRDAICRRLMSAPGVGPLVAITFKTAIDDPARIRKSKAVGALLGLTPRKYQSGETDVTGHVSCVGDTMARTALYEAANAILSRVTRFSALKRWGMDVAKRRGMKRAKVALARKLGVILHRMWMEGTSFRWTKEASQAPQIARA

SEQ ID NO: 187948 - protein, 363 aa, unidentified
MQYIAFDAHKHYTLASVARPDGQVVREQRIEHERGALQEFLARCEPGSPVAVETIGNWYWIVDEIEAAGCIPRLVHARKAKLMMGEINKTDRLDVRGLNRLQRNGTLPTVWIPSGELRDQRDLPRTRMVLVRQRTQLKNRLHATLAKYALHHFEVSDVFGVRGRAVLRQRLELLPPHTAYASGHLLKQVEDLGNQIREFEQRIHTTFKPTAGIQHLMTVPGVGLMLAVVIALEVGDVARFATAEKLAGYAGTTPRVHASGGKTRFGRSRPDVNRYLKWAFVEAANAICLTRRRARSRHVSRLYERIAHHKGHAKAIGAVARHLAEATFWILSKQEPYREPKLSTVSSTGDKREIPLSSPKLDR

SEQ ID NO: 187949 - protein, 314 aa, unidentified
MTFYLGIDVSSKSLDVAFFIADGMPARGEQYPNSAAGAKKLLQALADLPVGHVVLEATGGYENLILNALAPHYPTTRIASHRGTAFARSLGLFAKTDRVDAMVLARMARTIPPQPYVPPEPAQQALRGLVKGRDQLVQQRDDNRRRIKRAESAVVRAALERVNTLLDREIRALETQLREAAEACDGERARQLAEVPGVGKITVATLLAFLPELGRCGNRQISALVGVAPYTRQSGRWDGPRQIMAGRPFVRRVVYMAALAAIRSTKSPLRAHYRALVARGKPAKVAIVACMRKLLITLNAMLRDNTPWRAPAVA

SEQ ID NO: 187950 - protein, 339 aa, unidentified
MELYVGMDLHSNNTYVGILDKETQGKVYHKRLPNELPKIVYELEPFRKDIRAITVESTFNWYWLVDGLMDSGYEVCLANPAANQQYKGLKHSNDKSDAFWLAHMLSLGVLKKGYIYPKEERPLRDLFRKRTFFVHQRTSNILSLQGLINRSLGRRINSNSIKTLTQEKIDELFKDDHSRLIATSGVNTIKSLDREIKSIEKAVLEKAKLRKEFENLLSVPGIGKVLALTIMYEVGDISRFEKVGNFSSYSRCISGKWTSNDKVKGKGNSKNGNKHLAWAFVEAANIARRYNKKLNAFYQRKESSKNSLVATKALAHKLSRACYYIMKDQVPYKEELLVS

SEQ ID NO: 187951 - protein, 350 aa, unidentified
MKKVVKQVLGTDVSQKELVVTLGRLFDDLSIDLYAHKVFKNSEKGILSLIEWVEKLTDQSVKVRYVMEATGIYHQKFAYYLDKNGYELSIVLPNKISNYMRTLENKTITDKTCSEAIAQFGLERKLEQWHRPNKVYKNLQQLTRERDQIVAERVTVKNQLHAEQNEAEPNQNSLRRLEDRKKLLNSQEKEIKQEIAQIINLNQELNEHVERICTIPGIGQLTAAIVLAETNGFELTRNKKQLTSYAGLDVKEKQSGTSIKGKPKISKRGNRSLRKSMHLPSLTAVKWDDKFEELYARLVAKHGIKMKALVAVQRKLLELIYILFKNKTTYDKEYETKKQIQKNSVQTQVV

SEQ ID NO: 187952 - protein, 438 aa, unidentified
MRSRAYASVRVNDVDAETLARGHDSQDVVVGMDIGKYDIKVVCRWPNARFERPWSVNNPSQIASLVRVLQTLGHGRQLRVALEPSGTYGDALRQALQDGGLSVERVSPKAAHDYAEIFDGVPSQHDGKDAAVVAELAALGKSTPWPYAPPDAWRQEMAYWVDELEYHRRVLVLGLGRIEALLARHWPEATRTLSLSSGTLLRVLATYGGPAALAADVHALEVLQRWGGKYLTAAKAQELLAGARNTVGVRQGEWDRQLRVNAERARAARQAFARSKRRLQRLARDHAILQAQGAVVGVPTACVLWTRLGDPRDYACAGAYRKAMGLNLTERSSGTWQGKLRISKRGHPQTRQWLYLATLRLIQRAGVQPWYQAKKARDGDGAKRALVAVMRKLALALYHVGARGATFDARRLFARIARRREKKADARTASRGTGSGRG

SEQ ID NO: 187953 - protein, 341 aa, unidentified
MNIKRIGIDLAKQVFQVHGVDGQEKVVLRKQLRRAQMLDYFKTIPPCLIGMEACSSAHYWARELQKLGHTVKLMAPQFVKPYVKSNKNDANDAEGICEAVARPTMRFVAIKSIAQQDIQAVHRIRSELVQQRTAKVNQIRGLLAEYGIVVGRRVDVLHNALPLILEDAENGLTPDFRVLLEGLRQDLATLNGRVDELDKTIKTLASSNTDAKRLQQIPGIGPITATALVCAIGDGKQFKRGRDMAAWLGLTPRQHSSGGKDRLLGISKRGDAYLRTLLIHGARAVLKVAGQKDDPRSRWLQNLCSRRNKNIAAVALANKNARIAWALLSKETDYLPEGEPA

SEQ ID NO: 187954 - protein, 359 aa, unidentified
MKIIGCDFHPSWQQIAIFDAETGEISEHKLVNGDGEAERFYRELEAPSLIGIEACGNSQWFIELLEGLGHEVWVGDAAQIRASYVRRQKTDRRDAGHILKLLMENRFPRLWTPTSEQRDMRQLLIHRHKLVEIRTRVKNGLQHLALNKGLQKKNALWSVRGRAELEKLPLQGWTARRREDLLKLLGGLDRQIGELDQAVQQAAENNPQARLLMTQPGVGPITSLAFVLTIGDVSRFRHSNQVASYVGLIPREHSSGGKQRLGAISKQGNRFLRQLLVEAAQSATRLDRGFRKEYQARCHHKPKGVAKVAAARKLAVRLYWMMRQNVGYPEIARIESSPRVPLTGKSQVVTLNERSRIQH

SEQ ID NO: 187955 - protein, 346 aa, unidentified
MKDNSKVFEISIVGIDLGKNCFHMHGTDASGHVVLKKQVTRAGLLRLMSNLPSCLVGMEACGGSHDWARRMLKMGHDVRLMGAQFVKPYVKSNKNDFSDAAAICEAVSRPNMRFVPVKGMEQQDVQSMHRARSLAVSHRTAQANQMRGLLMEYGIVLPQGMASLRGRIPDILADADNDLTPIFRELLCRLADEVRRLDERITDYDRQIKQLAEQSDACKRLMSIPGMGPMSATALVAAVADAKAFGNGREMAAWLGLVPRQHSTGGKPRLLGISKRGDSYLRKLLIQGAQSALRVASKKTDRQSKWVCGLSERRGRNVAAVALANKNIRTAWALLSKHESYHPAMA

SEQ ID NO: 187956 - protein, 375 aa, unidentified
MSSVVGTIYLGLDVHKDSVTIAVLPGDAVAPTRVERLPNDLAKLRRFCERLRAQGEVRACYEASGAGYVLHRAFTSWGYHCDVIAPSLIPTKPGVQRKHDKHDAVQLARLYRAGELTVIRIPSEAEERVRDVVRCRETFQREILKSRHYILKFLARRGFVYRAGTNWTQPHYEWLRQLSHARSPLAPEDRSVFGEYLGLLEYKLSRRDELDRQIAELALLPALAPAVARLQCFRGVQLHGAMVLATELVDWRRFESPRQLMAYLGLVPRERSSGDRERRGSLTKAGNSHCRHVLVQAAWAYRYQPKIGISLKARQRGQSPVVIAHAWKAQHRLHTLYRRLAARTKPQIAVVAVARELVGFLWAVMQEELPVSVAA

SEQ ID NO: 187957 - protein, 420 aa, unidentified
MEQEPTVFVGIDWASEEHQVCLIGPKGPVQRAFTHDAAGLGAMAEWIVSQASCPKDVAVAIETPTGPVVEVLMDRGVAVFSINPKQLDRFRDRLSPAGAKDDRKDALVLGLSLRTDRHCFRQLQPLDPAIVELREWSRMDSELKDERNRLTNRIRQQLWRYYPQALELNDDMGADWVLDVLALAPTPSAARRLTERKVTKILAAHRIRRITPASILNLLQVAAVTVASGTEQAATAHIAAVAERLRLVNRQLKEVARRLERLIANLPAVEPGEPEGQLSEQRDAVILRSFPGVGRTVLATLLAEANQALHARDYHALRTLCGVAPVTKRSGKSIRVERRQACSHRLREALYHWARVATQHDPVSKARYAALRSRGHSHGRALRGVGDRLLAVACAMLKTQTIFQPREPKLAGTQPQIIPC

SEQ ID NO: 187958 - protein, 339 aa, unidentified
MTVKTVGLDLAKDVFQVHGISESGRVIFNRAIKRAKLLAFFETLPPCTVGMEACGSSHHWGRQLRKFGHDVRLMPANYVKPYVKRGKTDAVDAEAICEAVRRPTMRFVEIKTEDQQAILSIHRTRDLAVRQRTQLANMIRSLLREFGHILPIGIEAVTAFAKRHLDGDHPDMPEIANGMLGIQCYQFIGLNERIEGYSKMIEQHALLNADARRLMRMPGIGPITASAIVATIGDAKQFRTGRDLAAWLGLTPLNKSSGGKERLGKITKAGDRYIRKLLVVGMTSRAVMAKRSPEKVDLWTAKIISDKPFRLATVAMANKAARAVWAMLTKKQEYRQPAF

SEQ ID NO: 187959 - protein, 378 aa, unidentified
MKKIIAITQVTLDGVMQSPGGPEEDPRNGFTHGGWAMPFFDDDSGNLWEGTLSDFRPDWTGTFAKKTNESDPDRSDLEAVVTAAEAADASLEGALEAAGHAVIVADPNYAPMYVQRSRRIKTDRRDAQALAEACRLGVYRPAHRTSDAQRHIRALLSARDALVRTRVRWIMTIRPLLRSEGLRVRTGATETFGDRVRALDLPDHVQCEIAPLLALLPALNEQIRMLDQQLVEMSRTQQESRRLTTAPGVGPVTALSFVATLDRIQRFRGAHQVESYLGLVPREWSSSETQRRGPITKSGNSRTRWLLVQAAHCIRRYSKQPQAAGLREWADRIAQRRGRAVATVALARKLAGILYAMWRDGVDFDASKLCSPGVRPAA

SEQ ID NO: 187960 - protein, 449 aa, unidentified
MASRKSNAAGLPVVHERAAGVDVGSRFHVVAVGADLCEAPVQTFQAFTADLERMADWLGAVGIKTVAMESTGVYWVPVYEILEARGIEVVVANARESRAVPGRKTDVNDAQWLQRLHACGLLRASFRPSRDIAALRVYLRLRERHLDYAAAHIQHMQKALTFMNLQLHHVVSDVTGVTGMKIIRAIVGGQRDPRVLSKMRDVRCKASNETVCAALVGNYQPEHVFALGQALVLYDFYQARVDECDAKIEQVLATLTASKAHPTRPLPDARHRTAAGNAVNFDVRPILYQLAGVDLTQIHGLGPYLALRLIAECGTDLSRWKTAKHFTSWLTLSPGSKVSGGKVLSAHTRKTTNRVVAHLRLAAVTVGRTNTALGAFYRRLSARIGKAKAVTATARKIAILFYNAMRFGMDYKDPGSSHYEQKYRERVIKQLHRRAAEFGFTLQDAASVS

SEQ ID NO: 187961 - protein, 304 aa, unidentified
MFGIGIDVSKATLDVAVHGEQFRQFSNDKRGFVRLIRWLKTWPIKQVVLEASGGYERAALDVLHAAGLPMVRINPARARRFAQGTGRAAKTDRLDATVLAQMAHLLPLTRYVPPAPWQQRLAEFAQCRRHLVQMRVSEMQRLRRLVDPDLIAMKQRHIAQLSDDLKQLDKAIAEQLEGQPGWKNIGALKGVGPILISTLACELPELGSLGSKAIASLVGSAPMNRESGTWQGQRRISGGRAVVREALYMAALTAIRYEPRLRAFYAGLKAKGKASKVALVAVMRKMLVILNARKRDAEVALGCP

SEQ ID NO: 187962 - protein, 366 aa, unidentified
MDHFAGLDVSVKETSVCIVDDTGKIVREVKVASEPKALLAVLKNPAYRFKRIGLEAGPLSQWLFSALAEAELAVVCVETRHMQAVLKAQINKTDRNDARGIAQMMRVGLYRPVHVKTLRSQKLRMLLTHRKLLQSKAIAIENDLRGTLRNFGLKVGMIGKVKFEARINELVESLPDLAGLVEPLLVVRRALREQIVVLHRRLLAIVRDDEVCRRLMTTPGVGPVVALTYRATVDVPARFHKSKAVGAVFGLTCSKYQSGEIDRSGRISRCGDQMMRVMLYEAAQSMLRSKKWCWLKAWAMQIARRRGMKKAIVALARRLAVIMHRIYGPAMRCKGIRTEWSFWSALIYPASRGSSCSGPSWLSAHT

SEQ ID NO: 187963 - protein, 434 aa, unidentified
MPAAAFRFGETWLGVLMANVMIGVDPHKGSHTAVAIGAGEEPLGELRVDACPSQAEQLRAWAVAWPQRAWAIEGAAGLGNLLAQQLVAAGERVLDVPPKLAARVRLLQAGDTNKNDPNDAYSVAVAALRSKLARPVLADGHAVVLKVWAKRHRDLARLRNQACCRLHAVLCDLVPGGVRREISAGRAARLLEQVRPADAVTTARCELAGEFLGDIRRLDAQLRECHNKLAAAVRASGTSLTGLFGVGPVIAGTVIGDVRHVFRFPRRDHFASWNGTAPVEVSSGDRRKVYRLSLRGNRRVNHAIHMAAISQIRHKHSDGRAFYEKKLAEGKTHKEALRALKRRISDAIYAALAADARRAASACSKSPGGQPGDHSASRAAGSHPAHRHFGQATPGPAPTIRPGANSSRAPTQPNRARRRAAHSPASSKKPPATT

SEQ ID NO: 187964 - protein, 317 aa, unidentified
MEAGLQGSCVGIDVSKDHWDVAVEERRGVRRFSADNAGASELLAWLEELSPKLVCLEATGGYERSLRRALHERGLPVSVVNPRQVRDFARAHGELAKTDALDAAMICRFAAAFNPEPDEAPTPAQERLRALRARRQQVVHSLTQEKNRLATAPDAEARQSIEEAIDFYNEQLSELDRRIAELTATDPTFRQRLALLVSVPGVGTVTAAGLLAELPELGAMNRGEAAKLVGLAPINRDSGALRGKRMIGGGRTQVRRSLYMATIVATRHNKIIRRHYRQLLDRGKSKMTALVACMRKLLLILNAIIKNNSPWKEYLTA

SEQ ID NO: 187965 - protein, 360 aa, unidentified
MKKDTRGESGLTVGVDLGDRWSKYCVLDEHGQILEEDTVATTGRAFRKLFSDRTAARVVIEVGTHSPWVQRLLQELGHETITANPRYVRLIYSSRNKNDKLDAERLARLARVDTKLLHPIQHRGGTTQADRALLRSRNALVECRTKLVNHARGIVKSIGGRLPSCSTTCFHKRVRQDLPDELKPALTPVLDTLAALTKKIQCLEARIERLAAKRYPETGLLRQVSGVGPLTSFSFVLTLEDPERFKNSRAVGPYLGLRPRQSQSGEQNPELRITKAGDMDLRRLLVGSAHYILGPFGPDTDLRRWGLALAARGKKNAKKRAVVAVARKLAVLLHRLCVTAEVYEPLRNSRSVIVQEAVSA

SEQ ID NO: 187966 - protein, 417 aa, unidentified
MTKHSKSPPKAKPATTNATATNKAKPATTSATAQTKAKPVTAGATATTAKKKRTSEQPGQGQSHTPAGRFTIGLDLGDRSTAFCVLDADGAIVAEGKLKTTQAAIKQQFASLAPARVALEAGTHSGWISRLIASYGHEVIVANPREVRKIYQNDRKNDRSDAQILARLARFDPQLLEPIRHRTAPMQADLATIRARETLVTARTKCVNAMRGLVKSMGGRLPKCSTESFCKRVSADVPAELEAALRPLITAIQTLNEQIRCCDQQIESLATQTYPQTALLRQVSGVGPLTALAFVLTIADGARFAKSRDIGAYLGLVPRQDDSGDHSSQLRITKAGDPYLRRLLVGSAQYIVGPFGPDTDLRRHGEKLMQRGGKNGKKRAIVAVARKLSVLLHRLWITGEVYQPLRNSNRQASLIAA

SEQ ID NO: 187967 - protein, 380 aa, unidentified
MEHLAIDLGGRKSQVCLRSSDGQILTEAKVLNEEIQTWLEGSEPRRVIVETCTEAFGIADLALSLGHDVRVVPSRLVRLLGVGARGKKTDLLDARALSEASCRLDLPSVHLPSAWSRRVKSMCGMRDVLVQSRTMMVNSVRAWSRTQLKAVRRATLKTLPLRMREQAASRGEKLPDFVERLLVSIEQLTEQIKAATKELTGLAEENDVCRRLMTVPGVGAITSLRFVAAIDQVGRFSNAHQLESYLGMTPGEDSSSERRRITSITKAGPSAVRWTLVQASWAALRCAPNDPLQRRVSDLVKTIAARRRTTAPAPTSANSRLRQLVAAVPDRQASRSGMALLRIALLLTGQPLHSGARAPDLFRPPKGATSTSSALTPGCR

SEQ ID NO: 187968 - protein, 346 aa, unidentified
MTIVEAARTVTGGIDTHGETHVAAVLDQVGGLLGTESFEANLHGYSALFSWLAGFGKVGKVGVEGTGAYGAGLARFLTRAGVEVIEVDRPNRQDRRRTGKSDPIDAVEAARAALSGRAHGHAKSRDGAVEAIRVLVVAKRSARQARVKALTQMRQLTFTAPDQLQCRIKGLSAPQFIAAAQGLRPTRSGDPVMVATKASLSSLAHRIGELEEEIAELDARITPILEAHAPELLGIYGVGIDTAATLLVTAGDNPKRLRSEAAWAHLCGVSPLEASSGKVTRHRLNRGGDRQANRALWIIVISRLASDPATQAYMERRVKEGRSKREIIRILKRYVAREVYRHLPRG

SEQ ID NO: 187969 - protein, 311 aa, unidentified
MQQTIGIDIAKDTLDAYRLGDGHRLSVDNNREGHRLLMQWIGAFQKTLIVFEATGPYHRELELVLGSRDVPFVKVNPKQARRFAQATGRLAKTDRVDAAMLARMGAALELEAQTPRPKSFHDLRELLAARRALIKDRAAAKIRRSVATLPLLKRQLEDRLARIDKDVKRIDTELARMAALDPDLSRRVAILQTIPGVGEVTAVTLIIDMPELGELEGKQAASLAGLAPVSQQSGRWQGKERIQGGRAALRQALYFPAIVAARFNVDLKLIYDRLTAAGKQKKVALVAIMRRLIVMANALIRDNRPWAPNHT

SEQ ID NO: 187970 - protein, 350 aa, unidentified
MDHIGIDVHKKDSQICILTEAGELLERRVRTEPDRFAEVLGHRSRARILIESATESEWVARCLEALGHEVIVADPNFAPMYAQRTRKVKTDRRDARALAEACLLGAYRRAHRLSDEQRHVRARLTVRDALVRTRTGYIAVIRSLLRQHGWRVRSGAAETFSCRVRELPLPGRLLSEIAPLLAVMRHVNHQLAYSDERIETVTRTDARVRRLRTVPNVGPVTAAAFVAAIDDVTRFRGAHEVEAYLGLVPRELSSGETQRRGRITKAGHSRMRRLLVQAALSTLRRPNPHTVELRHWATRIAARRGKQVAVVALARRLAGILFALLRDGTTFQPRRASGHSSAATASRAPA

SEQ ID NO: 187971 - protein, 403 aa, unidentified
MNNVAGIDVSKGKSMVSVLRPFGEVVAKPFSIGHTGSELKELADYLKSLDGETRVVMEHTGRYYEPVARFLHDEGVFVSAVNPKLIKDYGNNTLRKVKTDKADSRKIARYGIDNWAELRQHTPMDTIRMQLKTLNRQQSLYTKTKTMMKNNLIALLDQTYPGVNALFDSPVREDGSQKWVDFATTFWHVDCVRNMSLTAFAERYRKWCKRHGYNFSQSKAVEVHAGAQDLIAMLPRDALTKTMVRQAIDALNAISASMERLKAEMQALAAQLPEYPVVMTMHGVGDSLGPQLMAELGDVTRFTHRNAITAFAGVDPGADQSGTHEAKSTRVSKSGAPELRRALFLVMDCLLKTQPQDDPVYRFMDKKRAEGKPYLVYMTAGANKFLRIYYGRVKEYLASLEGN

SEQ ID NO: 187972 - protein, 347 aa, unidentified
MTLYIGVDFHPHQQTVSYCNNEEGEVHQTSLIHNVEQVRRFYRQLPKAVVGIEASCTAAWFEQMLFDLGHELRVGNPTAIRARARSRHKSDKRDADLILDLLLKDEFPTLWRRSVQGQSVLEQLRFRHQLVKHRTQICNRLQALAHAAGLPKKGIQTKRARVALMEARLSETQSFQRDQFFELLDDLTERIKQVEQWLEEKAAGDTKVQLLLTHKGIGLLSALATVHTLGDVSRFPSSKEAVAYTGLDPLEQSSAGKVRYGSISKAGSSVLRHLLGQAMHVASRYDGELRSFYKRLASRRSKSIAKVAATRKLLVRLFIMLRDGIDYAEFKRRGATVGMPVLSHGLQ

SEQ ID NO: 187973 - protein, 351 aa, unidentified
MDRYIGLDVHSQSCTLVVLGPSGRRLKNQVLETNGRVLVDAIKGIAGDLHLCFEEGTQSAWLHELLSPHVKELVVTVPAERKGAKDDLRDATELAEKLRAGTLETRVYKAPKPLAGLQNAVRAYGMVTRDLVRAKNRLKAVFRARGIASDRTVYDVERRASWLKKLPAAHRRLAEWMGREVDALVPLRDEAEAWIHEEAKAHPIVKILSTAPGMATKRSAQVVAIVGTPDRFRTRRQFWSYCGLGIVTRSSSDWIHQGDGDWVRKEVNQTRGLNRNRRPQLKAVFKGAATTVIQQLHDHPLYEDYQRALRAGIKPNLAKLTLARRIAAAVLSMWKHKEDYDEKRVSVKKRP

SEQ ID NO: 187974 - protein, 338 aa, unidentified
MTIIATGIDLAKNVFAVHGVNGSGVVQMRQPKVARGKLGALVAGLPPGVIGMEACSGAHHWARQFQAHGHRVRLMAPKLVTPYRMSGKRGKNDAADAAAICEAMQRPNMRFVPVKTEEQQAQLMVHRARQGFITERTACINRIRGLLSEFGIVLPLKAEVVRRQAREHLEDLPGYANLVIGDLLSEVAHLDERIGQYDKHVHAIARQSTPAQQLMQLMGIGETTATALVAMVGNATEFNCGRQFAAWIGLVPGQYSSGGKTRLGRITKAGDPYLRSLLVMGARAVLNAAKNKADSISRWALAVEQRRGYWRAVVAIAAKNARLAWAVLTKGEAFKLPA

SEQ ID NO: 187975 - protein, 429 aa, unidentified
MTQTHHKTEQPVLVAIDIAKHRNEVLIAAPGRQRRRRLTVRNVREDVDRLVETLAAFEMPVQVGFEPTGDYHRPLAWRLHQAGFELRLISSLSLARTREAMHNSWDKNDPKDAQVMLHMMQTGLTQIWHDPLVHGVNDIQELSKTHAVISQTKTEFWHRLRTHYLPLYFPEIERFMGNSRSDWFLAFLERFPTPGSITCMPEQAFIEAAWDVVGRKVAKARLLADMYATAADSIGLPVDTTMPAISMFRLVLNQGRELIAKRDQIEQQASDLLGTHPDFVRLRTIPGIGPINALTILAEAGDLRRFGHHRQFLKYCGFNLSTQQSGVFRGQTKLSKFGNARLRRTFWMAAQVAIRQRENGFRDKYERYIARDHSDPHLKRKALTAVAAKIARTAHSVIKTETDYRPFFEGRGPRRKDPALHVPLRHATS

SEQ ID NO: 187976 - protein, 350 aa, unidentified
MVVIGSDVHKSTHTFVAVDEVGRWLGCKTVKATHSGHREAVMWAREQFGDQVRWGIEDCRNMSGLLERDLLGTGQAVVRVPTKLMDRERKATRTRGKSDPIDALAVARAVLREPNLPRATHDEVSRELKLLTDRRDTLVTQRTSATNRLRWLVHELDPERAPGSRKLDAATHQEMLQDWLLTVAGVVAEMALAELADVVRLTSEINALATRIGARTREVAPSLLSLFGCGELTAAKIIGETAGVARFKSEAAFANHAGVAPIPVWSGNTCGRVRLSRCGNRQLNRALHTIANTQRAHPGIGQTYYQAKTAENKTSKEALRCLKRHLARVVYRHLIADEKARQSPPQTAAA

SEQ ID NO: 187977 - protein, 347 aa, unidentified
MLHAGLDLSRKKLDVCLLSDDGEHLDQLAVPPDVDSLRTLARRIEEVHGEPVCAVIESMTGARIVHDTLEQEGWDVEIADAQRVKGLAPLACKTDKIDSKVLAVLSHRDLVPAIWLPDPRVREERELARFRLHLVKHKSALKCRIHSTLINFGRACPVTDLFGAEGRELLRCLEVPEPWRGNVTASVCLIDDLERQISEINARLRAAHADHPYIPLLMSVPGIRWVLAFTIAAEIGEIERFSSPEKLAGYTGLCPRVNQSGEKDRRGPLTKHGPTYLRWALLEATMHALRHPAYSERYQRTKRRLGKQRGAKVAQIDVARRLAHAIWHMLSRNEKFAPRGAALRLAA

SEQ ID NO: 187978 - protein, 387 aa, unidentified
MEKPLDDSKACRTAFVQDNTLVAVIEMSLSSWLVAGMIPGVSREPLKKIAPDAEDLLQLLYRWRGEAITAGKEITRIAVAYETGRDSFWLARWLRERGIDANVIHATSVAISREHRRAKTDRIDTAMLRRGFLGWLRGEPGHCSMAIVPTVAEEDAKRPHRERDSLVHERTSIINRMKAILIQFGVRNFNPVLRKAREKLDALRTPEGIPLPPNTVAALRRNMERLCILKEQIKAIEQTQLQCLERDPAERMNAIIFLLVRIIGLGVETAQQLAHEILFRNLRDRKAVARYSGVTGSPDESGSKRREKGISRSGNGRVRKILIQLSWRMLQFQPESDLVVWYKKRTLNAQGARKPMIVALARKLIIALWRYVNTGVVPGGFKLRPAA

SEQ ID NO: 187979 - protein, 319 aa, unidentified
MCQGKYYIAFDVSKSKLDYFTPDSGAGVIANDCRAAAKLLLPLARKHGGALHVCLEHTGIYGRTLAEFCWGNGITCSLLDPKKIYHFRKEQGAKAKTDSKDAELIWEYARQRAPEPSLPGSALARKLAELDKFRAMLVKSASQLKTAVQQVGDKEVKAMCAAQIKRLERRITAVGKQMAELIAGDERMSQLKERFMQVNGVGELTATSMIVYLGDALGQVGDRTVCALAGLAPLADESGKIKGPRRIRGGRIEPRRALYIAAWTAAKHNHILSPFYRRLVIESRKPKQLALIAVARKLLCLLNRIARDPDFKVLTSSAA

SEQ ID NO: 187980 - protein, 351 aa, unidentified
MESGKRKIVIGIDTHKDIHVAVALDHLGVRVGQLVLPATTAGYAQLEKWCHQHGVPTTFGVEGTGSYGAGLTRFLRHRDHHVVEINRPDRAGRARLGKSDPIDAEAAARAVLSGTALSVPKSGTGHVELIRMIKVARDTAVRARSQALITLKTVIITAPAELRETLDGLAAKPLVERCASFRPGLVTAPIAAAKFALQALARRWMDLDREVRSHDRELDRLTLEQAPTLRAAFGFGTDTTAEMLIVAGDNPRRIHSEAAFAVLCGVAPLPASSGKTKRHRLSRSGHRQANAALYRVVIVRMRWHQATIAYVTRRLAEGKTKKEVIRCLKRYVAREVFRLLRPAAMSTPTAA

SEQ ID NO: 187981 - protein, 414 aa, unidentified
MFAVGVDVSNGRSTVAVLSARRTVVVKPHEVPHTTDGFAELTERLRGLDGEVRIVMEHTGRYYESFAMSMYRAGFFVSAVNPLAIKDYQEGISVRKVKTDKADALKIAQFAIDKWEILPHYTPMDMIRYDLKTLHRQFQLSSKTKTALNNNLIALLEQSYPGANRYFDSPVRPDGSQKWVDFVDTFWHVDCVASISRKAFVERYQKWCKRHGYNFSEAKAGEIHEDARQKFPLVPKSDTCKLLVREAVAQLNAVSRTVETYRAEMDRLASQLPEYETVMAMAGVGKSMGPQLMAEIGDLRRFPHQKSLVGFAGTDPIKDDSGDKVSDSKPSSKRGSPYLRKTLFVIMTILLQLQPPDDPVYQFLDKKRSEGKQYYVYMTAGMTKFLRIYYGKVRDCLKEKGLWEQPIVDEVNPG

SEQ ID NO: 187982 - protein, 340 aa, unidentified
MLTVGVDVAKATLEAALWQEGRAVRLGRFEQTAAGWGALRDAIVAQPRPVMDREAVAIVLEPTGGYELAVALWARQQSGWQVHRPNPARVRAWARSQGLRAKTDRQDALLLARFGASAQPALSVWQPLTSEVSELEQLLRRRDDVKDLLERERRRQEQLGVRPDASTTVRVSVERLLKTLEDELADLERAITEHIQQHTQLQAAAVRLRTVPGVGARVALPLLVVCERFHALTGGEGDAKGVVAYVGLDPQLYESGVSVRRAAGISRKGDRLLRARLYMGALGALRGDNPVRAFYQRLVQRGKPKKLALVAAARKLLVWAWAVFLSGQPFDAGKVGGSPT

SEQ ID NO: 187983 - protein, 441 aa, unidentified
MAAPVMEPNAAGVDIGATEIYIAVPPDRDMQPVRRFAAFTEDLKAAADWLERCRIETVAMESTGVYWIPLFQILEARGMKVCLVNARHVKNVPGRKTDVSDCQWLQYLHAVGLLRASFRPSGQVCAVRSLMRYRESLVGMAAVHLQHMQKALDQMNLQLHHVISDLSGTTGMAILDAILGGERNPLKLAQLRDPRIKASPETIAKSLVGDYRREHLFTLRQSVTAYRSYQQLLACCDVEIEQMLGEFSDGAGPDTPVLADPKDRHRPRRNEMKFDLRGHLYRIFGVDLTEVPGLNALTAHTLLTEVGPDLSAFPNVGAFASWMGLCPDNRVSGGKVLSSRTRKVNNRVARALRMAAQSLFRSQSWLGQYYRRMRAKLGAPKAITASAHKLARIVFNMLTNRHAYDETVFAQQEIQNQHRLQQKLLQQAKKYGFQLIAITQN

SEQ ID NO: 187984 - protein, 340 aa, unidentified
MDEYIGLDVSLKETAVSIRRGGKRVWRGKCASDPQLLAALIRKRAPAAKRVVFETGPLSVWFFHALIAQGVPAICIDARHAKAGLDMAANKTDANDADGLAHLAEVGFYKAVRVKSFDSMLARTLVAARTRLVRIGTELSNQIRGLMKTFGLVVPSVSGGKFERQVEGLLADNTDLGQIIRPLIEAWRAVRLRAADLSGKLLADARRSDACQLLMSIPGVGVVTATSFIAAIEEPANFRRSRSVGAWVGLTTRRYQSGAVDYDGHISRRGDSHLRGLLYEAATSLLTRSRAQSDLRTWGLQLRERLGFKRAAVAVARKLAVIMHTMLTTGEPFRRTQATA

SEQ ID NO: 187985 - protein, 321 aa, unidentified
MTKYKEIYGVDISKDVFDVFGSLTGHRQFKNTEVGFKAFAKALPKNSLVVMEATGYYHYRLAQFLDLNKVTVSVVNPLSVKRFIQMKLAKVKTDKSDAKMICEYGTMNEVPLYSALTNVQAECLQLFRLLDNYLKKRTATKNKIHGETVLGMPSSFVFRSLKRNLKHLNAEVKGIEARLLKLVKKDQQHQLTLLKSIPGLGVKTALFLIVATDGFSKFENAGQLCSYVGITPTIRQSGSSVRGRSRISKVGNKKLRNLLFLCAFSACKHNKACKAIYDRIVAKGKSKKLALIAVANKLLKQAFAIVKSGRPYDENYVSRLV

SEQ ID NO: 187986 - protein, 392 aa, unidentified
MVVSVGIDVSKDKHDCFIVSSEGEVLADAFIIPNTMDGFHYLLQRIRHCTAPQDKIKVGLGATGHYSYNLLGFLLDNGLTTYVLNPLRTNLYRKSLSLRKTKTDRVDARTIASMLLSDAGLKPYTDTAYHNEELKSLTRYRFDKVKERAKLKSSIARLVCILFPELEKLVPSLHIASVYALLEEFPGAKQVANTHLTRLKALLETASNGHYKRDMALEIRNAAKNSIGSQMPAKSLELQHTIRLIRELDREIDEIEEQIQSIMDELHSPITTIPGLGFRMAAMILAEVGDFTRFDSPDKLLAYAGMSPSTYQSGQLKNCYPHMEKRGSRYLRYALYNATKYVCHWDPAFADYLAKKRAEGKHYNIAISHAAKKLVRLIFAMEKSRQPYCSAA

SEQ ID NO: 187987 - protein, 338 aa, unidentified
MAIITIGIDLAKSVFAVHGVNESGKPELVRPEVPRAKLMELIANVPPCLIGMEACSGAHHWAREFSRFGHTVRLMAPKFVAPYRMSGKRGKNDAADAAAICEAVARPNMRFVPLKSIEQQSRLFVHRARQGYVEQRTALINRIRGLLSELGIVLPLKAATVRLEAHKHLEDLPGWCNTVVGDALSELTHLDERIAQYDKYIAQAAAEDPQSRQLMHLSGIGPTTASAIVATVGKGHDFSCGRQFCAWLGLVPGQYSSGGKQRLGRITKAGDSYLRTLLVLGARAALATAKNKTDPVSRWAISVQERRGYWKAVVAIAAKNARMCWAMLQRGEAFKMPA

SEQ ID NO: 187988 - protein, 412 aa, unidentified
MYYVGIDIAKITNVTSIINDKDVFIKKSFKFNNDEKGFKEFTNLLSSIDKNIDNFIIAMEATGLLFENLYLYLKGKGYNVILLNPYQTSKFREMDTMKKVKNDNIDAVMIASLIKSGRYSKAYVSEEVYASLRALHRHRASLEEELKKHKRQVSSLLAVVFPEFEQVVKNPFSVSGLALLEKYPTAKHYTYTSPQRILKVFRNIKGNNFNIQKAEKLLELAKSSIYSGNAYDERTFVIQSHIRAIKFLQKEIESIDNEMLKLFNASPSFTKEEEQEVTDIIDNLRSIPGVSDKTLFTIMGECGNLDRFKNINAFIGYLGLYPTLEQSGNKTSYGKLAKRGSKLAKKALYQAAVAAIRHNDEMKKLYCDKVSRGKAKKEALVIVARKLAAIILAIYKNNTPYNSKRVFNQNTA

SEQ ID NO: 187989 - protein, 354 aa, unidentified
MPIVADHYELVVGIDTHAANHALSVVATATGATVNQASFPTNPAGLDRARTWITNRAGERTVLVVVEGIGSYGAGLAQRLIAAGLPVVEPSAMAAADRRGTGKTDALDAVRIARSVLPVDVERLRRPRADGSRVAMRVLTIGREQITGERTRTVNALTALVRTVELGIEARKPLSGRQIQSIAAWRTRSSDDVTAATCRAEAVRMATRIRALDTELRNNRQALDALVSAAAPELTALRGVGAVVAASVLIAWSHPGRVRSEAAFAALAGTCPIPASSGNTCRHRLNRGGDRRLNRALNTIVLVRMRTDPDTRAYVARRRSQGRTTKEIMRSLKRYVTRQLFRILAAAHQLPQVD

SEQ ID NO: 187990 - protein, 416 aa, unidentified
MKIVRPICCGMDVHKNIIVATIGITNKKTRITEYIQETFSTLNSDLLNLKQWLINHKCFDACMESTGKYWIPIFNILEDEINIYLTHPKYVKAIKGKKTDKKDSKWICDLFKHDLIKFSFIPPKEIRALREISRYRYKLVGMRSSERNRYQNCMTVSNIGIGSVFSDPFGKSAQAIMKEVLESDIIEDEKILKCIHRSCKNKDKILDSIKHCNIETDQRFKMNESMTHMEELQVHIDNCEIEMMKRAAPMFDQFMHITQLPGISTLSAILIISEIGVDMKQFESDKQLTCWAGLAPANNESANKKKSVRISKAGQYLKPLLVQCALGAIKDKEGYFGIKYSRIKKRRGHKKAIIAIARMMLVSIYHMILTGETFNPSDYESFRNPKPPIKQQDLTEESAIEFLKKSGFDVSKLTKP

SEQ ID NO: 187991 - protein, 336 aa, unidentified
MYIGLDVHKRRNQACVMDKSGMIVQERSFLNTKEELDEFLESLPEDSQIVIEACSVWQPVFEEIEEKGFDVHLAHPSKVKLIAEARVKTDRIDAKVLADLLRTNMLPEAYIAPEHIRKLRTIVRHRYSLVRLRTSVKHRVHSILHRVGITIELSNIFGETGMQFLKDVPLKPQYRFAMNHYLELIEHINQCIEETNTYIDTQARTIPEVQMLKSIPGIGTYSALLIYAEIGDVSRFSTYRQLCSYAGITASVYQSGESIRYGHITKQGNTLLRWILLQAVFKVAVHSPGMQRFHKRLLIRKGKKVAKIALARKLLVYIYVMLTHNVRFKQLRVNSV

SEQ ID NO: 187992 - protein, 387 aa, unidentified
MYFIGIDISKFKHDCAIIDEAGDTVTASWSFANNCEGFSLLKQLLDALDGQKKIGFESTGHYGHNLKLFLETNNFSFMEFNPLLVSKFVRSKSLRNTKTDSLDAVSIAQYLMTVEYKPYPPSFYHMDQLKSLTRFRDSLVRQHSRQLVELTNILDKVFPEFKPFFDGRFSATALYILTHYQSPEKIANMNAKSYEALRKKSRGKFSMVKFAQLKTLAKNTVGRSDAFLLKQMEITIDIENQLDAKIGEIESQILECIHALNPPILTIPGIGELTAAIILSEYGNINKFENPAQLLSFAGLEPGYYQSGLAEHQGHMVKHGSSHLRYALMNACLPLITYEPVFAEYYAKKRAEGKPHRVALTHVAKKLLRVIFTLQTKNISYDPTLIR

SEQ ID NO: 187993 - protein, 346 aa, unidentified
MQNRNIIGLDTAKNVFQLHISDSGGKKIKGMRLRRDQLIEVFANLPPALVGLEACGGSHHWARTLEAMGHEVKVMAPQHVKPYVKGGNKSDSRDADAICEAASRPSVPSVRVKSLDQQQMQALHRTRELYMKQRIQISNQIRGLLAEFGIVVPKSYKKLLQAVPLWLSEEGNPGILSELVEELYSRMLKLDEDISGIEKKIKLLHDQCETSKLLSTIPGVGFLTATAIVAGIGDGSQFSTGRKFSSAMGLTPREYSSGDKRTQMGITKRGNSYIRKMLIHGARAVLASRSRNPKGEWIDKLLERRGFNIATVALASKNARRIWAMLRSGEKFDADREVMQRMKKAA

SEQ ID NO: 187994 - protein, 313 aa, unidentified
MLYVGIDIAKNKHDVTALNVPGKTVLKPLTFSNNKAGFELLDLSLRQLNQDCLIALENTGHYAFNLLNFLHEQGYKVYTYTPLLIKEFAKSLSLRKTKTNKKDAHGIALKLLSDPNREQFQHDNRQVELKILARHIHRLKKKQSDWKVQYTRCLDIIFPELDKIVEKHSEYTYQLLTCYPNPQKRLEAGFDKLIEIKRLTASKIQDILSVAPRSIGTTSPAREFEIIKHYKRLIDKAETCVNDLMAEFNSVITTVTGIGNRLEAVILAEIRNIHAFDNPAQLQAFAGLDSSIYQSGQIDLAGRMIKRGSPHLR

SEQ ID NO: 187995 - protein, 435 aa, unidentified
MEEVEDEPLFCDRAAGIDIGKATIMVTVRVPSETRKGRRRQETREFGTTRRELLALADWLRCWQVEKAGMESTSDYWKPVYFLLEKEGLDCTLYHASQVKALPGRPKTDKLDSAWLAKITEQGSLAGSFVPPEEIRRLRTHTRYRRRLVQMRTAQKERCEKLLEDAHLKLSSVISDIHGMSGRDMLRAIIAGERNPKVLAEMARGRMRVKIRKLEEALDCSFFTGEHAFILQMMLDSIDQLTAQIAVLDEKITAMCEPYERQVAQLDAIPGFGVTTAQDLIAEIGLDMSVFPTAGHLASWARQTPRVTESAGKRKGKNATGRGNPYIGAALGEASVSVGRTQTFLGAKLRRLQARMPKKKAQTAIMRTQLVIAHALLSDPAAEYQDLGPGYYERRADTRRRARGHARALERLGYKVTLQAPDPETGEYLPIATAS

SEQ ID NO: 187996 - protein, 337 aa, unidentified
MEYFAGLDVSMEETHVCVVTQNGAVMHEVKVPSTPAGIATALARVPACRWVLFETGRMAPMLYHGLSQLGLPVVCVESRQAYHALKLLGTHKTDRNDARGLAYLARTGFFKPVHVKSLPAHAVRSLIIARKKLVGQRVTLENQIRGLAVVFGVRLPRALSPAFIRQALRASEGIAGLSAAMRGLVAVRAAVLAAVVMIDGDIRRMVRASDACRRLMSIPGVGQLTALAFTAAVDDPGRFQRSRDVGAYLGLVPRRYQSGEVDYTGSISKCGDRRVRTLLYEAANVMLTRYKGPLKLKEWAVAIAKRSTMRKARIALARRLAIIMHAMLRHGTEFKPA

SEQ ID NO: 187997 - protein, 391 aa, unidentified
MPTTLTHCTTPTATLYMALELAAHEWLLTFAAGPGSARRHVTIPARAGARLLAEVQRAKVKLGLPADAPVLSCYEAGRDGFWVHHWLTRQGITNAVVDPASIEVNRRLRRAKTDRLDGAGLVRLLARWHGGERDAWKVCTVPPTLAEDLRQPIRERLELVEERTRLVNRIRGLLAGVGAVVDGPLTAATDLDALRQWDGQALPPLLRARLARDRQRLALLERQVTDLENAERRAVRDDATPQVEQARRLLGVKGVGPTSTWLLVRELFGWREHLTPKQTGALAGLCPTPYTSGDSAREQGISKAGSKRVRWALVELAWGWLHHQPHSALSRWYQRKYGAGGARHRTVGIVALARKLLVALLRLALTGAVPEGAEVRDWYTKVTGRPRATAT

SEQ ID NO: 187998 - protein, 356 aa, unidentified
MRKTDPAEIIIGIDTHKEAHAAVAINGLGARLGAMTLLVSSRGYHEMESWAQSLGPVRAFGIEGTGSYGAGLARFLQERGHNVIEVNRPNRQIRHQHGKNDPLDAENAARAVLSGQARAAPKSGTSSVEMIRHLKVARDTAVKSRTQAMVTLKTIIVNAPAALRESLDGLTGKMTLIRHLAALRPGAMTSPTASAKATLRALARRWLMLDAEIKSHDADLDALTTACAPTLKEAHGMSTGTAAEMLILVGDNPERIRSEAAFAKLCGACPIPASSGKTSRHRLNRGGHRQANAALYRVVIIRMRSHPPTLDYVRRRTAEGKGKMEIIRCLKRFVAREIFGYLCRARRDPTTAPSTS

SEQ ID NO: 187999 - protein, 351 aa, unidentified
MLKAQKGEPAVMYCGLDMGKKSSHFCLVDEKRKVLEEGKVKNTEVDLRREFGKRPAMRICIEASTKSFWLADRLKELGHTVVVVDPGKTKAIGAGQIKNDKLDARVLATLCQADLMAAVDQPAESERLARMMVVSRDGLVRSRVSLMVMVRSLLDSEGIELRHATAEGFPAAVKELLPKLPPTMASAVEPLVKAIEDLSVQVARCDKALEAAARGNPTMQLLMTAPGVGVIVASCFVNAIRDPKRFETSRDVGAFLGLVPKLYQSGTIHHKGGITKHGNRQARWALAMAANSILAITKKKSALRDWGLKLSKKRGRKKAVVAVARKLAGILWAMWKNQTSFEARLPQAKAA

SEQ ID NO: 188000 - protein, 422 aa, unidentified
MVLKGVPMALKIVYKICCGIDVHKNFVVAFIAKTDKQGVTTYERHHFSTYTKGLKQLLKWLLDRNCKDVCMESTGKYWIPVYNVLEHDCSIVLAHPKYVKAIRGKKTDKKDAKWIADLFKHDLVAGSFMPPADIRQLRDLMRYRFKLTCFKSSEKNRYQNCLTVSNIQLGNVVSDTFGKSSQKIIAKILENPDDTSFDIGSLIHGSMKDKLPELELAIDGYITPEQAAKLKIIKEHFDNLEARKAELEELILALANPYQQEISIILTAPGFKNTFTAIGIISEIGTNMEAFPSAKHLCSWAGLTPTNNESAGKKKSVRVSKAGCYIKPLLVQCANAAIKSKKHPEIRDRYLRIKKRRGHKKAIIAIARMLLTALYHMLKNGENYNSDLYQKSDILPTTREITVEQAILMAQFQGFRIKSATE

SEQ ID NO: 188001 - protein, 433 aa, unidentified
MENSIRFVGLDVHAATIAVAVAEANGEVRSLGLIPNRPEALRRLMHKLGPAERLRVCYEAGPCGYALYRQMVELGVRCEVVAPTLIPVKPGERVKTDRRDARKLARSYRAGDLTPVWVPDGAHEALRDLVRAREVAKADQLRARHRLLKFLLRQGRRPPAATKAWTTKWWAWAREQRFEYPAQQTVLLDYLAELEHAAARLERLEQALAVAIASAPEKLRAVIAGLQALRGIAQLSALTIISEVGELSRFGRPRQLMAYSGLTPSEHSSGDKIRRGAITKTGNAHLRRVLLEAAWTYRHRPAVGTSMRMRQERVSAEVKAIASKAQQRLCPRYQRLLARGKPACKVASAVARELLGFIWAIGVHLERHRGGAPAARLSASKPSAGHRGARRPGARLVLNPDTGIQSAVNHHCARAALRSPSKRLGRVSAKPRA

SEQ ID NO: 188002 - protein, 371 aa, unidentified
MEIMNETTKKDNRKDLKLNLDEKECVWVGMDVHKKTWNVALYSANRERVVKSWHMPANLADLLKILEPIKKQVKRIAYEAGPTGFGLARFLQSHEFEVAVVAPDDIPQSRRTKAKSDRIDAGTLAQELVGNRLRSIYIPTLEEEDARDAFRNRDQLCNKLRRVKAQIKSHLLRWGFAEPEGLENWSRKSIEELRGIEMPSNAKLQLDTFLKELDSLESWQKQATDQMKSVVDELPGQERQCAESVPGVGPVTASAVILEIPQLKRIENRRELAQIVGLAPLKRATGDREKECGRGKGGKKKVRSLLIEASWRWIGKDSGARKIFERICGGKQNRRKKAIVAIARRLAIIIWRLVKENRFYRNFDVHCAQVL

SEQ ID NO: 188003 - protein, 409 aa, unidentified
MEVIHECCCGLDVHAATVVACVIRKGRRQIRTFGTMTEDLLGLRTWLESAGCTHAAIEATGVYWKPVFNVLEDAVEVLLVNARHVKAVKGRKTDVRDCEWLADLLRHGLLKPSFIPPPSVRALRELTRYRESLVREQTALSNRIEKLAESGNVKIGQVASRTMGMSGREMLTKISRGETNTEALADLARGRLKEKRAALQRALEGRLTETQRWVLGELLGRYDEVEAALQRVQQRIGEQIRRDPDPFVAKAPQLLEAIPGIGTSVAQTIVSEIGVNMDAFPTARHLTSWAGMCPGSDESAGKRRNPRTNPANRYLRSALCEAAWAASHTKSTYPAAQYKRFIRRMPKKKALMAVGHTLLVIVYKILATGQTYRELGGDYFERQNPQATQRRLVRRLEALGLKVTIQNAA

SEQ ID NO: 188004 - protein, 345 aa, unidentified
MKIVGCDLHTRYQQIAMLDQETGELIERRLEHESGEARAFYAALSSPVRVGIEATGHTRWFERMLAELGHELWIGDAAQIRASVVRKQKTDARDAAHLLELLLSERFPRIWRPTMAERDLRQLVWHRQKLVWMRNAVGNQLHALAMGEGVCRKKKLFTKKGRAELESLGLGVWASYRRQELLTMLDRFDGSLGELDRAVAEQAEQNAAAVLLMTHPGVGPVTSLAFVLTLGPVERFERSKQVVSYLGLNPREHSSGGQQRLGAISKQGNPMMRSLLVEAGHTAARLDGELRQDYQRLKLRRGSGVAKVAIARKLAVRMYWMLRGQASYAQLVRMQGSPWATLVTE

SEQ ID NO: 188005 - protein, 370 aa, unidentified
MKKNTTVKQSPKRASARVGEGPSTIGMDLGDKSSRYCVLGETGEVVSEGRVGTTRKAMTEKFNQTRRCRVAIEVGTHSPWLSRLLTGLGFEVIVANARQVQLISASSRKNDRIDAQMLARLARVDPKLLRPIRHRSEQAQSDLMTIRIRAALVEARTSLVNAARGFTKATGERLPACDSDSLGMEKLKALPAGLQQSLQPLMEQIEALTEQIKKLDGNIEQIARIEYPETQLLTQVHGVGTLIALTFVLTVEDRERFPKSRDVGCYVGLRPKQSESGESQPQLRITKEGDPYLRTLLVQGAHCILSRRSPDTDLKRWGLKLAERGGKNARKRAIVAVARKLAVLLHRLWVCGEVYEPLRNNQTASSQKAA

SEQ ID NO: 188006 - protein, 370 aa, unidentified
MAEPTTLYVGLDVHKESIAVAYASADRASEVVHVGQVGTREADLDKLLRRLRSHASRLVVAYEAGPCGYGLYRTLTAKGVSCLVVAPSLIPKRPGERVKTDRRNAAQLARLLRSGDLTSVYVPTVDDEAVRDLSRARAAAIGVLKDAKLRLKSFLLRHGLNYSGRATWNEAHLRYLAKVVCPTPAQQIVFQESLHAVTEQTERVRRLEDQLLDIAATWRLGRIVDAFQAMRGVQHHTAVTLAAELGDLTRFDSPRPLAAFVGLIPSEYSSGESRRLGPITKAGNGHARRALVEAAWAYRYPAKVSAHLQHRIERCPTPIQQIAWKAQVRLCKRYRRLVARGKHPNVVVTAIAREILAFLWAIAREVPLSA

SEQ ID NO: 188007 - protein, 340 aa, unidentified
MREFIRIGVDVSKGFFQVHAIEGEGSSAVRRKLSRAKFLSFFAGIAPTRIGIEACGSAHHWARELRALGHEVVLMAPAYVKPYLKRGKTDANDAAAICEAMSRPDMRFVPVKSADQQAVLMLHKTRALMIKQRTMAVNALRGHLSEFGLIAARGIHRIKDLLALAETDERLPEAAREATAMLAAEIQGLDGRIDGLEAKIAAASSPMIRHLDEIPAFGPLIASAMVAFNPDPRAFRSGSDFSASLGLTPSQHSSGGKEKLGHITKAGNRYLRTMLVVGCTSVLRVAHKYKGALAEWIVAMRARKPERVVAVALANKLARIAWAVLHRGISYEPEFAAQAA

SEQ ID NO: 188008 - protein, 358 aa, unidentified
MVTGLKHQKEKRSMDHFAGLDVSVKETSVCIVDETGRIVREVKVASEPEALLAVLKIPAYHFKRIGLEAGPLSQWLYNALAEAGLPVICVETRHMRAVLKAQINKTDRNDARGMAQMMRVGLYRPVHVKTLRSQKLRMLLTHRKLLQSKAIAIDNDLRGTLRNFGLKVGTVGTAKFEARIKELVENLPDLAMLVEPLLIVRLVLREQIGVLHRRLLAIVRDDDVCRRLMTVPGVGPVVALTYRAAVDVPARFKNSKAVGAVFGLTPSRHQSGESNRPGSVSRCGDEMMRMMLYEAAQTMLVVSTKWSWLKAWAMKIARHRGMKKAIVALARRLAVIMHRIWVDGTEFRWTREQAPTAA

SEQ ID NO: 188009 - protein, 347 aa, unidentified
MVTESADYVVGVDTHAERHALALIEAGSGLLVLESELSACREGYRRALRLVRRRAPGRRVWAVEGTGCYGAGLARYLAGQGERVLEVGRPVRQGREGRFKSDPLDALRAARSALSGQLACPRAEGEREALRVLLATREQAVATRRAGRNQLRALVVTAPEGLRQRLRGLGKDQLLSSCLRLRPRAGQEPARHATELALRSCARRVAAAHKEADELEREISKLVRSLCPKLLAQQGVGPISAGWLLSAWSHKGRVRSEAAFARLAGAAPIPASSGKTTRHRLDRGGDRKLNRALHTIVLSRRHSDPETKAYISRRLSEGKSSREAVRCLKRYLTRSLFRLMEATAATP

SEQ ID NO: 188010 - protein, 414 aa, unidentified
MNQQEVAAWIGLDWADKKHSIHLQVRDGKREHRMLEQKPDIIHEWVAELRQRFDGQRVAIAIEQRKGAVVHALMTYDFIVLYPINPKALARYREAFRTSGAKDDPSDSELLLDLVSKHGDKLRAWIPDTVVARKLQLLCEQRRKIVNHRVALTNRITSLLKQYFPQAIEWVGDVASIQACDFLSNWPTLASIQRARKETLRKFYRQHNCRKASVIDERISQISNAVPLTNDAAIIEPLSLSVQIYAVQLRSLIRAVQQFDKQIVETFAQHPDHDVFDSFPGAGQVCAPRLAAAFGTDRSRWQSAVEMQSHSGIAPVTERSGDSKWIHHRLACPKFMKQTFHEFADQSIRFSKWARVYYDQMRARGNDHHAALRALAYKWIRILFRCWKDGKPYDEEKYVKALRQRGSALIEKFA

SEQ ID NO: 188011 - protein, 404 aa, unidentified
MYNAVGIDVSKGKSTIAVLQPGGTVIRKPFDVSHTSLNLNELAHYLGSLEGSTRIVMECTGRYHEPMLKALYEAGLFVSVVNPHLIKNFGNNSLRRVKSDPADARRIARYTLDNWAELRQYSGMDNTRTQLKTLNSQFSFFMKQKVAAKANLIALLDNTYPGVNKLFDSPPREDGSEKWVDYAYSFWHVDCVRRIGLKTFTERYRAFCRKHHYIFQPDKPEKLFHASKELVAVFPKEKTYKLLIQQSIQQLNLASGHVERLRQEMNALASTLPEYSTVMGIYGVGKTYGPQLIAEIGDVSRFTHREALTAFAGVDPGVDESGQHKSKSNRASKVGSARLRKTLFQVMTTLLQNAPEDDPVYRFLDKKRAQGKPYYVYMTAGANKFLRIYYGKVKECLRNLEQAE

SEQ ID NO: 188012 - protein, 371 aa, unidentified
MKEFNKYLGLDVHKATIAVSIAEGNGTEVRYQGEMPNTIEALGKLVRHLGKGGATLSFCYEAGCCGYEIHRYLTDHGWNCMVVAPSLIPKKAGDRIKTDRRDSMSLARLHRAGELTAVWVPDREQEALRDVIRAREDVKDLQRKAKQQLLAFLLRHGKRYEGKSHWTQAHYRWLETVKFAYAAQQILLQEYMDMVKAMANRVASLGKVIETEMKALVFWPVIEGLMALRGVDLLTAATVVAEIGDLRRFTGAPQLMAYLGLVPSEHSSGGSKSRGGITKTGNSHVRRVLTESAWTYRHPARKSAPLQRRAERTSQEIQDIAWKAQTRLCGRYRLLEGKGKLRVQVCTAIARELVGFIWAIGQAAPAPTIRH

SEQ ID NO: 188013 - protein, 388 aa, unidentified
MTQTSVSLPHPVALDHNETLVLAIELSNKSWVLAAQVPGLTRVKAKQTIEPTAEALLAALQGYRERAKVAGRQVERVVATYEAGWSGFWLARLLTTHGIETHVVQPSSVLVDRRARRAKSDGIDAEQLLRTLLAWLRGEPRVCSMVPIPADGDEDARRCVRERTELIAERIGLVNRIGAVLATMGCGDYDPLLRNRRQRLDELRTALGTSLPPHAYAKISRMLDRLDLVRKQIAELEQDRDAVLEEEVPDKAGEMIQQLTKLRGIGVQSATVLVREAFVREFANGKALGSYAGLCATPYNSGGTDREQGIGKAGNRRLRTVMIELAWLWQRYQPGSAVVNWFRARVSGTGARMRKVMVVALARKLLIALWRFATQGVIPEGAVMKPAP

SEQ ID NO: 188014 - protein, 337 aa, unidentified
MKSEYVGIDLHRRRSVIVRMSPDGEQLSTVKIDNDPVALAAAIAPAGPNPHVVVEATYGWYWAADVLEECGAQLHLAHPLGMKGITSNRRVKNDVRDAVLLADLLRLGSLPEAWVAPPATRELRELVRYRTKLVNMRSSLKCQAHAVMAKEGILPTHSDMFGPAGQAALDEMPLGRAYTIRMESLRDLMESYDAQVSMLEREIHGQLKDHPGYRAIQAIDGVGRVFGAIFVAEIGDVHRFSGPEKLCSWAGLTPKHRESDTTIHRGSITKQGSKLVRWAAIEAVAKRRGGPKLRADFHRIAERRGKPKARVAVARRLLSLVYYGLRDGEIRCLAETS

SEQ ID NO: 188015 - protein, 428 aa, unidentified
MSNPQQYAFFVGIDWANDKHDVAIIDSQGRSSHCAIEHSTEAIDVFVSDLLSKANGLPIAIILEQSKGSLIHALMLRDNVVLFPVNPKQFSSYRESFRTTKAKSDKDDALLLARMLFERHGQMTAWKPEDENTRFLNRLCSTRRKWVEQRTTLGQRLLDQVKSYFPAILMLADTKLFANSLLLEVLRKWPDPRTLKRVNPKVLAALAAHHGIKNETQQQDIVNGLRKAPIHSKDTTLLSVSAMEAKALVKQLEDCQELIVELDQKIKEVLAKHPDALLFTSLRGAGAALAPRLLTAFGTDRNRFKNAEEVASYVGIAPVTKQSGKSCIVVRRRACSKYLLQTFHEFASAAAKWCTWSKAFYKLQQSKGMKRHAILRKLAYRWIRILFRVWQSRTPFEPNRYIQSLLVKNPEIRSFLQIEKPEKTLKMT

SEQ ID NO: 188016 - protein, 367 aa, unidentified
MKKVSTGTAMQSRNISQQRLTIGLDLGDRNSWYCVLDEAGQIQLEQRVRTNAKALQEVFGTMPCSRIALEIGTHSPWISRLLKQLGHEVIVANARKVRLIGESRKKDDRLDAQTLARLARIDPQLLYPVKHRSAQAQADLMMIRAHAGLVRARTGLVNTARGLAKSYGERLRSCNVRDMDPEKAEGLSPELQRALEPVLSAIEEVSEQIVEYNDRIEALAQSSYPQVELLKQIKGVGTLIALTFLLTLEDPHRFGKSREVGSYLGLQPGRRNSGQREPQLHISKEGDPYLRTLLVQGAQHILGPFGIDCDLRRWGLKLAERGGRNAKKRAIVATARKLAVLLHHLWVSGEVYEPLHNGSRVTVSAAA

SEQ ID NO: 188017 - protein, 342 aa, unidentified
MTLYSGVDIHARQQTLSYLDSSDGTTGQVVLDHEVDDVREFYAQFQGEVIVGIEACGYTNSFEELIEAVGHRLLVGDAAEIRRLARRRQKNDRRDADLLLDLLVHGEFPTLYRYPKASREVLRQLRYRHKLVKLRTIVANTLHALALNAGLSLRARLLTKSGRKQLSTLQLSASSQQQRDELLSLADELTQRINKVELWLAAQAKADERVRRLQTHPGVGLLTSLCVVHTLGEVSRFSGTRKVAAYVGFDPMEDSSAERKAYGGISKAGSCLLRYLLIEAGQTAARDDQHLKQFYRRLLPRRGKARAKVAVGRKLLIRCFIMWRAEIDYAEFLRRGSQQETE

SEQ ID NO: 188018 - protein, 339 aa, unidentified
MNRTAVGVDIAKNVFQVHYIDQETGEIVNKPIKRAKFLEHFANRAPCLIGIEACGGAHHWARQLTKMGHEVKLMPGEFVKAFNVRNKSDAADARAIWLAVQQPGKPVAVKTEMQQAMLGLHRMRQQLLKFRTMQTNSLRGLLTEYGEVMSKGRSKLDKEIPVVLERLAERLPAVIIDTFREQWNGLAKLDEQVAQIERRMREWKKEDKSVKAIGEIPGVGLLTATAAVAMMGDPKAFSSGREFAAWVGIVPRQTGSGGKVNLHGISKRGDTYLRTLLIHGARSVLEHAKEPGEWVEQMKKRRPKNVVVVALANKMARTIWAVLAHNRPYRKDYVSVNPA

SEQ ID NO: 188019 - protein, 343 aa, unidentified
MKHYAGLDVSLEETAICVIDESGRVVKETRAASEPEALVATLREIDLALERIGLEACSLTAWLHDELRSAGLPAICIETRQANAAMKTMPNKTDRNDARALAQIMRTGWYRQVHVKSRPCRLWRSLLVARRTVLNEMRSIENVVRAVLREGGLKLGTPSRAAFARRARELIAEDASVKPLVEPLLAILATMLDQFARLTKQVLDIVRREKVCRRLMSVPGVGPITALAFRATIDRPDRFRRSRDVGAHLGLTPARYQSGETDIQGKISRCGDELARTALYEAAHTLLVRSRKWSSLRAWGMKIAKHRGMARARVAVARKLAVILHRMWRDETEFRFGKEPATA

SEQ ID NO: 188020 - protein, 449 aa, unidentified
MSETLIRGPATAWSRRKAGQFHGRQVCITWMREYDTDAQASRTKGVDSTMFDTSDVDVFLALDVGKTAHHGHGLTPAGKKVFDKPLPNSEPKLRAVFDKLTAKFGTVLLIVDQPASIGALPLTVARDAGCKVAYLPGLAMRRIADLYPGEAKTDAKDAAVIADAARTMPHTLRSLELSDEITAELTVLVGFDQDLAAEATRTSNRIRGLLTQFHPSLERVLGPRLDHPAVTWLLERYGSPAALRKAGRHRLVEVIRPRAPRMAKRLIDEVFDALDEQTVVVPGTGTLDIVVPSLARSLGAVHDQWRALEAQINELLEEHPLSPVLTSIPGVAVRTAAILLVTVGDGTSFPSAAHLASYAGLAPTTKSSGTSIHGEHAPRGGNRQLKRAMFLSAFAALHDPASRTYYDKCRARGKTHTQALLRLARHRISVLFAMLRDGTFYEHRTSRLA

SEQ ID NO: 188021 - protein, 344 aa, unidentified
MQITTIGLDLAKHWFQVHGVDAAGAVVVKRRLRRSEVIGFFKGLEPCLVGMEACATAHHWARELIALGHEVKLMPPGYVKAYLKRNKNDAADAAAICEAVTRPSMRFVPIKNVEQQAVLMLHRGRALLIRQRTMLVNALRAHMAEFGIIAPRGLRNVEQLVATVSDERTPLPELARSILQLIIGQLNDTEVRIRMLEARLAKWHRANGVSRLLASVPGVGIMGASAIAATVIDPSLFRSGREFAAWLGMTPRQNSSGGKERLGGISKRGDKYIRSLLIAGAVAILRHARNRATKDAEWVRGMPARKPAKVVAVALANRTARIVWAVMRRGTPYRATAILGQAAA

SEQ ID NO: 188022 - protein, 350 aa, unidentified
MRTKPIPETAAFGIDIGKKVFHVVALNAAGAIIQRAKFSRDTLIGFFEIAPSALVGMEACPGSQWLARRLAAMGHDARIIPARFVKPYVKSNKTDTVDAAAIAEAVTRPTMRFVEVRTPEQVDLQALHRIRDRLVGQRTALMNQARAFCLEYGLAMRVGAGGFHADIQKHLANKENDLTSSMRVLLGELLDDLGYIEDRIKAVNGKVEAYARENDTVSRLVTIPGIGALGATALVAAAGDGQQFRKARDLAAWLGLVPAEHSTGGKQTLLGISKRGNRYVRRLIIHGARSCLLHLNRANHALGGWLSALEARTHRNKAVVALANKLTRIVWAILTRPGTVYLQSKGTATS

SEQ ID NO: 188023 - protein, 346 aa, unidentified
MNMTNIQPNKTDTESKGSHFAGIDVGAEELVLVILKNGKPFDPQKFSNTPADRARLVKKLVKLPGIVVCLEATGIYHFDLAIALHDAGVLLMVVNPKASHNFAKVLMKNSKTDAVDAHTLAEYAARMDFVAWTRPTDETLNLRSFSRRINALTGQKAAAKNHLHALTSTQETPKAVLRDAKLAITQLEKRIDRLTADALILIGKYSELTRILALLIGIKGIGETSAIALMGELLLLPPGLSHREWVKFAGLDPRSFDSGKSVHKKTRISKAGNAHIRSALYMPALSAKQHDPHVKAYFQHLVDNGKKPLQAVCAIMRKLLHAIHGMLKHNKPYDNTRFYAIPVSAR

SEQ ID NO: 188024 - protein, 332 aa, unidentified
MSSFVGIDIGATAFEVVIRKNDKNGAVKSYLQTPKDHEKLAAQLLKLDPACVVMEATGIYYLNLAVVLFNSGLNVSVINPNSFNHFAKLTLTHSKTDGIDAALLAEYAQRMTPRLWTAPDPKLLSLRDIGRQINRLVGRRTEARNNLHALQAKDSTYQPLIDDELEGIEYLEFRIERMRNMALEIIAGNENLKQKLENLTAAVGIGTNSAIMIICELELLPEHLKSSQVSRFAGLDVRLTQSGTSINKPGRLSKAGNSYLRTALFMPALSAATHDANTRAFYQSLIQRGKKKMQALCAVMRKMLTGIWACLKLNMPFDSSKLFSEEHKKACA

SEQ ID NO: 188025 - protein, 305 aa, unidentified
MSNSSVVHIGVDISKAYLDCDLQGRALRLPNSMQGFKKLLPLLPPNAHLCIEATGGYERPLVETLHRSQIRYSVLNPRQVRDFARAKGILAKTDTIDARVLSDYGSAMDPKPSTLPEPAQRQLAELNTLRDQFVAIQTQLINAGEHLTDPVAKRIFKSQLLHLQKQIKKVEKACCDTLKAHPPLAARNATLQAIQGVGAVTSITLIALLPELGTASRGQIAALAGLAPLNDDSGPRKGHRHIRGGRSRVRRALYMATLSAIRSKGSLRSFYQRLRAAGKPPKVALIASARKLLLFINYQLKSSSI

SEQ ID NO: 188026 - protein, 464 aa, unidentified
MNRSRRSRRAGSRRRPELSAAARPLVEPHAAGIDVGARQMYVAIPPDHDEEPVRVFATFTQDLEALADWLVERGITTVAMESTGVYWIPLYQILEDHGLRVCLTSARQMRNVPGRRTDWHECQWLQYLHSVGLLRAAFRPQQQVCAVRSLMRHRGRLVESACDQIRLMQKSLTQMNVQLHHVISDLTGVTGMAIVDAILGGEREPARLARLRQPEIRASEETIRKSLEGDWRGEHLFTLKQAREIYRALVAAIEECDREIARMLDEVEPWVQPDEKPRRPGSKKLKTRRAKRTGDFRFDAQREAYRLFGVDVTQIPGVGGIALGLYSELGRDMSRWRSADAFSSWLALCTDNDKTGGKVVWRGTRGVKNRAGHLFRMSANALHRSATPLGQFLRRMKAKLGPEAGITATAHKIARIFYTMVKNQMEYDETIWQQQDTQRARRQEDRLKRQARKLGYQLVPIQAA

SEQ ID NO: 188027 - protein, 408 aa, unidentified
MDLTPMHKRVIALDVHQAKITACAVVEHDDGRVEVTKRDFGAFKRDRHALAQWALEIAPEVVVMESTGVYWKSPFAALEAVGIIAWVVNARHVKAVPGRKTDMADAQWLATLARAGLLRASFIPPLQMRQLRLVARQRQKLVGMCSAEKNRLHKVLVDAGIRINVLVADIHGASARAMVKALIAGKPMHEVLDCKGRLRASREELFEALSTEQFSVVHRFVAEEIMQHIEQIEQRIARLDQYLLEGLQPWQAQLKLLQTLPGIDEQGAAMLLVEIGSDMSVFGSAERLASWVGICPGNNESAGKRKTGRIRKGNAWVRRLLCEFAQAAARTRCALKAKFDALAIRKGRKKSVVALAHKMLRTVYAMLANGTHYQDKEVDYEALNVQRNAPRWIKMLRKHGFMADSAAA

SEQ ID NO: 188028 - protein, 486 aa, unidentified
MDGSVEVVVDDAEQILERVAAIDVAKASGKVCLRVPHDMHEGRRVTRVFDVIATVPAVEELADHLVCQGVQRVVVESTSDYWRVFYYLLEERGLTVWLVNARDVKNVPGRPKTDKIDAVWLAKLNERGMLRRSFVPPAAIRRMRDVTRMRVDLVADRTRVKQRAEKLLEGALIKLSSVVSDLFGVAGRRILDALVAGERDPRRLAALGTGVKASPETLTAALTGRFSDHDAFMLTIYLEQIDALDEQLAALSARIEQMTAAMPLPARHTDTPDAAEVTAVPGVGTVSPVTGEIIPPAGGAGDPPAGGTPTPAGGRSQPRTAADLVDLLDAIPGIGRDAAQLILAEIGTDMSPFATSGHLASWAKLTARTIQTGASLRMGRTGRGNRYVRRTLGTAAASVARTNTFLGARHRRLRARRGALKALVATSRTILEIIWRIVRDQVPFRELGADYHTRRQDPDKRKRALARQMKNLGLSPEEAVAMLATA

SEQ ID NO: 188029 - protein, 338 aa, unidentified
MHITTLGIDVAKTVFQLHGVDVRGRAVLSRRVKRSQLLNAVASLPPCVIGMEACGSAHHWGRAFEQLGHTVKLMPPKYVKPYVKTNKNDGRDAEAICEAVSRPTMRFVSIKTVDQADLQAVHRTRSLFVKHRTAVINQIRGLLAEYGLVMAPSPVKVRPALVRFLDDAESGLTAFARDTFSELYEQLTELDSRIERVTHRVERVYRAHPVCQKLAAVPGIGPLTATALLATVGRPQAFHNGRHLAAWLGLVPRQYSSGGKERLGGISKRGSRYVRTLLIHGARAVVQRAERRTDTQGRWLCALKHRKGTNVAAVALANKNARVIWALLAHDEAYRQPT

SEQ ID NO: 188030 - protein, 370 aa, unidentified
MKEYSEAFVGFDTAKNKHAVAIADGGRDGEVRYFGEIDSSPTTVAKVLGKLSARYPRLHICYEAGPTGYGLYRQVKALGHHCMVVAPSLIPRKPGDRVKTNRRDAVTLARLFRAGELTSVWVPDPVHEAVRDLVRARGAAAADLRKKRQQLLSLLLRHGRIFAGRAHWSLAHRRWLAGQRFEHPAQQIVFQDAVDAIEDAAARLRRLDQQLLTIVPSWSMAPVIAAYQAMRGVSFIVAATFVAEIGDVRRFDNPRQLMSFLGLVPSERSTGETVRRAGLTLAGNRRARRVLVEGAWTYRYPARVSETLRARLQGLPKTVRDIAWKAQVRLCARYRRLVAAGKKTPVVVAAIAREMAAFLWAISCQVEPLT

SEQ ID NO: 188031 - protein, 366 aa, unidentified
MKKNSTVARRRKQNFGAKRLTIGMDLGDRFSYYCVLDEAGEVLIEQKVATTKQALQQAFGRMPRSRVALETGAHSPWVSRLLTQLGHEVIVAHARNVRLIGESRRKDDRLDARMLARLARLDPRLLSPVRHRSAKAQIDLTVIRARAALVGARTALVNAARGLAKSYGERLRKCGTQQVNPDLAAGLSAELRAALEPLLAEVASLNQRIAEYDRRIEQIATKEHPEVALLKQIKGVGTLIALTYVLTVDNPHRFRRSRDVGCYLGLRPGRRNSGKSEPQLHSSKEGDRYLRTLLVQGAQYILGPFGQDSDLRRWGLQLAERGGKNAKKRAVVAVARKLSVLLHKLWVSGEVYEPLRNNHQVVSAVA

SEQ ID NO: 188032 - protein, 355 aa, unidentified
MDSTKYIGMDVHKESISIAVRNAAGKVVMECVIETKASMILEFIDGLRGDVLVTFEEGTWAAWLYDLLKPHVTRLVVCDPRRNALLQEGNQNDRVDARKLAELLQNNQLRPVYHGDHGLRTLKELVRSYLTITKDLSRTMTRVKAIYRSWAIPCTGKQVYSSRHRAEWLGKIVEPGVRRRAEFYYQQLDALRSLRQEVRRELLAESKKHKAWKRLCQIPSIGPIRAAVLLGILQTPHRFRTKRQLWTYSGLGIEVYSSADHHVVKGQLERKKKHVEIRGLNDNGNHDLKNLFKGAAVVASTKPGPFEEFYAALLAKGTRPEMARLTLARKIATIVLIVWKRGVCFDANHLKSQTA

SEQ ID NO: 188033 - protein, 388 aa, unidentified
MIYVGIDIAKLNHYASAIDSDGVVLIEPFEFLNDNEGFYTLLSKLNSFELDDIIIGLESTAHYGNNLVSFLVTKGLHVCVINPIQTATLRKNNIRKTKTDKVDTLVIAKAVALMDHPRFVTLYDIALMQLKNLGRFRMNLVKQRSRTKIQLTAYLDQVFPELQYFFKSGIHQKTVYAILKEAPSATQIASMHLTHLKNLLVSNSHGHFKKETALELRVLAQKSVGTADRSLSIQITQSIAQIELLDSQIDAVESEMKDIVISLDSVIMTIPGIGPINGGMILGEIGDINRFSKPRKLLAFAGLDPSVYQSGNFIAKKTKMSKRGSSALRYALMNAAHNIVKYNQTFKEYYDCKRAEGRGHYNALGHCAGKLVRIIYKMLKDDVEFNLD

SEQ ID NO: 188034 - protein, 414 aa, unidentified
MDTEPLVFVGIDWASTEHQVCLVGADGPLQKAFAHDADGIGAMVDWLCTQAEQPGQVAVAIETPHGPIVEALMDRGVAVFAINPKQLDRFRDRFSPAGAKDDRRDALVLASSLRTDRHCFRRVEALDPVVVELREWSRMAEELKQERVRLTNRVRQQLWRYYPQMLDLTEDVGADWLLALWTKAPTPADAMRLTEVKITKVLAAHRIRRITAHDALAILRRPALTVAPGTTDAACAHITAVAERLSLVNRQIKTVTRRIDGLVEQLAGPETGPGQDTEQRDAAILRSLPGVGRIVLATLLAEAHQAIQARDYHALRTLTGVAPVTKRSGKSCRVEMRQACSGRLRTAVYHWARVATQHDARSRSRYAALRARGHSHGRALRTVADRLLGIACVMLTNRTMFDPEKPPADRPKSA

SEQ ID NO: 188035 - protein, 311 aa, unidentified
MTSDSIGVDISKDHLDVHRLSSGAAARFPNSSVGFRALAAWLSREGVERVVYEPTGPYHAAFERAFAGRLPLVKVNPLQARRFAQARGTRAKTDPVDARALAEMGAALLLQPHEPVSDTLRVLRELQIARQALVKDRTRLLNRLRSLELPLLRRQSQARLEQAERQLAEIDREIHARIREDRVLARTLAILCSIPGIGAVSAAALLIELPEIGTLTRKQVASLAGLAPMTRQSGNWRGRAFIQGGRKHLRDALYMPALVAMRVNPDLKAKYTRLRAAGKPGKLALTVLVRKLIEMANTLVVADREWQPMPA

SEQ ID NO: 188036 - protein, 388 aa, unidentified
MHVVAAQSEAAIAIRTDLCAIFVSLELSRSTWLLTSLSPGAGEKMSKHSVSAGDTAGLFSRFVELQQKARTRTGRTFPIITIQEAGLDGFWIHRLLQGEGIESWVVDPASVLTSRRRRRAKTDKIDGETLVRTLLAYKRGEPRVCAMVKAPTPEEEDRRRICRERKTLTAERVRHVNRIKGLLFAQGVGDYEPLRRNRRGRLEELATGDGRPLPEHLKAQISRELDRLEVILAQLKAVGSERDAMLEPAKEGPPTPASLLAQLKGIGPEFAAVLWSEGLFRSFNNRRQVAAYAGLAPTPWQSGSVAHEQGVSKAGNPRLRTTMIQLAWLWLRHQPGSALSIWFRERVQRNGGRSKKTAIVAMARKLLVALWKYAVHGILIDGTTAKAA

SEQ ID NO: 188037 - protein, 337 aa, unidentified
MMYSGIDLHSNNSVVAVIDDGDRVVAQKRLPNDIAKIAGFLARWQDELAGVVVESTYNWYWLVDGLQDAGLHVHLANTAAIKQYDGLKHSGDETDAQHLAHLLRLGILPTGTILPREHRVVRDLARKRMQLVQSCTTHVLAVENIMARQLGGRMTSNQIKRLTEDTIDSLPLAADVGLAIKANVAVIATLQSQIEILEKRLQERVKPRPQYGLLTSVPGIGQTLATVIVLETGPIDRFPDVGNFASYARCVDSVLTSNRKKKGEGNVKNGNKYLAWAFVEAANFARRFCPEAKRFHERKKAKTNNIVATKALAHKLARACYHILKEGKPFDATRCFA

SEQ ID NO: 188038 - protein, 342 aa, unidentified
MQISTIGFDLAKHVFQAHGVDMHEKVVVKKQLRRAQVIAFFEKLPPCLIGMEACASAHYWARELTKLGHKVKLMPAKDVKAYVKRSKNDAADAAAICEAVARPTVRTVPMKTPDQQARLMQHRTRDLLVRQRTQLSNAMRAHLAELGLIAAQGREGLKSLLAIVANENDDRLPADARASLGVLAAQILACNAQIATLEKRIHTQHRTCEASQRLETIPGIGVIGATAIAATVPDPSVFKTGRDFAAWIGLVPRQDSTGGKQKLGPVSKQGDRYLRRILVVGAHAVLKHARTHPEKHPWLMQLLARRPAKLVAVALANKMARIAWAVLARGETYRAPRIAATV

SEQ ID NO: 188039 - protein, 377 aa, unidentified
MNQHGITFVGMDAHKKAINVAVLLPDQREALEWQVANQPAAIRRLAKRLVREAPGEVRCCYEAGPCGYVLQRQLEAAGGVICEVIAPSLVLIKPGERIKTDRRDARKLAVSLRAGDLTAVHPPTPADEAVRDLCRCREDAREDLTRARQRLGKFLLRRGRVYTLGKRAWGHLHRQWLKGLEFEHRADQVTFEDYLGAIELLEERLRGLEQRLEAIAEQDPYREPVGWLRCFHGIETVTAIAVVAELHDFRRFETARALMAYLGLVPSEYSSGERQRRGAITKAGNVHVRRLMIEAAWHYRHRPRVGEGLRRRRQGQSSAIIAIADRAQHRLSRRFRHLTEQGKPFNKAVVAVARELVGFVWAALYPAAAGQAASDRP

SEQ ID NO: 188040 - protein, 504 aa, unidentified
MTGPVWGGAEFRIPVGECPVRACFLRGDNRRPCLSTGDWRMLVPLRLGIDIACRAAHQASLADEQGRFVWSGRRFRTTPEDLLRLWEMLPDGVNGGDLTVVMEPTRNAWVPLAAWFRRQGATVVLVPPERSADLRAYYAKHTKTDRLDSQMLARLPLLHPDGLHAEHGLGPADSLRRAAKLHSTLMARRSKSLARLDALLEILGPGWHAACGADLANKTPLRLLAAGYADPHYLLRVGRARLVRFLARHSRGSWGDEHAVALRAAAQQSLQLWQGELDYADLADDIAIEARLALQLTEEIHELDERTATLLDRVDPKGIVRSAPGVGPVTAAAILGRLGDPTRFATLAGARAYTGLVPALDSSGQTGRHGGPTKRGDAVLREALFMAADHARRIDPVLAAKYHRLMTVAGKHHTSALCHIATALLTRIVACCRADVPYQLRDVDGTAVTTDQARNIITIRYAIPPELRIRRRTTTTGTGRRSKESPSAPSTGPSTPNAKRRGAA

SEQ ID NO: 188041 - protein, 431 aa, unidentified
MPNEVPIEQEIVAYVGLDWADQQHVICWQAADSAAVQSAVVQQRPEELQAWVAELRQRFPQGLVAIALEQSRGAVIAALMHFDFLRLYPINPKSLARYREAFASSGAKDDPDDAALLLELLVKHRDRLTPWVPDDPLSRQLALRVEHRRQLVNLQTKLIQQLRSHLKVYFPQALDWVGELDSLQACDFLQRWPTLAAVQKARPSQLEKFYHQHHCRRPQLIQQRLEQIRQAQPLTQDSAIVPAYSQMVLALVAQLRVLIPTLQQWQQQISQLFAQHPDAALFASFPTAGPVFAPRLQAAFGSRRDRFGSAAEVLQFSGVAPVTKRSGKSRQVQRRWARPKFLHQSFVEFTGLSIPHCCWARALYQQLRARGHRHWAAIRVVAYKWIRILFRCWQDRVPYDEQKYLKSLERRNPTLWAAIQQLPAQPSRKEV

SEQ ID NO: 188042 - protein, 344 aa, unidentified
MRIAVLGVDLGKNVCSLVGLDASGAVVLRRRAKRETVIALAAKLSPCIVGMEACCGAHHLGRVFAAYGHDVRLMSPEYVRPYVKAQKNDDRDAEGIAEAVTRPTMRFVELKSQDQLDMQTLHRSRDRLVGDRTALINQLRAILLERGIVAPQGKRKLEQFLVELMDEQGGPGLSPRMIMLVTDARAQWAELDRRIAAFDAEFVRWTRENEDARRLATVPGVGATIASALIAAIGKGETFERGRDLAAWLGLVPRQLTTGGKPKLLGISKRGNKYLRKLLIHGARAALPYVAERDMPLGRWAKSLLSRAHPNVVVVAFANKLARIAWAVLRRGERFAAKGTPLAA

SEQ ID NO: 188043 - protein, 330 aa, unidentified
MKERTRLLPERWTYRRRSCSGEHTLNVANNPRGIATLIKRLKKWRVSRIVLEASGGYEIAAAYDLAAAGLPVAVVNPRQVRDFARATGRLAKTDAIDARVLAHFAEIIQPQTRPLPDMQTRELMALVARRRQVVDMLTAETNRHGRAVDAVNRAIAAHVRWLRKQLADLDAALERAIRNSPLWSEKARLLRSVAAVGSVTVITLLSHLPELGTLNRRQIAALVGVAPFNHDSGKLRGRRAIWGGRAQVRAVLYMCTLGRNPQLQAFYARLIAAGKKPKVALTACIRKLLIMLNAVLRQRIPWNPELATLPSPFSAARGGAVIGAGSIATT

SEQ ID NO: 188044 - protein, 439 aa, unidentified
MRTFALDVHKNFSEVAVHEGGQVRRVGRVETRDLRAFAAALEPTDHVVLESTSVSWAIVDLLAEHAGRVTISNPMQTKAIAQAKVKTDKVDAKVLAKLGAADFVAEVWVPDTETRALRRRVAHRASLVRQRTALRNQVHAILARNLLALEATDLFGKKGRALLGAVELPEHESEQLASALRLHDALQGEVQRLERTLAGHALKSQSVRRLMTIPGVGSITALSIVSVIGEVSRFPSARHLVGYLGLDPKVRQSGERAARTGHISRQGQAHARGLLVEAAHAAVRTPGPLRAFYRRLGARRGQKIALVATARKLAIVCWHMLTREEDYRFEAQALTLRKARQPPAPGRRGGRADHGPGRGQAPRARATPARTGAAHLRGRGGPTGKRRGASRGTRLFRPSCGRRCAAGSWSPSTCTSRRGHPRRGGAYGVRLTFSSARFM

SEQ ID NO: 188045 - protein, 424 aa, unidentified
MKPSVTPPFAAYVGIDWADTKHDICLQAGIDAPREIACIPHKVPDIHQWAQSLHQRVGGPIAVALELAKGPLVYALQRYDFFVLYPINPLTLAKYREAFTPSRAKDDPTDAELALDLLIRHPERFAPLHMQSEGMRTLLSLTEHRRELVGDKTRFTNRLTNTLKQYYPQALDWFEQRDTFLYCDFLARWPTLAQVKRARASSLRDFFHAHNCRYPTVIDGRLAAIKAAAPLTEDKGVIEPCRLLVLALVEQLRATLLAIDQFDQRIAELAPTLPDYSIFEALPGAGPHLAPRLLVAFGEQRERFPSAESLQKYAGIAPVIERSGKKCWVHWRWQCPNFLRQTFVEWAAQTIDKSFWAGAYYRQQRDKGSSYQAAVRALAFKWIRILHRCWQTQTPYDESKYLNALRTRGSPLIKSLPLPAAEKA

SEQ ID NO: 188046 - protein, 349 aa, unidentified
MLHVGLDLSRRRVDVCLISSEGELVEHFRAPADRDGLYGLTRRVAVYDEPVRGVVESMNGARFVHDELVRYGWEVLVADAQRVKGLAPLACKTDRVDARVLAELSFRDLVPAIWLPSPELRAERERSRWRLHLVKHRSILKNRVHASLIAFGHQVPMADLFGAGGRRLLAELDFPEPWLSHVRASVELIDDLDRRIAEIERWLQRSGADHRYIPLLMSAPGIGWVTGFTIAAEIGDISRFSSPVKLTGYTGLCPRVNQSGDMDRRGPLSKHGPRYLRWGLMEAAIHASTHPLYKERYQRTKRRLGRQRGAKVAQIELARKLTEAIWYMLTRNQPFKPFAPAGAVCRLTA

SEQ ID NO: 188047 - protein, 338 aa, unidentified
MKVYVGMDLHATNRYVGMVDEENEVLHKQRFRNELPLILAGLDPFRKDIQGVVVESTFNWYWLVDGLMAEGYRVHLANVSAIKQYEGLKQIDDTRSAFWLANLLRLGILPTGYIYPKEERPTRDLLRKRLHLVRHRTSHILSVKNILARNLGLRMKSEDVKKLEDSEVKRFFPDKEMQTAVLASVGLIRHLEVEISGIERMITKKLKIRKEFAKLMTVPGIGKILTLTIMLEVGDIRRFPTVGDYSSYCRCVKSIRTSAGKIIGYGNRKNGNKYLSWAYIEAAQAARRFHETVRSYYEKKMAKTNRIVAIKALSHKLTRASYYVMRDQVDYDPARLFR

SEQ ID NO: 188048 - protein, 467 aa, unidentified
MSSKKIQIKKRAGRKKKGFSFGDRPLVEPNAAGVDVGAREMYVAVGPDRDPEPVRVFPTFTADLEALADWLLDRGITTVAMESTGVYWIPLYQILEDRGIRPCLVSARHMKNVPGRRTDWHECQWLQYLHSTGLLRAAFRPDQEVCAVRTLLRHRNELVQMASQHVLHMQKALTQMNFQIQHVISDIVGVTGSAIVEAILAGERDPAVLANLRHSNIKADAETIRKSLEGDWRQEHLFTLRQSRDLNNVYRKCIEDCDREIAERLGRFESKVDIERNPLPKISGLSQKRRTKRTGDFRFDVRKEAYQLYGIDVTQIPGLNGLVIPLFSEVGRDLASRFGNSARFASWLGLCPDNDKSGGKVLWKAVRRIKNRAGHMFRMAAAALHHSRSPLGDFLRRMKAKLGPAAGITATAHKIAQIFYTLVTRQIEYDDSAWAARDTQRNQRFEQKIKRQARDLGYQLVPLQPET

SEQ ID NO: 188049 - protein, 412 aa, unidentified
MTATNQFAAHVGLDWADKKHDVCVQFKNGERVFHVIEHTAEALDVWLTELHQKVKGRIAIAVELKKGPVVYALQKYPFITVFPVHALSLARYRQAFSPSGAKDDPQDAELALELMLRYPQKIKAIEPDNADIRLLQQLVEQRRQLVEDKRRFVNRIINTLKQYYPQPLEWFSHRGSLLLCELIIRWPSLQQLKRARRDTIRNFLNAKGGRAMALTEQRVASIDNAIPLTTDPSVIEANALMATALATQIKVVSEIIKTYDERIETLFDTLPDAGLFKSLPGMGPCMGPRMLAALGDNRDRFNSAEEIQNYAGIAPVTERSGQKSWVHWRWQCAKFVRQTFVEWAAKTVNSSYWARLYYQGLREKGKSHQSAIRALAFKWIRIIYRCWKTRTQYDEAKYLLALEARHSPLLRP

SEQ ID NO: 188050 - protein, 387 aa, unidentified
MPQLNDLSRSLVALDQDSTIIAVVELSQSSWLVAGVLPGIERQPQKKLEPSAERLLGLLHRWRDEAVRAGKKITRIALAFEAGRDGFWLARWLNARGVEAHVIHPSSVAVSREHRRAKTDRLDTELLKRGFLGWLRGERGHCSMARVPTIAEEDAKRPNRERECLVGERTRIVNRMKATLARLGVRNFKPTLRKAAERLATVHTPEGTPLPRNVLAELQREMARLGFVVSQIREIEQARQKRLEQETETGPHAMVRQVARVIGIGIETADMLVHEVLSRPMRDRKAVARYAGLTGSPDESGARRREQGLARAGNARVRRGMIQLAWRFLRFQRQSALAQWYRARTADSRLGMRKTMIVALARKLLIALWRFVTTGEILEGVILRPAG

SEQ ID NO: 188051 - protein, 399 aa, unidentified
MLNPVSLQLRVGVDVGSQCHSVAVGLTDGSLLEEFEIPHTAAGFGDFFSRIEGHAKRHPYPIAVAMEGYNGHVRPLDSLVRTRGWRLFNVNNLKLARFKEIFPAAAKSDRIDAAKTLELFQLRDHLPMAGDVLQEVMATPEENDILKRLSRRRRRLVNERGRVINSLQADLQAVAPGLLQITREVGNLWFLNFLTCRKGLLKLARVRRASLLKVPGIGATYADAIQAWQSRAFFAHDASLVGDMIQQDAARILELKQQITALEEQMARVAESSSIAGQLASIPGYGAVCTAELAGEIGTLERFRSESSLALYLGMATLDNSSGKYRGSKAPKHVNARAKAAMMAAIDHHRKRVPQSQRYYEKKRAEGKRHNQAIRALGRHLCRVIFKMLSQERPYRIYP

SEQ ID NO: 188052 - protein, 441 aa, unidentified
MSTGEKHLHGDRPAYLSAFKSPDPFPSACINKLKNQMDQNATSNPRVIGLDSHPDTFTAALLRGQTPAAAVTEKMFNRVPVAQLQSWAKKHTAPEDLFVLEASGNSFQIVRLLAAVERKALVLESCQMGKLKETHANNDKISAVRIGKAYLAGTAKVVWVPDPKTQERRDWFHAHRKAVKRTTQMRNRLLSYLSDNGVRLKKDTPLATGKEAAERLRQSRNWSARQWQVLEGLLMELRHADEQRAHWRSLIAQEVLADPQLLSLVRLCGVREMVAFALGALIGDIHRFSEPRKLVKYIGLNPAFDDSGENKWTGGIQGHGRKDLRSLLIESAQAILRSKHPLAKWGKKLLSRKGSLNLAAGAVARKLAVAVWYLMMGRWTPLEEIDSRLALKVGKIIGGVGTNGLKQLQKTRKTFKEEVYASLKAGRTYQLDPNTKFIPAT

SEQ ID NO: 188053 - protein, 337 aa, unidentified
MQMPYSAVGAAVCIGVDVDSKLLNLTRASAATLDTPVTTIANTATAIKAWLKTLPPGCRIGMEATGKYHRTLAELAVRAGHTVFVFNPAQVASYLRSLRSRGKTDVLDTRGIARYVLNESADCHPYVPPGPFHAKLAVLIGRRHQIDKQRTSLKMSLADVPECAAQIRTLKNAFKRLLATIDAQINAAFAGEHELQLQRQRLCTIHGFGPLVSAAVAARLSRVPYANSDAVVAAFGMDPRPRDSGQFKGRRCLSKRGNAEERRLIYLAAVSACNNPLFRAIRDTLLLKGMSNIQAHCVIARKLLRIAFAVWQSKQPFDPSRIAKAVDSKRAMSPEHL

SEQ ID NO: 188054 - protein, 332 aa, unidentified
MEDFYFIGVDVSKKKLDFCVMFEGKVVYEEKTANHQSAIMSLIYHLQEDYEIAGSRMLICAEHTGQYTFPLACACKAMECRLWLENPAEIKYSSGVQRGKNDKVDAKRIAVYARRFQDKVHYYERPTEDIERLKQLESERTLYVSDLAKYKAQLKDQKDYMPKTLFERKMKRLQALMDDLVEAINAITDEMEEVISACPALSRQMELLMSVDGVGRVVATNMIIATEAFTRFDDSRKFNCYAGVAPFSYSSGSSQHSKSKVSHRADKTIKRLLHLAAVAITHKTGGELKMYYERKVAEGKNRMSVINALRAKIVSRMFAVIKRNEIYRPFLS

SEQ ID NO: 188055 - protein, 320 aa, unidentified
MIQFVGIDISKDTFDFYFEQAGRAMQWQLQQTEADYETFIKLIGPNRCCVMEATGNYHLKLVNYLHRHDIEVVVENPLKIKRYGQMKLQRAKTDKVDARLIFDYGSQILIHSRQPWRPTSEEIHQLKQYDTLTRQLSKQMTALSNTYHAMQHLEGLDDEIARILEDTIHGIKKTIDELDGKMLELVKASYHESFDLITSVPGVGPKTAVMLLCLTDGFRRFDDVRKFVSYIGMSPRTYESGSSIKGKGHITKIGNGRMRSLLYLCSWTAKSCNPQCKALYEKLEKKGKPEKVMKVAIAHKLLRQVFGIMKRGEPFCVDIA

SEQ ID NO: 188056 - protein, 370 aa, unidentified
MKKNSTTKQSPKRAAARQKGPLTIGLDLGDKTSRYCVLGDQGEVVSEGSVATTKKAMLGKFGSMRRCRIAMEVGTHSPWLSRLLAGLGFEVIVANARQVQLISASSRKNDRMDAQTLARLARVDPQLLRPIRHRSEQGQKDLMTIRIRATLVEARTGLVNAARGFAKALGERLPACDADEMGVGQMKELPEALRDRLKPLLEEVESLTEKIQELNTDIEQIARTQYPETELLQQVSGVGTLIALTFVLTVEDRERFHKSRDVGCYVGLRPKQSESGQSQPQLRITKEGDRYLRSLLVQGAHCILRQKSPDTDLQRWGRKLCARGGKNAKKRAVVAVARKLAVLLHRLWVGGEVYEPLRNSQAAALSRQAA

SEQ ID NO: 188057 - protein, 325 aa, unidentified
MKVKTIGIDLAKEVFGVHGVDARGKSLVHKRVSRKHLLGLLVKLEPCLVGMEACGSAHHWAREIEKLGHTVKLMSPQFVAPYRKGNKNDPNDAEAICEAVTRPSMRFVPIKSEAQQDLQALHRVREQLLKSRTALVNQVRGLLGEHGIVAPRGIAHLRRLMVEILAEPASRGLSGLFGETLFEIAERLRFLDERIRTYDLRIGRVFAHDERCQRLAKVEGVGPLVATALVAAVGNANEFKSGRELSAWLGLVPRQHSSGNRNVLLGISKRGDRYLRTLLIHGARSALCRAERRSDRRSIWASKLKLARGFNVAAVALADKNARIL

SEQ ID NO: 188058 - protein, 384 aa, unidentified
MSLNRTNLHQAVTAVDDGAIFVSLELSRSSWLVTSLSPGSQKMSKHKVSAGSGPALLGLLAQLKSKAEARLGRPLRLVVIQEAGLDGFWLHRLLISEEIESHVVDAASVAVSRRMRRAKSDRIDGEALLRTLLAWLRGEPRVCSMVVAPSPEEEDRRRQGRERKALITERTRQTNRIKGLLASQGIYDYSPLCRNRRKRLDELVTGDGRALPSTLRKEILRGLDRIELLLEQIKELEVARAELIKPEQSPKAAMLAQLKGIGPEFAACLWLEGFWRTFANRRQVAAYCGLAPTPWQSGSIEREQGISKAGNPRLRETMIELAWLWLRHQPGSALSKWFKKRVGNEGGRVRRIAIVAMARKLLVALWRYLTDGIIPEGAVLKAAG

SEQ ID NO: 188059 - protein, 478 aa, unidentified
MAAVKMNRKQRKELVRRMRSEDPGLEVVHPDAAGIDVGNGAHYVAVRPDRDAEPVRRFECFTADLHRLADWLQACGVKTVAMQSTGVYWIPLYEILEARGFEVYLVNARHTKNLPGRKSDVQESQWLLKLHTYGLLNNSFQPTSEIRVVRTYWRQRGEHVHGASTCIQRMQKVMTQMNLQLANVISDLSGLTGQTIVRAILAGERDPAKLAALSHPQVRASRAEIAKSLEGNWRPELLFVLKQEVEMYDTYQRRIVECDGELEAHLKRFADKAERKEEEPTADNQKGKKTPKTKLGQSGKRAQGNAPRFDLRSELFRVSGVDLTRIDGIHVMVAQTVISEVGLDMSRWNTEANFSSWLGLCPDNRISGDKVLSKGTRRVVNRAATALRMAASTLIKSRSYLGAQYRRLRSRLGAPKAITAMAHKLARLVYRMLKYGQEYVDKGMQFYEDKYRCQQVDRLKKTAAKLGLQLIEIQAVEG

SEQ ID NO: 188060 - protein, 359 aa, unidentified
MLNVGVDVHKRICQACLKDGQGSIVEEFRFPNNREGACRLAAILRKHGDARVALESTGNLWVKLYDRLEEEECIDVILTNPKKTRVIAEAKIKNDKLDARLLADLVRADLVARSYVPPKDIRMQRALLRERISLVESRTMIKNRIHALLDKYEIHCAYTDLFGKKGREWLRSLNLPGIDQTILEVNLQRLEELEAHIDAFTHKIAQEAVEKPEVRLLMGFTGIDYYSAMLLASEIGDVKRFASAKKLVSYAGLAPGIRQSADRTVHGHIVKDGNKRIRWILVEAAQHASRHDPRLRAFYLRILKRRGYQRAIVAVARKMLVAMYHVLSKNEAYHGVRGELFERKLKRLEWETARSLQAT

SEQ ID NO: 188061 - protein, 345 aa, unidentified
MPIVGGLDIHRKQITFDYLDTGTGQVRRGQVSPADREHLRAWLARFAGREDVAFALEGCAGWRYVAEELAAAGITAHLAEPADTAFARGRKRHAKTDKTDARHLRMLLAEGRLPECWIPPRHILECRAVLELYNDLRRERTAWAQRIHAVLFHQGAPALGEGALRTERGVAELRAAAAAHLSPAGQLQVATAVEVIDALEARLHVVRHQLLDAARHLAGAKALAARLYGVGPVTALAITCWLGGAGRFSSSRQAVRFAGLDITVSSSDRKGPPGKLSRQGPPVLRWAVYEAGKAHARTSAPDHGYYAAVKDRKNSKRACLSEARKILRQAHHILAELGDDALAVA

SEQ ID NO: 188062 - protein, 458 aa, unidentified
MSNGSARRLSRGDRRRNERLTRLRAVVTRESAVLAFDLAGDKQVCALCDQDSAVIARRTVTAKAWQLSGAVAWGLARAAATGFASVVVACEPTGHRWRVLDQLAAEAGVRLVCVQPLLVGRAREAEDFTRNKNDDSDAVIIARLVTELRCYLPERAEPAWARLRHLGARRAGLVLAAGAAGTQIRDLLECAWPAVLGAAVEPLESASWRAAMTVVLDRVADTGDLGVIRRSGWSRFAAAVRRELPRHGTARWHSPIVRAVFAAATDPAQAGLGVAEQRAGALERVRFALDDLGHARAELAVVEARMVAVLDTLGLTALVTSIRGLSAVGAAAILAETGDPRRFSSARALVKHAGLCPRDNASGGYQGKTAISGRGRARLRMAAWRAIFPALHHNPVLAARYAHLVGRPDRQLTDAQARVAVAGSLLRQLHAVITTGTPWDQAIAAGTTRAGGEAASAA

SEQ ID NO: 188063 - protein, 384 aa, unidentified
MEKSSTMYVGLDVHKDSIDIAAADAPRDAEVRHVATVPGGLIPVTKAMRKLIGTGRRLHIVYEAGPCGFVLQRHFTTLGWHCDVVAPSSIPRPSGERIKTDRRDAMKLARLARSNELAVVRVPGAADEAMRDLVRAREDSVREQRNARQRLKALLLRNGITYAGKAAWSAAHLRWLATLKMEHAAQQIGFQEYLHSINESGARIFRLEQAMRDALPSWSLTPMVQALESMRGVQLIAAITLVAELQDFLRFENARQLMAYVGLVPGEHSSGQRRRQGNITKAGNSAARRMFVEIAWHYRHSPRVSRVIAVRQEQLPQAVVDIAWAAQLRLHSKFKRLLARRVMKNKAVVAVARELAGFVWAIAQEVQTSGWLGYKVVPATCTPA

SEQ ID NO: 188064 - protein, 363 aa, unidentified
MNYIFVGCDSHDKTLVTKIALNLEPAEKKTFSGTRRGREKLVAYLSRRSAAAGGAKAVVAYEASGNGFILCEEIKAAGHECHVLAPTKIERSTKQKRNKNDERDADRLLEILRGHYLAGNRLPSVWIPDAQTRDDREPVRTRHDLSQKATAVRTQLQMLLKRNGIEKPEGIGKGWTKPYRQWLKALTESGTANRQGMRTTLASLLRQLEFLEEEIGRLDEAMQSVANTARWKPIVDALMREKGVGLKAALKYATDIGDFSRFRRGRQVGAYYGLTPSSQESGDNNDRKGHITREGSPSTRQILCQSTWARVRHDPHERAVYQRLVAKNPKKKKIALVACMRRLSVRLWHVGLQAQLNMTKQEN

SEQ ID NO: 188065 - protein, 366 aa, unidentified
MKKISTVEIERIQIFKENQLTIGLDLGDRTSHYCILNEAGEVIFEHELPTTPKGIEEVFSRIPRSRIALETGTHSPWVSRQLTELGHDVIVAHARNVRLISESSRKDDRLDARTLARLARIDPGLLGPVRHRSAKAQIHLTVIRARATLVSSRTALVNAARGLTKSYGQRLRKCGTEQMNRESAKELSQELRDALDPLLAEIESLNERIAEYDRRIEQIAKEVYPQVAVLKQVKGVGPLIALTFVLTLDDPHRFRRSRDVGCFLGLRPGRRNSGMSEPQLHISKEGDRYLRTLLVQGAHYILGPFGQDSDLRRWGLKLAERGGKNAKKRAVVAVARKLAVLLHKLWVSGEVYEPLRNNHKVVAAVA

SEQ ID NO: 188066 - protein, 423 aa, unidentified
MDVIHDRVAGLDVHKDTVVACVRVMSGAKVERTCRTFGTTTVALGQLRDWLDGNGCTEVAMEATGVYWKPVWNILSDGRFELTLANAAHIKAVPGRKTDMNDAMWIADLVACGLIRPSYVPGERQAELRSLLRTRKQLCREQASHVQRIQKTLEEANIKLASVISDILGVNGRRLIEAMIAGVRNPHRLAGLADRRLKASPKQLYDALHGRLTDHHRFLLRLHLGQYDTLGTAMGQTDRQVDTAVATLDAEAAAGQASFRALIALLSTIPGVSTLAATTILAEIGRDMSRFLSAGHLVAWAGLCPGQNESAGKRKSARLRKGAPWLKTMLVQCAWAAKRKKDSYYQAQFYRLSARRGPQKAICAVAAAILTAIYHMLKDGTVHHDLGANHFDRRPAQVRVKHLVAHLTKLGYQVQLQPLPEAA

SEQ ID NO: 188067 - protein, 347 aa, unidentified
MLHAGLDLSRKRLDYCLLDGRGERVEVGAVPPDGDGLVGFVRRVDERHGQTVRAAIESMNGARFVHDTLERLGWEVEIADAARVKGLAPLACKTDRIDAWVLAELSRRELVPAVWLPSFEVRQERERARWRLFLVRKRSSLKHRVHAQLLAFGHACPVSDLFGASGRQLLERLEFPEPWRSNVLAAVSMIDDLDREISEIEKELRALGADHRYIPLLITVPGIAWVLGYTIASEIGDIERFASPTKLAGYTGLCPRVYQSGQSDRRGPLSHAGPKYLRWALMEAAVHACRHEAYRDRYQRNKQRLGKQRGAKVAQVDIARRLSEAIWQMLTRNQPFAPASATHALAA

SEQ ID NO: 188068 - protein, 422 aa, unidentified
MYSYNNQWRIFMKQEVKEDVHITPQLDKACGLDMHKDKIVGFISWKDGSHQELKEFGTFTCELKQIRDWLQANGICHCLMESTGIYWMSLYAILTDAGIDVTVANPVNIKQMPKRKTDRKDAKWLCTLLINGLVRASFIPNNQQRVIRDYCRNRLFYTWQLNRTRNRLLKILESNNIKLRSVISTIHTLSAMDMIRLLALGVTDKQQLINCARGKVREKKEKLLMALEGTLQPYHQTQLQMLLLDYDHVQKQIGFLDAAISEIIETHYAQAFECLDSISGIGVRSAEIILSEAGNDMSRFPTADHFTAWCGVAPGNNESAGKRKNTAIKKGNNYLRIAIVGAAWAAVRMKDSYWHALFDKLRKRMKAQKAIVAVARRLLKVVYKTLESLTIYQEKGLAHYLDLQAKAVSYQRSHQLWPTQNM

SEQ ID NO: 188069 - protein, 323 aa, unidentified
MTVYLGIDIASKKFDVAELCDGNYRCKAFENTSAGFLALYKWLGQSTMPDIHACLEATGDYGTSLATFLYENKIKVSVVTPARIKGFGASELSRTKTDKADSKLIARFCKAAVPDGWKPTPAPVRKLQALVRRISALNGMLRMECNRRENADANIQASLDRIISLLKTEIEVVRQEIKDHVRSDDELKKQDALIQSVPGIGEVSSNLILSFMSGKGFRKAKEVTAYLGLNPRHHQSGSSVRGKTRMSKMGDTRLRSALYMPALVALRYNPDIKAFGQRLLLAGKPRMLVVGAVMRKLIHIVFGVLKSGTAFSSRIAVHSVVTS

SEQ ID NO: 188070 - protein, 373 aa, unidentified
MKKIRFVGLDVHAETIAIAVAEPDGEVRSLGTIPNREESVRKLANKLGDREQLRICYEAGPTGYALYWQLTGLGIQCEVVAPTLVPVKAGDRVKTDRRDAEKLARCYRSGDLTAVWVPDGAHEALRDLVRAREAAKQDQLRARHRLGKFLLRQGRRFAGNAWTQKHLAWVRQQQFAQPAQQFTLLDYLQEVEHMNERVLRLEQAIEEAVKLAPRPMQEVILALQALRGVAKITAVTLASELGEISRFATARQLMAYSGAVPSESSSGQRERRGAITKTGNAHLRRVVIEAAWSYRLRPGVGPALRQRQKGVSEEVKEIAWKAQHRLHKKYRRLTAAGKDGRKVVTAVGRELLGFIWAIGTRTESLYRQQTATA

SEQ ID NO: 188071 - protein, 411 aa, unidentified
MDVLIERCAGLDVHRDTVVATVRRPGPGGVRRSETRTFTTMTGQLEALADWLAAQKVTLVGMESTGIYWKPVYCVLEDHFPVWVINAEHLRNVPGRKTDVADSMWIAQLIEHGLVSPSFVPPRHVRLLRDLTRHGRRLTEERTRTIQRLEKVLQDAGIKLTSVASTILGKTGRAILAALLAGEEDPAVLAELAKGRLRPKIPALQEALTHRFRLEHHGVLIAQMLAHIDFLEASIAETHQRVEVLLRPVADRVELVMTIPGVGRRVAEVLIAEVGLDMTVFPTAGHLASWAGICPGNNSSGGKRRPGRTRHGSMWLRIALTEAAQVAARGKGTYLAAHHAQIRGRRGTQKAIGATRHDILIAYYHIVRDQVSYQDLGPDWNNRRRSTEQQTRRLVRQLERLGLNVTIEPVA

SEQ ID NO: 188072 - protein, 360 aa, unidentified
MRIIGCDLHARQQSVAMLDTITGEVVNRTLMHEGQEVREFYSALPQPVLVGIEAIGPMQWFLNLLQQLGVECQIGDAAKIRAAEPRKQKHDRRDAELILKLLVEKRFPAIWMPNKEQLDLRALLLHRHQWVGLRTQLQNALQAIALANGLRRGASLWSQLGQQSLRMLPLAPYVAYRRDALQALYARMEAEIKDLNQRVEEQARQRPAAQRLLTHPGVGPVTALATEVFLGNPQRFPDGKAVASYVGLIPREHSSGKRQRLGALTKQGNPLLRFLWGEAGAHAARYDPQLQRFYRRKLVQKGLGKARVAVARKLGIRLWIMLRDQIDYQEFCRRGQKYSGAACAGMPGNGVGANSHRPID

SEQ ID NO: 188073 - protein, 358 aa, unidentified
MVTGPKHQKEKRSMEHFAGLDVSVNETSVCIVDDTGRIVREAKVASEPEALLAALKNRAYHFKRIGLEAGPLSQWLFSALAEAGLPVICVETRHMKAVLKAQINKTDRNDARGIAQMMRAGLYRPVHVKTLRSQKLRMLLTHRKLLQSKAIAIENDLRGTLRNFGLKVGVVGTVKFEARIKELVENLPDLAVLVEPLLIVRRVLREQIVILHRRVLAIVRDDEVCRRLMTTPGVGPVVALTYRATVDVPARFRKSKSVGAVFGLTCAKYQSGELDWSGRISRCGDEMMRSMLYEAAQSMLVHSKKWSWLKAWAMQIARRRGMKKAIVALARRLAVIMHRIWVDGTEFRWTREQAAAAA

SEQ ID NO: 188074 - protein, 372 aa, unidentified
MLIHYIDIAKRNFVIAVSSLSKTKTETNNPKGIAHTIEYLKKHKVALVVTESTGGLEIPAAKAIHRAGIAVIIANPRQTHQFAQSQSLTKTDAKDAKMPAFFAQMKAQKEDWQTMPYHPPTEAEEVLEALVNRRNQSADMRTAEKNRLHQVHETQVGSVKQLIAHFDRLIDESDKQIDDHTHTHFDGKAQVAEQIKGIGSITTATLMAMLPELRRLSHKRIAGLAGIAPHPRESGEAKFKSRCFGGRSAVLKALYMATVAATRFEPLIRDFHQRPLSEGKPYKVAVTACMRKLLETFAKFLSLTTTEIPTQVFGCFRPKYRLILPKHPLNPPRTPDNQASGLPFRRQRAHLACWRLSTGSNTSPSDGFAHSL

SEQ ID NO: 188075 - protein, 354 aa, unidentified
MSQNPNTPIAVVGIDIGKNSFHVVGLDLRGAIVLRQKWSRGQVEARFANMPPCLIGMEACVGAHHLSRKLKGFGHDARLMPAKYVRPYSKGQKNDFRDAEAIAEAVQRPTMKFVATKTGDQLDLQALHRVRERLVSQRTGIINQIRAFLLERGVAVRQGLRFLRAELPHILATPPDVLSPRMVRVIEGLAGDWRRLDERVESLSHEIEAVARQDAGCERLMSVPGIGPIISSAMVAAIGTGDGFSKGRDFAAWLGLVPKQMSTGDRTILGKISKCGNRYLRVLFVQAAWVVLIKPKSWERYGLKPWIEAAKKRLHRNVLAIALANKLARIAWSVLARGRNFEVRKIDEAAAQSA

SEQ ID NO: 188076 - protein, 412 aa, unidentified
MNLKPDQLVYVGVDLHKQHHTAVIIDCWNKKLGEIKFDNKPTVFPQLEKEVKKYVKKGMSVVYGLEDVGGFGRALAVYLTEKGCWVKEVNAKLANARRKSHVTIQKSDSWDAECVAKVLRDELLNLPDAKPIDLYWAISQLVTQRKWQARTLTGMVKRLHQQLGYHYPSYKKFFSEVDGKTALAFWHKYPSPSRLSGVDVDELATYLRKLSNYALSTKKAMQILMLIVDDGDTTRDFQDKRDFIVRDLVRNIRFYEHGLTRIEREIASLMNQLGFQLETMTGIELVTAAELVAEIGDIHRFASADKLARFAGVAPIAVGSGDKHRNYKSKQGNRELHDIIKALAIRQIAVTRTKKEPRNPYFYAYYEQKMAAGKTKQQAIVCIMRKLVNVIHYLMRTKAAYVIPAVSSNEAA

SEQ ID NO: 188077 - protein, 421 aa, unidentified
MRSVMHPIACGIDVHKKKLACTIIIAESMQVEPVYHHRKFSTHNYDLVKLVVWLDHYDCHCVCMESTGKYWIPVFNYLEDRDFDIVITHPKYVKSPKGKKTDFLDSIHIAELFQMGEVQPSYIPNKEFRQLRDLSRYRYKITNFISSEKNRVQNCQTVSNISLASVVSDPFGVSASAVFSELLTSSDVDEVHIRSLLRGSLKKKSEEILNSIRGFHLDDDQSYKSLLSLGHMQFLEDMKSALSSEIDKRTSKYHVYIDLATQLPGIGHLSATTLVSETGVDMSVFSDAEHFTSWIGLTPTNNASADKKKSVRISHAGTYLKPMLIQCALAALKDKKCPYFKIKYDKIKKRRGHKRAIIAVARMMAVCLYHMFKDLKDFHPSDYEELMNPIPPKPRKQDIQDALELLQSVGEYKITPILAAS

SEQ ID NO: 188078 - protein, 343 aa, unidentified
MQAITTIGLDIAKSVFQVHAVDAKGNVVLRRQIKRRYVLAFFQKLPPCLVGIEACASAHHWSRQLQALGHTVRLMPPAYVTPYVKRHKNDAIDAEAICEAVTRPNMRFVATKTREQQSCLTLHRTRHLLIRQQTSVINAIRAHLAEFGIVAPVGRNGVDQLLGIVADASDKRLPELARACVAALGTQLGTLKAQILQFDRLIMAWHRSSEASRRLDDIPGVGPALATALVATVADPRAFRSGRNFSAWIGLVPKQHSSGGKNRLGSISKRGDRYLRFLFVAGALAVIRYAKIHGTKHRPWLTALLARRHTKVAAIALANKIARMTWAIMAKGEHYKEPIALAA

SEQ ID NO: 188079 - protein, 413 aa, unidentified
MPVLFARCAGLDVHKKTVVACLMLTLLSGEVRKQVRTFATTTQGVLAVADWLTSQQVSHVAMESTGLYWRPVFTILEGAFTVILVNAQHIKAVPGRKTDVKDSQWLAELLRPGLLKASFIPPQPIRDLRDLVRYRESLIEERSREINRVQKGLATANIQLSSVVSDVMGASGRAMFQALITGEQSPEVLAELAQGSVHKKIPQLREALLGRVDAHHQILLSPLLAHISFLDQTIFQLFFQIQQYLTPYEEAVELLVSIPGVAAETAACILGEIGVDMRCFPTAAHLASWAGVCPGNRESAGKRLSGQTTKGNKRLKAALAEVVWVLSHMKDNYLSAQYHRLARRLGKPKAVMAVAHSLLVIIYHLLRDKQPYRDLGATFFEAREKERVVKGALRRLENLGYTVTLQSPEEVSA

SEQ ID NO: 188080 - protein, 430 aa, unidentified
MKSNTQNAKIEAITEKTLVLGIDVGSEMHYARAFDYRVIEYSKKPFKFSNTEAGFATFKEWVLDLKERHEKDKVVPGMEPTGHYWFNLGKFLQDNEMKPVLVNPHHVKKSKELDDNNPTKNDRKDPKVIAGLVREGRYMIPYLPEGVYADLRTASNIRFQLQAELTRIQNRISRWFNIYFPEYKTVYGKPDAKSGMLILKAAPLPEDILTLGIDGVNQIWRDAKLRAVGKARAKTLIEAAEHSVGSKEGAVSARMEIRMLLEDYESRNTRLQEVMVLIEELVRKIPMAEKLLEIKGVGIRTVSGFLAEVGDISHFNNPKELQKLAGLALVENSSGKHKGETTISRRGRKRLRYLLFEVAMSLVSKNQEFRELHNYYTTRRLNPLKKMQSLMAIAAKLIRVFYAMLTKGVDYDPKKMVSDIKRPAVYLQAA

SEQ ID NO: 188081 - protein, 320 aa, unidentified
MRNTVGLDISKLTFDASAMVGNAEYSAKFDNDSKGLNQFSDRLKSLGCQNLHICMEATGNYYEEVADYFAQYYSVYVVNPLKISKYAESRFKRTKTDKQDAKLIAQYCRSAQESELVKRQKPTDEQYRLSRMTAAYAQIKSECAAMKNRHHAAKDEEAAKAYAEIIKAMNEQLEVLKEKIKEQTEKPNCKEGVKRLETIPAIGRMTAAVLFHHLTSSKFETSNKFAAFAGLSPQQKESGTSVRGKGKLTKFGNRKLRAVLFMPAMVAYRIRAFPDFIKRLEEKKKPKKVIIAALMRKLAVIAYHVHKKGGDYDPSRYKSA

SEQ ID NO: 188082 - protein, 361 aa, unidentified
MKKPSQHLIAEAPRKRGQVELTIGIDLGDVWSHYCTLNQQGEVIDRGRFRTTPKAIEKWFVDVPHARVAMEAGVHSIWISEQLQELGHEVIVANVRELRAISHSDRKSDQVDAEKLARYARLDPNILRPIAHRTVEQQQALTLIRARALMVRLRTAAINAVRGLTKACGHRMPASATPCFAQRSMAAMPPGLGQALGPVLQQIAEMTLKIKQYDRQIQQLGQTEYPETQALLKVHGVGHITALTFVLTLGSKERFGRSRDVGCYLGLRPRRSQSGDHDPQLGITRAGNAYLRSLLIECSNHILRPHGKDSALRQWGLHLAGRGGKQARSKAVVAVARKLAVLLHRLWTTQEPYMPFYAAAA

SEQ ID NO: 188083 - protein, 315 aa, unidentified
MPEPTVYAGIDVSEASLEVAVRPSLAAWSVDTNEKAVRALAKRLTKLGVGLVVMEATGQVEAPIAAILAEAGLHLAIVNPRQVRDFARSTGRLAKTDRIDAQMIAHFAEAVKPEPRALPDAETAELRALLARRSQVVEMLREERQRLHRVATGVRPRLEAHIAWLKEESDDLDKTLHERLRHSSVWREQDNLLQSAPGVGPIVSLALLLWMPELGKVDRKAAAALLGVAPFNVDSGKHRGRRRIWGGREHLRQILYMGTLSAIRWNPTFRDFYDRLISVGKPKKVAQVACMHKLLTMLNAMMRTHARWTPALRTA

SEQ ID NO: 188084 - protein, 395 aa, unidentified
MRSTKMAKQNEETIAAYIGLDWADSEHEVTMLVVETGEVESRKLKQESEALADWVQSLRERFSGRKVAIAIEQRKGALIYALMCYDFLILYPVNPKTLARFREAFYTSGAKSDPGDSGLLLDLIRLHRDKLRPWVPEDADTRLLQMLVEERRGLVDEVTRLTNRLKSTLKQYFPQALEWAGELDSRQALDFLTRWPMLESIRKAGAVAVEKFYRQHSMRNQDKLEQRVKAIKEARALTTDRAVLAASKMKALAIVRQLRALGKSIAEMEARIQELFEQHRDHEVFSSFPCAKKVLGPRLLAAFGGDRTRYESALDLQSFAGIAPVTRSSGKSKTIHKRMACPKFLRQTFHEYAAQSIKKAGWARVYYRGHRDKGVKHHAAVRALAYKWIRIMFRC

SEQ ID NO: 188085 - protein, 367 aa, unidentified
MEKSSIVFVGMDVHKESIDVTLAETGGEVRRVGSIGGDRAAVERLLGRLSRVHGHLHVVYEAGPCGWWLQRLCAGHGHACSVVAPSLIPRRAGEHVKTDRRDSEKLARLARAGELEALYVPDARDEAIRDLVRGREDAVVAQRRARQQLKALLLRHELRYVGRTSWTGAHRRWLAELKLPEPAQQIVFEEYVMAIEAAGERVARLTRAIEEQAAHWRFGPVLQALQALRGVQFIHAATLVCELGDLTRFDSPRQLMGYLGLVPREDSSGPARRQGSITKAGNGFARRALIEAAWAYQHPARVTPIIARRQTGLPKPIRDIAWAAQLRLCARFRKLAARRLNKNKVVVAIARELSGFVWAMARQLKPL

SEQ ID NO: 188086 - protein, 411 aa, unidentified
MQVVYERCCGLDVHKTKVVACLITSGKGGKPHKEIRTFGTTTGELNLLSDWLSAAGCTHVAMESTGVYWKPVYYVLEGNFELLVVNARDIKQVPGRKTDVSDAEWIAELLRHGLLRGSFVPPKPIRELRALTRHRKTLVREKARVINRIQKVLEDANIKLASVASNILGASGRAILQALAQGANDPYVLAELAKGSLRSKLAELEKALSGVVEPHHRFLLQQHLAHIDFLEQAIALVEAEIEERMLPFAKEVEQLMTIPGIKKQAAWTIIAEIGIDMGVFPSHKHLASWAGLCPGNNESAGKRKTGRTRKGNPWLREVLVEAAWAASRTRKTYLAAQYHRLAARRGKKRALVAVAHSILVIAYHLLAKGTTYRELGPNFFDQLNHQQLLKHHVRRLAELGYRVTLEPEAVA

SEQ ID NO: 188087 - protein, 356 aa, unidentified
MKILALDIGKYKSVGCDYEAETGRHSFATVATTPQALHDLLVEREPDRVVIEICSIAGWICDLVRTLGIEIQVANTSDERWSWRKVKQKNDRRDALKAAQLSAVNQLRPVHVPRLEIRQWRALIAYRQQLVRRRTKIKNHTRDLLQREGVILPRGRKAWTQIGMAALQELVKPLSESSLNELWRGELGVELAQLKELQQQIEVVEAKLDELGAADARVRLLRTIPGVGPRLAEAIVTMFDDPRRFGSGREVSAYVGMVPKQFDSGETERSGRITRQGNRLVRSLLVEVAWASLRHNAWARQCYQRIHGGKKSRKKTAIVAVGRKLLVRCWGMLRHQTPWHWEMKTATPVSSELRVG

SEQ ID NO: 188088 - protein, 368 aa, unidentified
MGQKSSKLFVGMDVHKESIDLAVAEEGGEVRHHGQIGGEMNALWRAVRKLESSGRELVFVYEAGPCGFGIYRGLTARGHTCWIVAPSNTPRRVRDRIKTDRRDSLKLAGLARAGELTPIYVPDVRDEAMRDLVRGREDAVVMQRQARQRLAALLLRNDVRYAGKTAWTAAHRRWIADLKLPQSAQRLAFEEYVQAVEEASARVQRLTQCIEQELAHWRWRSVVVALQACRGIQLIHAVRIVAELGDLSRFSHPRQLMGYLGLIPGEDSSGEHRHQGAITKAGNSSARRALVEAAWAYQYTAKVSALIARRQADVPKAALDIAWKAQVRLCARFRRLAARGINRNKIVVAIARELAGFVWAIAQHVKPV

SEQ ID NO: 188089 - protein, 311 aa, unidentified
MEHSHFVGIDVSKAHLDVHVLPTGDSFRVSHDDDGLVTLIERLRPVAPVVLVLEATGGYDVTAAATLASAGLPVAVVNPRQIRDFARATGQLAKTATLDARVIALFAEAVRPAPRPMPDEQARALGELIARRRQLVDMLGAEQNRRRLLHDRRLQRHVDAHIAWLEEALRRLDHDLTTLIRSTPVWRETEDLLRSVPGIGPVTACTLIADLPELGHLDRRRIAALAGLAPFARDSGAFRGRRMIAGGRAHIRRVLYMATLTAIKHNPAIRVFYLRLVAAGRPGKLALTAAMRKLLTVLNAMLRDRRPWQPA

SEQ ID NO: 188090 - protein, 371 aa, unidentified
MSQPEPGELLVWTAPDGIKLCQKEVVADLRQRGPSVDQISRIGMDTSKHVFQLHGVDAGEKVVLRKKLRRKEMIAFYQKLPPTVIAIEACGSSHHWARLLQSFGHEVKLIPPQLSKPYVKRGKNDAADAEALCEAMSRPTMRYVTVKTAEQQAALMLVGVRDRLIRNRTQLANAIRGYAAEFGLTAAKGMAHLGPLLERIQADESLPALARELFAAQAEEYQQLQAQIDAVDAKLTAWHKTNDCSRRLAKIPGVDPIGATLLQMKTPAPELFRSGRQFAAWMGLTPKDHSTAGKVRLGVITRAGDEALRQADLIAQPQTASSSGYLRLLILKIFLSRSPLHRLMRVVAGPNGASPDWYVTVGYSFRFDRLF

SEQ ID NO: 188091 - protein, 350 aa, unidentified
MLDTCVECVIGVDTHKHSHTAAVVAAGTGAVLEISAVTADLDGYEMAVGLADAHCEPTGRAWSIEGTGSYGAGLCSFLQARGELVFELDRPSRPARRDGAKDDGLDAVRAARELLARDRCAIPRASGHHRDAMRLLLVTREGATKDRTRAINQLKAAVVTAPEPLRDRLRGLNGTTLIKRCAHLRHRTGEDAAERGTVDCLRRLAERIVSLNAEIDAHTTDLQALTEEHCPHLLAEVGIGPVVAAQVYIAWSHPGRCRNEAAFASLAGTAPIPASSGETTRYRLNRGGDRQLNRAIYTIVLSRSYRDPTTKAYIERSVANGKTRREARRCLQRYTARHLYRLLENHHPNT

SEQ ID NO: 188092 - protein, 339 aa, unidentified
MHCFANTAAGHKALLRALTRKGRRVRVVLEATGLYGLDLALALSAQEGIAVMVANPRAVRHFAQAMMQRSKNDRLDAGVLREFAARMPFQPWARPGENTLALWAIARRLEVLVKQRTAEKNRQHAARISQAVPLVVRREIARSLRELENGILRLRREARRCIAADARLQRQWELLCSITGVAEVSAVTILAELAMLPEDRDVRQWVAFAGLDPREYSSGTSVRKQTRISKVGNRHLRHALYMPALVACRYEPHVRDFYQRLLKRGKKKRQALLAVARKLLHAIRPCWPWRVNSCTPSTACSELYSPSMAPVCLPSCQLKRLEIEERIYKARLQAVAGFG

SEQ ID NO: 188093 - protein, 341 aa, unidentified
MKQEMTVLGIDLAKHVFHAVGMDNTGKIVFRKRLSRHDLMPFIAKLPMVLIGLEACGGAHYWARRFRASGHEVKLMAPQFVKPYVKSHKNDSRDAEAIAEAVTRPTRRFVPAKDVDQQDMQALHRVRERLISERTALVNEVHGLMHEYGIVMPKGVSKFRQAVVGKLESEKDKLTPLSQEMFWKLVEEFAALEEQLAYYQKKLEALATTHPECQRLMTIPGIGPLTATALVAAVSDASAFKNGRQFAAWLGLVPRQHSTGGKERLLGISKRGDGYLRKLFVHGARAVVRGVRDKTDRRSGWIRGLIARRGFNRTTVAVANKNARIVWALLTSHQDYQPATC

SEQ ID NO: 188094 - protein, 425 aa, unidentified
MGVYCGVDWAEGHHDIALVDDEGRLVGKRRIVESLDGLAELTAMLAAAGDSAAEPIPVAIETPRGLLVAALRATGRPIYPINPLAVARYRERTSVSGKKSDHVDAMALANILRTDAHLHRMLPDDTSLARSITVLARAYQDAVWRRTKTVQELRARLREYYPGFLAAFAAGTGSGGGLSTTRLASRDARAVLAIAPSPAEGLRLSTARVEKALRRAGRQRRIAAVAGQVVAALRVPQLRQDPVVEHAMRIEALALLAVLDAVCASIEDLENALVAAFAEHPDHEIITSFPGLADVSGAIVLAEIGDDRSRFADDRALQAFAGSAPVTRASGKSRTVTRRRTKNNRLASIGYSWAFTASARPSPAREHYLRRRDRGDGHPAALRHLFNRMLGQLFHCLQTGQPYDPVKAYPHSTTITGAPATTVAA

SEQ ID NO: 188095 - protein, 317 aa, unidentified
MTQTSTTAAGIDTSKSKLDVALHGRTGHWQVANSLAGWRELTVKLAKADVSRVGIEATGGYERGVVEHLRAAGFTVLVLQPIQVKAFGRVHLRRAKNDVLDAALIAACTAAIDRIRDAPDPRLTELAEHLTFLEQVEDDIKRCKTRLEHIDQPTLRRLVLGDIARLKARRFAQIRHLARHLRSHHDLATRLDLVLSIPGIGERTALALLIRMPELGRISREEAAALAGLAPFDNDSGQHKGQRRIAGGRARLRRSLFAAALPAAFRWNKALIALYTRLTAAGKAHNAALIACARKLLIYANTVVQRGTPWREITIMT

SEQ ID NO: 188096 - protein, 332 aa, unidentified
MYYIGMDLHKQDLVMAVEDEQGPVGRVRRIACRDTEAIRAAVERWRPFRAVVEASASYRWLYDLVSRQGEMVLAHPLRLRAIATARAKTDKLDAALLARLLRANLIPAAYVPPARYQRLRDLTRTRARLSYGATLAKNQIHALLARANVHPPLKTLFGPRGRRYLAGLDLGLSGNLARDELVRRLEHYGREIAAFDAHLEAVASEFPEAEALEVLHGIGRYSALLVVAEIGEPERFRNGRQVGAYAGLTARVHQSGKTEHRGSVSKQGSRWLRWILVQAAIKLVRRDERLANFYQRIRRRAGRNVARVAVARKLAGICWVRLRRWQREQAAA

SEQ ID NO: 188097 - protein, 352 aa, unidentified
MKIVALDLGKSKSVACILDSITGEHHFDASPTNPEMFRMLLETDRPERVVIEVSPLAGWVGDLVRGMGMELQVANVNHEAWRWRNVKRKTDRLDALKLARLSAANQLPLVHLPQLRMRQWRELIAYRQALVARRTRVKNRIRAILAMQALSMPAGKGGWTAKTIKMLSALARPLSEAAEDALWRGELDLELQQLNQLQELLGNVNAKLDAIAATHPGVALLQTIPGVGPRLAEMVVTAIDDPHRFTKGKQVGSYVGLTPRQYQSSSMDRQGRISGQGHRHLRAMLVEVSWLGLRHNCWMRTVYERVHRGSPARKKVAICAVARRLMVHCWAMLRDGTRWRDPLGDAPAAQAA

SEQ ID NO: 188098 - protein, 373 aa, unidentified
MPKYSTAFGMDVHLRSTTVCALDADTGEAVTRRFPGNPWGEIAGWMDGFPGPSLAAYESGYLGFAPQRELAGLGVECVVAAVSKIPRSAADSASKNDRNDAARMAKAILAHDISPVWIPSPEVEGIRDLAGAYDGATARLATAKQRLLAFLAKRGFVYGGTTPAGNPRKYWTYDFLRWLDKVRPEDDGGVRTLAALRNEVEAAAEARADLLSEYRAAVDASPIAAEVAALQSIKGCAFALAAAFSAEVGDFTRFRSGRQVTAYFGLAPSQRSSGDSVRLGGISGAGNALVRKLAVEGSWCYAAARHQPKLMPRDTGVPLEIRMHGRKGSERLLRRRKEMLARGVPAAKANAATAAELVRWLWALGMMCREGAE

SEQ ID NO: 188099 - protein, 341 aa, unidentified
MMIIGCDFHPSWQQVSWLDTETGETGEQKLVHATGDAERFYRQMPVPSLIGMEATGNSQWFMELVEDLGHALWIGDAAQIRASYVRKQKTDKRDAGHIRKLLAEGRFPKLWTPDREQRDHRQLVMHRHKLVQIRSRVKNELQHLSLNKGMQKQNKLWSAAGQKALRELPLKPWAACRREDLLQLLAMLDQQIGKLDAAVQQAAEHNPHAKLLMTQPGVGPVTSLAFVLTLGDVSRFPRGKQVASYLGLIPREHSSGGRQMLGSISKQGNRLMRALLVEAAQTAVRYDPGFRKEYLHRCHQKPKGVAKVAAARKLAVRLYWMLRTQKPYPEIVRIESSPRVL

SEQ ID NO: 188100 - protein, 345 aa, unidentified
MSITTLGIDLGKSTFHAVGLDAHGHVRLRRRFRRETLLRYLANAEPMRIGMEACPGSQWLARKLRGLGHEALILPAQFVKPYVKSNKNDLRDAEAIAEAVTRPTMRFVPIKRPEQLDLQALHRVRDRQVNQRTRLICQMRAFLLENGIPLRPGAGLFKREFPGILAEDENGLSVPMRRLLAGLWDELRGLEVRIAQVTREIKALAERDEVARRLMTIPGIGPLGASALIAAVGDGKQFRRARDLSAWLGLVPRQYSTGGKTTLLGISKRGNTYVRRLFIHGARSCLMHLDRSQDRLGAWLDALSARMPTNKVVVALANKIARIAWVILTRPGATYRRVDPMLGVA

SEQ ID NO: 188101 - protein, 315 aa, unidentified
MDEQRAVFVGIDVSKDRLDVHLRPSGKAFCVPREGKGMDDLVIRLQGLPVALVVLEATGGFEATVAAALAGVGLPLCVVNPRQIRDFARAMGRLAKTDTLDAEVIALFAERVRPQARPLREPERVHLAELVGRRRQIIEMMGMETNRGRQAIDKPLARRLARHVAYLQKELDAIDHDIGDAIKHSPAWREAEALLKSVPCIGDVTARTLLAELPELGTVSRHQVAALVGVAPINRDSGLMRGRRAIAGGRTSVRAVLYMAALTAIRRRSPFRGFYDQLTAHGRPKKVALVAMMRKLLTILNAILRDHTPWRPLNA

SEQ ID NO: 188102 - protein, 339 aa, unidentified
MEHVAIDLGAKKSQICVRGADGRILEEKRWPTGDLETYLAGRPTSRVVVETCAEAFCVADAARQLGHETRVVPATLVKTLGVGARRLKTDQRDARALSEVSCRIDLPSVHIPKTESRDRKTMCGMREALVGARTKIINTVRGWLRSRGRRIERGGRASLRRRVEAAWQGQVPSYVERQLQVFEVLNAQIAAADAEVKSWAEADETCARLMTVPGVGPLTALRFVAALDEVKRFDSAHQVESYLGLVPGESSSSERQQRLSITKAGPRALRWVLVQAAWALHLRCRKSEAVPLQLWAQRIEQRRGRRTAIVALARKLAGILYAIWRDGSVYDGGRSAKLI

SEQ ID NO: 188103 - protein, 371 aa, unidentified
MKQFSKFVGMDVHKATIAVSVADANGGEVRYVGEIANTPEAIEKLVRQLRKGDAHLSFCYEAGPCGYGIHRQLSDLGWDCQVVAPSLIPRKAGERVKTDRRDSLMLARLHRAGELTAVWVPDDAQEGLRDLTRAREDMKHLQRQAKQRLCAFLLRYGKCYSGKSNWTQAHYRWLEEQQFRQSVQQIVFQEYVDTVKALSKRVDGLDTQLESAASESVFWPVIEGLMALRGVNLLTATTVVAEIGDLKRFASAPQLMAYLGLVPSEHSSGATKSRGAITKTGNAHVRRVLVEASWTYRHPARKTAHLQRRAERTSEAVQDIAWKAQKRLCARYRLMEGKGKLKVQACTAVARELSGFIWAIGQELPQPVPNR

SEQ ID NO: 188104 - protein, 344 aa, unidentified
MSNLDTCGIEVSAKELVVRLRRQEDLEPLRNFTNTPEGHLILLRYLRRAGRVVRVCMESTGLYGLDLALALSGQGGIEVMVANPRAVRHFAYALMKRSKNDPMDAGVLEEFAARMPFQPWQRPSVAALALHALARRLRELVEMQTAEKNRQHAAGLSRAIPAVVRRDLARSLRAQERAIERLTRQARKLIAQDPQLAERFELLDSVPGIGETSAVQLLGELGVLAPDLEARQWVAYAGLDPRQYTSGTSVHKKPRISKAGNKHLRHALYMPALVAVQHDPHLRAFYQHLLAKGKFKMQALVAVMRKLLHALHAMFKAHQPYDGSKLFRLNSAPAQEVPRALVAS

SEQ ID NO: 188105 - protein, 427 aa, unidentified
MSVTQNEKIRQVTETTMVIGVDIASEMHWARAFDWRGLELGKAVKFENSAEGFRFFLHWLSELAAEQKKSSVMVGLEPTGHYWFTLAAYLQGSSIKLVLVNPYHVKRSKELDDGHPSKSDKKDPKTIAKLVLEGRYAFPYIPQGLYAELRVAMNCRWRVQKELTSVQNQIQRWLKIYFPEHKTVFGKFEGMGSMALLHAAPFPSDLIALGVDGINQIWRQMKLRCVGLKRAQRAFEAAKNSVGCTTGIEAARMELQILLEDYDVKLQQYERIMEVVESLCGQIPEAEELLQIKGIGLTTVAGIFAEVGDIRRFSSPRQLQKLAGLAITENSSGKHKGQTEISRRGRAHLRAILFRAAMPLVAKNEEFQKLHQYFTTRAENPLKKMQSMIAICCKLLRVFYAVATKGCAYSAEKMLADIHRNQPLKAA

SEQ ID NO: 188106 - protein, 323 aa, unidentified
MTVYLGIDIASKKFDVAELCDGNYRCRAFANTSAGFLAFYKWLSTENKQDIHACLEATGDYGTGLATFLYERNLKVSVVNPARIKGYGASELSRTKTDRADSKLIARFCKAANPERWKPMPAPVRKLQALVRRISALNGMLRMECNRRENADANIQASLDRIINQLKKEIEAVRQELHAHIRSHDELKKQDELIQSVPGIGAISSHLILSFISGKEFRKAKEVTAYLGLNPRHHQSGSSVRGKTRMSKIGDARLRSALYMPALTALKHNPDIKAFGQRLLLAGKPRMLVVGAVMRKLIHIVFGVLKSNIAFSSRIALDSVTTS

SEQ ID NO: 188107 - protein, 344 aa, unidentified
MAIVGGLDIHRRQITYDILDTDTGETRRGQLSPATRTELRAWLARFTGQQADFAFEGTTGWRFVAEEVMGAGFRAHLAEPADTRALRGPKRRAKTDRTDAHHLRELLRAGTLPESWMPPAHIADARTQVRLRRVLVGERTGWQQRIHAILFHHGLPERSQLLTADGRAWLARVELPAVARQAVELALRMIDQLDTELDLLDTQLARIARAQPGCTALQRRYGIGWLTAVAIWAEFGDVRRFANSRQAVRFCGLDITISESDGKRARGHLARQGSPVLRWALHEAAMCAARPSSPDHAYYLQVRQRLGGKRAALSVARKLAREAYHTLRELGDQALVPVELATAA

SEQ ID NO: 188108 - protein, 434 aa, unidentified
MRSNNKSGMKICIFQDDSLPLLSKGGTGQLERETGFRDYRPLPRVNEPSWSFQLSCKVQIECHWHNSLFRVRDNTTIGQFLHKDECKGMKKIFIGIDFSKEKFDATLIKAEGLKEYAPSAHEVFDNKASGYRRLARWVKSQSDGLTAESWLFCGENTGGYSTALSNYLYSCGYDMWLECAYRIKHSSGIQRVKNDRADSRAIAEYAMRNHDKMVAYKPQSPSLARLREVFLYRHSLVKQKVALTVRRSEKRLTQDKSDVKTFMSQTSRHLITEVNKAIGKCDKKIEEIIAADDELREVFEIATSMPGVGVQNATCLMVYTDNFAKFGFDARKIGCYYGIAPFGKDSGTSVHTRPQVSPFANRMIKSLLSQAALAAIRFDPKMYDYYQRLIKRGKHPLLAQNNVKNKILHTLTAMVRNKQKYNPDYTYKTPGKAA

SEQ ID NO: 188109 - protein, 344 aa, unidentified
MEIRTIGIDLGKTVFHLVGVNARGEVVVRKKCSRTQLLRFTSNLPACLIGMEACGGSHFLGRALREQGHDARLMPAQYVKPYVKTNKNDYIDAEACAEAVTRPRMRFVPIKSDDQLDLQSLHRVRERWMVRRTAVINQIRGMLLERGITIAKGRRHIEESLPRILEDADNKLSGALRVLLSELRREMQYLHRQIEECNKLIDRVVGELEQCKHLVTVPGIGPITATATVAAIGNGAAFKRGRGFAAWIGAVPGERSTGGKQKLTGISRRGNKYLRKLFVQGAHTVLLKRTKQDPGLSMWLAKLVSRKRPQVATVALANKMARIAWAVLSKGEAYRPALAAQAAA

SEQ ID NO: 188110 - protein, 411 aa, unidentified
MEVMFDRVAGLDVGKATLTACLRTPGPTGRRRRSETRTFKTTTGSLRMMRDWLVEAGVSIAAMESTSTYWKPPFYCLEEVMEVWLLNAAHMKAVPGRKTDVKDAEWIAQLLEHGLLSPSFVPPPEIRHLRMLTRYRVQLMGDRNREIVRLELMLEDASIKLSSVASSLKTVSARAMITAMIEGELDPLKLAELAKGRMRSKIPDLAQALTGHFNAHHAQLARSMLQRLDLVEQALAELDAVIAEACAPWQHQIDLLQTIPGVGPKVAQVIIAETGADMSRFPTAAHLAAWAGLAPAMNESAGRSSPAGKRRGNKWLNAMLVEAAGSVGRMHGKNYLAVQHARLTKRRGMGRAQVAVAHSIVVAAYWMLKRDQPYQDLGADWHSRRNNEAHTRRLIAQLEHLGHHVTITPAA

SEQ ID NO: 188111 - protein, 419 aa, unidentified
MKPSKAEKVKIINEKTLVAPLDIGKGAHQAYFRASNGKDIKPFAVHNSRKSFGKFWMRVCQFKREHKLEEVVIGFESTGPYAEPLFHYLRKKPVKLVQINPMHSKRLKDLTGNSPNKTDKKDPRVIADVIYLGHALTLVVPQGSAADLRRLTQARERAIKRRTAALNQLQDLIFVIFPEFLSIMKGISTKTAFHLIKKYPTPQSIVALGVESLTTLVRKVSRGRFGHQRAEALFSAAQSSIGIQEGKRSILLEIEYLVSQIGADNRFIATLEKQMGNHLKKIPYSHSLLSIKGIGIITVAGLIGEVGDFKKFHTIPEIMKLAGLDLYEVSSGNHRGQRRISKRGRPLMRKLLFFAAINVVKSNGIMHERYGQMLQRGMPKVKALIAISRKLLKLIFAIARDNTVYIENYGSKQHLKIAA

SEQ ID NO: 188112 - protein, 409 aa, unidentified
MQPILQSCCGLDVHKSMVMACIAHGPLDKPPIFEIRKFSTMTNDLRSLSEWMKEYAVTAVAMESTGIYWKPIFNILEDDFDVVLANAQHIKNVPGRKTDVKDCQWIAHLFRNGLISGSFIPPREIRELRDLTRTRRKLVGVMTSEKNRVQKVLEDANIKISSVVSKVFGVSALAMICALMEKDELSADEIAEMAKGKLKKKVNQLVEALNGNVTDHHRFLLKQHLGHIDFLVEEIKEFDEEIQRRLVPYQKEFKDIQSVTGIKGVSAASVIAEIGVDMSRFPDEAHISSWAGVCPGNNESAGKKKSGKTRRGNNYLKATLTESAWAAARTKETAFSAMYRNIAGRRGTKRALVAVGHQILIEVYRVLETGDRYQDAGAEAVTERRLKNREQRMVRELKRCGYNVSKVVV

SEQ ID NO: 188113 - protein, 348 aa, unidentified
MTIVAEKYDYVIGIDTHARTHTYAIINTRTGAREHCQTFPVTTPGMNRAVAWLQRNIHGESIAAVEGTRSYGATIAHTLVDAHIEVVEAKPPRKKDQSSRGKSDEIDATAAAISILGKDISQLLRPRSEGARAALSILSASRGRIDTQRTINRNSLSALLRTFDLGIDARQSLTARQIKQISVWRQHSSDSIDQRFAREEAKFLASSILAADQLLKENSKAMSELDEQLAPELQQVFGLGPVTTAWILMAYSHPGRVRSEAAFAALAGVSPLQASSGNHERYRLNRRGDRLLNKALDVVARTRMGYDEETKKYVEKRTAEGLSPKEIKRILKRYIARSICRQLQVIMA

SEQ ID NO: 188114 - protein, 387 aa, unidentified
MSQTAAALIPTPVAYGSTLVLAIEVSNKSWVLAAQVPGLPHTKAKRTIHPEAGALLAAIAGYRARAAATGHSIERVIAVYEAGWSGFWLARWLIRHGVEVYVVQPSSVPVDRRMRRAKSDGIDAELLLRTLLAWLRGEPRVCSMVPVPDEADEDARRCVRERTELISERVGLTNRIGAVLATLGVTDYNPLLRSRCRRLAELRTGLGEPLPANAHAKIKRLLARLELVLTQIAELERERDAVVETEASDKAGKMIQQLISLRGIGVQSATVLVREAFVRRFANGKALGSYAGLASSPYNSGGINREQGIGKGGNRRVRTVMVELAWLWTRYQPSAAQVCWFRERIGPTGRRVRKIMVVALARKLLIALWRFVIDGVVPEGAVLKPAA

SEQ ID NO: 188115 - protein, 343 aa, unidentified
MQIRSVGIDLGKTTFHLVALGDDSKVLLKKKFTQKQLIAFTANLQTSLIGMEACSGAHFMGRVLRAQGHDVKLIPAQFVKPFVKSNKNDFLDAEAIAEAVDRKNMRFVPIKTDDQLDLQALHRVRDRLIARRTSVINQLRAFLLERGMTFARTPAKLKVAMPEILENADANLTPRMRNLISLLWSEWKDLEQQIVTVNAEVEQIASSDAACLRLRQIPGIGPLIATAIVAAIGNGAAFHKGREFSSWLGLVPRQHSTGGKARLLGISKRGNSYLRKILIHGARSAVVRMKRERAPFGAWLDALQTRAPLNVVVTATANKLARIAWAVLSTGKEYRALPSPTPA

SEQ ID NO: 188116 - protein, 341 aa, unidentified
MHHVAVDLGSRQSQLCVRSPEGQIQQEVKVANAGLGVTLAALPKSRVILESSSEAFAVADLALGAGHEVNIVPSGLAHNLGVGQRGVKTDKRDARNLSMASCRMETLPTVHLPSMHSRELRRLLTSRGQLVSARTGMVNSVRGWLRSQLLRAPRGTCPENFPKRIRELTLSRPEGLPEHIERLLKVVETLNDQLKMADKELESLTEADLVCQRLMTVPGVGPVTSATFRATVDEVSRFKTAHAVESYVGLTPGENSSGETVQKLGISRAGSTRARAVLVQAAWSAWRTRPSDPMVCWARGLARRRPIQVAVVALARKISGILFALWRDEANYDPKHGSQQQ

SEQ ID NO: 188117 - protein, 408 aa, unidentified
MQIIYERCAGLDVHKRSVVACLLFPENGQPHKERQTFSTMTPDLLRLRDWLKDHDCTCVAMESTGVFWKPIYNLLEEHFQVFVVNAQHIKAVPGRKTDIKDAEWIAELLQHGLLRPSFIPPAWQRSLRDLTRTRSTLTEERSRVIARLQKGLEDANIKLASVVSDVMGISAQHMLHALVQGELSPAAMAELALGNMRPKRAQLAQALTGHLQPHHRLLIVEHLAHIANLEQAMAQLSAEIAERLAPYEEILLRLETIPGIKRRIAEILLAEIGPDMSRFPSAAHLASWAGMCPGNHESAGKRLSGKTRKGSQWLRTALVEAAHAASHCKECYLSAQYHHIAFRRGKKRAAVALGHTLLIIIYHMLAEKKEYEELGGDYLDQLDRQGKEKRLVRQLEKLGFEVCLTPTE

SEQ ID NO: 188118 - protein, 360 aa, unidentified
MEYIAFDSHKRYTFASVEEHTGNILQEGRIEHRRGAVKRFLAPWKPGTPVAVETVGNWYWIVDEVEAAGMKPQLVHARKAKLMSGMVNKTDKLDCHGLNRLQRKGTLPTVWIPPAEIRDQRDLPRTRMVLSKQRTAMKNRIQATLAKYGLSVEGVSDPFGKRGLEELRKCVRQLPPHTRFCVDRLLELLLMVQQQISGFEKMMKATFSTNEELELLQTLPGVGFILSLVIALEVGDVKRFPECSRLSSYSGTTPRVHASGGKVRYGPLRQDVNRYLKWAFIEAANVVCMHRHKRPFQHVSRLYEKIRRKKGHQKAVGAVARHLAEATYWILKRKVPYREPCQKRVPNRESPKRVVSSTRG

SEQ ID NO: 188119 - protein, 389 aa, unidentified
MKIYVGIDIAKLNHFAAAISSDGEIMIEPFKFTNDADGFQLLISKLESFDKNSIIIGLESTAHYGDNLVRYLVTELYQVCVLNPIKTCQMRKNNVRKTKTDKVDTYVIAKTLMMQDDIRFVSFFDLDMMDLKALGRFRQKTIKQRTRLKIQLTTYVDQVFPEIQYFFKSGLHQKAVYALLKEAPSPKEVTSMHMTHLANLLKVNSHGHFTKEQAKELRVLAQKSVGANDSAISIQITQTIQQIELLDSQLEKIEAEMTEIMKFNDSVIKTIPGIGYINGGMILGEIGDIHRFSNPNKLLAFAGLDPSVYQSGNFQAKTTRMSKRGSRVLRYALVNAAWNVVRNNATFKAYYDAKRAEGRSHYNALGHCAGKLVRVIWKMLTDNVEFNLE

SEQ ID NO: 188120 - protein, 341 aa, unidentified
MIVTRVGLDLAKSVFQVHGVDRAGATVVRRRLARSQLLGFFGKLPPCIVGMEACSSAHHWARELTRIGHEVRLIPPQYVKPYVKRNKTDAADAEAICEAVGRPTMRFVPIKTVAQQAVLALHRVRSLLVRQRTATINAARGLLGEFGLVAAKGAARVDELRRRLGATRPDDVPPAARIAIEMLFEHIDDLRRRADAIEAEIIAWHQASETSKRLAGVPGIGPLTASALVAAVGDGRQFRSARHFAAWLGLTPRMASSGDKQRIGRISKGGDRYLRTLLIHGARAIVGAVNRPNLRPRPWLSPLLARRPIPVAATALAHKTARVVWAMLSRDEAYRSAVSAA

SEQ ID NO: 188121 - protein, 452 aa, unidentified
MEHKTLKMEVINPHAAGIDIGSRSHFVAIGQGKDDVKEFGVYNEDLQAVASWISEHQIKTVAMESTGTYWQSLFTVLQSAGFRVILCNGKFTKNIKGRKTDVQDCQWIQRLHTIGLLSGSFLPDEATEQLRTYCRHRSNLIDVAADTTRKMQKYLRLLNLRLDVVVTDITGLTGLSIIDAICKGKTDPDKLAALRNGNCKKSAAEIARALQNNGRNDYLFALKHEYQTYRETQAKIKECDIEIEKMLNEQITNSDNKRQHLIDKKTHKRINKNSPKNIDLNLVSYQYFEGVDLLAIEGVSYSTVLTIMSEVGLEGLKKFGSAKQFASWLRIAPNNKVSGGKVLSHKVPKGSSRLKIALRNAANAIGNLKDTPLSNFFNRINFRKGRLAAVSATARKLAVIIWNMVIKRQPYNNDHGYEFLDQKRKRKVQEMKKLIHRFGINHEELGLQINAL

SEQ ID NO: 188122 - protein, 374 aa, unidentified
METIYIGVDFHARQQTICYLKTETGELVTCELKHEDKQAVRAFYAQFGGQVVVGLEASGYSPWFERLLEELGCEVWLGHATEIRRRARWRQKNDRRDAELILELMLHHEFPRLHRPAVQSREVMRMLRYRQKLIKIRTMSKNSLQALALQAGVARRSHLFTREGKQELTAALMSPAMQWQREHWLQLLEPLNQQVLEAMVWLKAQSKGDVAVARLRTHPGIGLLTSLCLAHTLQPVDRFRNTRKVVAYAGFDPVERSSAERKRFLGISKAGSRLLRHLMVEAAHVAVRKDEDLKCFYQRLADRRGRPKAKVAAARKLLIRAYIMLRDEIDYAEFRRRAVAARLARLGHGPKVPEVVIGQPASTERQEQLSRTRK

SEQ ID NO: 188123 - protein, 351 aa, unidentified
MSPKLNFGIAVIGIDIGKNSFHVVGLDRRGSIVLRQKWSRGQVETRLANLPPCLIGMEACVGAHHLSRKLQMLGHDARLMPAKYVRPYSKGQKNDFRDAEAITEAVQRPTMKFVATKTAEQLDLQALHRVRERLVSQRTGIINQIRAFLLERGVAVRQGLRFLRAELPRILAAPCDALSPRMLRVIEDLAGDWRRLDERIEGLSSEIETLARQDKSCERLMTVPGIGPIISSAMVAAIGTGDAFSKGRDFGAWLGLVPKQISTGDRTILGSISKRGNRYLRALFVQAAWVVLVKVGPKHWERYGLKSWIEAAKKRLHHNVLAVALANKLARIAWSVLAHGRTFEASKIQTA

SEQ ID NO: 188124 - protein, 348 aa, unidentified
MIVIGVDYHPSWQQICWLDTETGETDEKKLEHATGEAERFYRQLSGRTLIGMESTGNCQWFVELLCRLGHELWIGDAAKIRASEVRRQKNDRRDAALILKLLVEGRFPRIWTPSSEEKDLRQLLIHRYKLVLIRAQVKNELQHLAMNQGVTRQRKLWSKAGEKVLRELPLAPWTSRRREDLFKVRGMLDEQIALLDAAVKEAAEKNEKARLLMTQPGVGPITSMAFVLTIGDPQRFRRGKHVASYLGLIPQEHSSGGHQRLHSISKQGNRFLRMLLVEAAQSAVRYDPEFRREYLHRCHGRPRGVAKVAAARKLAVRLYWMLRTNTAYPGVVRVESSSRVAVVVRSNG

SEQ ID NO: 188125 - protein, 326 aa, unidentified
MGGDDSMNAGLFIGIDVSKDRLDMAVRPTGQCLSFDNTDAGVDNLIRALSDLSPTLIVMEATGRYHRLALGGLLAANLPAVAINPRQSRDFARALGQLAKTDRIDAAILAEFADKVRPALRSIPDLDTQELEAICTRRRQLMTMLTAEKNRHQAAPRSLRPGIKKHIHWLEKELEHSDKDLHNRIRSSPAWREKEDVLSSCNGIGPVTTHSMLAYLPELGTFNRRQIAAIVGVAPFNNDSGKHRGRRSITGGRRQLRNVLYMAALVAIRHNPTIRTFYQRLIASGKLPKVAIVACMRKLLTILNSMVRNKTPWKPDFLLARQDSLS

SEQ ID NO: 188126 - protein, 360 aa, unidentified
MKKKLNHLGIDVGKRICRVALKDDMGKILDEFFFGNSYQGILELIKRIQDHGTKKCNAVLESTGNMWMRIHDTLEDNGIDTILANPYKTKIIAQAKIKSDKLDARILSDLLRSGLISESYVPVKEFREKRSLVRHRIALSRTKTKLANKVHAILDKYEYRTELADIFGKSGINWLKSLSVSPIDKIILNTTLSSIESIDNQIEIVSKEIAKYAWKDSQDVKILLSMTGIDIFSAMLISTEIVDITRFSTPWKLVSYAGLVPSTRESSGKIKTGRITKQGSPLLRWILVQCSLSAIRHDHHMRTFYERIKQRKGHGKAIVATAKEMLVIIWYMLTRHQLYKYINRSRYDQKLESLKKIGSQ

SEQ ID NO: 188127 - protein, 332 aa, unidentified
MRLLHRWRDEATKAGRMINRITVAYEAGRDGFWLARWLQGQGIEAHVIHPTSVAVSREHRRAKTDRLDTELLKRAFLGWLRGERGHCSMAMIPTPQEEDAKRPNREREGLVGERTRIVNRMKSTLARLGIRGFKPTLRKAPERLTGLLTPEGVPLPPNTLAELRRDMARLLFVIGQIREIEAARLQQLEQHPEQGPHAMVRLLAQVIGVGIETADMLVHEILSRTLRDRKAVARYAGLTGAPDESGARRREKGLARAGNARVRRGMIQLAWRFLMFQKDSALAQWYRARTADARGTTRKTMIVALARKLLIALWQLVTTGEIPQGVVLRAAA

SEQ ID NO: 188128 - protein, 470 aa, unidentified
MSSAIGIDPDSTGLVCALVDSQSPRVTTKGFLVTEEGLKDFLCWVRQHGEALVVLEGSHGQSRPIEKALRDAAIVFYSFKPADADKFRKAVLGQNKDNERDAESVARYALALESQGRLERHKKMWFPDMDLQLLTRRWGSLSEQITAEVNRLWKLLRYASADLYLALGGKNPHSDCGEHKALKNQGILTLLISVPDIGLWKTLSEEQIFQAMGGDNYKGRRQLIQELRRVMPSFPSLSHPMATLLKASALQIQRLREEQQDLKRALEDLSPARADIQKLLGIRGIGVTTAATMSAELIDIRRFSREDSLACYSGLGMNEHSTGQTLRMVLTHQFNRRLKDAFMTAALNFVLYNPDSHLAGYHKNLIKRGMSRLQANKRVARALVRVIYRLLVGVATTNTGTQAEEDLKRGESEVASGTSRSGRSHKSNTSLSAPKRSKAKKPTEVKVAESKITPVTKARRPRRKTLKKIA

SEQ ID NO: 188129 - protein, 311 aa, unidentified
MTTQSIFVGIDVSKDQLDVFVRPQGDSFRKPYTDEGMNSLVEYLTKLQPELIVLEATGGYEVKVVASLAHDRLPVVVMNPRQIRDFAKAIGRLAKTDGIDAEVMAHFAEAVRPECRLLADEDQHELNALMTRHQQLVAMFTMEKNRLHTATARVQAHIKEHLQWLDNQLKKVDEDLDKFIGNNPELRRKTEITMSVPGVGPVFSRALVSYLPELGTVNNKKISALVGVAPFNCDSGLLKGKRIIWGGRHHIRSILYMSTLTATRFNPVIRSFYQRLLQAGKSKKLAITACMRKLITILNTMVKNDTLWGEN

SEQ ID NO: 188130 - protein, 456 aa, unidentified
MQKKYLKSKKEKKRVSIHQAWPLINPRAAGVDLGAREHWVAVPEDCCAQAVRPFGTFTRDLEALADWLQQCQVTSVAMEATGVYWIPLFQILERRGFQVLLVNARQIKNVSGRKSDIADCRWIQRLHAYGLLGASFRPADPYCVVRSYLRYRDELVAARSVQTQHMQKALQQMNVQLTQVLSDVNGVSGLAIIAAILQGQRDPLKLAALVDRWVKTSLDKIARALVGDYRAEHLFVLKIACELYHTYEAKIADCDQELARELARLPDQVDLAAKPLPAKIGKTQIPEEMRLGLYRKLGVDLTAVEGFGPLVGLTVLSEVGPDLTKFKTEKQFASWLGLCPDNRVSGGRVLSCRTRRVVNRLSDILRLAATTLERSQTGLGAYYRRMKAKLGAAEGVTATAHKLARLLYRLLKHGEAYVRQGLADYEKKYADRKLKALKKTAASIGFDLVQRQAVTP

SEQ ID NO: 188131 - protein, 343 aa, unidentified
MQNSNVIGIDLAKNVIQVCKIDKHGELISNRAISPSKLKELLAKSNPSIVAMEGCGACHYWARLAQKYGHDVRIISPRKVKAFLQGHKTDANDALAVAIAATQFGMVFSQIKAEEQQSLQTLETSRKFLDKELTALNNHLRAYLYEYGITMNRGQKSLRATIVIVLDDLDTRLPQCLKNTLKTLWERYQLTVFQLKETEKYRAALVKQLAPCKRLMELEGIGEVCAAMLYASIGDGREFKNGRQASVYIGLTPKQYSSGGKIIMLGIDKRGGNKPLRAALYQGALSVISRLPSEPRTAKEAWLLKLVERVGVKRACIALANKTVRTAWALLATGKSYEPVLLS

SEQ ID NO: 188132 - protein, 404 aa, unidentified
MNAVGIDVSKGKSTVTIRKPGGKVVLAPRDYKHNRSAINALINEIKSLEGETKVCMECTGRYYEPMATWLSNAGIFVSTVNPMLIKDFSDASLRTPKTDKADSQKIARYTLDRWDKLKQYGLMDETRNQLKTMNRQFDYYMEQKTSMKNNLISLLDQTFPGANDLFTSPPRADGSQKWVDFVYTYWHVDCVAGKSLDAFTEHYRNWCSRKDYGFSAKRAREIYEISKDLIAVLPKNETTKLIIHNAVDQVKSISKTVETLRSKLYDTAATLPEFPIVMAMDGIGPTLGPQLMAEIGDVTRFKHRGALTAFAGVDPGSNQSGQYAQKSVRTSKKGSPHLRKTLFQVMDGLIKRSPADNDVYLFMAKKRAEGKPYYVYMTAGANKFLRIYYGRVNEYLNSLNQETQ

SEQ ID NO: 188133 - protein, 447 aa, unidentified
MQIESYAGVDWASDKHDVHVADAAGEKLLAATFAHDEKGLRSLCRQLLRLNVALVAVERPDGLLVERLSDAGLRVLALHPNQVAAARDRFRVSGGKSDRFDAFVLCELARTDNHRFRVLEPDSDATKALRALTRGREDLVGMRTALGNQLRAELERFWPGPLGLFSDLHSRISLAFLERYPSPADARGLGEARLAGFLARERYSGRQTPAQLLAKLRQAPAGCLGEQELATRRQLVLTLVSMIKLVGEQIKQLERQIATAIREHPDGPIFLSLFKGTVITAAELLAEIGDCRARYPTRDALAGDAGQAPVAKESGKRKTATFRWGCDKRLRQAFHTLADSTRHWHPWAQALYAQARARGHDHPRALRTVGRAWSRILWRCWQDRVPYDPARHRALQAHITVTIPTPSGPVPDLAATQRMAGAAVTQRAARRAERETLDSKTPSAISG

SEQ ID NO: 188134 - protein, 407 aa, unidentified
MELEPMYKRVIGLDVHQAQITACALIEAEDGTTRVERQQFGAFKRDRRALAEWAASLHPDVVVMESTGIYWKSPYAALEAVGIRAQVVNARHVKNVPGRKTDVGDAQWLATLARAGLLRGSFVPPSSMRELRLIARQRQKLIGQLASEKNRLHKLLIDGGIRLGVVVSDVHGKSARAMVKALIAGKLPGEVLSLASNRLKATREQLFDAVQGDLTCSHRFVLEELMAHIEEIERRVGRFDQRLLDGLKAETNALALLQTLPGVDLIGAAMLLVEIGSDMAAFGSADRLASWAGVCPGNDESAGKRRSGRMRKGNPYVRRLLCEFAHAAARTTSVFKSKFQALLIRRGHKRAIVAIAHKLLRTIFFMLHRRQHYRDSAVDYEALAVGRNAARWIKKLKQFGFIGPATA

SEQ ID NO: 188135 - protein, 318 aa, unidentified
MRMAQEQVVVGIDVAKEKVDVAIRRGAEGCFANDSRGRRQLLAWLKEHAVGQAVMEASGGYEKSWAQLLRKAGVEVVIVDPKRVRHFAKSAGQLAKNDPIDARMIAWFGEAFEHRGKPEDAAREELDQLVTARRALSRLKEKIDNWGEHEQPKAVQKAYQALLREVDRQQARLEALIADRIEQTESFSLPAEIIQSVPGLACNSAAALLAFLPELGKVGRQAASALLGVAPFDDDSGKRRGHRHIQGGRRKLRCMLFTPILGAATRHHPVLKAYYRRLIAKGKAHKVALVSCMRKLLCILNIMLARGEKWDPARHALA

SEQ ID NO: 188136 - protein, 353 aa, unidentified
MIHLPEEREVILGVDTHLDMHVAVLIDVVGRIVATTSVPTTALGYEQLIEWARGFGRLTRAGIEGTGTYGAALARRVHAHGVQVLEINRPDRSRRRLRGKSDPTDAENAARAVLAGEANAIPKAQSGLVEAMRAVSMARRSAVKAKTQAINQLRALLVTAPESIRATLWKVKPEQCVARCARLQSLGDTPLLKALTSTLRLLARRWMSLAKELHQLDAALAELTQRAGRRLLARFGVGPQTAATLLVTAGDNPDRLRSEAALAALCGASPLEASSGKTTRHRLNRGGDRAANNALWTISMVRMRSDPRTRAYVARRTAEGLSTKEIQRCLKGYIVRELYPLILADLADPIRES

SEQ ID NO: 188137 - protein, 324 aa, unidentified
MTTTAFLGIDIAKRKFDAFLQRHQRSYHRQFANTASGFAQLQRWLHQSADGPIHAGMEATSRYGEALALFLHQAGVRISVINPARIHAFAKSELARNKTDKLDAAVIARFVATQAPAAWTPPALEQRQLQALVRRLDALQAMRQAEQNRLDLEDADSPIRDSLTEHIGHLDEQLRQLRRDLAEHVRAHPTLQHHSRLLQSIPGIGETTALKLLAELPALAEQRSAREVAAYAGLNPAQRCSGSSVHGRSRLSKIGNPRLRRALYLPAVVAIRCNPLVQPFAQRLCERGKAPMVIVGAAMRKLLHEACGVLKHGRPFDPNYATTR

SEQ ID NO: 188138 - protein, 318 aa, unidentified
MNTKINQSINVGVDTGKTQLDIHIRPLDLFFSVENNDKGIKKALKTIKSHSPERIVIEATGRLEMPFVLACAEAQLPIVRANPVHIKRFSGAIGRRAKNDRLDAELIAHYGEAIKPALTVIKPKNIRLMSDLVIRRNQLLSMQTMEKNRIQILPASLHPTIKPMLTTIKNQITKLEEKLVKLIEDSPEYQAKNTILQSVPGIGSIAAASIISNVPELGYITNKQAASLIGVAPITRESGRYKGKRVIQGGRAQVRTVLYMAMMSAMQCNPVFKATYARLVAAGKPKKVAIIACVRKMVVTLNSMLRDGAMWDENTAKN

SEQ ID NO: 188139 - protein, 394 aa, unidentified
MKLVGIDVGKNSHHFCVMDKETGEFNVTPSSFSNNKEGFDFLINSLKPYSKKSILLGMEDTGHYHVALLKFLLSNGYTVALINPKTTDLTRKMEGGITKNDKLDTITICDVLDTPERKKQYRITKVDRFDLYEQRQLTRHHHNLKEELNIYCNRLQKSIDLVFPEFNTLFGSKYGVVYMNLLKTFGSAEAIASTDIRTIRKCFEIKGRGGRISLTAEKLKECAKNSIGISSEVETIQIKHLVSQIMLIKEQIAEIDKKIEELSITNNSPILSIPGISHFSGTSILAELGDIGNYSKPSRIIKFAGVAPYHYESSQYNAQHTAITKKGSKYLRKTLYQVILPVINNNPVFKKYYRLKISQGKGHRCAQGHCIRKLLRVIYHLLETGQSFDPALLR

SEQ ID NO: 188140 - protein, 344 aa, unidentified
MEVAIGVDPSKSSLAVAAVDPLGRVVGTAEFSNDPRGHRALLGWVGERGPDRVIGIECSLSYGATLSRVLLRSGEDVREVPTTLTHRQRRRRASQGKSDMVDSVAIARIVASGEVLPSAHRLEVLADLRALVEYRDQLVRARTQVANRTHADLVNVLPGYERQVPNLRAKAHRTTARSLLRGDRSVRGELVRKRLGELSRLEGEIAAMDRRIRATVQKTGTSLTSIPGVGPFIAAKILGEVGDPSRIRSKPAFAVLSGTAPLSASSGQVQRHRLNRGGNRQLNWALHYIALVQCRVMPEAQAYMARQREAGKSHKEAMRCLKRHLSNVVYRHLVADARRAELAA

SEQ ID NO: 188141 - protein, 347 aa, unidentified
MASIDRTKYLFVGVDLHKKTHVAVLCNFFGDVMKQFKITNAPNHFPAFLEDVKKHAEGKDIIFGLEDVNFYGRSLAKFLIANGYIVKEVNSSYTKKKRNKGTNRNKTDELDAKAICMNLIMEYDAHPVANPQDIYLAIKQTLSTRNNYVKMAANMKLSLHNLLIHHYPNYTDFFKDLESKTARGFFYTYPSCEMVANVSAEELTKTLQQYNKSVPKAKAQEILDAITSNGWADNGYQEERNQSIRSYIQSIEHLEEEIAALEKQLDRLIDETGYPLKTIHGVDTVLAATFIANIGDINRFKHHSQLAKLAGIAPIEHSSGESNPGSTVSRCTNRHKPRRVKGCGGCG

SEQ ID NO: 188142 - protein, 460 aa, unidentified
MVESSLPDGAAAAVKKSERTIAREAPCIRSTRDSAAMRATRKVRMKSWNEITHYAGFDWAKNHHDIVVVDAQGRVVAEFQFEHSQAGWKAFAQKIKAYPGLAVAIETSQGSAVDQLLQCECAVYPLNPLAAKRYRDRKSPSGNKTDRADAWAFADALRVDGHGWSVLQPLDSLTQQLRLLCRDEMALIEQRTALVNQLQQALSEYYPAALEAFDDWTQSYCWEFVAEFPTPAALVKAKKGRWNRFLHKHKLWRPQTSQKRLEIFARADQFCGSQALSAAKSLLAVSLAKTLQALQIQLDAYRDQIRQIFNQHPDHDIFDSLPGAGDKLAPRLLAEVGGDTQRYPDTQALQCLAGTAPISYQSGQIHKVLIRRQCNKILRQVVHLWANGSRQSALWAQTYYEQKRNEGKSHACALRCLGQRLLKILWKMIQTRTPYDPDLHARNQKAHGSWVLELVKQKPA

SEQ ID NO: 188143 - protein, 441 aa, unidentified
MKSFEKMQIVNPNAAGIDVGSRSHFVAIGQDENQIREFNVYQSGLCALVAYLQENKIRSVALESTGSYWQSLFMILQGNGFEVLLVQGTQTKNLKAKTDVKDAQWIQKLHSLGLLRGSFLPSETTLQIRTLHRHRSSLIEQSSSFVNKMQKALRLMNFRLDVVISDITGVSGIRVIEMILSGETSGEKLAEYCDKRVKKSKEEIADALQGKINNEYLHELSDCYDIYRLIQDKIKNTDTRIDQVLKNQTREIVLSEDIELVKKQNKGKNQPKFDVQKYSLKLFGVDLFAIESVCSGTVTSFLAEIGTDIYKFKTSKQFVNWLRLAPNNKISGGKVLSSRTPKGKNKFALTLRNAANTIERKKEGYLVMFFKRISFKKGRGAAITATARKIAVIIWNMIVKKQHYIPINTDEYIQEMKNKKTIQIKKMIKKYGIETTSLSIP

SEQ ID NO: 188144 - protein, 331 aa, unidentified
MQAGEGIIGIDISKDSFDMVLRSTRGEQHRVFSNDQKGYMALVAWAEKQPERVVHICMEATGSYWEGLAEHLYQGEYTVSVVNPYQIKRYADHLLNRNKTDKADASLIAEFCEKDQERLRAWKPYSPEIKALRSMGRRLDELQDMKQQEQNRLKSGVTDQVVIESLEENIKQLKDQIKALWKKIQEHVKQHPDLREQQRLLTSIPGIGKLTAIKLIAEIGDIRDFSSASQLAAYAGLAPKQFRSGSSVHKQTRISKQGRTELRRCLYMPAVVASEHNPIVKDLKRRMLASGHVMMEVIVAAMKKLLHLVYGVLKSGKPFDPDYGKQFCFNS

SEQ ID NO: 188145 - protein, 382 aa, unidentified
MIKYSLGIDISMKSFYVCLSCIDALQQVKVVSSFTFTNNLSGFKLLHQWLQKHYKQRELPLVIVMEATGVYYEQCAMFLFKEGYNVAVVLPNKAKKYLQSLGLKSKNDKIDAKGLARMAAEQSLELWQPMDDFFYQLRALTRQHQSLQELKTSVSNQLHAQEHSAMVNKIVIKQLKQLIATIDKQIDAIAKAVETHVESNAVIAKKVADICFVKGLGILTVAIIIAETNGFILFKNARQLVSYAGYDVIENQSGNHIGKTKISKKGNSRIRRALHMPAFSVVRYQVAPFVNLFNRTLQKHNIKMKSYVAVQKKLLIMIYTLWKKNEAYDAKVYQYKSTNDIEQETTSRHGFEKTEIEKEIHKNSADYKPALHKVINRRHVAV

SEQ ID NO: 188146 - protein, 334 aa, unidentified
MAYTHFVGIDIAASSATISWRTPSQPASKAWTIAQQPHAYARLVAQLSALAAPASCLVVMEATSTYWLALALHLHQAGFAVSVVNPSQPHHFAQLRLQRTKTDAVDARLLADFACQFQPGCWTPPPPMLEQLRQSLTLRAALLDSRTQQRNRLHALLHNPQADPFVLSLMQQQLTDLQHQLDALTAHLTALLLGDHPWREAVHHLLSIPGMGVISAAWIVVATHAFARCATPEQAVAFAGLAPHAHDSGSSLRGQRTVGHGGHKALRDCLYMAAGVAARFNPRLRAFYERSLASGKAKKVARLAVARKLIHLAWTLVVKQQDFDPHYAYSRLAT

SEQ ID NO: 188147 - protein, 351 aa, unidentified
MPRATSSTNVIATIGIDIGKNTFHVIGLDVKGAIILRHKLSRGQVYARLANIPPCLIGMEACVGAHHLGRQLSALGHDTRLMPARYVRPYSKGQKNDFRDAEAIAEAVQRPTMKFVAIKTVEQLDLQALHRIRERLVCQRTSVINQIRAFLLERGIAVRQGLRTLRTEMPIVLAKTDKLSQRMIHMIEDLCMDWRHLNGRIETVSKEIETLSEQDDGAKRLMTVPGIGPIISTATVAAIGTGEVFSKGRDFGAWLGLVPKQMSTGGRTILGPISKRGNRYLRMLFVQAARAVLLRPQSWEKHGLKLWIEAAARRLNRFKLAIALANKIARIAWGVLHGGRNFEVRPMNQAA

SEQ ID NO: 188148 - protein, 457 aa, unidentified
MSRKTTKSKLGRTMPMVHPNAAAIDVGATMHMAAVSADRSPEPVRSFGTFTTDLHRLVNWLKECGVETVVMESTSVYWIPLFEILDARGFAVFLVNARDTKHVPGRKTDVSDAQWLQRLHSFGLLRASFRPKGQIAELRAYVRQRERLLEYAASHIQHMQKALTEMNLQLHHVVADITGATGLRIIRSILAGEHDPRELAHLRDYRCHASVETIEKALTGSYRAEHLFALEQAVSLFDGYHEKVSACDVRIEAVLKELITGRGRGSGSLPSSRRRTDQTNAMAFDVRAALFALLGKDLTQIDGLGPYLSLKLIAECGDDLSAWPSAKHFTSWLCLAPSNKISGGKVLSSRTRRSGSRAAALLRLAASTVGRTDTALGAFYRRLSARIGKAKAVTATARKIAVLFYNAVQHGMDYIDPGASIYETRYRARVVDNLHRRAKAFGFVLQPAEPTPSVAVS

SEQ ID NO: 188149 - protein, 333 aa, unidentified
MSHLNSGIAVIGIDIGKNSFHLVGQDRRGAIVLRQKWSRGQVEARLANLSPCLIGMEACVGAHHLSRKLQALGHQARLMPAKYVRPYSKGQKNDFRDAEAIAEAVQRPTMKFVATKTVDQLDLQALHRVRERLVSQRTGIINQIRAFLLERGVAVRQGLRFLRVELPGILATRTDVLSPRMLRILEDLSADWRRLDARIEGLSSEIETFAHQDQHCERLMTVPGIGPIISSAMVAAIGTGDVFSKGRDFGAWLGLVPKQISTGDRTILGSISRRGNRYLRALFVQAAWVVLVKLGPKQWERYGLNGATLPGPTVSHVLKRCNNDICAMLPLAR

SEQ ID NO: 188150 - protein, 455 aa, unidentified
MLFQAQINVGVEPRNLIFVKTILVFSVSVQSLPVSSNIFIEERCMPKIVYPICCGIDVHKSFVIACIASTNESGVTTYSKPKRFSTFTNELRRLSAWLTANNCRDVCMESTGKYWIPVYNILEPTCDIVLAHPKYLKAIKGKKTDKRDAKWIADIFKHDLLNGSFIPPVLIRQLRDLVRYHTKLTSYMTGEKNRAQNCLTVSNIKLDDVFSDVFGKAASAITEQLLKSNEPFDVTPYLTKNIKAAPEEIQAAVDGVMCAEQAEKLRIIRSHMKSLELCKANLESAILTIAEQFRPQVNLLVTVPGISTFSAIAIIGEIGVDMSVFKTSRNLCSWAGLTPQNDNSAGKKKTTRISRAGVYIKPLLVQCANAAVKSNKHPEIRNRYNSIKKRRGHKKAIIAIARMLLTAIYNILKKNEPYNSELYQKADMPPKNREVTLEQAIFIIQRQGYIVAASP

SEQ ID NO: 188151 - protein, 452 aa, unidentified
MEKKKEEVWQIVYPHSAGIDVGSRFHMVAVGQSDDQVRKFGINTDDHNLMIDFLKVHQITHVAMESTGSYFQTLFLALQEAGFEVSLVHGSHTKGIGGQKTDVKDCKWIQKLFTYGFLKSCFLPSNATMEIRTLNRHRNNLIDESSRLLNRIGQCMRQMNIRLDVAINDLGGKTGQSIIQAIVEGQRDGNKLAILADSRIRKSHQELAQYLQGRWNDNQLYILKDLHQAYQYVRNRIENCDQQMKNCFDQIIESQGAEEAGKINLTKKQKSRNSSSLNVCTTSYQYYGVDLMEIECVSEATVMSLLAEVGRDIFKFSTASKFVSWLRLAPNNKKTGGKIISSKTPQTTNKFTLTLRNAANTISRKKTGYLLHFFQKIAYKKGRGAAITATARKIAVIIWNMITKKQPYKPIDMDQYKLKKRQRTLKTINKLIKHMEINTDELIIGSQRLAGS

SEQ ID NO: 188152 - protein, 366 aa, unidentified
MKKTSTVQALKNEIFKGRKLTIGLDLGDRWSFYCVMDEAGQIILEQKLPTTPEAMKQTFGKIPRCLIALETGTHSPWISRLLTELGHEVIVAHAQKVQWITKSSRKDDRHDARTLARLARVDPELLGPVRHRSAQAQLHLTVIRARAELVSARTALVNAARGLVKSSGQRLPKCGTYQVSEKLAEGLSAELREVLVPLFKEIESLNGHIKEYDERMEKIAKQVYPEVALLKQVKGVGTQIALTYVLTIEDPYRFAKSRQVGCFLGLRPGRRNSGESEPQKGISKEGDRYLRTMLVQGAHYILGPFGEDSDLRRWGRKLAERGGKNAKKRAVVAVARKLAVLLHRLWVGGEVYEPLRNSQKAMREVA

SEQ ID NO: 188153 - protein, 476 aa, unidentified
MVVPNQEPKKPGKPKKSTKLTKPRTSSLPVPVPASSAPLPVLNPHAAGIDVHSNMHMVCVPADRDAASVRQFGANTADLQEIVTWLKECHVTTVALESTGIYWIPLFELLESEGLEVNLAEPGQLSRSGARPKTDVLDAQWIQRLQSYGLLRGSFRPPDSVLALRAYCRQRQTQVRYAASHVHHMQKALEQMNVKLTEVVSDITGLTGLSIIGAILDGERDPVKLAKLRDRRCHQTEHEIALALEGNWRPEHLFELRQAHDLYHFHHRQITECDQQIQAELAKFTNRAQGKTRAAKSRRRGRKGNDIRFDAASPLFQALGVDLTKIEGIDVGTALVILAEIGVDVTRFPTEKHFASWLRLSPPQHQSNKTNRRRGHRTGTNRVTIALRLAARSVGRTMTPLGLFYRRIRSRIGGLGAVKATAHKLACLVYRMLKYGQDYVTQSMDEYEAKMRANLVKSLRRKAAAMGFQLSPLPTT

SEQ ID NO: 188154 - protein, 323 aa, unidentified
MNKDIKYFGIDISHLVFDVTDSDGNYYQFKNSLIGFKKFMKLLDFNSHCVMEATGYYHYQLAYYLQENSVVLSVENPLSVKRFIQMKLSKIKTDKSDSKLICEYAKQVDLKLWQGNSKHQLECLQMTRLLSVYTKQSTMLKNKLHGEAVLGQPSKLVVTSLKRSLRQLKKEIDTIEEKLLLLVNEVHKDILTRLKSIPGIGKKTSLMLVVLTDGFDRFKSGSELCSYAGLTPIIRQSGSSVNGRARISKIGNQKLRNLLFMCSFNACKYNKGCKAIYDRIVAKGKRKKLALIAVCNKLLKQAFAIAKSGLIYDDTYISTLVKN

SEQ ID NO: 188155 - protein, 382 aa, unidentified
MFGCPSASTQLSDPRGGELESVCDRSLPTTFCALDVHKSYLVVAAVDATQQIVLQPKRVLLAEFAAWSAHHLRPTDQVVLEVTINTWQLDDQLVPQVAAVTVANPLQVKLIAASRVKTDSRDTLVLARLLAAGLIPAVWVPPAPVRELRALVAQRAGLIRQRTQLRNRLHAILLAHNLVPPAGDLFAPAQQAWWTNLALNATERLQVRQNLALLSSMSSLVSELDTELVRVSQQAPWAEAVPYVLQLPGFQVHNALVLLAAIGEIARFPSAKQLVGYSGLGASVHRSGQVAYTGRITKQVRRELRHVLVEAAWTAVGCHPYWKAQFARLWGRLGENKAIVEIARKLLVAIWHVLSHREADRHIRGHNNFWHKLHANKLQSLD

SEQ ID NO: 188156 - protein, 375 aa, unidentified
MNNNNTLYVGLDVHKESITVAYAINSEPVELMGKIGTSPTDIQNLCKRLRSKSSQVSIVYEAGPCGYGLYRRLVKSGFDCMVCAPSLIPKKPGERVKTDRRDAIRLVRSLRAGDLSAVYVPGIEDEAFRDLARAWASARDDLRHARQRLKLFLLVHGGHYVGRADWGPAHRRWLSKYSFESPWRQLAFDEHRRTIEDRQAQCERLESALKEAVTEWRLYPVVEALQAMRGIQFITAVGLISELGDLTRFEHPRQLMSWFGITPSEYSSGGSRHQGSITKAGNSYARKLLVEAAWSYRHPARISPAIQKRQENLPRPVIDRAWDAQLRLCKRYRKLQAKGKNVNITIVAVARELAGFIWDMGRIAMSVAQQPQCHK

SEQ ID NO: 188157 - protein, 414 aa, unidentified
MPETAYALYVGIDWGTVTHQVAVLDAQRVLLGERAIAHEAVALHALTEWLTQLARGEPARVAVALEVPRGAVVDTLLERGFHVFALNPKQLDRFRDRYTVAGAKDDRRDAFVLATALATDQPAFRALAPEDPLIIELREWSRVEDELREEWGRLASRLREQLHRFYPQALTLCPAADEGWFWALVGLAPTPAAALRLRRAAVVTLLRAHRIRRLTADQVLAALQSPPLRVAPGTVQAASAHVALLLPRLDLVDRQRRDCARRIERLLDALATTGEHQGHRDVTILRSLPGVGRVVAATMLAEASRLLAARDYHGLRTQAGVAPVTRQSGKRLLVGMRYACNPRLRNALYYWGFISVRYDAHSRQHYQLLRGRGHSHGRALRGVVDRLLTVLMAMLAAQTTYDPARRSAMLALAP

SEQ ID NO: 188158 - protein, 357 aa, unidentified
MTEAYDGRQVVGVDLHRRRSVLVRMTEDGRRLGTARITNSPQELRAQIARAGKSPRVVLEATYGWYWAADTLAAAGAEVHLAHPLGVKAFTYRRVKNDERDAADLADLLRMGRLPEAWIAPQEVRELRELTRYRQKLVHLRTSCKDQVHGVLAKLGVPPACTDIFGVAGSAWLDQLGLPQPYAGKVTSLRQLTGELNSEITMLSEVIADLAAGDRGYQVIQQLRGIGPVLAAVIIAEIGDVTRFNNAAQLCSWAGLTPRHRESDTKLTRGHITKQGSRMLRWALIEAIQRAGADTVTGAIKDAIIARRGKQARNIAKVAAARRLLTLVFYGIRDGQIRCLSTTPGGSPPPARAARAA

SEQ ID NO: 188159 - protein, 318 aa, unidentified
MKTKTNQNINVGVDTGKFQLDIYIRPLDIYFTVENNEKGIKEAVKTIKKYKPERIVIEATGRLEMPFILACANAKLPFTIANPVHVKRFAGALGQRAKTDKLDAQLIAHYSEAIKPALSKLKPDTMQAMSDLVTRRNQLLNMQTMEKNRLQIMPKELAMTIKPVLTLFKNQILKIEEKIVKLIDSCPEYQAKNMILQSMTGIGKIAAASIISNLPELGYINSKQASALIGVAPMNRESGRFKGQRKIQGGRPQVRTVLYMAMMSAMQSNPVFKATHQRLLEAGKPKKVAIIACIRKMIVILNSMLRDGVMWEAPKVNN

SEQ ID NO: 188160 - protein, 484 aa, unidentified
MAAVMIGVDPHKGSHTAVAIDAAEVALGTLRVRASSVQAGKLLEWAAEWPERTWAVEGAGGLGHLLAQQLVAAGEQVMDVQPKLGARVRLLSTGTSNKNDPNDARSVAVAALRSPVCQQVRADDHALILRVWSRRHRQLSRLRSQAACRLHAVLCEIIPGGVGKDITVARAAATLGANHPADAMAAAWHDLADEHLTDLRRLDAQLRDTRKKLTAAVRASGTSLTEVFGVGPVVAATVIGDVTDITRFPTADKFASYNGTAPIEVSSGQRKIFRLSMRGNRRLNHVIHMAAVTQIAHKHSDGHAYYQRKLDEGKTPAEARRALKRKTATPSTPPCAPTPQPGQRAREGNQGTTLHPARPAHTPNASSSDQPLPGPLPPYARQAQQQEDITPIHLTNRQTNGTRYGRKCYGPIDLRSRTELSICTQFPMGLPTVSSGAGLHGLGFVHGSMALSGRGAGMVSSRRGRVCTADRPAGSGPGSCPSVI

SEQ ID NO: 188161 - protein, 364 aa, unidentified
MSEGICFVGLDVHARKTAAAAVQLGSGEVFKAQLSGSPRAVIEWLVGLPGPVRAVYEAGPTGFGLARQARAEGVEVMVCSPGAIPRQPGDRIKTDKRDALKLARLHAAGQLRAVLVPSLELEALRDLVRAREDLRGDLMAARHRIGKLLLRRGLIFPGPGDPWASQRHVAWLGSVCLDDRLAQVVLGEYLACHEVLLARRDRLDALIAEQAKAERWAGVVGRLRCMRGIDTLTAVGLVAEIGDFSAFAHPRQLASFVGLVPSERSSGDKRRQGTITKAGSSHARRLLIEAAWHYRRQPAVSLTLRRRQAGQPPAAIQAAWRAQLRLSGRWAHLDARRAKRRTTVAVAVARELTCFVWEIARQPD

SEQ ID NO: 188162 - protein, 385 aa, unidentified
MLFVGDDWAEEHHDVELQDQAGRVLARARLEEGITGIARLHELIAENLEEDSDTAQVTIGIETDRGPWVAALVAAGYRVCAINPLQVARYRERRSVSGAKSDAADAHTLADMVRTDSHQLRTIAGDSDQAEAIKVVARAHKTLIWERTRHTLRLRHALREFFPAALVAFPDLTGVDALELLAKAPDPAAAARLTITQISAALTHARRRHVADKAMVIQAALRTEHLGQPIRITAAYAATVRAQAAILTTLGAQITAMAEQVDAHFGQHPDAEIYLSQPGLGTILGARVLAEFGDDPNRYANAKARKNYAGTSPITRQSGKKKVVLARYVHNDRLLDALGRQAFAALTASPGARAYYDELRGRRHRPPRRAAPARQPPCRHPPRLP

SEQ ID NO: 188163 - protein, 310 aa, unidentified
MERIFVGLDVSKNRLDVHVRPAGESFTLAYDEAGLVTLVTRLSALRPALIVLEAPGGYEAAVAAALANAGLPVAVVNPRQIRDFARATGQLAKTDALDARVTAWFAETVQPAARPLATEQAQVLGELVARRRQLVEMVGAEMNRRRQVRDRGLQTRITAHVTWLTRAIEELEGDIQRLIRSSPVWRETEDLLTSAPGIGDITAHALIAELPELGQLNRRRIAALVGIAPFNRDSGLWRGRRMIRGGRPAVRRALYMATMVAIRHNPPITDVYRRLTRAGRPKKVAIIAAMRKLVTILNAMLRDQRRWQPA

SEQ ID NO: 188164 - protein, 388 aa, unidentified
MQVAADRTDASTAIQTDLPAIFVSLELSRSTWLITSLSPGAREKMSKHSIRAGDVAGLLVRLAQLKEKARGRTGRDFPIIAIQEAGLDGFWIHRVLQSEGIESHVVDAASILTSRRRRRAKTDGIDGETLVRTLLAYKRGEPRVCAMVKVPTPEEEDRRRICRERKTLVGERVEHVNRIKGLLFAQGVSNYEPLKRNRRARLEELKTGDGRPLPAHLKAQIGRELDRLELVLPQLKAVEAERDALLKPVSEGCSTPASMLAQLKGMGPEFTAILWSEGLFRSFSNRRQLAAYAGLAPTPWQSGSVAHEQGVSKAGNPRLRTTMIQLAWLWLRHQPTSALSVWFRERVQSKGGKIRKTTIVALARKLLVALWKYSTSGVVIEGAAMKTI

SEQ ID NO: 188165 - protein, 343 aa, unidentified
MYYIGLDVHKRTISYCVKDAAGHVHSEGKIGSMRCELDAWIRTLPQPRMIAMEATIFTGWIYDHLLPHAEKVKVAHPLMLRAIAAAKKKNDRIDAVKIADCLRCDFLPECHMATREIRDRRRTLRYRNLVIKQMVQMKNRVSGLLMETGVSYNKQRLHKVGYFGELMTTNKEVQQSIRPLLKLSREMISRSQKLEYALVSSLERDPLLQERLRRLRTVPGVGPITALTWALEIGDYTRFSSIKQAISYCGLCGEEKSSADKVMRMPISKQRNKHIQRVLIEAAKLAPRQSHELALIHARELERGHRNRATLAVARKMVCYMLAVERRQQDFVPAEEFSRTVAA

SEQ ID NO: 188166 - protein, 354 aa, unidentified
MPRYKPEAWRGKQLFVGVDLHLKKWQVTVLSEDGLKLFSNSIDGNWPSFESLLSRFGEASKVSVVYEAGYFGFWLYDRLVEYGVEARVTPPSLIPSVSGSRVKTDRIDSLKLAQLLKADQLKGVYVPTKEERAHRQVARRRRQLIEDRVRVQNRIKAHLRVNGIFLPQESSGKWSLGYVDKLRAFRFSDRFEQKSFESLLEQYDFLCDQVDGQTRLLRELTRTETYEARVEILKSVPGIGWLSAMEILLELQDVERFKSADALAAYVGLTPSQHSSGEHVRYGRITAQGKPSVRALLIQAAWSLIKKDALLGKKYQQLKGRAGGKKAIVAIARMLLIRMRRLLISKEPYVLGVA

SEQ ID NO: 188167 - protein, 367 aa, unidentified
MSRMKRLTVQQLDVSMDYLVIGLDLAKTDTAVIAITTDGELYAIDRLKYLDLLNQAKQLGPTVFAMEPCNGMTYLVHELEELGHECRVINGEAVKDYVKSHFAGQKNDLNDAQAIAFLAQDEMLKFIRTKAKSEMTMQTLQVVRQQLIKQRTCSVVCIKGICQNYGLIISKSIMSEAKIRPIIEESQKLPEEIKEPLKALLRNAARFTIDIKQIDKAIEQGLKGNDTAERLLEVPGLGPQCVSRLLTTIGDINRFEGPKNLAAYYGLVPRSHTTGHNEQMGKITKHGDRLMRSFLVQGAHAILILHTRGRLPKSALKKWIGKKLSGGMPRSKLSIALAAKLLRIAFAVLKYKKKFDIKKAGVARCSL

SEQ ID NO: 188168 - protein, 445 aa, unidentified
MAKKIRYRATSIEQTSSEKLAVMLHGAQKLVVAIDVAKTKMVAGIGPEDGSTRCLVKWTSPFDNRAFVELVAQTARALAVPVEAIMEPTGTYGDPLRAMLLAHGVELYIMSPKRVHDAAEVFDGVPSMHDAKACVVIAQLHEKRVSKRYVVPDAQRTQLRALADQRELYAKPLQFYLGQLEALLARYWPEALSDVDVWQNKTPLAVLAHYPGPAVLLEHADQAIERVHNLGHGRLHTEQVQRMVASAARSSGVVQHDEAKQLIRIAATEALRMRVALDAVDRQLEQLAEQAEPTKHLAPVVGRVTSVLLVAYLGAFTDYESAAALEKACGLNLKIRSSGNFVGRPALTKRGSAGVRRYLYLATLRLIQKDPRIAQWYRSRAGYRGGHKLVAIVAVMRKLIRALWHVARGQTFDSSKLVDERTLPALAPPMTPGAQTSRDAQLLTH

SEQ ID NO: 188169 - protein, 338 aa, unidentified
MKLYGGIDLHSNNSVVALLDEEDRVVYRQRLGNDAALVLESLAPYREAITGLVVESTYNWYWLVDALMDAGYRVHLANTAAITQYSGLKYSDDDSDAAWLAKLLRLGLLPEGYIYPKAQRAVRDLLRRRSRLVQQHTANVLAVQNLFSRNRGRSLSANAIRRLTPETVGELLPDANLALAVQSTLLAMRGQEAAIDLLEREACAQVRGRPAYRHLLSTSGIGQVLGLTILLETGPIERFARVGNYASYCRLVGSERLSNGKRKGRGNTKSGNKYLAWAYLEAANFAVRYNPAIKRYYQRKRAKTNGVVAIKTVAHKLARACYYMLSEGTDFDVDRAFA

SEQ ID NO: 188170 - protein, 340 aa, unidentified
MKLHVIGIDLGKTVFHLVGLDSTGRVVTRKRCSRTQLLTFTANLQVQLIGMEACSGAHFLGRALREQGHEVRLMPAQYVKPYVQTNKSDYLAIAEAVQRPRMRFVPIKTEEQLDLQALHRVRERWVMRRTAVVNQIRSLLLERGLTLPKGRSHLDKQLPRILEDAELHLSDSFRVLLAQLQLELQQLAARIEEMDRVIQNTARENEACQRLTEIPGVGPVTATALIAAVGNASAFGKGRKLSAWMGIVPGEYTTGGKQKLLGISKRGNKYLRRLFIQGARSVLQQRHQQAPGLSEWLAQLLARTHQNVVVVALANKLVRMSWAVLCKNERYRAPVFAGTA

SEQ ID NO: 188171 - protein, 435 aa, unidentified
MANFYHSPVVGIDVAANFSVATALKPDGTVFKKNLNIKHNQNGFEKLLDFLKKIEEEFNSVPAVFCESTGIYHLTLLQFLVKHQVVIHVVNPLITNSNKNWNIRKAKTDKLDSYSIAKLCKTGDVKTSCILTEDFLHLRFLVREYYQIADNAAELKIKFSNTIYIHYPGLQFAFANLTGKTPLAFIQAYSTPNDLINAPKEEVITFLRKSSRRGSEWAKNKYEKLIKTAHEANHIGINPNLFTNKVKRFSETYSFLQVQLSNLFDEIQNYIENSSFAESFMQNYDLLMSFKGIGPMTAITLLSEIGDIRDFSNAQKLVAFFGVDPSVNESGNFKGDKNKMSKRGTSLGRRVLYTLAMASIRKSKSGKENNKVLHHYYNIQLSTKKKKKVRLVAVMNKLLRYIFSVLKNQKPYVVRDPRIHKKMFLESQYSNQLAA

SEQ ID NO: 188172 - protein, 373 aa, unidentified
MSNVRFIGLDVHAEKIAVAVAEPDGEVRSLGVIPNQPESIRRLIKKLGPTDQLRVCYEAGPTGYVVYWQLTALGVKCEVVAPTLVPVKAGDRVKTDRRDALKLARSYRARDLTAVWVPDAAHEALRDLVRAREAAKKDQLRARHRLGKFLLRRGQRPPTAMKAWTQKHLKWVKTVHFDHAAQEATLLDYLHEVEHMADRIERLEHAIDDAVKTAPEQMRAVIEALQALRGIALISAATIVTEVGELSRFPTPRQLMGYSGAVASENTTGERTRRGSITKTGNAHLRRVVIEAAWAYRYRPAVGAALRKRQTDLSPEVKAIAWKAQHRLHGRYCWLAAKGKLKQEVVTAVGRELLGFIWAIGVHVEATRRQAAA

SEQ ID NO: 188173 - protein, 320 aa, unidentified
MNPQPCFIGIDVSKAALDVHARPSGQVLHVANDTDGIAALVARVLEWAPTLVVLEATGGLEHPLAAALAEAHLSVAVVNPRQARDFARATGRLAKSDAIDAAVLAHFAEAIRPQARPLPDAKTHELAELLGRRRQLLGMRTAENNRLGTVTAPRVRKSVEAHLSWLAKQLEGLDKDLGEAVRNSPVWRVNDDLLQSIPGVGRVVSRALMAELPELGTLSRERIAALAGVAPMNRDSGTWSGKRSVCGGRSRVRGALYMAALSAKRFNPALREFAQRLAQKGKAAKVILVAVARKLLIMANAIIRDQQPWEDRTAKCLAAA

SEQ ID NO: 188174 - protein, 392 aa, unidentified
MFFVGIDIGKNNHVASMMDESGKVVFKAFSFPNTSDGGHALFSKLASYSPSPDDFEIGMEATGHYWLSVYSFLFEKKFLLHVINPIQTDGWRRGTEIRKRKNDIIDSVLIADLIRYGQFVETRLADEDLFSLRSLTRFRTYLVESISDLKRKVVCVLDQVFPEYQSIFSDIFGKTSKEILLQFSSPIDFESVSSQTLAQLLAKLSRKQVGPAKAEQLKAAASCSFGVTFAKNSFTFQLKALIEQISFIEKQVKETEAEIAGVMEKLESPITTITGIGSVTGAAIISEIGDISKFDSPRKLVAFAGLDATVTQSGEFEAAHNVMSKRGSPYLRKAIFQAALVAAFKDPVLSAYYQKKRAEGKHHLTCIGAVARKMCNIIYAVVKNNQPYVPKA

SEQ ID NO: 188175 - protein, 400 aa, unidentified
MSNVIMIGCDLHDRNMLLRYAVGTAEPQQLAYDNDAAGRRRMIARLKAIAEKNQAEKIIFAYEASGLGHGLSDELHQEGIECFVLSPTHLPKTPKSARLKTDAKDAQMLLEQLRGFVLAGNDLPVVWTPPQRLRDDRELVRARVDVADEMTRVKLKINTLLKLHQLKVVSPTKCKWTKAFVTWIREKLIPDLDLCVATKLKLLLDRFDMYRKEQGELDKALKKLSREPRYKVACNELRKLPGVGQLVALTFLTEMGDLERFANRRQIAAYMGLCPSSNESGEKNDRKGRITRQGPARLRKVLCQAAWVSVNRSEEAAADYHRIKQGQKHRSKKALVAMMRKLGIKMWHRALACGVSSELKGRDRPSSKDFVGLAQSGLAQSGLAQRTVSPPSLQLGQCAG

SEQ ID NO: 188176 - protein, 332 aa, unidentified
MNTSDSLSVGVDVSAKTCAVLKRQMGKSGVVQHFANETAGHRALIAALAGHTRVRVCVEATGMYSMDLVMALHGAGIPVMVVNPKSSHNFAKALLLRSKTDNIDADTLAQYAERMPFVPWQPPAAEHFALRAFARRLTALTEEKAAAKNQLHALSATAETPRALLQDAKRGIAQLEKRIDQLTAHALKLIKAHETLRTALALITSICGIANTSAIALLGEVLVLPSNLTHKQWVAHAGLDPRETQSGTSVHKAPRLSKAGNRYIRRALYMPALCAVQRDPYVKAFYQHLIDNGKKPLQALCAVQRKLLHAIHGMLRDQKPFDNTRFFAMVKT

SEQ ID NO: 188177 - protein, 342 aa, unidentified
MNHYAGIDVSLECSSVCVVDASGKIIREGKVPSEPEALIAWFGSLGFELTRIGLEAGPLSQWLFAGMQKAGFAVELLETRHVRNAFKTMPVKTDRKDARGIAELMRLGWFRPVHCKSIEAQETRALLTARKLVQSKLGDVERSLRGILRGFGLKVGRVTPKQFEARIRELVVGHPSLQTLAEAILAVRAVLLREFKGFDKRVRKIARDDARARLLMSTPGVGPIVSLTYSSAIDDPARFKSSKQVGAHFGMTPKKYQSGEKNVTGRISKIGDSSVRAALYEAAHIILTKPVKGSNLKSWAMRVAKRAGMNKAKVALARKLAVLMHRMLVDGTSFNFAAAAAR

SEQ ID NO: 188178 - protein, 349 aa, unidentified
MSMVCGLDLHRQQITFDALETESGEVWRGRVWQPDRQRFRRWLSRDVARRADGQPVAMAVEGCTGWRYVVEEITAAGFEAHLAEPADTQAARGRKRHAKTDRSDARMLRELLQSGDLPESWIPPTAVLEWRERVRLYKSLVDQRRVWTQRIHAELFQHGVAVPEAAIRSVTTRERLTGDEVTLTPAGRQRVRVGYTMLEATDVEAQSLKRDLQRFGHRQRACRALVGANYGIGGLIAVAVWSELGDCRRFSRSEQVVRHSGLDVSVDSSDRHRAHGYLTRQGPPTLRWALFEAAMNASHRRSPDHAYYTTVKHRHDGKLAAIAVARRLARRCYHVLRNLDPDVVYAMPD

SEQ ID NO: 188179 - protein, 346 aa, unidentified
MLHAGLDLSRKRLDVCLLSDQGELVEELTAFPDSGGLKKLVERVEAEREPVRAVIESMTGARFVHDTLERHGWEVLIADAQKVKGLAPLAVKTDRVDARVLAILSQRDLVPAIWLPDPRVRRERELARFRLHLVKHRSQLKNRIHSALISFGRPCPVTDLFGVAGREHLAGLELPEPWRGNIDASLSLIDQLEGQIDEIDGKLRASGADHPYVPLLLTVPGVGWVLAFTIAAEIGEIERFPAPTKLTGYTGLCPRVRQSGESDRRGPLSKHGPRYLRWALLEATMHALRHPAYAERYQRNKRRLGKQRGAKVAQVDIARRLAVAIWHMLTRNEEFAPRGAAFRLAA

SEQ ID NO: 188180 - protein, 399 aa, unidentified
MLAVGIDISKSKSVAAILNQDGSMHTSPFEFHHTQPEPNAFIKYILNSNQSATILMENTGHYHYPVLKAFREAGLPVCMVNAYQIKKFGDMDLRKAKTDKKDAVRIARYALEKSYSLVPYTSMEQKYEDLRFLARQYNQRMLTLKTNKVFLLNLLDETMPGITNILPLTTRTPETSLSVLFINRFKSYDRIKKMGKSRFLDAFEKIARKSRNRQTKTYGLAIYEAALRNITTRGENEYTLAAQDQCLELVCESQKAADSIIPKMQTLAETLPEYAVLRSMAGVGDRLDPLILAEIGDIRRFHSGKALNAYAGNDAPPYQSGTFESHNRHISKRGNAALRKYCFEVMQALKLTRPQNDPVYLFLLKKEQEGKPYNVAKMAGVNKFLRIYYARAMETLKQQ

SEQ ID NO: 188181 - protein, 417 aa, unidentified
MRLPCSSTCSNICYGWVARQPTVWQLGVTMEVVHERCCGLDVHKDKLTACVLIGQVREVRTFGTMTRDLLQLADWLTEEKVTHVAMESTAVYWKPVYNLLEDQFSVLVVNARHIKKVPGRKTDVSDAEWIADLLRHGLIRGSYIPERPQRELRELVRYRRRLSEQRAQVVNRMQKVLEAMVQGVDNPEALAGLAKGKLREKRAQLQEALHGLMGPHQRMMLESQLRHLDFLDEEIARLDEEVSKRMRPFDEVIQRIDGIPGIGRRLAERVLAEIGVDMTRFASAEHLASWAGICPGNNESAGKRRSGRTGRGNPWLRCALVEAAWGANRTRETYLRAQFRRIAARRGNKRAALAVAHTILNIIYYMLQRGTTYEDLGGNYFDQRHSESIAHRAVLRLERLGYKVILKLPEPASTAFS

SEQ ID NO: 188182 - protein, 346 aa, unidentified
MIVIGSDPHKRGYSFAAVDAATGELRSSETVKAASAGHEQLLAWGRAADGERVWAVEDTRQVSAKLERFLLARGETVVRVPPHLMAGRRRGLRQAGKSDPIDALAVARAALEEGVHTLPVAMLDGPSREIKLLLDHREDLIEERTRIQNRLRWLLHDRWPELELPKASLDHYSRLDWLARRLARCQPDADVRVMRSQIKRLRELTREARALEKEITALVVVQQPRLLELPGVGALIAARLIAEIAGIERFKSPAKLARLAGVAPIPASSGNSTRVRLHRGGNRQLNAAFYRIAITQMRMHPPASAYIARKIAEGKTKREAIRCLKRHLIRTIYNTMTTANCEPLLT

SEQ ID NO: 188183 - protein, 338 aa, unidentified
MKKYIGIDLHSNNSVVVVTDAEDRILYQKRLANNLNEIQAALAPHREETVGVVVESTYNWYWLVDGLMDAGFQMHLANPSAIKKYEGLKYSGDFADAAYLAQLLRLGLLPEGYIFPRELRAVRDLARKRMQLVRFRTTQILSIGGILVRETGGRMSSDRIKTMTAETVEALGFMPDVALAMESNRVVCQVLQQQISVLEKRLEAQVKLQPGYQLIKTIPGIGQILATIIMLEAGPMTRFADVGNFSSYCRCVDSLRESNGKKKGEGNSKNGNKYLAWAFMEAANFALRYCPEAKRFYERKKSRTNRIVALKSVAHKLARACYHILREQQPFDVKRCFV

SEQ ID NO: 188184 - protein, 350 aa, unidentified
MAMTIVGTNPDAVIGGVDTHAEVHVAAAVNHVGGVLGVESFPTTRIGYRQLVSWLRSHGELSLVGVEGTGSYGVGLARYLARAGIAVVEVDRPNRQTRHRKGKSDPVDALSAARAALSGTATGLPKTRDGNVEAIRVLMIARRSAVDTRIETLNQMRHIVFTATPEIRGKFEGLTAISLANTAAALRPRDGDDPVRYTTLVTIRALGQRIQYLREETKRLNRLLRPLIRQTAPTLLEVYGVGYDTAAKLLVAAGDNPERIRSEAAWAHLCGVAPIPASSGKTSRHRLNRGGNRQANSALYRIMLSRLRHHQATRDYVARRLSQGKTMGEIGRILKRYIAREVYKHLPRPS

SEQ ID NO: 188185 - protein, 520 aa, unidentified
MARKSSGRRRRSRGPEVLGKPRGVIHPRVAKVGPEHFGIVSVDCAKARSKWMLADFYGNVFVPPTVVAHNRVEFEAAVRQVKEAIHRHGIEDLLVAVERTGRYHHPVQRAFAAGAFEVRTVHPFATKQFRLPASPGVKTDDVDLAAIHLAAVNGFALIEASLDESWRELQLLTRHRRDLVRKTSILCCQIKEHLDAAMPGYAACFPKLWEHPAALHLVWQFGSAEAMRRAGLIKMSVQLRRDGIRYQERTVERVVEWAQNAAPRDVAAEGHRRIAEALNGDREQKEQQIRGLEREIAAKLVRTPYVLLMSIPGVNVVSAAEFAGEMGPIGNYANARCITGRAGLYPSRYQSDAVDLKGSLVRCANRSLRYAILQIADNLIVCNHHFSLLAARWQQAGKDPRHTRVRVGLRFCRIAFQMVAGGQVFHHPCCRDRSYILDKLMTFHKEHGTPAPQVLTDLQAALPQIPRAEYAAEAVPLRKELEAIQEHRRRGPQPIGEILPLVLASLSVVQSGESGDQGPT

SEQ ID NO: 188186 - protein, 347 aa, unidentified
MRFYNNSHPYYCGIDLHARLLYVCIIDSKGEVVAHKKIGASKGDLLLILEPYIGNVIVGVECMHCWYWVSDWCAELGIDFILGHALYMKAIHGGKTKNDKIDSFKIATLLRGGNFPIAYDYPSEMRAARDLLRRRMKIVRHGAMLKGHVVNTNSQYNLPATELNLKNISARQKLREQYQDPIVQRNIDLDMALLDCYAKELAQVEWFIEKQAKNHNPVYLELLKTVPGIGKILSLTILYEIGDISRFESVQKFASYSRLVKCKAESAGKTYGTNGNKIGNAHLKWAFSEAAVLYLRGNDKARNYLNRLQKRMSKAKALSALAHKLGRCVYFMLKNKTVFDEQRFLKG

SEQ ID NO: 188187 - protein, 345 aa, unidentified
MKIVGCDLHTRYQQIAMLESETGELSERRLEHAHGEARTFYAELQGPVRVGVEATGYTRWFERLLAELGHELWIGDAAQIRASMVRKQKTDARDAAHLLQLLMDDRFPRIWRPSLAERDLRQLVWHRQKLVWMRNAIGNQLHALAMGEGVCRKKQLWTKKGRAELEGLRLGDWASYRRQELLTLLDELDGSLEKLDRAVEEQSQQNQAAVLLRTHPGVGPVTSLAFVLTLGPVERFARSKQVVSYLGLNPREHSSGGKQRLGAISKQGNPMMRSLLVEAGHSAARLDAELRKDYQRLKLRRGSGVAKVAIARKLAVRMYWMLRSQASYAQLVRTQASPRGTLVES

SEQ ID NO: 188188 - protein, 395 aa, unidentified
MKIFVGLDVAKDLHWAYVIDSDAKPVLSHSVANDPDQIAALITEIEALGADEVTVALDLLGGTATLLCAMIAEAGLRLVHTPGLSVNRARQGMRGGENKSDPRDAATIAELARTRPDLRPVETEREIDVDIRLLVGRRSEIVRDQTRRLGRLRDLLSSLFPAFERQIDVKTKTGLTFLSHFAAPHELRTARAARIARKLMRSSPHLRGVLQLAEEAIMLAKAQSLDVPGATTRARLIKELAAEALAARQARDRIDSDIAELLARHPDAALVQSLPGMGVVMTAELIAHIGDIRRFRSADALAAAAGLTPVLRQSGKSYAIRRATSGDKALKRVFFQSAFAALSHPGSKAFYNRKRTEGKRHSQALIALAEDASTLFGQCLIRGSHSSKTSKMSLD

SEQ ID NO: 188189 - protein, 419 aa, unidentified
MSFKILKNNCCGLDVHKTWIYACIGITDSQKRTEYKEARFSSFTKGLQELCLWLAKYNCIDVCMESTGKYWIPVFNVLEKNNIFVTLSHPKYTKPQKGNKTDRKDAKWICDLYMCGMVKPSFIPPADIRQLRDLVRYRFKLTCMITGEKNRAHNCLTVSNLKLDDVFSDIFGKSSRSITEQILQHPGEVFDVAPFVDSRCKTPIEEIQAAVDGAISHEQAVKLRQCLKHIDELEMHKAEIEREIFRLSQKYESVLDLIRTIPGFDKNPLTAIQVLSEIGADMSVFPTAKNLVSWAGCCPRNDQSSRKIKSTRISRAGSYFKPVLVQIANALIKSKKHPEFTTRYRRIKARRGHKKAIIAICRMILTAIWHILTDLKPYTPEGFLESRPVNKEKVLTISQALNLIKQRGYIIKDDVGPVT

SEQ ID NO: 188190 - protein, 371 aa, unidentified
MRFYSSPHQFYAGIDLHARSMHVCVLDGAGTVVYDRNLACHFPTLLEALAPYRGDLVIGAECMFGWYWLADRCAENHIPFVLGHALYMKLIHGGKPKNDRLDAAKIARLLKGGNFPLAYVYPQGMRETRDLLRRRMYLVHKRAELITHLEILNAQNNLPPFGKKLSYAGNRAELHIPERFAHPSVHMSATLDLDLIDKLDELIAEVELYLTRTAKVDDVQMYHRLRTIPGVGPILALVLLYEIHDLARFEEVGQFLSYARLVRCEHESAGKKLGWGAKKIGNAHLRWAFAEIACLFLRASERAKQWKQKQEQKHGSGKALGILAARLARSVFHMIRKQEAFDAKRFWSGQVSGEQPVASRKKPAKSRRKAS

SEQ ID NO: 188191 - protein, 341 aa, unidentified
MSEDYDGRQFVGMDLHRRRSVLVRMSETGERLETVRIVNDRDRLAAVMARAGEAPEVVLEATYGWYWAADALAELGAGVHLAHPLGVKAFSYRRVKNDERDAADLADLLRMGRLPEAWIAPPETRELRELVRHRAKLVHLRSGLRSQVHAVLAGQGVAVPVSDLFGLGGMRLLERAPLSAAARQRIDSLLRLIEVFDVEIDAAAKTTAGQLKTHPGYQAVQTLPGVGPILGAIFVVEIGDVTRFPDPTRLASWAGLTPKHHESDTTVRRGRITKQGSRLVRWAAVEAVQHISPHTRLGAYRDRVAERRGRNIGKVAAARELIECVYYALRDGTVKRLADAA

SEQ ID NO: 188192 - protein, 373 aa, unidentified
MDQDTTYVAFDTSKETIAVSIADSGRRKEVRFFGTIASRPEAVRKLVEKLAKQHHRLAFCYEAGPTGYGLYRQIRAMGYDCQVVAPSMVPVRPGGHIKTDRRDATTLAALFRAGELTAIWVPDAAHEAMRDLSRGRQAAMEGLRRARQQLLSFLLRHGRVYPTRSHWTRAHRRWLAEQRFEHAAQQIVFEELIQAVEQAQSRRDRLEQQMVALLPSWSLRGVVAALQALRGVALLSAITLMAEIGDFRRFTNPRELMAWLGLVPREHSSGATTVRGAITKAGNRRARRVLVEGAWTYRLPARVGLELLRRNQALPQAIKDVAWKAQVRLCARYRRLLRAGKPTSVVTVAIARELAAFVWAIATTVMPPLEPTA

SEQ ID NO: 188193 - protein, 420 aa, unidentified
MTRKNHNKIISVVHPICCGIDVHKKMVSASIIITEPDGEQTFVVKEFSTFTDDLFRLKSWLSSHACPVVAMESTSVYWRPVHNVLEDAFKVILVNAKHVKNVPGRKTDISDSMWLASLLRIGVLKASFIPEKRIRQIRELVTLRKSYIRSLADYKRRVHKLFETANIKIGSVVSDLFGQTGRNLIDILSDIETELKMEHVEQCAQGSLKRKVAELFRAIQGFFEAHHRFQLKMMMRTIGHLENEIESITQRLDRLLAPNQALIDKLDQVHGIDKKTAQSIVGHVGDTLTAFRSEKALASWAGLCPGNNESAGKRKSGKSPVRKHPFKELMIEVAWAAVRTKGSYYKDKYHRLKSRRGAKRAAVAIAHRITKAIYHIIKHGRSFVDLGEKYLLSKSKEKSVKILKMKAKHLGFNLVPVEAN

SEQ ID NO: 188194 - protein, 348 aa, unidentified
MDQIIRIGMDTSKTVFQLHGVNAAEEVVLRRKLRRKEMVAFFERLPATVIAIEACGASHHWARLLNGFGHEVKLIAPQLAKPYVKRGKNDAADAEALCEAMSRPTMRFVPVKTAEQQAALMLIGVRERLIRNRTQLSNAIRGFASEFGLAAAKGVVHLDPLLDRLRDDESLPALARELFNSQAQEFAQLQTKIEVIDAKLAAWQKTEPQVQRLVKIPGVGPISAAMLILKTPSPRMFRSGRQFAAWMGLTPKDHSTAGRARLGAITRAGDEALRSVLVVGATAVIRHVRRGNSSSAFASWVAELLKRKAPKSVAVALANKMARIAWKLMVTGQAYAEKSTSAALASAA

SEQ ID NO: 188195 - protein, 349 aa, unidentified
MSQSHNSAVAVIGIDIGKNSFHVVGLDDRGAIVLRQKWSRGQIEARLANLSPCLIGMEACVGAHHLSRKLKALGHDARLMPAKYVRPYSKGQKNDFRDAEAIAEAVQRPTMKFVATKTADQLDLQALHRVRERLVSQRTGIINQIRAFLLERGIAVRQGLRFLRAELPRILAAPPDVLSPRMVRLIKDLAEDWRRLDERIDRLSNEIAALAQQDAGCERLMSVPGIGPIISSATVAAIGTGDAFSKGRDFAAWLGLVPKQISTGDRTILGKISKRGNRYLRVLFVQAAWVVLIKPMSWDRHGLKHWIEAAKKRLHRNVLAIALANKLARIAWGVLAGGHTFEASKLQIA

SEQ ID NO: 188196 - protein, 318 aa, unidentified
MEERMIGVDVSKEYLDADTLPSTQKRRFTNNEAGIAELVEWARPFQPERIVFESTGHYQKAAVGALLAASLPAVVVNARQVRDFAKALGILAKTDAIDAAVLARFGQVVPTIVRPLPAPEIQAFQELYDRRGQLVKMLASEKNHRHAASSAKVIRNIDAHIRYLEKQIQELEDRMDQFVENTEAFRTRDEILQSIPGIGPQVSRTLLAYLPELGLGTRQQISALVGLAPFNDDSGTQSHTRHIRGGRGKVRLGLYQAAVTAIRHCPPMKDFYSRLKERGKASKVALIAVARKILVLANALIRSMKPYDPANSVCSKNV

SEQ ID NO: 188197 - protein, 338 aa, unidentified
MKLYGGIDLHSNNCVINLMDENGIVIFKKRVANSLDAILLIFQAYQDAIVGLVVESTYNGYWLVDGLMEAGFKMHLANTAAIQQYSGLKHGDDDSDAHWLATMLRLDILPEGYIYPKEERMVRDLLRKRLQLVQQNTLNLLAIQGLYTRHLNVPLNSNKLKQLTQEKLALDFSDGNVRMAVASNLLMHDCLTGQINIIEKFLKKQLKLREEFVQLTSIDGIGLILGLTIMLETGDITRFNNVGNYASYCRCVNGARYSNGKKKGNSNTKNGNKYLAWAFVEAANFAIRYNETVKRYYQRKLTKSHPAVAKKTVAHKLARACFYVLRDQVAFDVNKAFG

SEQ ID NO: 188198 - protein, 372 aa, unidentified
MGHHTEAFVGIDTSKSSDAIAIADGGRGGEVRYLGDFPATEAAIRKLVAKLAAKYRDLIFCYEAGPTGYGLYRLLKSLGHECLVVAPSLVPKKAGDRVKTNRRDAVSLAKLLRAGELTAVWVPDERHEAMRDLSRARQAVKKDLQGKRQQISSLMLRLGRIYPGKTTWGPAHMKWLMAQKLEHREQRITFEELLDGIRQESERVERLEKAIREAVPEWSLAEVVAALQAMRGIDLIAAVGVLAEIGDLSRFQNPRELMGYLGLVPSESSTGDKVKRGGITKAGNGRARRILVEAAWSYRYPPRVSREKQRKVEAAPRRVREIAWKAQTRLCGRFRSLERKGKRRTVIATAVARELSAFIWAINCELMAHRQA

SEQ ID NO: 188199 - protein, 312 aa, unidentified
MSSLSVFVGIDVSSQRLDVAIGDEQLESFSNDDAGVVALSQRLSGVGCELIVLEATGGYEALLVATLAGAGLPVRVINPRQARDFAKAMGLLAKTDALDAQLLRQFAERIRPVLLPHKSEAARELAALVARRRELVQMLTAEKNRLKLATRAVGRDITAHIRFLEKRIGDSDDELKRRIEAHAEFRITDELLRSVPSVGRVSSSTLIALLPELGALPHRQIVALVGLAPLNDDSGKRVGQRRIWGGRAEVRSVLYMATISALRSNPVIKTTYQRLVAAGKPKKVAIVACMRKLLTILNAIVRDQTPWNPAIA

SEQ ID NO: 188200 - protein, 371 aa, unidentified
MPDVSSNAPPDVRLWVALDVHKLSIVAATLPPTGGQPEVCQLETTRVALRRFVERLGGPQGLAVCYEAGPGGFDLLRVLTELGVACDVIAPSLVPVRAGDRIKTDRRDAVKLVRLYRAGQLSYVAPPSPETEGLRDLMRCREDLRRARTNARHRVSKQLLRHGRIYREGRCQWTRMHRAWIARQRLDDPLAQAALCQMLIHLDGLDRQLEALDCDLEQIAGGERWAAAVETLTRFRGVSTRTALGLLAEIGDFARFSHPRELAAWLGIVPCEYSSGQERQRGHITKTGNDHARRLLIEAAWAYRHRPSRPDRGPQPDARAWQAQIRLHRRYRHLTEHGKRSTVATVAVARELAGFPWAAATDQPLAREAGA

SEQ ID NO: 188201 - protein, 405 aa, unidentified
MEQQFAGVDWASERHAVCVINEHGEVRERLVVPHTRLGLAELASRLARHAEPADLPVGIERPDGPVVDALVAAGFPVVIIPPHVVKAARPRFSAARAKSDPGDARLLADLVRADGGRFRRLAPVDPETGRLRRLVRTRDELRDTRTLVGNQLRALLEEAWPGAAEVFARVDSPIALAFLERYPSPRSAQGLGEARLAGFLVRHRYSGRRSADELLARLRAAPVVREPVIVDEATADAVRSLVACLRTLLSRLADLEGAVRAALAAHPDGELFRSFPRAGEINAAQLLAGIGADRERFPSPEALAAQAGAAPVTRASGKTSVVAFRWACDKRLRVALTTFADNSRRASPWAAAVYQSAIDRGADHPHAIRILAKAWCRVLWRCWQNRQPYDPERHGALIRMAQPAA
